United States Patent Application Publication US 2026/0191920 A1 - sequence listing, part 12

SEQ ID NO: 55626 - protein, 368 aa, Geobacter pelophilus
  REGION 1..368: note = tr|A0A1W7QTY6|A0A1W7QTY6_9DELT Queuine tRNA-ribosyltransferase OS=Geobacter pelophilus OX=60036; GN = tgt PE=3 SV=1
MIFKLLKKDPTSGARRGVVTTAHGQIQTPIFMPVATHAAMKAMTPAQVHDTGAQIILSNTYHLHLHPGEALVQKAGGLHQFMGWDGPILTDSGGFQVFSLPKKRITEEGVFFRHEDTGEEVFLDPAKAVAIQEALGADIIMNFDECIPYPCEKSYAERSTEKTIRWAKQCRDAHKRENQYLFGIVQGSVFEDLRKRCAKELVKMDFPGYAIGGVSVGEGLELLKQVVGYTAPHLPEDKPRYLMGVGLPEDILESVERGVDMFDCVIPTRYARSATLFTNRGRIRLTNKNYRRDFYPVEPNCSCYTCRNFTRAYLHHLFTANEVLSAILASIHNVHFYLNMMSEIRTSIEEGRFKQYKEKFLGSYLKGK

SEQ ID NO: 55627 - protein, 368 aa, Geobacter pickeringii
  REGION 1..368: note = tr|A0A0B5B8T1|A0A0B5B8T1_9DELT Queuine tRNA-ribosyltransferase OS=Geobacter pickeringii OX=345632; GN = tgt PE=3 SV=1
MKFTLKKTDRSTSARRGTLVTPHGTIETPIFMPVGTHAAMKAMTPAQVKETGAQIILSNTYHLHLRPGEELVAKAGGLHRFMAWDGPILTDSGGFQVFSLPNKRITEEGAYFKHEVTGEEIFLDPARAIAIQEALGADIIMAFDECIPYPCDRQYAAKSTRKTLRWAEQCRKAQTRKDQALFGIVQGSVFEDLRAMCAKELVQMDFPGYAIGGVSVGEGLDLLKKVVEYTAPFLPENKPRYLMGVGLPEDIFESVERGIDMFDCVIPTRYARSATLFTNRGKIRLTNRNYRRDFYPVDPNCGCYTCRNFTRAYLHHLFNANEVLSAILASIHNVHFYLNMMEGIRIAIEEGRFAEHKKEFLSGYLKGK

SEQ ID NO: 55628 - protein, 370 aa, Geobacter pickeringii
  REGION 1..370: note = tr|A0A0B5B7N7|A0A0B5B7N7_9DELT Queuine tRNA-ribosyltransferase OS=Geobacter pickeringii OX=345632; GN = tgt PE=3 SV=1
MPALDFTLITQDGNARLGSLTTPRGTIETPIFMPVGTQATVKAMTPEELTGIGAQIILANTYHLYIRPGHEVVRRLGGLHRFMHWDRPILTDSGGFQVFSLNDLRKITEEGVRFRSHLDGSYHFISPEDAIAIQEALGSDIAMCFDECTPYPATHDYARRSMEMTSRWARRCKEARRREDQALFGIVQGGMYRDLRERSAMELREIGFDGYAVGGLSVGEEKELMYEVMEYAAPMLPADRPRYVMGIGAPEDLIEAVHHGFDMFDCVMPTRNARNGMLFTSFGRVNIKGAAYAEDNGPLDPECDCYVCRNYSRAYLRHLYRSGEILSARLNTYHNLHYYLSLMAQARAAIAEGRFAAFRREFYAKRTLSV

SEQ ID NO: 55629 - protein, 369 aa, unidentified
  source 1..369: note = Geobacter soli
  REGION 1..369: note = tr|A0A0C1QSY7|A0A0C1QSY7_9DELT Queuine tRNA-ribosyltransferase OS=Geobacter soli OX=1510391; GN = tgt PE=3 SV=1
MAAIQFRLLKQDGAARLGSLTTPHGLIETPIFMPVGTQATVKAMTPEELDAIGARIILANTYHLYIRPGHELIRRLGGLHRFMHWDRPILTDSGGFQVFSLNELRKITEEGVRFQSHLDGSYHTIRPEDAVAIQEALGSDIAMCFDECTPYPATHDYARRSMELTTRWARRCKDAHSRGDQALFGIVQGGMYRDLRERSAAELVEIGFDGYAVGGLSVGEEKEHMYGVMEWTAPLLPADQPRYVMGIGTPEDLVEAVWRGFDMFDCVMPTRNARNGMLFTSFGRLNIKGAAYAEDQGPVDPACGCYVCRNYSRAYLRHLYRSGEILASRLNTYHNLAYYLDLMAQIRAAIAEGKFDSFRREFHGRRETQ

SEQ ID NO: 55630 - protein, 368 aa, unidentified
  source 1..368: note = Geobacter soli
  REGION 1..368: note = tr|A0A0C1U4W4|A0A0C1U4W4_9DELT Queuine tRNA-ribosyltransferase OS=Geobacter soli OX=1510391; GN = tgt PE=3 SV=1
MKFKLIKKDTRTSARRGSLTTPHGTIETPIFMPVGTHAAMKAMTPSQVKETGAQIILSNTYHLHLRPGEDLVAKAGGLHRFMGWDGPILTDSGGFQVFSLPNKKITDEGVFFRHEVSGEEVFLDPARATAIQEALGADIIMAFDECIPYPCDKKYAAASTRKTIRWAEACKKAHTRKDQALFGIVQGSVFEDLRAQCARELVQLDFPGYAVGGVSVGEGLELLKKVVEYTAPFLPENKPRYLMGVGLPEDILESVERGMDMFDCVIPTRYARSATLFTNRGKIRLTHRNYRRDFYPVDPNCTCYTCRNFTRAYLHHLFNANEILSATLASIHNVHFYLNMMAEIRAAIEEGRFADYKRNFLASYLKGK

SEQ ID NO: 55631 - protein, 371 aa, Geobacter sp.
  REGION 1..371: note = tr|A0A212PHV4|A0A212PHV4_9DELT Queuine tRNA-ribosyltransferase OS=Geobacter sp. DSM 9736; OX = 1277350 GN=tgt PE=3 SV=1
MKFKLLQKDKKTAARRGTLTTPHGTIETPIFMPVATHAAMKAMTPVQVVATGAQIILSNTYHLHLRPGESLVKKAEGLHKFMGWDKPILTDSGGFQVFSLPNKRITEEGVFFRHEVTGEEVFLDPASAMKIQEDLGADIIMAFDECIPYPCDRTYAERSTRKTIRWAKQCKESHQSQSQALFGIIQGSVFEDLRVLCARELVRLDLPGYAIGGVSVGEGLELLKQVVSVTAPHLPEDKPRYLMGVGLPEDILESVERGMDMFDCVIPTRYARSATLFTNRGRIRLTNKKYRRDFYPIDPNCGCYTCQTFTRAYLHHLFVANEVLSAILASIHNVTFYLTMMQGIRNAIEEQRFSEYKRSFLESYLAGEHKA

SEQ ID NO: 55632 - protein, 368 aa, Geobacter sp.
  REGION 1..368: note = tr|A0A556SXC7|A0A556SXC7_9DELT Queuine tRNA-ribosyltransferase OS=Geobacter sp. OX=46610 GN=tgt; PE = 3 SV=1
MIYKLLKKDKRSAARRGVVKTAHGEIQTPIFMPVATHAAMKAMTPAQVKETGAQIILSNTYHLHLHPGEALVEKAGGLHKFMCWDGPILTDSGGFQVFSLPKKRITEEGVFFRHEDTGEEIFLDPAKAVAIQEALGADIIMNFDECIPYPCDKAYAERSTEKTIRWAKQCREAHSRENQYLFGIVQGSVFEDLRKRCAKALVKMDFPGYAIGGVSVGEGLELLKQVVGYTAPHLPEDKPRYLMGVGLPEDILESVERGVDMFDCVIPTRYARSATLFTNRGRIRLTNKNYRRDFYPIEPNCTCYTCRNFTRAYLHHLFTSNEVLSAILASIHNVHFYLNMMSEIRTAIEEDRFVEYKEQFLAAYMKGK

SEQ ID NO: 55633 - protein, 368 aa, Geobacter sulfurreducens
  REGION 1..368: note = tr|Q74DZ0|Q74DZ0_GEOSL Queuine tRNA-ribosyltransferase OS=Geobacter sulfurreducens (strain ATCC 51573 / DSM 12127 / PCA) OX=243231 GN=tgt-1; PE = 3 SV=1
MKFKLIKKDTKTSARRGSLTTPHGTIETPIFMPVGTHAAMKAMTPSQVKETGAQIILSNTYHLHLRPGEDLIAKAGGLHRFMGWDGPILTDSGGFQVFSLPNKKITDEGVFFRHEVSGEEVFLDPARATAIQEALGADIIMAFDECIPYPCDKKYAAASTRKTIRWAEACKKAHTRKDQALFGIVQGSVFEDLRAQCARELVQLDFPGYAVGGVSVGEGLELLKKVVEYTAPFLPENKPRYLMGVGLPEDILESVERGMDMFDCVIPTRYARSATLFTNRGKIRLTHRNYRRDFYPVDPNCTCYTCRNFTRAYLHHLFNANEILSATLASIHNVHFYLNMMAEIRAAIEEERFAEYKRNFLESYLKGK

SEQ ID NO: 55634 - protein, 368 aa, Geobacter sulfurreducens; identical to SEQ ID NO: 55633
  REGION 1..368: note = tr|A0A0D5NB65|A0A0D5NB65_GEOSN Queuine tRNA-ribosyltransferase OS=Geobacter sulfurreducens; OX = 35554 GN=tgt PE=3 SV=1

SEQ ID NO: 55635 - protein, 377 aa, Geobacter thiogenes
  REGION 1..377: note = tr|A0A1T4RQ77|A0A1T4RQ77_9DELT Queuine tRNA-ribosyltransferase OS=Geobacter thiogenes OX=115783; GN = tgt PE=3 SV=1
MPDHFRLLHQDTGCRARTGRITTPHGEIQTPIFMPVGTSASVKAMRPENLKDAGAQIILSNTYHLYLRPGHRLVEQMGGLHKFMAWDRPILTDSGGFQVYSLTELRKISEEGVKFRSHIDGSMHLLTPELSIKIQESLGADIIMCFDECPPAEADREYVERSLAMTTRWAQRCKDAHSRSDQLLFGIVQGGRFAELRQRSLQELQEIGFDGYALGGLSVGETKPVMHEVMDACSDLLPPDHPRYIMGIGTPEDLVEAVWRGYDMFDCVMPTRNARNGMLFTSQGRLNIKRKQYEDDQGPIDPTCDCYVCRTYSRSYLRHLFRSGEILSSMLNTHHNIAWYLNLMARMREAITQDRFEAFRKEFYHQQQSETENHKEE

SEQ ID NO: 55636 - protein, 380 aa, Geobacter thiogenes
  REGION 1..380: note = tr|A0A1T4RPT7|A0A1T4RPT7_9DELT Queuine tRNA-ribosyltransferase OS=Geobacter thiogenes OX=115783; GN = tgt PE=3 SV=1
MNFTLLKKDKDSAARLGILQTSHGEIQTPIFMPVATHGAMKPLTPAQIHDTGAQIILSNTYHLHLQPGEGLVKKAGGLHKFMAWEKPILTDSGGFQVFSLPKKRITEDGVFFKHELTGEEIYLDPAKAINIQQELGSDIMMAFDECIPYPCDKVYAEQSTRKTIRWLKECQNAWTNRETQALFGIVQGSVYEDLRIMCAKEMRKLDLPGYAIGGVSVGEGLELLKKVVGWTAPHLPEDKPRYLMGVGLPEDILESVERGIDMFDCVIPTRYARSATLFTRRGKIRVSNKNYKRDFFPVDPSCSCYTCQNFSRAYLHHLFAANEVLSAVLSAIHNVTFYLQMMTEIRQAIADNRFMAYKQAFLADYLASEKQTQGSKKHSK

SEQ ID NO: 55637 - protein, 371 aa, Geobacter uraniireducens
  REGION 1..371: note = tr|A5GEQ6|A5GEQ6_GEOUR Queuine tRNA-ribosyltransferase OS=Geobacter uraniireducens (strain Rf4) OX=351605 GN=tgt PE=3 SV=1
MSAIDFKLIKTDSSSAARLGSLTTPHGKIDTPIFMPVGTHATVKAMTPEELTEVGAQIILANTYHLYMRPGHELVARMGGLHEFMHWQGPILTDSGGFQVFSLGELRKITEEGVKFQSHLDGSYHFISPETSMEIQAALGGDIIMCFDECPPYPADYAYIAKSMEMTSRWALRCKNVKKRADQALFGIVQGGMFSDLRERSALALQEIGFDGYALGGVSVGEEKELMHEVMGFSAPFLPVDKPRYVMGIGAPEDLIEGINAGFDMFDCVMPTRNARNGMVFTSFGRLNIKGARYAEDRLPIDPECGCYVCKNYSRAYLRHLFKSGEILASRLNTWHNLHYYLSLMAGARQAIAEDRFADFRRDFYAKRETM

SEQ ID NO: 55638 - protein, 368 aa, Geobacter uraniireducens
  REGION 1..368: note = tr|A5G6K1|A5G6K1_GEOUR Queuine tRNA-ribosyltransferase OS=Geobacter uraniireducens (strain Rf4) OX=351605 GN=tgt PE=3 SV=1
MKFKLLKKDTETAARRGRLETPHGVIETPIFMPVGTHAAMKAMTPQQVKETGAQIILSNTYHLHLRPGESLVEKAGGLHKFMAWDGPILTDSGGFQVFSLPNKRITEDGAYFKHEITGEEVFLDPAKAIAIQEALGADIIMAFDECIPYPCDKQYAAQSTRKTLRWAEACKKAQTRKDQALFGIVQGSVFEDLRAMCAKEMIDMDFPGYAIGGVSVGEGLELLKKVVAMTAPFLPEDKPRYLMGVGLPEDILESVERGMDMFDCVIPTRYARSATLFTNRGKIRLTNKNYRRDFYPVEPNCSCYTCRNFTRAYLHHLFVSNEVLSAILASIHNVHFYLNMMAEIRLAIEEERFAEYKRTFLEGYLKGK

SEQ ID NO: 55639 - protein, 371 aa, unidentified
  source 1..371: note = Geobacteraceae bacterium
  REGION 1..371: note = tr|A0A1G0MQS1|A0A1G0MQS1_9DELT Queuine tRNA-ribosyltransferase OS=Geobacteraceae bacterium GWC2_53_11 OX=1798316 GN=tgt PE=3 SV=1
MSETFSVLHQDSSCKARLGSLNTPHGEIETPIFMPVGTNATVKAMTPEDLTAVHAQIILANTYHLYLRPGHRLVEQLGGLHRFMNWDKPILTDSGGFQVFSLGELRKISEEGVKFQSHLDGSYHMLTPELAIHIQESLGADIIMCFDECPPATAEYSYVSRSLELTARWAARCKEAHTRVGQQLFGIIQGGMHYDLRARSVNDICTIGFDGYALGGLSVGEEKEQMYGVMECCSTLLPHDAPRYIMGIGSPEDLVEAVWHGYDMFDCVMPTRNARNGMLFTSQGRVNIKSKIYEDDAGPLDPACSCKVCKNYSRAYLRHLYRSGEILSSQLNTYHNLHFYLDLMRRVREAIRQNSFDDFRKQFKTAMLQKQ

SEQ ID NO: 55640 - protein, 377 aa, unidentified
  source 1..377: note = Geobacteraceae bacterium
  REGION 1..377: note = tr|A0A1G0M567|A0A1G0M567_9DELT Queuine tRNA-ribosyltransferase OS=Geobacteraceae bacterium GWC2_55_20 OX=1798317 GN=tgt PE=3 SV=1
MSGKFTIIHSDTSCRARLGSLNTPHGVIETPIFMPVGTNATVKAMTPEDLLAVKAQIILANTYHLYLRPGHRLVEKMGGLHRFMNWDRPILTDSGGFQVFSLGELRKISEEGVRFQSHIDGSRHMLTPELAIGIQEALGADIIMCFDECPPATAEYDYVSRSLELTSRWARRCKDAHSREGQQLFGIIQGGMHYDLRARSVDDICSIGFDGYALGGLSVGEEKEQMYGVMECCSPLLPKESPRYIMGIGAPEDLIEAVWHGYDMFDCVMPTRNARNGMLFTSQGRINIKSKIYEEDAGPLDPECNCLVCRNYSRAYLRHLYRAGEILASQLNTYHNLHYFLDLMQQARSAIRDNSFDNFRKQFLESMRINNRLKEGN

SEQ ID NO: 55641 - protein, 366 aa, Geomicrobium sp.
  REGION 1..366: note = tr|A0A061N8W5|A0A061N8W5_9BACL Queuine tRNA-ribosyltransferase OS=Geomicrobium sp. JCM 19055; OX = 1460649 GN=tgt PE=3 SV=1
MTAVYYEHIKTCKQSGARLGKVHTPHGSFDTPMFMPVGTLATVKMMSPDELKEMDAQIILSNTYHLWLRPGEDLIREAGGLHSFMNWDRPILTDSGGFQVFSLSKLRDIDEEGVRFRNHISGEKLFLSPEKAMQIQHALGSDIMMAFDECPPYPAEYKYMKDSVERTSRWAERCLREHEGNTTQGLFGIVQGGEYKDLRRQSAEDLVSMDFPGYAIGGLSVGEPKHVMNKVLEETMPHLPDNKPRYLMGVGSADALIDGAIRGVDMFDCVLPTRIGRNGTCMTSEGRKVIRNAEFARDFRPIDEKCDCYACKNYSRAYIRHLIKSKEAFGFRLTSYHNLYFLLNLMVNVREAIKEDRLLDFKEEFF

SEQ ID NO: 55642 - protein, 379 aa, Geomicrobium sp.
  REGION 1..379: note = tr|A0A061NRS2|A0A061NRS2_9BACL Queuine tRNA-ribosyltransferase OS=Geomicrobium sp. JCM 19037; OX = 1460634 GN=tgt PE=3 SV=1
MSAVYYEHIKTCKQSGARLGKVHTPHGSFDTPMFMPVGTLATVKMMSPEELKEMNAQIILSNTYHLWLRPGEDLIEEAGGLHSFMNWDRPILTDSGGFQVFSLSKLRDIQEEGVHFRNHISGEKLFLSPEKAMRIQHSLGSDIMMAFDECPPYPASYEYMKRSVERTSRWAERCLTTHEGNETQGLFGIVQGGEYPDLRAQSAKDLVSMDFPGYAIGGLSVGEPKDVMNRVLEETMPHLPDNKPRYLMGVGSADALIDGSIRGVDMFDCVLPTRIGRNGTCMTSTGRKVIRNAEYARDFRPIDENCSCYACKNYSRAYIRHLIKSKEAFGFRLTSYHNLHFLLNLMVNVREAIKEDRLLDFKEAFFEQYGFNRPDAKNF

SEQ ID NO: 55643 - protein, 368 aa, unidentified
  source 1..368: note = Geomonas terrae
  REGION 1..368: note = tr|A0A4S1CCL2|A0A4S1CCL2_9DELT Queuine tRNA-ribosyltransferase OS=Geomonas terrae OX=2562681; GN = tgt PE=3 SV=1
MIYKLLKKDKRSAARRGVVKTAHGEIQTPIFMPVATHAAMKAMTPAQVKETGAQIILSNTYHLHLHPGEALVEKAGGLHKFMCWDGPILTDSGGFQVFSLPKKRITEEGVFFRHEDTGEEIFLDPAKAVAIQEALGADIIMNFDECIPYPCDKAYAERSTEKTIRWAKQCREAHKRENQYLFGIVQGSVFEDLRKRCAKALVKMDFPGYAIGGVSVGEGLELLKQVVGYTAPHLPEDKPRYLMGVGLPEDILESVERGVDMFDCVIPTRYARSATLFTNRGRIRLTNKNYRRDFYPVEPNCTCYTCRNFTRAYLHHLFTSNEVLSAILASIHNVHFYLNMMSEIRTAIEEDRFVEYKEQFLAAYMKGK

SEQ ID NO: 55644 - protein, 384 aa, unidentified
  source 1..384: note = Geomonas terrae
  REGION 1..384: note = tr|A0A4S1CGE1|A0A4S1CGE1_9DELT Queuine tRNA-ribosyltransferase OS=Geomonas terrae OX=2562681; GN = tgt PE=3 SV=1
MAAISFELIKKDPGCAARLGSLTTTHGRIETPIFMPVGTQATVKAMTPEELVEVGSQIILANTYHLYLRPGHELIERLGGLHRFMHWDRPMLTDSGGFQVFSLGELRKISEEGVKFRSHIDGSRHFISPEVSIAIQEALGADIAMCFDECPPYPAERHYVEKSLELTTRWARRCKDAHKREDQALFGIVQGGMHGDLRRESAKQITDIGFDGYALGGLSVGEEKEVMHGMMEECSGILPENAPRYIMGIGAPEDLVEAVYNGFDMFDCVMPTRNARNGALFTSFGRINIKGAQFAEDQGPIDPLCDCYVCRNYSRAYLRHLYRSQEILASRLNSWHNLHFFLNLMKEVREAIGKGEFVQFRKDFYAARSAAFAVKEQENNPGGN

SEQ ID NO: 55645 - protein, 376 aa, unidentified
  source 1..376: note = Georhizobium profundi
  REGION 1..376: note = tr|A0A3Q8XP67|A0A3Q8XP67_9RHIZ Queuine tRNA-ribosyltransferase OS=Georhizobium profundi; OX = 2341112 GN=tgt PE=3 SV=1
MSDVFRFDIAATDGAARTGAISMPRGTVRTPAFMPVGTAGTVKAMYLDQVRDLGADIILGNTYHLMLRPGAERVARLGGLHDLIRWPHPILTDSGGFQVMSLSGLRKLDEQGVTFQSHVDGSRHHMSPERSIEIQGLLGSDIQMQLDECVALPAKRSEVERAMDMSVRWAERCKTAFGDQPGKAMFGIVQGGDQPDLRVKSAEALKALDLKGYAVGGLAVGEPQDVMLAMLETTCPVLPSEKPRYLMGVGTPDDIIKSVARGIDMFDCVMPTRAGRHGLAFTRRGRINLRNARHAEDTRPLDEESACPASRDYSRAYLHHLVRANEALGGMLLTWNNLAYYQDLMRGIRQAIAEGRFADFMAETQDEWARGDIAPR

SEQ ID NO: 55646 - protein, 372 aa, unidentified
  source 1..372: note = Geosporobacter ferrireducens
  REGION 1..372: note = tr|A0A1D8GPC9|A0A1D8GPC9_9CLOT Queuine tRNA-ribosyltransferase OS=Geosporobacter ferrireducens; OX = 1424294 GN=tgt PE=3 SV=1
MTVTYENIKVCKQSGARLGRVHTPHGTIDTPVFMPVGTQATVKAMTTEELKEIEAQIILSNTYHLYLRPGHKLIEKAGGLHKFMNWDRAILTDSGGFQVFSLGDLRKITEEGVEFRSHLDGSKHFISPEKAIEIQNALGSDIIMAFDECAPYPAEHTYVKNSLERTTRWAKRCKEAHQKPDQQALFGIIQGGMYKDLREQSANEIIELDFPGYAVGGLSVGEPKHLMYEVLEYTTPWMPANKPRYLMGVGTPDCLIEGVIRGIDMFDCVLPTRIARNGTAMTSVGKVVIKNAQYTEDFLPLDPNCECYTCKNYSRAYLRHLYKAQEILSARLVTYHNLHFLIDLMKQIRKAIMEDRLLDFRKEFFQKYGYEV

SEQ ID NO: 55647 - protein, 372 aa, Geosporobacter subterraneus
  REGION 1..372: note = tr|A0A1M6BRQ7|A0A1M6BRQ7_9CLOT Queuine tRNA-ribosyltransferase OS=Geosporobacter subterraneus DSM 17957 OX=1121919 GN=tgt PE=3 SV=1
MAVTYESIKVCKQSGARLGRVHTPHGVIDTPVFMPVGTQATVKAMTPEELKEIEAKIILSNTYHLYLRPGHKLIEKAGGLHKFMNWDRAILTDSGGFQVFSLGDLRKITEEGVEFRSHLDGSKHFISPEKAIEIQNSLGSDIMMVFDECVPYPAEHSYVKNSLERTTRWAKRCKDAHRKPDQQALFGIIQGGMYKDLREQSAKEIIELDFPGYAVGGLSVGEPKSLMYEVLDYTTPWMPADKPRYLMGVGTPDCLIEGVIRGIDMFDCVLPTRIARNGTAMTSVGKVVIKNAQYVEDFLPLDPNCQCYTCKNYSRAYLRHLYKAQEILSARLVTYHNLYFLIDVMKQVREAIKKDRLLDFRKEFFQKYGYEQ

SEQ ID NO: 55648 - protein, 353 aa, Geothermobacter ehrlichii
  REGION 1..353: note = tr|A0A5D3WNB6|A0A5D3WNB6_9DELT Queuine tRNA-ribosyltransferase OS=Geothermobacter ehrlichii; OX = 213224 GN=tgt PE=3 SV=1
MQTRRGVVETPVFMPVGTQATVKGMLPETLRQIGAQIILGNTYHLYLRPGHELIKRLGGLHRFMNWDGPILTDSGGFQVFSLGELRRIDEEGAVFQSHLDGSRHQLTPEKSIAIQEALGADIIMAFDECIPYPADRAYVAASTARSGRWARRCRHARREGDGAALFGIVQGGMEPDLRRRSAEELMAIGFEGYALGGLSVGEETSLMYDVMEYSLPLLPEEAPRYVMGVGTPENLIEGIARGADMFDCVMPTRNARNGVLFTSRGKISIKQARYREDERPLDENCSCYVCRHYSRAYLRHLFQANEILSSVLNTHHNLHYYLHLMASARDAIEAGRFGEFRREFHARRQNVES

SEQ ID NO: 55649 - protein, 375 aa, Geothermobacter ehrlichii
  REGION 1..375: note = tr|A0A5D3WR01|A0A5D3WR01_9DELT Queuine tRNA-ribosyltransferase OS=Geothermobacter ehrlichii; OX = 213224 GN=tgt PE=3 SV=1
MFRFELLAQDSTTCARRGRIHTPHGTIETPIFMPVGTHGALKAMTPDQVAAAGAQIILANTYHLHLRPGEGLVAKAGGLHRFMNWQGPILTDSGGFQVFSLPNKEIGEDGVTFRNEVTGQSTFLGPREAIAIENALGADIIMAFDECIPYPASHDYAAKSIRKTIRWAEACRKAHARSDQALFGIVQGSVYEDLRRQCAQALTEMDFPGYAIGGVSVGEGLELLKQVVEFTEPWLPQDKPRYLMGVGLPEDILESIERGMDMFDCVIPTRYARSATLFTRRGRMRLTQRKYRRDFYPVDTRCECYCCRNFSRAYLHHLFNANEVLSATLAAIHNVHFYLDMVAQARKAIEEGRYRAFKTAFLEEYGFYEKSKKGG

SEQ ID NO: 55650 - protein, 371 aa, Geothermobacter sp.
  REGION 1..371: note = tr|A0A1X0Y1K5|A0A1X0Y1K5_9DELT Queuine tRNA-ribosyltransferase OS=Geothermobacter sp. EPR-M; OX = 1969733 GN=tgt PE=3 SV=1
MFPFELLANDTGSRARRGRLTTPHGVIETPIFMPVGTHGALKAMTPDQVDAAGAQIILANTYHLHLKPGEGLVEKAGGLHRFMNWDKPILTDSGGFQVFSLPKKQIGEDGVTFRNEVTGEQTFLGPKEAIAIENALGADIIMAFDECIPYPSSHDYAAQSIKKTLRWAESCRKAHRREDQALFGIVQGSVYQDLRRECAEQLAAMDFPGYAVGGVSVGEGLELLKQVVEFTEPFLPEDKPRYLMGVGLPEDILESIERGMDMFDCVIPTRYARSATLFTRRGKLRLTNRRFRRDFYPVDTSCDCYCCRNFTRAYLHHLFNANEVLSATLSAIHNVHFYLTMVAEARRAIERNDFVAFKKAFLEEYGFYRQG

SEQ ID NO: 55651 - protein, 371 aa, Geothermobacter sp.
  REGION 1..371: note = tr|A0A2K2HCF0|A0A2K2HCF0_9DELT Queuine tRNA-ribosyltransferase OS=Geothermobacter sp. HR-1; OX = 654845 GN=tgt PE=3 SV=1
MFPFELLANDTDSRARRGRLTTPHGVIETPIFMPVGTHGALKAMTPDQVDAAGAQIILANTYHLHLKPGEGLVEKAGGLHRFMNWDKPILTDSGGFQVFSLPKKQIGEDGVTFRNEVTGEQTFLGPKEAIAIENALGADIIMAFDECIPYPSSHDYAAQSIKKTLRWAEACRKAHRREDQALFGIVQGSVYRDLRRECAEQLAAMDFPGYAVGGVSVGEGLELLKQVVEFTEPFLPENKPRYLMGVGLPEDILESIERGMDMFDCVIPTRYARSATLFTRRGKLRLTNRRFRRDFYPVDTSCDCYCCRNFTRAYLHHLFNANEVLSATLSAIHNVHFYLTMVAEARRAIERNDFVAFKKAFLEEYGFYRQG

SEQ ID NO: 55652 - protein, 375 aa, Geotoga petraea
  REGION 1..375: note = tr|A0A1G6M5T2|A0A1G6M5T2_9BACT Queuine tRNA-ribosyltransferase OS=Geotoga petraea OX=28234 GN=tgt; PE = 3 SV=1
MSSSPIKYELIHKDKHSGARRGRIHTPRGIIETPVFMPVGTNATVKTLTNKMIRELGSEIILGNAFHLFLRPGLEIMKEFGGIHNFMNWDRPLLTDSGGFQVFSLKDRKITEDGVKFRSPLDGSKIMMTPEKSMEIQQIIGSDIAMAFDECVDANSEYEYFKESVERTYRWAKRSYDAHNKKEQALFGIFQGGLFDDLREKSLEQITSIPFDGYAIGGLAVGEKYQDSEKILKKFGNKMPENKPRYIMGIGSPTMMILSVENGMDMFDCVLPTRMGRHGTALTWKGKLNIKAAKNKFSKDPIEKDCKCYTCRNHTRGYLNHLFKRNENTGKTLLSIHNLHFNITFVKKMREAIENDAFLDFKKEFFENSDYPLEN

SEQ ID NO: 55653 - protein, 373 aa, Geovibrio thiophilus
  REGION 1..373: note = tr|A0A410K1L0|A0A410K1L0_9BACT Queuine tRNA-ribosyltransferase OS=Geovibrio thiophilus OX=139438; GN = tgt PE=3 SV=1
MFEFTLEKTSEKSKARAGRIVTPHGEIETPIFMPVGTVGSVKGVAPRELDEIGAQIILGNTYHLHLRPGEDTVAHFGGLAKFNSWNKPTLTDSGGFQVFSLAKLNKIGEEGVEFRSHLDGSKLFLSPEKSIEIQQKIGADIMMAFDECVPYPSEKIYVEKSLELTTRWAERCLKAKTRDDQALFGIIQGGVFPDLRRRSAEQICALPFEGFAIGGLSVGEDIPTMYEIADFITDHMPADKPRYLMGVGTPEDLLNGIERGIDMFDCVMPTRNARNALLFTNSGKLHIKAARYRLSDEPVDAECGCYTCRNFSRGYLRHLYKTGELLALKLNSIHNLHFYLSLVKRARNAINNGFFEDFKKEILDKITFGGDNV

SEQ ID NO: 55654 - protein, 374 aa, Gibbsiella quercinecans
  REGION 1..374: note = tr|A0A250AYN7|A0A250AYN7_9ENTR Queuine tRNA-ribosyltransferase OS=Gibbsiella quercinecans; OX = 929813 GN=tgt PE=3 SV=1
MKYELQKTDGRARRGRMVFERGVVETPAFMPVGTYGTVKGMTPEEVKETGAQILLGNTFHLWLRPGQEIMKLHGDLHDFMQWHGPILTDSGGFQVFSLGAMRKIKEEGVYFRNPINGDKIFLSPEKSMEIQYDLGSDIVMIFDECTPYPADWDYAKRSMEMSLRWAQRSRQRFDELNNKNALFGIIQGGVYEDLRDVSVKGLVDIGFDGYAVGGLAVGEPKEDMHRILEHVCPQIPQDKPRYLMGVGKPEDLVEGVRRGIDMFDCVMPTRNARNGHLFVTEGVVKIRNAKHKDDTSPLDPECDCYTCRHYSRAYLHHLDRCNEILGARLNTIHNLRYYQRLMAGLRRAIEEGKLELFVADFYGRIGKPVPPLKA

SEQ ID NO: 55655 - protein, 390 aa, Giesbergeria anulus
  REGION 1..390: note = tr|A0A1H9LND5|A0A1H9LND5_9BURK Queuine tRNA-ribosyltransferase OS=Giesbergeria anulus OX=180197; GN = tgt PE=3 SV=1
MLQFELLTTDPASHARRGQLTLNHGVVQTPIFMPVGTYGTVKGVMPRSLHDMGAQIILGNTFHLWMRPGLDIMKTFGGLHAFEKWDKPILTDSGGFQVWSLGAMRKITEEGVTFASPVNGDKLFMSPEVSMQIQTVLNSDIVMQLDECTPYETKGHLTTEREARTSMEMSLRWAVRSKNEMERLQNPNALFGIVQGGMYLNLREESLQQLVEMDFPGYAVGGVSVGEPKEEMLGIMAHTPHRLPAHKPRYLMGVGTPEDLVEGVACGVDMFDCVMPTRNARNGTLFTRYGDLKIRNARHKTDHQPLDTSCTCYACAGSSGVAWEQGGREGFSRAYLHHLDRCGEMLGPMLTTVHNLHYYLNLMREVREALDVGQFAAFRARFKAERARGV

SEQ ID NO: 55656 - protein, 378 aa, unidentified
  source 1..378: note = Gilliamella apicola
  REGION 1..378: note = tr|A0A066T8D6|A0A066T8D6_9GAMM Queuine tRNA-ribosyltransferase OS=Gilliamella apicola OX=1196095; GN = tgt PE=3 SV=1
MKFELDNTDGLARRGRMKFDRRGVEYTVETPAFMPVGTYGTVKGMTPEEVTATGAQILLGNTFHLWLRPGQEIMRKHGDLHDFMQWHGPILTDSGGFQVFSLGDIRKIKEEGVYFRNPINGDSIFLSPEVSMEIQYDLGSDIVMIFDECAPFPADWDYVKKSMEMSLRWAKRSRKRFDELGNKNALFGIVQGGIHQELRDISIKGLTEIGFDGYAVGGLAVGEPKADMHRILEGTCPQLPADKPRYLMGVGKPEDLVEGVRRGIDMFDCVMPTRNARNGHLFVTNGVIKIRNAKYKDDTTPLDPHCDCYTCKNYTKSYLHHLDKCGEILGARLNTIHNLRYYQRLMAEIREAVANKRYEDFVIEFYQRIGKTPAPLSK

SEQ ID NO: 55657 - protein, 238 aa, unidentified
  source 1..238: note = Gilliamella apicola
  REGION 1..238: note = tr|A0A080KBL6|A0A080KBL6_9GAMM Queuine tRNA-ribosyltransferase (Fragment) OS=Gilliamella apicola SCGC AB-598-B02 OX=1445513 GN=GASC598B02_004190 PE=3 SV=1
MKFELDNTDGLARRGRMKFDRRGVEYTVETPAFMPVGTYGTVKGMPPEEVAATGAQILLGNTFHLWLRPGQEIMRKHGDLHDFMQWHGPILTDSGGFQVFSLGDIRKIKEEGVYFRNPINGDKIFLSPEISMEIQYDLGSDIVMIFDECAPFPADWDYVKKSMEMSLRWAKRSRKRFDELGNKNALFGIVQGGIHHELRDISIKGLTEIGFDGYAVGGLAVGEPKEDMHRILEGTCPQ

SEQ ID NO: 55658 - protein, 384 aa, unidentified
  source 1..384: note = Gilliamella apis
  REGION 1..384: note = tr|A0A242P6I2|A0A242P6I2_9GAMM Queuine tRNA-ribosyltransferase OS=Gilliamella apis OX=1970738; GN = tgt PE=3 SV=1
MKFELDNTDGLARRGRMKFDRRGVEYTVETPAFMPVGTYGTVKGMTPEEVKATGAQILLGNTFHLWLRPGQEIIRKHGDLHDFMQWSGPILTDSGGFQVFSLGDIRKIKEEGVYFRNPINGDSIFLSPEISMEIQYDLGSDIVMIFDECAPFPAEWDYVKKSMEMSLRWAKRSRQRFDELNNKNALFGIVQGGIHQELRDISIKGLTEIGFDGYAVGGLAVGEPKEDMHRILEGTCPQLPADKPRYLMGVGKPEDLVEGVRRGIDMFDCVMPTRNARNGHLFVTNGVIKIRNAKYKDDTTPLDPHCDCYTCKNYTKSYLHHLDKCGEILGARLNTIHNLRYYQRLMAEIREAVANRRYEAFVTEFYQRIGKTPAPLGNKAEQSC

SEQ ID NO: 55659 - protein, 383 aa, unidentified
  source 1..383: note = Gilliamella apis
  REGION 1..383: note = tr|A0A2V4DKE2|A0A2V4DKE2_9GAMM Queuine tRNA-ribosyltransferase OS=Gilliamella apis OX=1970738; GN = tgt PE=3 SV=1
MKFELDNTDGLARRGRMKFDRRGVEYTVETPAFMPVGTYGTVKGMTPEEVKATGAQILLGNTFHLWLRPGQEIMRKHGDLHDFMQWSGPILTDSGGFQVFSLGDIRKIKEEGVYFRNPINGDSIFLSPEISMEIQYDLGSDIVMIFDECAPFPAEWDYVKKSMEMSLRWAKRSRQRFDELNNKNALFGIVQGGIHQELRDISIKGLTEIGFDGYAVGGLAVGEPKEDMHRILEGTCPQLPADKPRYLMGVGKPEDLVEGVRRGIDMFDCVMPTRNARNGHLFVTNGVIKIRNAKYKDDTTPLDPHCDCYTCKNYTKSYLHHLDKCGEILGARLNTIHNLRYYQRLMAEIREAVANKRYEAFVTEFYQRIGKTPAPLGNQTKQS

SEQ ID NO: 55660 - protein, 402 aa, unidentified
  source 1..402: note = Gilliamella bombicola
  REGION 1..402: note = tr|A0A1C4D8L6|A0A1C4D8L6_9GAMM Queuine tRNA-ribosyltransferase OS=Gilliamella bombicola; OX = 1798182 GN=tgt PE=3 SV=1
MIQLRIITMIGAKLFIWSQEVNKKMKFELDNTDGLARRGRMKFDRRGIEYTVETPAFMPVGTYGTVKGMTPEEVATTGAQILLGNTFHLWLRPGQEIMRKHGDLHDFMQWHGPILTDSGGFQVFSLGDIRKIKEEGVYFRNPINGDSIFLSPEISMEIQYDLGSDIVMIFDECAPFPADWDYVKKSMEMSLRWAKRSRQRFDELGNKNALFGIVQGGIHQELRDISIKGLTEIGFDGYAVGGLAVGEPKADMHRILEGTCPQLPADKPRYLMGVGKPEDLVEGVRRGIDMFDCVMPTRNARNGHLFVTDGVIKIRNAKYKDDTTPLDPHCDCYTCKNYTKSYLHHLDKCGEILGARLNTIHNLRYYQRLMAEIREAVANKRYEDFVVEFYQRIGKTPAPLSK

SEQ ID NO: 55661 - protein, 378 aa, unidentified
  source 1..378: note = Gilliamella intestini
  REGION 1..378: note = tr|A0A1C4CLP8|A0A1C4CLP8_9GAMM Queuine tRNA-ribosyltransferase OS=Gilliamella intestini; OX = 1798183 GN=tgt PE=3 SV=1
MKFELDNTDGLARRGRMKFDRRGVEYTVETPAFMPVGTYGTVKGMTPEEVAATGAQILLGNTFHLWLRPGQEIMRKHGDLHDFMQWHGPILTDSGGFQVFSLGDIRKIKEEGVYFRNPINGDSIFLSPEVSMEIQYDLGSDIVMIFDECAPFPAEWDYVKKSMEMSLRWARRSRNRFDELGNKNALFGIVQGGIHQQLRDISIKGLTEIGFDGYAVGGLAVGEPKADMHRILEGTCPQLPADKPRYLMGVGKPEDLVEGVRRGIDMFDCVMPTRNARNGHLFVTNGVIKIRNAKYKDDTTPLDPHCDCYTCKNYTKSYLHHLDKCGEILGARLNTIHNLRYYQRLMAEIREAVANKRYEDFVIEFYQRIGKTPAPLSK

SEQ ID NO: 55662 - protein, 383 aa, unidentified
  source 1..383: note = Gilliamella sp.
  REGION 1..383: note = tr|A0A242PDV5|A0A242PDV5_9GAMM Queuine tRNA-ribosyltransferase OS=Gilliamella sp. N-G2 OX=1970471; GN = tgt PE=3 SV=1
MKFELDNTDGLARRGRMKFDRRGVEYTVETPAFMPVGTYGTVKGMTPKEVKATGAQILLGNTFHLWLRPGQEIMRKHGDLHDFMQWSGPILTDSGGFQVFSLGDIRKIKEEGVYFRNPINGDSIFLSPEISMEIQYDLGSDIVMIFDECAPFPAEWDYVKKSMEMSLRWAKRSRQRFDELNNKNALFGIVQGGIHQELRDISIKGLTEIGFDGYAVGGLAVGEPKEDMHRILEGTCPQLPADKPRYLMGVGKPEDLVEGVRRGIDMFDCVMPTRNARNGHLFVTNGVIKIRNAKYKDDTTPLDPHCDCYTCKNYTKSYLHHLDKCGEILGARLNTIHNLRYYQRLMAEIREAVANKRYEAFVTEFYQRIGKTPAPLGNQTKQS

SEQ ID NO: 55663 - protein, 381 aa, unidentified
  source 1..381: note = Gilliamella sp.
  REGION 1..381: note = tr|A0A242NYG3|A0A242NYG3_9GAMM Queuine tRNA-ribosyltransferase OS=Gilliamella sp. A7 OX=1970465; GN = tgt PE=3 SV=1
MKFELDNTDGLARRGRMKFDRRGVEYTVETPAFMPVGTYGTVKGMTPEEVKATGAQILLGNTFHLWLRPGQEIMRKHGDLHDFMQWPGPILTDSGGFQVFSLGDIRKIKEEGVYFRNPINGDSIFLSPEISMEIQYDLGSDIVMIFDECAPFPAEWDYVKKSMEMSLRWAKRSRQRFDELNNKNALFGIVQGGIHQELRDISIKGLTEIGFDGYAVGGLAVGEPKEDMHRILEGTCPQLPADKPRYLMGVGKPEDLVEGVRRGIDMFDCVMPTRNARNGHLFVTNGVIKIRNAKYKDDTTPLDPHCDCYTCKNYTKSYLHHLDKCGEILGARLNTIHNLRYYQRLMAEIREAVANKRYEAFVTEFYQRIGKTPAPLGNKSK

SEQ ID NO: 55664 - protein, 376 aa, Gillisia hiemivivida
  REGION 1..376: note = tr|A0A5C6ZNH4|A0A5C6ZNH4_9FLAO Queuine tRNA-ribosyltransferase OS=Gillisia hiemivivida OX=291190; GN = tgt PE=3 SV=1
MKFDLLAKDPQSNARAGEITTDHGVIETPIFMPVGTVGSVKGVHQRELKEDINPDIILGNTYHLYLRPQTEILKKAGGLHKFMNWDRSILTDSGGYQVYSLSERRKIKENGVKFKSHIDGSYHIFTPENVMEIQRVIGADIIMAFDECTPYPCDYKYAKRSMHMTHRWLDRCISHLEKTPFEYDYSQAFFPIVQGSTYKDLRKQSAEYIASVGAEGNAIGGLSVGEPAEEMYAMTEVVTEVLPEDKPRYLMGVGTPINILENIALGIDMFDCVMPTRNARNGMLFTAHGTINIKNKKWHDDFSPIDDMAITFVDTDYSKAYLRHLFTVNELLGKQIATIHNLGFYLWLTREARKHILAGDFASWKNRMVQQMNKRL

SEQ ID NO: 55665 - protein, 376 aa, Gillisia limnaea
  REGION 1..376: note = tr|H2C081|H2C081_9FLAO Queuine tRNA-ribosyltransferase OS=Gillisia limnaea DSM 15749; OX = 865937 GN=tgt PE=3 SV=1
MNFELLTTDPGSKARAGKITTDHGVIETPIFMPVGTVGSVKGVHQKELKEEINPDVILGNTYHLYLRPSTEILKKAGGLHKFINWDRNILTDSGGYQVYSLSDNRKIKEEGVKFKSHIDGSFHTFTPENVMEIQRVIGADIIMAFDECTPYPCDYRYAKRSMHMTHRWLDRCISHLDKTPYQYDYTQSFFPIVQGSTYKDLRKQSAEYIASVGAEGNAIGGLSVGEPADEMYAMTEVVTEILPEDKPRYLMGVGTPINILENIALGIDMFDCVMPTRNARNGMLFTAHGSINIKNKKWCDDFSQIDEMAITWVDTEYSKAYLRHLFTVNEMLGKQIATIHNLGFYLWLVREARKHILAGDFVTWKNMMVKQMDKRL

SEQ ID NO: 55666 - protein, 376 aa, Gillisia mitskevichiae
  REGION 1..376: note = tr|A0A495NY02|A0A495NY02_9FLAO Queuine tRNA-ribosyltransferase OS=Gillisia mitskevichiae; OX = 270921 GN=tgt PE=3 SV=1
MKFDLLAKDPQSNARAGKVTTDHGVIETPIFMPVGTVGSVKGVHQRELKEDINPDIILGNTYHLYLRPQTEILKKAGGLHKFMNWDRSILTDSGGYQVYSLSERRKIKESGVKFKSHIDGSYHTFTPENVMEIQRVIGADIIMAFDECTPYPCDYKYAKRSMHMTHRWLDRCITHLEKTPFEYDYSQAFFPIVQGSTYKDLRKQSAEYIASVGAEGNAIGGLSVGEPAEEMYAMTEVVTAVLPEDKPRYLMGVGTPINILENIALGIDMFDCVMPTRNARNGMLFTAHGTINIKNKKWHDDFSPIDDMAITFVDTEYSKAYLRHLFTVNELLGKQIATIHNLGFYLWLVREARKHILAGDFASWKNMMVQQMNKRL

SEQ ID NO: 55667 - protein, 376 aa, Gillisia sp.
  REGION 1..376: note = tr|A0A559PPC2|A0A559PPC2_9FLAO Queuine tRNA-ribosyltransferase OS=Gillisia sp. Hel_I_86; OX = 1249981 GN=tgt PE=3 SV=1
MKFNLLAKDPQSNARAGEITTDHGVIETPIFMPVGTVGSVKGVHQRELKEDINPDVILGNTYHLYLRPQTGILKKAGGLHKFMNWDRNILTDSGGYQVYSLSERRKIKENGVKFKSHIDGSYHTFTPENVMEIQRVIGADIIMAFDECTPYPCDYKYAKRSMHMTHRWLDRCISHLEKTPFEYDYSQAFFPIVQGSTYKDLRKQSAEYIASVGAEGNAIGGLSVGEPAEEMYAMTEVVTAVLPEDKPRYLMGVGTPINILENIALGIDMFDCVMPTRNARNGMLFTAHGTINIKNNKWHDDFSPIDDMAITFVDTEYSKAYLRHLFTVNELLGKQIATIHNLGFYLWLVREARKHILAGDFASWKNKMVQQMNKRL

SEQ ID NO: 55668 - protein, 376 aa, Gillisia sp.
  REGION 1..376: note = tr|A0A1H1KUK1|A0A1H1KUK1_9FLAO Queuine tRNA-ribosyltransferase OS=Gillisia sp. Hel1_33_143; OX = 1336796 GN=tgt PE=3 SV=1
MNFELLTTDVGSKARAGKITTDHGVIETPIFMPVGTVGTVKGVHQRELKEEINPDIILGNTYHLYLRPQVEILKKAGGLHKFMNWDRNILTDSGGFQVYSLSDRRKIKEEGVKFKSHIDGSYHTFTPENVMEIQRAIGADIIMAFDECTPYPCDYRYAKRSMHMTHRWLDRCISHLEKTPYLYDYSQAFFPIVQGSTYKDLRKQSAEYIASVGAEGNAIGGLSVGEPAEEMYAMTEVVTEILPEDKPRYLMGVGTPINILENIALGIDMFDCVMPTRNARNGMLFTAHGTINIKNKKWEDDFSAIDDMNITWVDTEYTKAYLRHLFSVNELLGKQIATIHNLGFYLWLTREARKHILAGDFTTWKNMMVKQMDKRL

SEQ ID NO: 55669 - protein, 376 aa, Gilvibacter sp.
  REGION 1..376: note = tr|A0A1Y0MR43|A0A1Y0MR43_9FLAO Queuine tRNA-ribosyltransferase OS=Gilvibacter sp. SZ-19 OX=754429; GN = tgt PE=3 SV=1
MQFSLAANDPLSKARAGTITTDHGTIETPIFMPVGTAGTVKGVHQRELKEDIDPDIILGNTYHLYLRPKTDILQKAGGLHKFMNWDRNILTDSGGYQVYSLSGNRKIKEEGVKFQSHIDGSYHMFTPERVMQIQRVIGADIIMAFDECTPYPCDYNYAKRSMLMTHRWLDRCIAELDKLPYTYDYSQAFFPIVQGSTYKDLRKQSAEYIASVDAVGNAIGGLSVGEPAEEMYAMTEVVTEVLPWDKPRYLMGVGTPINILENIALGVDMFDCVMPTRNARNGMLFTSEGTINIKNKKWEDDFSVIDPMGHTYVDTQYTKAYLKHLFSVNELLGKQIATIHNLGFYLWLVREARRQIIAGTFKSWKDKMVRQMDKRL

SEQ ID NO: 55670 - protein, 372 aa, unidentified
  source 1..372: note = Gimesia maris
  REGION 1..372: note = tr|A0A3D3RFJ9|A0A3D3RFJ9_9PLAN Queuine tRNA-ribosyltransferase OS=Gimesia maris OX=122 GN=tgt; PE = 3 SV=1
MSHFHFELLHTDTKTSARAGRWHTPHGIVDTPAFMPVGTLASVKGLLPDQLKQVGTQQVLANTYHLALRPGAEIVAEMGGLHKFMNWDGPILTDSGGFQVFSLAQLTKMDDQQVAFRSHIDGSLFELSPEKAVKIQEQLGADCIMCLDECPPHDVPMEKMQDAVDRTTKWAARCRDAQKRDDQALFGIVQGGTDQKMRERSAEGLLPLEFPGYAVGGLSVGEKPEDMYSTLDFTTPMLPVEKPRYLMGVGRPSDLIEAIIRGVDLFDCVMPTRNGRNGMAFTSQGRVNLRNQKHARDPSPLDPEIDSPGSRDYSRAYLRHLFMSREMLGPILISLHNIAFYQKLLRDLRQAILNDQVEEFRAVHLARWNASF

SEQ ID NO: 55671 - protein, 372 aa, unidentified
  source 1..372: note = Gimesia maris
  REGION 1..372: note = tr|A6CC73|A6CC73_9PLAN Queuine tRNA-ribosyltransferase OS=Gimesia maris DSM 8797; OX = 344747 GN=tgt PE=3 SV=1
MSHFHFELLHTDTKTSARAGRWHTPHGIVDTPAFMPVGTLASVKGLLPDQLKQVGTQQVLANTYHLALRPGAEIVAEMGGLHKFMNWDGPILTDSGGFQVFSLAQLTKMDDQQVAFRSHIDGSLFELSPEKAVKIQEQLGADCIMCLDECPPHDVPMEKMQDAVDRTTKWAARCRDAQKRDDQALFGIVQGGTDQKMRERSAEGLLPLEFPGYAVGGLSVGENPEDMYTTLDFTTPMLPVEKPRYLMGVGRPSDLIEAIMRGVDLFDCVMPTRNGRNGMAFTSQGRVNLRNQKHVRDPSPLDPEIDSPGSRDYSRAYLRHLFMSREMLGPILISLHNIAFYQKLLRDLRQAILNDQVEEFRAVHLARWNASF

SEQ ID NO: 55672 - protein, 372 aa, unidentified; identical to SEQ ID NO: 55670
  source 1..372: note = Gimesia sp.
  REGION 1..372: note = tr|A0A2D5GVC7|A0A2D5GVC7_9PLAN Queuine tRNA-ribosyltransferase OS=Gimesia sp. OX=2024833 GN=tgt; PE = 3 SV=1

SEQ ID NO: 55673 - protein, 372 aa, unidentified
  source 1..372: note = Gimesia sp.
  REGION 1..372: note = tr|A0A2E7K8D7|A0A2E7K8D7_9PLAN Queuine tRNA-ribosyltransferase OS=Gimesia sp. OX=2024833 GN=tgt; PE = 3 SV=1
MSQFHFELIHTDSRTQARAGRWHTPHGIVDTPAFMPVGTLASVKGLLPEQLKQVGTQQVLANTYHLALRPGAEIVQELGGLHEFMNWDGPILTDSGGFQVFSLAQLTKMDDEQVVFRSHIDGSLFELSPEKAVKIQEQLGADCIMCLDECPPHDVPLEKMQEAVDRTTKWAARCRDAQKRDDQALFGIVQGGTDQKMRERSAEGLLPLEFPGYAIGGLSVGEKPEDMYSTLDFTTPMLPVEKPRYLMGVGRPSDLIEAIMRGVDLFDCVMPTRNGRNGMAFTSQGRVNLRNQKHARDPSPLDPECDSPGSRDYSRAYLRHLFMAREMLGPILISLHNIAFYQKLVRDLREAILNDQVEEFRAVHLARWNASF

SEQ ID NO: 55674 - protein, 372 aa, Glaciecola nitratireducens
  REGION 1..372: note = tr|G4QK25|G4QK25_GLANF Queuine tRNA-ribosyltransferase OS=Glaciecola nitratireducens (strain JCM 12485 / KCTC 12276 / FR1064) OX=1085623 GN=tgt; PE = 3 SV=1
MKFNLMATDGKARRGQLIFERGVVETPAFMPVGTYGTVKGMTPEELDESGAHICLGNTFHLMLRPGTSIIKQHGDLHDFMNWDKPILTDSGGFQVFSLGDLRKITEHGVTFRSPINGEKILLTPEKSMEVQRDLGSDIVMIFDECTPYPATEKEASDSMEMSLRWAQRSKDAHGDNPSALFGIIQGGMYEHLRDTSLEGLEDIGFDGYAIGGLSVGEPKEDMIRIINHTAPKIPENKPRYLMGVGKPEDIVEAVRRGIDMFDCVMPTRNARNGHLFVTDGVVKIRNAVHKTDTGPLDEKCDCYTCKNYSRSYLHHLDKCNEILGSRLNTIHNLRYYQRIMEGLRTAIAAGELASFVDEFYAQKGLPVPPLED

SEQ ID NO: 55675 - protein, 372 aa, Glaciecola pallidula
  REGION 1..372: note = tr|K6ZBZ3|K6ZBZ3_9ALTE Queuine tRNA-ribosyltransferase OS=Glaciecola pallidula DSM 14239 = ACAM 615 OX=1121922 GN=tgt PE=3 SV=1
MKFNLMATDGKARRGQLIFERGVVETPAFMPVGTYGTVKGMTPEELDESGAHICLGNTFHLMLRPGTSIIKQHGDLHDFMNWDKPILTDSGGFQVFSLGDLRKITEHGVTFRSPINGEKILLTPEKSMQVQRDLGSDIVMIFDECTPYPATEKEASDSMEMSLRWAQRSKDAHGDNPSALFGIIQGGMYEHLRDTSLAGLEDIGFDGYAIGGLSVGEPKADMIRIINHTAPKIPENKPRYLMGVGKPEDLVEAVRRGIDMFDCVMPTRNARNGHLFVTDGVVKIRNAVHKTDTGPLDEKCDCYTCKNYSRSYLHHLDKCNEILGSRLNTIHNLRYYQRIMDGLRNAIAAGELVNFVAEFYAQKGLPVPLLEG

SEQ ID NO: 55676 - protein, 370 aa, Glaciecola punicea
  REGION 1..370: note = tr|H5T7W0|H5T7W0_9ALTE Queuine tRNA-ribosyltransferase OS=Glaciecola punicea ACAM 611; OX = 1121923 GN=tgt PE=3 SV=1
MKFSLLNTDGLARRGQLIFERGVVETPAFMPVGTYGTVKGMTPEELTETGAHICLGNTFHLMLRPGTGIIKDHGDLHDFMHWNKPILTDSGGFQVFSLGAMSKINEEGVTFRSPINGEKILLTPEKSMHVQRDLGSDIVMIFDECTPFPATKDEAQRSMELSLRWAKRSKEAHSDNPSALFGIVQGGMFEDLRDVSLSGLEEIGFDGYAIGGLSVGEPKEDMMRIVKHTAPQIPANKPRYLMGVGKPEDIVEAVRRGIDMFDCVMPTRNARNGHLFVHDGVVKIRNARHKTDIKPLDEKCDCYTCKNYSRSYLHHLDKCNEILGARLNTIHNLRYYQVVMEGLRTAISENALTEFVELFYAQKGMDVPDL

SEQ ID NO: 55677 - protein, 375 aa, Glaciecola sp.
  REGION 1..375: note = tr|A0A2Z6UHU1|A0A2Z6UHU1_GLASK Queuine tRNA-ribosyltransferase OS=Glaciecola sp. (strain KUL10); OX = 2161813 GN=tgt PE=3 SV=1
MKFNLKKTDGRARRGQLEFDRGIVETPAFMPVGTYGTVKGMTPEELKESGAHICLGNTFHLMLRPGTSIIKQHGDLHDFMHWDKPILTDSGGFQVFSLGAMRKITEEGVTFKSPINGEKILLTPEKSMEVQRDLGSDIVMIFDECTPYPATEKEAEDSMQLSLRWAQRSKDAHGDNPSALFGIIQGGMYEHLRDVSLEGLENIGFDGYAIGGLSVGEPKEDMIRIINHTAPKIPENKPRYLMGVGKPEDLVEAVRRGIDMFDCVMPTRNARNGHLFVTEGIVKIRNAVHKTDTSPLDENCDCYTCKNYSRSYLHHLDKCNEILGSRLNTIHNLRYYQRVMQGLRDAIDAGELETFVEEFYAQKGKLIPALEAIDE

SEQ ID NO: 55678 - protein, 95 aa, Glaciecola sp.
  REGION 1..95: note = tr|A0A348MV09|A0A348MV09_9ALTE tRNA guanosine(34) transglycosylase Tgt (Fragment) OS=Glaciecola sp.; OX = 1905676 GN=tgt PE=4 SV=1
MQFKLLATQGKARRGQLVFPRGIVETPAFMPVGTYGTVKGMTPEELTETGAHICLGNTFHLMLRPGTEIIQQHGDLHDFMHWDKPILTDSGGFQV

SEQ ID NO: 55679 - protein, 375 aa, Glaciimonas sp.
  REGION 1..375: note = tr|A0A2T6FC25|A0A2T6FC25_9BURK Queuine tRNA-ribosyltransferase OS=Glaciimonas sp. PCH181; OX = 2133943 GN=tgt PE=3 SV=1
MLEFTLLKTEGKARRGRVKLNHGIVETPIFMPVGTYGSVKAMSPLELKEIDAHIILGNTFHLWLRPGIEVVKKFGGLHKFMGWDKPILTDSGGFQVFSLGAMRKITEEGVKFSSPINGDKLFLSPEVSMQIQKVLNSDIVMQFDECTPYEIDGRPATQIEAAESMRMSLRWAKRSQDEFKGGENPNALFGIVQGGMFEHLREESLAGLNALDFNGIAIGGLSVGEPKEEMMRVLEYIGPKLPANKPHYLMGVGTPEDLVAGVQNGVDMFDCVMPTRNARNGWLFTRFGDVKIKNARYKEDTQPLDESCGCYACKNFSRAYLHHLHRTGEILGARLNTIHNLHYYLDLMQNIRNALDEERFTSFVALFHADRARGV

SEQ ID NO: 55680 - protein, 385 aa, unidentified
  source 1..385: note = Glaesserella parasuis
  REGION 1..385: note = tr|U4SM61|U4SM61_HAEPR Queuine tRNA-ribosyltransferase OS=Glaesserella parasuis D74; OX = 1275971 GN=tgt PE=3 SV=1
MKYELKKTNGNARRGRLTFSRPKGEYHVETPAFMPVGTYGTVKGMTPEEVAQTGAQILLGNTFHLWLRPGQEIMRQHGDLHDFMQWHGPILTDSGGFQVFSLGKLRKIKEEGVYFQNPISGEKVFLSPEKSMEIQYDLGSDIVMIFDECTPYPATFDYAKQSMEMSLRWAKRSRDRFDELQNPNALFGIIQGGVYEELRKVSVEKLVEIGFDGYAVGGLAVGEPKEDMHRILEYVCPQIPADKPRYLMGVGKPEDLVEGVRRGIDMFDCVMPTRNARNGHLFVTNGIVKIRNAKYRNDISPLDPECDCYTCKNYTKAYLYHLDKCGEILGARLNTIHNLRYYQRLMAEIRQAIDEDRFDHFVVEFYQRIGKEVPPLQLAKEGENA

SEQ ID NO: 55681 - protein, 385 aa, unidentified
  source 1..385: note = Glaesserella parasuis
  REGION 1..385: note = tr|U4S324|U4S324_HAEPR Queuine tRNA-ribosyltransferase OS=Glaesserella parasuis str. Nagasaki OX=1117322 GN=tgt PE=3 SV=1
MKYELKKTNGNARRGRLTFSRPKGEYHVETPAFMPVGTYGTVKGMTPEEVAQTGAQILLGNTFHLWLRPGQEIMRQHGDLHDFMQWHGPILTDSGGFQVFSLGKLRKIKEEGVYFQNPISGEKVFLSPEKSMEIQYDLGSDIVMIFDECTPYPATFDYAKQSMEMSLRWAKRSRDRFDELQNPNALFGIIQGGVYEELRKVSVEKLVEIGFDGYAVGGLAVGEPKEDMHRILEYVCPQIPADKPRYLMGVGKPEDLVEGVRRGIDMFDCVMPTRNARNGHLFVTNGIVKIRNAKYRNDISPLDPECDCYTCKNYTKAYLYHLDKCGEILGARLNTIHNLRYYQRLMAEIRQAIDEDRFDDFVVEFYQRIGKEVPPLQLAKEGENA

SEQ ID NO: 55682 - protein, 385 aa, unidentified
  source 1..385: note = Glaesserella sp.
  REGION 1..385: note = tr|A0A328C3A1|A0A328C3A1_9PAST Queuine tRNA-ribosyltransferase OS=Glaesserella sp. HHC-2018; OX = 2094024 GN=tgt PE=3 SV=1
MKYELKKTNGNARRGRLTFSRPKGEYHVETPAFMPVGTYGTVKGMTPEEVAQTGAQILLGNTFHLWLRPGQEIMRQHGDLHDFMQWHGPILTDSGGFQVFSLGKLRKIKEEGVYFQNPISGEKVFLSPEKSMEIQYDLGSDIVMIFDECTPYPATFDYAKQSMEMSLRWAKRSRDRFDELQNPNALFGIIQGGVYEELRKVSVEKLVEIGFDGYAVGGLAVGEPKEDMHRILEYVCPQIPADKPRYLMGVGKPEDLVEGVRRGIDMFDCVMPTRNARNGHLFVTNGIVKIRNAKYRNDISPLDPECDCYTCKNYTKAYLYHLDKCGEILGARLNTIHNLRYYQRLMAEIRQAIDEDRFDDFVVEFYQRIGKEVPPLQLAKESENA

SEQ ID NO: 55683 - protein, 381 aa, Globicatella sanguinis
  REGION 1..381: note = tr|A0A2I1PGP4|A0A2I1PGP4_9LACT Queuine tRNA-ribosyltransferase OS=Globicatella sanguinis OX=13076; GN = tgt PE=3 SV=1
MSEPVIRYELIKEEKHTGARLGKLHTPHGTFDTPMYMPVGTLATVKGLSPEELKEMGAQVVLSNTYHLWLRPGDDLVAEAGGLHKFMNWDQGILTDSGGFQVFSLSDIRRIEEEGVHFRNHLNGSKLFLTPEKAIHIENNLGADMIMSFDECPPFYETHDYVEKSINRTTRWAERGLKAHQRPHDQALFGILQGAGYKDLRLQHARDMISLDFPGYSIGGLSVGESKEEMNEVLEYLTPVIPKDKPRYLMGVGSPDALIDGAIRGVDMFDCVLATRIARNGTTMTSTGRLVVKNAKYARDFRPLDEHCNCYTCRNYSRAYLRHLFKADEMFGLRLASIHNVHFLLNLMKQVRENIMNDSLLEFKEDFFERYGYNKENARAF

SEQ ID NO: 55684 - protein, 381 aa, Globicatella sp.
  REGION 1..381: note = tr|A0A1E8Z2Q2|A0A1E8Z2Q2_9LACT Queuine tRNA-ribosyltransferase OS=Globicatella sp. HMSC072A10; OX = 1739315 GN=tgt PE=3 SV=1
MSEPVIRYELIKEEKHTGARLGKLHTPHGTFDTPMYMPVGTLATVKGLSPEELKEMGAQVVLSNTYHLWLRPGDDLVAEAGGLHKFMNWDQGILTDSGGFQVFSLSDIRRIEEEGVHFRNHLNGSKLFLTPEKAIHIENNLGADMIMSFDECPPFYETHDYVEKSINRTTRWAERGLKAHQRPHDQALFGILQGAGYKDLRLQHARDMISLDFPGYSIGGLSVGESKEEMNEVLEYLTPVMPKDKPRYLMGVGSPDALIDGAIRGVDMFDCVLATRIARNGTTMTSTGRLVVKNAKYARDFRPLDEHCNCYTCRNYSRAYLRHLFKADEMFGLRLASIHNVHFLLNLMKQVRENIMNDSLLEFKEDFFERYGYNKENARAF

SEQ ID NO: 55685 - protein, 381 aa, Globicatella sulfidifaciens
  REGION 1..381: note = tr|A0A1T4KQJ9|A0A1T4KQJ9_9LACT Queuine tRNA-ribosyltransferase OS=Globicatella sulfidifaciens DSM 15739 OX=1121925 GN=tgt PE=3 SV=1
MSEPVIRYELIKEEKHTGARLGKLHTPHGTFDTPMYMPVGTLATVKGLSPEELKEMGAQVILSNTYHLWLRPGDDLVAEAGGLHKFMNWDQGILTDSGGFQVFSLSDIRRIEEEGVHFRNHLNGSKLFLTPEKAIHIENNLGADMIMSFDECPPFYETHDYVEKSINRTTRWAERGLKAHQRPHDQALFGILQGAGYKDLRLQHARDMISLDFPGYSIGGLSVGESKEEMNEVLEYLTPVMPKDKPRYLMGVGSPDALIDGAIRGVDMFDCVLATRIARNGTTMTSTGRLVVKNAKYARDFRPLDEHCNCYTCRNYSRAYLRHLFKADEMFGLRLASIHNVHFLLNLMKQVRENIMNDSLLEFKEDFFERYGYNKENARAF

SEQ ID NO: 55686 - protein, 344 aa, unidentified
  source 1..344: note = Gloeobacter kilaueensis
  REGION 1..344: note = tr|U5QEQ9|U5QEQ9_9CYAN Queuine tRNA-ribosyltransferase OS=Gloeobacter kilaueensis JS1; OX = 1183438 GN=tgt PE=3 SV=1
MPVGTQATVKTLTPAQLVEAGAQMILANTYHLSLQPGAEIVAEAGGLHHFMQWPGPILTDSGGFQVFSLSSLRTIDDDGVTFREPRSGSLVRFTPEYAMAVQNALGADVAMAFDECPPYPAERSAVERAVTRTLHWFERCLAAHRRSDQALFGIVQGGVWPDLRAHCAEVLASADLPGYAIGGVSVGEPGMLIEKVVRVTAPLLPEHKPRYLMGVGTFRELAQAAAVGVDLFDCVMPTRVARHGSALLINATGDRRINLKNAQFRRDFAPLDTHCPCYTCRHFSRAYLSHLVRSGEILAMTLLSIHNIATLSRFSAELRAAIIDGSFTQRFAAYLQPEAEVERG

SEQ ID NO: 55687 - protein, 378 aa, unidentified
  source 1..378: note = Gloeobacter violaceus
  REGION 1..378: note = sp|Q7NMG4|TGT_GLOVI Queuine tRNA-ribosyltransferase; OS = Gloeobacter violaceus (strain ATCC 29082 / PCC 7421); OX = 251221 GN=tgt PE=3 SV=1
MTASFAFTIEHRDGEARAGTFATPHGPVYTPCFMPVGTQATVKTLTPAQLAETGAQMILANTYHLSLQPGADIVAGAGGLHGFMQWPGPILTDSGGFQVFSLSSLRTIDDDGVTFREPKSGALVRFTPEHAVAVQNALGADVIMAFDECPPYPADREQVEGAVERTLRWFERCVEAHRRSDQALFGIVQGGVWPDLRRRCAEGLVAADLPGYAIGGVSVGEPQTLIERVVRVTAPLLPEHKPRYLMGVGTFREMAQAVAVGVDLFDCVMPTRVARHGSALLLGTGGDRRINLKNAQFRRDYEPLDCVCPCYTCRHFSRAYLAHLVRSEEILAMTLLSIHNVATLTRFAALLRCAIATGSFAQEFAHYLQSGPEPVLSN

SEQ ID NO: 55688 - protein, 378 aa, Gloeocapsa sp.
  REGION 1..378: note = tr|K9XG73|K9XG73_9CHRO Queuine tRNA-ribosyltransferase OS=Gloeocapsa sp. PCC 7428; OX = 1173026 GN=tgt PE=3 SV=1
MSEKFSFQVLAECSQTKARAGFFLTPHGRVATPRFMPVGTLANVKTITTAQLGETGAQMVLANTYHLHLQPGEAIVAKAGGLHSFMHWHGPMLTDSGGFQVFSLSELRQVTDDGVTFRSPRDGQVINITPEKSIQIQNALGADVIMAFDECPPYPASREAVTDATNRTYRWLERCIATHQRQDQALFGIVQGGVYLDLRAQAALEVAKLNLPGYAIGGVSVGEPPELIHQIVEATAPLLPREKPRYLMGVGTYREMAKAVAAGVDLFDCVIPTRLARHGAALVQQGDRWNLKNARFREDFTPLDETCPCYTCQNFTRAYLCHLVRSREILAYTLLSIHNITELIRFTQRMREAILSDSFATEFAPWLTQSAVTDSSNT

SEQ ID NO: 55689 - protein, 371 aa, Gloeocapsa sp.
  REGION 1..371: note = tr|L8LM49|L8LM49_9CHRO Queuine tRNA-ribosyltransferase OS=Gloeocapsa sp. PCC 73106; OX = 102232 GN=tgt PE=3 SV=1
MGFSFHNQGNCSFTKARAGIWTTPHGCVETPRFMPVGTIATVKGLTPAQLEVSGAQMILGNTYHLHLQPGEEIIAQAGGLHKFMAWNGPILTDSGGFQVFSLSKLRKISEAGVTFRSPRDGRLIEFTPEKSIEIQNILGADVIMAFDECPPASATREEIKAATERTYRWLKRCVQAHQRPQEQALFPIVQGGVYLDLRSQAAQELVELDLPGYAIGGVSVGETPELIHQIVAHTAPLLPQDKPRYLMGVGTYREMVQAIAWGIDVFDCVIPTRLGRHGTALVRGERWNLRNARFRQDFNPLDEHCSCYTCQTFSRAYLNHLVRSREMLGYMLLSLHNIHELIHFTKAIREAILQDRFLTEFGHWLTQRMIP

SEQ ID NO: 55690 - protein, 368 aa, unidentified
  source 1..368: note = Gloeomargarita lithophora
  REGION 1..368: note = tr|A0A1J0AA61|A0A1J0AA61_9CYAN Queuine tRNA-ribosyltransferase OS=Gloeomargarita lithophora Alchichica-D10 OX=1188229 GN=tgt PE=3 SV=1
MASFSFRVIQTCSHTHARAGIFPTPHGSVLTPTFMPVGTLGTVKGVAPDQLAGTGAQMILGNTYHLHLQPGEEIVQHCGGLHRFMNWPGPILTDSGGFQVFSLSSLRQITDDGVTFRSPRNGDLIHFTPEKSIQIQNALGADVIMAFDECPPYPASYDEVKNAVNRTDQWLKRCIDAHQRSDQALFGIVQGGVYPELRRLSAQQITEYDLPGYAIGGVSVGEPSELIHDIVKTVAPYLPLDKPRYLMGVGTYREMALAISAGVDLFDCVIPTRLARHGAVLVRGERWNLKNRVFQRDERPLDSTCPCYTCQNFSRAYLSHLFRSRELLGYTLLSIHNLTELMRFSLGLRQAIITGNFAEKLASILSEN

SEQ ID NO: 55691 - protein, 375 aa, unidentified
  source 1..375: note = Gloeothece citriformis
  REGION 1..375: note = tr|B7KCS6|B7KCS6_GLOC7 Queuine tRNA-ribosyltransferase OS=Gloeothece citriformis (strain PCC 7424) OX=65393 GN=tgt PE=3 SV=1
MGFSYNCQATCSQTFARAGVWNTPHGIVETPRFMPVGTLATVKGLTPAQLQTTGAQMILANTYHLHLQPGEAIVEKAGGLHQFMAWKGPILTDSGGFQVFSLSELREIKDSGVTFRSPRDGRIIEITPERSIQIQNALGADVIMAFDECPPANTSRTEVERATQRTYRWLERCINAHQRPQEQALFGIVQGGIYPELRCQAARDLVQLDLPGYAIGGVSVGEKPELIHQIVDITAPLLPPHKPRYLMGVGTYREMAKAVAAGVDLFDCVIPTRFGRHGTAMVQGERWNLKNAQFKEDFRPLDETCSCYTCQHFTRAYLNHLIKSREMLGYILLSLHNIAELIRFTQKMREAILSDRFASEFAYWLKEEDKSLSSF

SEQ ID NO: 55692 - protein, 372 aa, unidentified
  source 1..372: note = Gloeothece verrucosa
  REGION 1..372: note = tr|E0UBH6|E0UBH6_GLOV7 Queuine tRNA-ribosyltransferase OS=Gloeothece verrucosa (strain PCC 7822) OX=497965 GN=tgt PE=3 SV=1
MRFSFNCQATCSQTKARAGVWNTPHGIVETPRFMPVGTLATVKGLTPAQVQTTGAQMILANTYHLHLQPGEGIVQKAGGLHQFMAWKGPILTDSGGFQVFSLSELREIKESGVTFRSPRDGRMIEITPERSIKIQNSLGADVIMAFDECPPANATRVEVERATQRTYRWLERCIQAHERPQEQALFGIVQGGIYPDLRSEAARSLVELDLPGYAIGGVSVGEKLELIHHIVNLTAPLLPPHKPRYLMGVGTYREMVKAVAAGIDLFDCVIPTRFGRHGAAMVKGERWNLKNAQFKEDFTPLDETCPCYTCENFTRAYLNHLIKSREMLGYILLSLHNIAELVRFTQRMREAILSDRFTSEFAEWLNTSPTPR

SEQ ID NO: 55693 - protein, 387 aa, Gluconacetobacter diazotrophicus
  REGION 1..387: note = sp|A9HBJ2|TGT_GLUDA Queuine tRNA-ribosyltransferase; OS = Gluconacetobacter diazotrophicus (strain ATCC 49037 / DSM 5601 / PAl5) OX=272568 GN=tgt PE=3 SV=1
MSTAFRWVEQARVGRARAGHLHTAHGVVPTPTFMPVGTVGTVKAMTMDSVRSTGAGIVLGNTYHLMLRPGAEKVRALGGLHRFMDWPGPILTDSGGFQVMSLGALRKLDQDGVTFNSHIDGSKHRLTPERSTDIQHALDATITMCFDECPALPAPPETIAQSMRLSMRWAARCREAFVPRAGYAQYGIIQGGTEPELRAESVRALTGIGFEGYAIGGLAVGEGQELMYATLDATVPLIPHDSPRYLMGVGTPDDLLGAVERGVDMFDCVMPTRAGRTARAYTERGTLNLRNARHADDTRPLSPHCDCLACTRHSRAYLHHLFRANEILGPMLLTWHNLAYYQRLMRGMRGAIVAGTLGAHAAGLRAEWAMEDWTPDEMPPPDLPPVP

SEQ ID NO: 55694 - protein, 386 aa, Gluconacetobacter entanii
  REGION 1..386: note = tr|A0A318Q0M0|A0A318Q0M0_9PROT Queuine tRNA-ribosyltransferase OS=Gluconacetobacter entanii; OX = 108528 GN=tgt PE=3 SV=1
MTAFRWRAQARSGRARAGYLDTAHGTVATPTFMPVGTVGTVKAMTMDAVRSTGAGIVLGNTYHLMLRPGAERVRALGGLHRFMDWPGPILTDSGGFQVMSLGPLRKLDADGVTFRSHIDGSKHRLTPERSTDIQHALDATISMCFDECPALPAPAEAIAQSMRMSMRWAERCRTAFVARPGYAQYGIIQGGTEPQLRAESVRALTDIGFEGYAIGGLAVGEGQELMFSTLDVTVGLIPDDAPRYLMGVGTPDDLLGAVERGVDMFDCVMPTRAGRTARAYTERGTLNLRNARHATDSRPISPHCDCLACSRHSRAYLHHLFRANEMLGPMLLTWHNLAYYQRLMRGIRAAIVDGTLPEHAACLRAQWAMEDWSPDEMPFPDIPPVP

SEQ ID NO: 55695 - protein, 387 aa, Gluconacetobacter liquefaciens
  REGION 1..387: note = tr|A0A370G0L9|A0A370G0L9_GLULI Queuine tRNA-ribosyltransferase OS=Gluconacetobacter liquefaciens; OX = 89584 GN=tgt PE=3 SV=1
MSTSFRWVEQARSGRARAGHLHTAHGVVPTPTFMPVGTVGTVKAMTMDAVRSTGAGIVLGNTYHLMLRPGAERVRALGGLHRFMDWPGPILTDSGGFQVMSLGPLRKLDQDGVTFSSHIDGSKHRLTPERSTDIQHALDATITMCFDECPALPAAPEVIAQSMRMSMRWAARCREAFVQRPGYAQYGIIQGGTEAELRAESVRALTGIGFEGYAIGGLAVGEGQELMFSTLDATTPLIPWDSPRYLMGVGTPDDLLGSVERGVDMFDCVMPTRAGRTARAYTERGTLNLRNARHAVDSRPISPHCDCLACTCHSRAYLHHLFRTNEILGPMLLTWHNLAYYQRLMRGIRAAIVEGTLEAHAAWLRAQWAMEDWSPDEMPPPDIPPVP

SEQ ID NO: 55696 - protein, 386 aa, Gluconacetobacter sp.
  REGION 1..386: note = tr|F3S4J3|F3S4J3_9PROT Queuine tRNA-ribosyltransferase OS=Gluconacetobacter sp. SXCC-1; OX = 1004836 GN=tgt PE=3 SV=1
MTTFRWRPEARTGHARAGWLDTAHGSVPTPTFMPVGTVGTVKAMTMDNVRATGAGIVLGNTYHLMLRPGAERVRQLGGLHRFMDWPGPILTDSGGFQVMSLGPLRKLDQDGVTFRSHIDGSKHRLTPERSTDIQHALDATISMCFDECPALPAAPDVIARSMRMSMRWAERCRTAFVQRPGYAQYGIIQGGTEPELRAESVRALTGIGFEGYAIGGLAVGEGQELMFATLDSTVPLIPDASPRYLMGVGTPDDLLGAVERGVDMFDCVMPTRAGRTARAYTERGTLNLRNARHATDSRPISPHCDCLACSRHSRAYLHHLFRANEILGPMLLTWHNLAYYQRLMRGMRAAIVDGAFAAHADHLRAQWAMDDWSGDEMPYPDFPPVP

SEQ ID NO: 55697 - protein, 392 aa, Gluconobacter albidus
  REGION 1..392: note = tr|A0A149TLB7|A0A149TLB7_9PROT Queuine tRNA-ribosyltransferase OS=Gluconobacter albidus OX=318683; GN = tgt PE=3 SV=1
MSNHQTDHATKMTWVPEASCGMARAGHLHTRHGTVPTPTFMPVGTVGTVKGMTMDAVRSTGAGIVLGNTYHLMLRPTADRVQKLGGLHRMMDWPGPILTDSGGFQVMSLGALRKLDEDGVTFRSHIDGSKHRLTPEISTDIQFKLDATITMAFDECPALPATPEVLRKSMEMSMRWAARSREAFVAREGYGQFGIVQGGTERDLREYSIKALTEIGFEGYAIGGLAVGEGQELMFSTLDFTTPMLPQDKARYLMGVGTPDDLLGAVMRGVDMFDCVMPSRAGRTARAYTERGPINLRNARFAEDTRTLTPNDDTPIAGRYSRAYLHHLFRANEMLGPMLLTWHNLAYYQRLMRQIRAAIVDGTLDVLAVKLREDWAKGDWTEDEWPMPDLAL

SEQ ID NO: 55698 - protein, 392 aa, Gluconobacter albidus
  REGION 1..392: note = tr|A0A1U9KZX9|A0A1U9KZX9_9PROT Queuine tRNA-ribosyltransferase OS=Gluconobacter albidus OX=318683; GN = tgt PE=3 SV=1
MSNHQTDHATKMTWVPEASCGMARAGHLHTRHGTVPTPTFMPVGTVGTVKGMTMDAVRSTGAGIVLGNTYHLMLRPTADRVQKLGGLHRMMDWPGPILTDSGGFQVMSLGALRKLDEDGVTFRSHIDGSKHRLTPEISTDIQFKLDATITMAFDECPALPATPEVLRKSMEMSMRWAARSREAFVAREGYGQFGIVQGGTERDLREYSIKALTEIGFEGYAIGGLAVGEGQELMFSTLDFTTPMLPQDKARYLMGVGTPDDLLGAVMRGVDMFDCVMPSRAGRTARAYTERGPINLRNARFAEDTRTLTPHDDTPIAGRYSRAYLHHLFRANEMLGPMLLTWHNLAYYQRLMRQIRAAIVDGTLDVLAVKLREDWAKGDWTEDEWPMPDLAL

SEQ ID NO: 55699 - protein, 388 aa, Gluconobacter cerinus
  REGION 1..388: note = tr|A0A1B6VKJ3|A0A1B6VKJ3_9PROT Queuine tRNA-ribosyltransferase OS=Gluconobacter cerinus OX=38307; GN = tgt PE=3 SV=1
MTEQATKMTWVPEATCGQARAGHLHTRHGTVPTPTFMPVGTVGTVKGMTMDAVRSTGAGIVLGNTYHLMLRPTADRVQKLGGLHKMMDWSGPILTDSGGFQVMSLGALRKLDQDGVTFQSHIDGSKHRLSPEISTDIQYKLDATITMAFDECPALPATPEALRKSMELSMRWAARSREAFVAREGYGQFGIVQGGTERDLREYSIKALTEIGFEGYAIGGLAVGEGQELMFSTLDFTTPMLPQDKARYLMGVGTPDDLLGSVMRGVDMFDCVMPSRAGRTARAYTERGYINLRNARFAEDTRPLTPHDDSPMAGRYTRAYLHHLFRAGEMLGPMLLTWHNLAYYQRLMRQIRAAIVDGTLNELVIKLREDWSKGDWTEDEWPMPSLAL

SEQ ID NO: 55700 - protein, 388 aa, Gluconobacter frateurii
  REGION 1..388: note = tr|A0A0D6PRF6|A0A0D6PRF6_9PROT Queuine tRNA-ribosyltransferase OS=Gluconobacter frateurii M-2; OX = 1231354 GN=tgt PE=3 SV=1
MTEQATKMTWVSEATCGQARAGHLHTRHGTVPTPTFMPVGTVGTVKGMTMDAVRSTGAGIVLGNTYHLMLRPTADRVQKLGGLHKMMDWSGPILTDSGGFQVMSLGALRKLDQDGVTFQSHIDGSKHRLSPEISTDIQYKLDATISMTFDECPALPATPEALRKSMELSMRWAARSREAFVAREGYGQFGIVQGGTERDLREYSIKALTEIGFEGYAIGGLAVGEGQELMFSTLDFTTPMLPQDKARYLMGVGTPDDLLGSVMRGVDMFDCVMPSRAGRTARAYTERGYINLRNARFAEDTRPLTPHDDSPMAGRYTRAYLHHLFRAGEMLGPMLLTWHNLAYYQRLMRQIRAAIVDGTLNELAIKLREDWSKGDWTEDEWPMPSLAL

SEQ ID NO: 55701 - protein, 388 aa, Gluconobacter frateurii
  REGION 1..388: note = tr|A0A0K8N6K6|A0A0K8N6K6_9PROT Queuine tRNA-ribosyltransferase OS=Gluconobacter frateurii NBRC 101659 OX=1104996 GN=tgt PE=3 SV=1
MTEQATKMTWVPEATCGQARAGHLHTRHGTVPTPTFMPVGTVGTVKGMTMDAVRSTGAGIVLGNTYHLMLRPTADRVQKLGGLHKMMDWSGPILTDSGGFQVMSLGALRKLDQDGVTFQSHIDGSKHRLSPEISTDIQYKLDATITMAFDECPALPATPETLRKSMELSMRWAARSREAFTAREGYGQFGIVQGGTERDLREYSVKALTEIGFEGYAIGGLAVGEGQELMFSTLDFTTPLLPQDKARYLMGVGTPDDLLGSVMRGVDMFDCVMPSRAGRTARAYTERGYINLRNARFAEDTRPITPHDDSPMAGRYTRAYLHHLFRAGEMLGPMLLTWHNLAYYQRLMRQIRAAIVDGTLNELAIKLREDWSKGDWTEDEWPMPSLAL

SEQ ID NO: 55702 - protein, 388 aa, Gluconobacter japonicus
  REGION 1..388: note = tr|A0A149U6V7|A0A149U6V7_GLUJA Queuine tRNA-ribosyltransferase OS=Gluconobacter japonicus; OX = 376620 GN=tgt PE=3 SV=1
MTEQATKMTWVPEATCGQARAGHLHTRHGTVPTPTFMPVGTVGTVKGMTMDAVRSTGAGIVLGNTYHLMLRPTADRVQKLGGLHKMMDWSGPILTDSGGFQVMSLGALRKLDQDGVTFQSHIDGSKHRLSPEISTEIQYKLDATITMAFDECPALPATPEALRKSMELSMRWAARSREAFVAREGYGQFGIVQGGTERDLREYSIKALTEIGFEGYAIGGLAVGEGQELMFSTLDFTTPMLPQDKARYLMGVGTPDDLLGSVMRGVDMFDCVMPSRAGRTARAYTERGYINLRNARFAEDTRPITPHDDSPMAGRYTRAYLHHLFRAGEMLGPMLLTWHNLAYYQRLMRQIRAAIVDGTLNELAIKLREDWSKGDWTEDEWSMPSLAL

SEQ ID NO: 55703 - protein, 388 aa, Gluconobacter japonicus
  REGION 1..388: note = tr|A0A149SHX9|A0A149SHX9_GLUJA Queuine tRNA-ribosyltransferase OS=Gluconobacter japonicus; OX = 376620 GN=tgt PE=3 SV=1
MTEQATKMTWVPEATCGQARAGHLHTRHGTVPTPTFMPVGTVGTVKGMTMDAVRSTGAGIVLGNTYHLMLRPTADRVQKLGGLHKMMDWSGPILTDSGGFQVMSLGALRKLDQDGVTFQSHIDGSKHRLSPEISTDIQYKLDATITMAFDECPALPATPETLRKSMELSMRWAARSREAFTAREGYGQFGIVQGGTERDLREYSVKALTEIGFEGYAIGGLAVGEGQELMFSTLDFTTPLLPQDKARYLMGVGTPDDLLGSVMRGVDMFDCVMPSRAGRTARAYTERGYINLRNARFAEDTRPLTPHDDSPMAGRYTRAYLHHLFRAGEMLGPMLLTWHNLAYYQRLMRQIRAAIVDGTLNELAIKLREDWSKGDWTEDEWPMPSLAL

SEQ ID NO: 55704 - protein, 392 aa, Gluconobacter kanchanaburiensis
  REGION 1..392: note = tr|A0A511B9S6|A0A511B9S6_9PROT Queuine tRNA-ribosyltransferase OS=Gluconobacter kanchanaburiensis NBRC 103587 OX=1307948 GN=tgt PE=3 SV=1
MSDHKTDHATKMTWVPEATCGMARAGHLHTRHGTVPTPTFMPVGTVGTVKGMTMDAVRSTGAGIVLGNTYHLMLRPTADRVQKLGGLHRMMDWPGPILTDSGGFQVMSLGALRKLDEDGVTFRSHIDGSKHRLTPEISTEIQFKLDATITMAFDECPALPATPEALRKSMEMSMRWAARSREAFVAREGYGQFGIVQGGTERDLREYSIKALTEIGFEGYAIGGLAVGEGQELMFSTLDFTTPMLPQDKARYLMGVGTPDDLLGAVMRGVDMFDCVMPSRAGRTARAYTERGAINLRNARFAEDTRTLTPHDDTPVAGRYSRAYLHHLFRANEMLGPMLLTWHNLAYYQRLMRQIRAAIVDGTLNALAIKLREDWAKGDWTEDEWPMPDLTL

SEQ ID NO: 55705 - protein, 388 aa, unidentified
  source 1..388: note = Gluconobacter morbifer
  REGION 1..388: note = tr|G6XMQ0|G6XMQ0_9PROT Queuine tRNA-ribosyltransferase OS=Gluconobacter morbifer G707; OX = 1088869 GN=tgt PE=3 SV=1
MTEHATKMTWVPEAACGQARAGHLHTRHGTVQTPTFMPVGTVGTVKGMTMDAVRSTGAGIVLGNTYHLMLRPGAERVRKLGGLHRMMDWQGPILTDSGGFQVMSLGALRKLDQDGVTFQSHIDGSRHRLTPEISTDIQYRLDATISMAFDECPALPATPETLRKSMELSMRWAARSREAFVQRDGYGQFGIVQGGTERDLREYSVKALTEIGFEGYAIGGLAVGEGQELMFSTLDFTTPMLPQDKARYLMGVGTPDDLLGAVMRGVDMFDCVMPSRAGRTARAYTERGHLNLRNARFADDTRPLTPYDDSPLAGRYTRAYLHHLFRANEMLGPMLLTWHNLAYYQRLMRQIRAAIVDGTLDALAVKLRSDWAKGDWTEDEWPMPDLSL

SEQ ID NO: 55706 - protein, 388 aa, Gluconobacter oxydans
  REGION 1..388: note = tr|K7SJ16|K7SJ16_GLUOY Queuine tRNA-ribosyltransferase OS=Gluconobacter oxydans H24; OX = 1224746 GN=tgt PE=3 SV=1
MTEQATKMTWVPEATCGQARAGHLHTRHGTVPTPTFMPVGTVGTVKGMTMDAVRSTGAGIVLGNTYHLMLRPTADRVQKLGGLHKMMDWSGPILTDSGGFQVMSLGALRKLDQDGVTFQSHIDGSKHRLSPEISTDIQYKLDATITMAFDECPALPATPETLRKSMELSMRWAARSREAFTAREGYGQFGIVQGGTERDLREYSVKALTEIGFEGYAIGGLAVGEGQELMFSTLDFTTPLLPQDKARYLMGVGTPDDLLGSVMRGVDMFDCVMPSRAGRTARAYTERGYINLRNARFAEDTRPLTPHDDSPMAGRYTRAYLHHLFRAGEMLGPMLLTWHNLAYYQRLMRQIRAAIVDGTLNELAVKLREDWSKGDWTEDEWPMPSLAL

SEQ ID NO: 55707 - protein, 392 aa, Gluconobacter oxydans
  REGION 1..392: note = tr|A0A067Z5T7|A0A067Z5T7_GLUOY Queuine tRNA-ribosyltransferase OS=Gluconobacter oxydans DSM 3504; OX = 1288313 GN=tgt PE=3 SV=1
MSDHKTDHATKMTWVPEASCGMARAGHLHTRHGTVPTPTFMPVGTVGTVKGMTMDAVRSTGAGIVLGNTYHLMLRPTADRVQKLGGLHRMMDWSGPILTDSGGFQVMSLGALRKLDEDGVTFRSHIDGSKHRLTPEISTDIQFKLDATITMAFDECPALPATPEVLRKSMEMSMRWAARSREAFVAREGYGQFGIVQGGTERDLREYSIKALTDIGFEGYAIGGLAVGEGQELMFSTLDFTTPMLPQDKARYLMGVGTPDDLLGAVMRGVDMFDCVMPSRAGRTARAYTERGTINLRNARFADDTRPLTPHDDTPIAGRYSRAYLHHLFRANEMLGPMLLTWHNLAYYQRLMRQIRAAIVDGTLDALAVKLREDWAKGDWTEDEWPMPDLAL

SEQ ID NO: 55708 - protein, 392 aa, Gluconobacter roseus
  REGION 1..392: note = tr|A0A4Y3M8F7|A0A4Y3M8F7_9PROT Queuine tRNA-ribosyltransferase OS=Gluconobacter roseus NBRC 3990; OX = 1307950 GN=tgt PE=3 SV=1
MSDHPTDHATKMTWVPEASCGMARAGHLHTRHGTVPTPTFMPVGTVGTVKGMTMDAVRSTGAGIVLGNTYHLMLRPTADRVQKLGGLHRMMDWPGPILTDSGGFQVMSLGALRKLDEDGVTFRSHIDGSKHRLTPEISTDIQFKLDATITMAFDECPALPATPEVLRKSMEMSMRWAARSREAFVAREGYGQFGIVQGGTERDLREYSTKALTDIGFEGYAIGGLAVGEGQELMFSTLDFTTPMLPQDKARYLMGVGTPDDLLGAVMRGVDMFDCVMPSRAGRTARAYTERGTINLRNARFADDTRTLTPHDDTPVAGRYSRAYLHHLFRANEMLGPMLLTWHNLAYYQRLMRQIRAAIVDGTLDTLAVKLREDWAKGDWTEDEWPMPDLAL

SEQ ID NO: 55709 - protein, 388 aa, Gluconobacter sp.
  REGION 1..388: note = tr|A0A252BNK1|A0A252BNK1_9PROT Queuine tRNA-ribosyltransferase OS=Gluconobacter sp. DsW_058; OX = 1511210 GN=tgt PE=3 SV=1
MTEQATKMTWVPEATCGQARAGHLHTRHGTVPTPTFMPVGTVGTVKGMTMDAVRSTGAGIVLGNTYHLMLRPTADRVQKLGGLHKMMDWSGPILTDSGGFQVMSLGALRKLDQDGVTFQSHIDGSKHRLSPEISTEIQYKLDATISMAFDECPALPATPEALRKSMELSMRWAARSREAFVAREGYGQFGIVQGGTERDLREYSIKALTEIGFEGYAIGGLAVGEGQELMFSTLDFTTPMLPQDKARYLMGVGTPDDLLGSVMRGVDMFDCVMPSRAGRTARAYTERGYINLRNARFAEDTRPLTPHDDSPMAGRYTRAYLHHLFRAGEMLGPMLLTWHNLAYYQRLMRQIRAAIVDGTLNELAIKLREDWSKGDWTEDEWPMPSLAL

SEQ ID NO: 55710 - protein, 392 aa, Gluconobacter sphaericus
  REGION 1..392: note = tr|A0A4Y3QCP9|A0A4Y3QCP9_9PROT Queuine tRNA-ribosyltransferase OS=Gluconobacter sphaericus NBRC 12467 OX=1307951 GN=tgt PE=3 SV=1
MNDQKTDHATKMIWVPEASCGMARAGHLHTRHGTVPTPTFMPVGTVGTVKGMTMDAVRSTGARIVLGNTYHLMLRPTADRVQKLGGLHRMMDWPGPILTDSGGFQVMSLGALRKLDEDGVTFRSHIDGSKHRLTPEISTDIQFKLDATITMAFDECPALPATPEALRKSMEMSMRWAARSREAFVAREGYGQFGIVQGGTERDLREYSIKALTDIGFEGYAIGGLAVGEGQELMFSTLDFTTPMLPQDKARYLMGVGTPDDLLGAVMRGVDMFDCVMPSRAGRTARAYTERGAINLRNARFAEDTRTLTPHDDTPIAGRYSRAYLHHLFRANEMLGPMLLTWHNLAYYQRLMRQIRAAIVDGTLDALAVKLRENWTKGDWSEDEWPMPNLAL

SEQ ID NO: 55711 - protein, 388 aa, Gluconobacter thailandicus
  REGION 1..388: note = tr|M9MAL1|M9MAL1_GLUTH Queuine tRNA-ribosyltransferase OS=Gluconobacter thailandicus NBRC 3255 OX=1291534 GN=tgt PE=3 SV=1
MTEQATKMTWVPEATCGQARAGHLHTRHGTVPTPTFMPVGTVGTVKGMTMDAVRSTGAGIVLGNTYHLMLRPTADRVQKLGGLHKMMDWSGPILTDSGGFQVMSLGALRKLDQDGVTFQSHIDGSKHRLSPEISTDIQYKLDATITMAFDECPALPATPETLRKSMELSMRWAARSREAFMAREGYGQFGIVQGGTERDLREYSVKALTEIGFEGYAIGGLAVGEGQELMFSTLDFTTPMLPQDKARYLMGVGTPDDLLGSVMRGVDMFDCVMPSRAGRTARAYTERGYINLRNARFAEDTRPLTPHDDSPMGGRYTRAYLHHLFRAGEMLGPMLLTWHNLAYYQRLMRQIRAAIVDGTLNELAIKLREDWSKGDWTEDEWPMPSLAL

SEQ ID NO: 55712 - protein, 388 aa, Gluconobacter thailandicus; identical to SEQ ID NO: 55706
  REGION 1..388: note = tr|A0A149STK3|A0A149STK3_GLUTH Queuine tRNA-ribosyltransferase OS=Gluconobacter thailandicus; OX = 257438 GN=tgt PE=3 SV=1

SEQ ID NO: 55713 - protein, 392 aa, Gluconobacter wancherniae
  REGION 1..392: note = tr|A0A511B390|A0A511B390_9PROT Queuine tRNA-ribosyltransferase OS=Gluconobacter wancherniae NBRC 103581 OX=656744 GN=tgt PE=3 SV=1
MSDFLTDSAAKMEWKPEAKCGMARAGHLHTRHGTVPTPTFMPVGTAGTVKGMMMDSVRSTGAGIVLGNTYHLMLRPTADRVQKLGGLHKMMDWSGPILTDSGGFQVMSLGALRKIDEDGVTFRSHIDGSKHRLSPEISTDIQFKLDATISMAFDECPALPATPEVLRKSMEMSMRWAARSREAFTQREGYGQFGIVQGGTEKDLRAYSAKALTDIGFEGYAIGGLAVGEGQELMFSTLDFTTPMLPEDKARYLMGVGTPDDLLGAVMRGVDMFDCVMPSRAGRTARAYTERGTLNLRNARFADDTRPITPEDDSPIAGRYTRAYLHHLFRANEMLGPMLLTWHNLAYYQRLMRKIRAAIVDGSLPELAQSLRADWAKGDWTPDEWPLPNLAL

SEQ ID NO: 55714 - protein, 432 aa, unidentified
  source 1..432: note = Glutamicibacter arilaitensis
  REGION 1..432: note = tr|E1VSJ5|E1VSJ5_GLUAR Queuine tRNA-ribosyltransferase OS=Glutamicibacter arilaitensis (strain DSM 16368 / CIP 108037 / IAM 15318 / JCM 13566 / Re117) OX=861360 GN=t gt PE=3 SV=1
MPEKNFDPSAPHARQDEFGFEVGTRLTATDGSPMLGRTGVIRTPHGEIKTPAFIAVGTKATVKAVTPVQVEQLGAQAVLSNAYHLYLQPGADILDEAGGLGKFMGWRGPTFTDSGGFQVMSLGSGFKKVIDMKSVDQSGPDDAVAPGKERLANVDEDGVWFKSHLDGNKHRFSPEISMGVQHQIGADVMFAFDELTTLQNSRGYQVESLERTRRWAERCIAEHFSLTDSRVGKDYQALFGVIQGAQYEDLRRKACQDLGAMAFDGFGIGGALEKENLGTIVGWCSEELPENKPRHLLGISEPDDIFTAIENGADTFDCVSPTRVARNSAFYTPWGRFNLSGARYKRDFTPLVEGCPCYACENFSRAYIHHLYKAKELLSHTLISIHNEHFTVSLVESARQAIEDGTFFELKDKVLSSYYAGTPDPQGKPATA

SEQ ID NO: 55715 - protein, 432 aa, unidentified
  source 1..432: note = Glutamicibacter arilaitensis
  REGION 1..432: note = tr|A0A4Y8TRJ7|A0A4Y8TRJ7_9MICC Queuine tRNA-ribosyltransferase OS=Glutamicibacter arilaitensis; OX = 256701 GN=tgt PE=3 SV=1
MPEKNFDPSAPHARQDEFGFEVGTRLTATDGSPMLGRTGVIRTPHGEIKTPAFIAVGTKATVKAVTPVQVEQLGAQAVLSNAYHLYLQPGADILDEAGGLGKFMGWRGPTFTDSGGFQVMSLGSGFKKVIDMKSVDQSGPDDAVAPGKERLANVDEDGVWFKSHLDGNKHRFSPEISMGVQHQIGADVMFAFDELTTLQNSRGYQVESLERTRRWAERCIAEHFSLTDSRVGKDYQALFGVIQGAQYEDLRRKACQDLGAMAFDGFGIGGALEKENLGTIVGWCSEELPENKPRHLLGISEPDDIFTAIENGADTFDCVSPTRVARNSAFYTPWGRFNLSGARYKRDFTPLVEGCPCYACENFSRAYIHHLYKAKELLSHTLISIHNEHFTVSLVESARQAIEDGTFFDLKDKVLSSYYAGTPDPQGKPATA

SEQ ID NO: 55716 - protein, 430 aa, unidentified
  source 1..430: note = Glutamicibacter creatinolyticus
  REGION 1..430: note = tr|A0A5B7WPX0|A0A5B7WPX0_9MICC Queuine tRNA-ribosyltransferase OS=Glutamicibacter creatinolyticus; OX = 162496 GN=tgt PE=3 SV=1
MPETTFDPAAAHPQQAEFSFQVGTRLTDGEGNTLPGRTGTITTPHGQIKTPAFIAVGTKATVKALTPVQVQELGAQAVLANAYHLYLQPGADILDAAGGLGSFMGWQGPTFTDSGGFQVMSLGSGFKKVIDMKSVDQSGPDDAVAPGKERMANVDEDGVWFKSHLDGTMHRFSPEISMGVQHQIGADIMFAFDELTTLQNSRGYQVESLERTRRWAERCIAEHFRLTDERSTKPYQALFGVIQGAQYEDLRRKACRDLGAMAFDGFGIGGALEKENLGTIVGWCAQELPEDKPRHLLGISEPDDIFTAIENGADTFDCVSPTRVARNSAFYTPHGRFNLSGARYKRDFTPLVDGCTCYACQHFTRAYIHHLYKAKELLSHTLISIHNEHFTVNLVESARQAIEQGTFFEFKDEVMAKYYAGKPDPQGQPA

SEQ ID NO: 55717 - protein, 432 aa, unidentified
  source 1..432: note = Glutamicibacter halophytocola
  REGION 1..432: note = tr|A0A5B8ISC7|A0A5B8ISC7_9MICC Queuine tRNA-ribosyltransferase OS=Glutamicibacter halophytocola; OX = 1933880 GN=tgt PE=3 SV=1
MPEKNFDPSAPHARQEEFGFEVGTRLTAPDGSPMLGRTGVIRTPHGEIKTPAFIAVGTKATVKAVTPAQVEELGAQAVLSNAYHLYLQPGADILDEAGGLGKFMGWHGPTFTDSGGFQVMSLGSGFKKVIDMKSVDQSGPDDAVAPGKERLANVDEDGVWFKSHLDGTKHRFSPEISMGVQHQIGADIMFAFDELTTLQNSRGYQVESLERTRRWAERCIAEHFALTDSREGKEYQALFGVIQGAQYEDLRRKACQDLGAMAFDGFGIGGALEKENLGTIVGWCAEELPEDKPRHLLGISEPDDIFTAIENGADTFDCVSPTRVARNSAFYTPWGRFNLSGARYKRDFTPLVEGCDCYTCQNFTRAYIHHLYKGKELLSHTLISIHNEHFTVGLVESARQALEDGTFFELKDQVLASYYAGKPDPQGQPAAK

SEQ ID NO: 55718 - protein, 432 aa, unidentified
  source 1..432: note = Glutamicibacter mysorens
  REGION 1..432: note = tr|A0A2M9AJE1|A0A2M9AJE1_9MICC Queuine tRNA-ribosyltransferase OS=Glutamicibacter mysorens; OX = 257984 GN=tgt PE=3 SV=1
MPEKNFDPSAPHARQNEFGFEVGTRLTAEDGSPMLGRTGVIRTPHGEIKTPAFIAVGTKATVKAVTPVQVEELGAQAVLSNAYHLYLQPGADILDEAGGLGKFMGWEGPTFTDSGGFQVMSLGSGFKKVIDMKSVDQSGPDDAVAPGKERLANVDEDGVWFKSHLDGTKHRFSPEISMGVQHQIGADIMFAFDELTTLQNSRGYQVESLERTRRWAERCIAEHFALTDSRAGKDYQALFGVIQGAQYEDLRRKACQDLGAMAFDGFGIGGALEKENLGTIVGWCAEELPENKPRHLLGISEPDDIFTAIENGADTFDCVSPTRVARNSAFYTPWGRFNLSGARYKRDFTPLVEGCECYACRNFTRAYIHHLYKSKELLSHTLISIHNEQFTVSLVESARQAIEDGTFFELKDKVLSSYYAGKPDPQGQPVTQ

SEQ ID NO: 55719 - protein, 432 aa, unidentified
  source 1..432: note = Glutamicibacter nicotianae
  REGION 1..432: note = tr|A0A4Y3W4D0|A0A4Y3W4D0_GLUNI Queuine tRNA-ribosyltransferase OS=Glutamicibacter nicotianae; OX = 37929 GN=tgt PE=3 SV=1
MPEKNFDPSAPHARQNEFGFEVGTRLTAEDGSPMLGRTGVIRTPHGEIKTPAFIAVGTKATVKAVTPVQVEELGAQAVLSNAYHLYLQPGADILDEAGGLGKFMGWEGPTFTDSGGFQVMSLGSGFKKVIDMKSVDQSGPDDAVAPGKERLANVDGDGVWFKSHLDGTKHRFSPEISMGVQHQIGADIMFAFDELTTLQNSRGYQVESLERTRRWAERCIAEHFALTDSRAGKDYQALFGVIQGAQYEDLRRKACQDLGAMAFDGFGIGGALEKENLGTIVGWCAEELPENKPRHLLGISEPDDIFTAIENGADTFDCVSPTRVARNSAFYTPWGRFNLSGARYKRDFTPLVEGCECYACRNFTRAYIHHLYKSKELLSHTLISIHNEQFTVSLVESARQAIEDGTFFELKDKVLSSYYAGKPDPQGQPVTQ

SEQ ID NO: 55720 - protein, 435 aa, unidentified
  source 1..435: note = Glutamicibacter soli
  REGION 1..435: note = tr|A0A365YBQ1|A0A365YBQ1_9MICC Queuine tRNA-ribosyltransferase OS=Glutamicibacter soli OX=453836; GN = tgt PE=3 SV=1
MPDMNFDPSAPHPRQQEFGFEVGTRLTAEDGTPMLGRTGVIRTPHGEVKTPAFIAVGTKATVKALTPEHVKQLGAQAVLSNAYHLYLQPGADILDEAGGLGKFMGWDGPTFTDSGGFQVMSLGSGFKKVIDMKSVDQSGPDDAVAPGKERLANVDEDGVWFKSHLDGNRHRFSPEISMGVQHQIGADIMFAFDELTTLQNSRGYQVESLERTRRWAERCIAEHFSLTDSREGKDYQALFGVIQGAQYEDLRRKACRDLGAMAFDGFGIGGALEKENLGTIVGWCAEELPEDKPRHLLGISEPDDIFTAIENGADTFDCVSPTRVARNSAFYTPWGRFNLSGARYKRDFTPLVDGCECYACQNFSRAYIHHLYKAKELLSHTLISIHNEHFTVSLVESARQAIEDGTFFQLKERVLASYYAGAPDPQGQPVAQPAK

SEQ ID NO: 55721 - protein, 430 aa, unidentified
  source 1..430: note = Glutamicibacter sp.
  REGION 1..430: note = tr|A0A2A3XYM0|A0A2A3XYM0_9MICC Queuine tRNA-ribosyltransferase OS=Glutamicibacter sp. BW80; OX = 2024404 GN=tgt PE=3 SV=1
MSEKNFNPSNPHSRQAEFGFEVGTRLTSPEGSPMLGRTGVINTPHGQIKTPAFIAVGTKATVKALTPVQVAELGAQAVLANAYHLYLQPGADILDEAGGLGKFMSWEGPTFTDSGGFQVMSLGSGFKKVIDMKSVDQSGPDDAVAPGKERLANVDDDGVWFKSHLDGSKHRFSPEISMNVQHQIGADIMFAFDELTTLQNSRGYQVESLERTRLWAQRCIAEHFALTDSRAGKDYQALFGVIQGAQYEDLRRKACQDLGAMAFDGFGIGGALEKENLGTIVGWCSEELPENKPRHLLGISEPDDIFTAIENGADTFDCVSPTRVARNSAFYTPHGRFNLSGARYKRDFTPLVDGCSCYTCQNFTRAYIHHLHKSKELLSHTLISIHNEHFTVSLVDSVREAIEDGSFFELKEKVLGEYYNGEPDPQGLRA

SEQ ID NO: 55722 - protein, 430 aa, unidentified
  source 1..430: note = Glutamicibacter sp.
  REGION 1..430: note = tr|A0A2A3Y4T5|A0A2A3Y4T5_9MICC Queuine tRNA-ribosyltransferase OS=Glutamicibacter sp. BW77; OX = 2024402 GN=tgt PE=3 SV=1
MSEKNFNPSTPHSRQAEFGFEVGTRLTSPEGEPMLGRTGVINTPHGQIKTPAFIAVGTKATVKALTPVQVEELGAQAVLANAYHLYLQPGSDILDEAGGLGKFMSWEGPTFTDSGGFQVMSLGSGFKKVIDMKSVDQSGPDDAVAPGKERLANVDDDGVWFKSHLDGSKHRFSPEISMNVQHQIGADIMFAFDELTTLQNSRGYQVESLERTRLWAQRCIAEHFSLTDSRAGKKYQALFGVIQGAQYEDLRRKACQDLGAMAFDGFGIGGALEKENLGTIVGWCSEELPENKPRHLLGISEPDDIFTAIENGADTFDCVSPTRVARNSAFYTPHGRFNLSGARYKRDFSPLVEDCSCYTCQNFTRAYIHHLHKSKELLSHTLISIHNEHFTVSLVDSARNAIEDGSFFELKAKVMSEYYAGNPDPQGLPA

SEQ ID NO: 55723 - protein, 431 aa, unidentified
  source 1..431: note = Glutamicibacter uratoxydans
  REGION 1..431: note = tr|A0A4Y4DRY7|A0A4Y4DRY7_9MICC Queuine tRNA-ribosyltransferase OS=Glutamicibacter uratoxydans; OX = 43667 GN=tgt PE=3 SV=1
MPQKNFDPSNQHPRQEEFGFEVGTRLTAEDGSPMLGRTGVIRTPHGEVKTPAFIAVGTKATVKALTPAQVKELGAQATLSNAYHLYLQPGADILDEAGGLGKFMGWDGPTFTDSGGFQVMSLGSGFKKVIDMKSVDQSGPDDAVAPGKERLANVDEDGVWFKSHLDGTKHRFSPEISMGVQHQIGADIMFAFDELTTLQNSRGYQVESLERTRRWAERCIAEHFSLTDSREGKDYQALFGVIQGAQYEDLRRKACQDLGAMAFDGFGIGGALEKENLGTIVGWCSEELPENKPRHLLGISEPDDIFTAIENGADTFDCVSPTRVARNSAFYTPWGRFNLSGARYKRDFTPLVEGCECYACKNFTRAYIHHLYKAKELLSHTLISIHNEHFTVNLVESARQAIEDGTFFQLKEQVLSSYYAGKPDPQGQPAA

SEQ ID NO: 55724 - protein, 376 aa, unidentified
  source 1..376: note = Glycocaulis alkaliphilus
  REGION 1..376: note = tr|A0A3T0EBP3|A0A3T0EBP3_9RHOB Queuine tRNA-ribosyltransferase OS=Glycocaulis alkaliphilus; OX = 1434191 GN=tgt PE=3 SV=1
MASFPFEIAAVDGQARTGTLKTSRGEIRTPAFMPVGTAATVKALYPDQVRQAGADILLGNTYHLMLRPGAERVKRLGGLHHFMRWDGPILTDSGGFQVWSLAGLRKMSEEGVAFKSHIDGSKHMLTPERSIEIQADLLGADISMQLDECTPFPCERDAAAKSMELSIRWGRRSREAFGGRETQNLFGIVQGSVYPDLRQQSAEALIETGFDGYAVGGLAVGEGFEMMCNVLDVTTPHLPQDRPRYLMGVGRPIDLVEAVARGIDMFDCVMPTRSGRHGQAWSDYGPFNLKNAQYAEDVSPLNEAVNCPASRDYSKAYLHHLVRAGEYLGSMILSWHNVAYYEDLVARMRASIAAGRFEAFRNEFLARWEEGTGKRG

SEQ ID NO: 55725 - protein, 372 aa, unidentified
  source 1..372: note = Glycocaulis sp.
  REGION 1..372: note = tr|A0A550KI83|A0A550KI83_9RHOB Queuine tRNA-ribosyltransferase OS=Glycocaulis sp. ZYF765; OX = 2518983 GN=tgt PE=3 SV=1
MPFPFRLDATEGAARTGALQTPRGDIRTPAFMPVGTAATVKALYPDQVRQAGADIILGNTYHLMLRPGAERVARLGGLHRFMGWDGPILTDSGGFQVWSLSALRKMSEQGVEFKSHIDGSKHMLTPERSIEIQADLLGADISMQFDECTPFPCERDEAARSMELSVRWGARSKAAFGERQSQALFGIVQGSVYEDLRRQSAEALIETGFDGYAVGGLAVGEGFETMCQVLDATTPHLPGDRPRYLMGVGRPIDLVEAVARGIDMFDCVMPTRSGRHGQAWSDFGPFNLKNARYAEDQSPLDESIDCPASRDWSKAYLHHLVRAGEYLGSMILSWHNVAYYEHLMARMRAAIAEGRFEAFRAEFRARWEQGQA

SEQ ID NO: 55726 - protein, 435 aa, Gordonia aichiensis
  REGION 1..435: note = tr|L7KI35|L7KI35_9ACTN Queuine tRNA-ribosyltransferase OS=Gordonia aichiensis NBRC 108223; OX = 1220583 GN=tgt PE=3 SV=1
MTPSDTDIPGTADTNPTGLHLRPDHSYAVGTRLDDSLGRTGVITTPHGDIHTPAFVPVGTKATVKTVLPEAVEALGAQAVLANAYHLYLQPGPEIVDAAGGLGAFMNWSGPTYTDSGGFQVMSLGAGFKKVISMDVTGEQDDEKIAEGRERLSRVDDDGVTFKSHLDGSSHRFTPELSMQIQHQLGADIIFAFDELTTLMNTRGYQEDSLERTRQWAIRCLAEHNRLSVERGHRPQQSLWGVLQGAQYEDLRRKAARDLTELSRRDQDAGGKGFGGFGIGGALEKAKLGTIVGWVNSELPEDKPKHLLGISEPDDIFTAIENGADTFDCVSPTRVARNGAIYSLDGRYNITNARYRSDFRSLDPEITNYTSQYSRAYLHHLFKAKEGLAATLATLHNVAFVVQMVDGARRAIESGDYYAYRDEFLGRYYAGNRDN

SEQ ID NO: 55727 - protein, 419 aa, Gordonia alkanivorans
  REGION 1..419: note = tr|W9DGL9|W9DGL9_9ACTN Queuine tRNA-ribosyltransferase OS=Gordonia alkanivorans CGMCC 6845 OX=1423140 GN=tgt PE=3 SV=1
MSSTGTEVADPAYTVGTTLPGTRGRTGVIQTPHGAIQTPAFVPVGTKATVKTVLPESVSELGAQAVLANAYHLYLQPGPEIIDQAGGLGAFMNWSGPTYTDSGGFQVMSLGAGFKKVIAMEVGNPDDELTANGKERLSRVDDDGVTFKSHLDGSAHRFTPEVSMQIQHQLGADIIFAFDELTSLMNTRVYQKNSLERTRQWAIRCLAEHNRLSVERAHRPQQALWGVIQGAQYEDLRRKASRDLVALSEADREAGGKGFGGYGIGGALEKHNLGRIVGWVNDELPEDAPKHLLGISEPDDIFTAIENGVDTFDCVSPTRVARNGAIYSLDGRYNITNAKYRNDFRQLDPEIENYTSQYSRAYLHHLFKAKEGLGPTLATLHNVSFIVTLVDRARQAIENGTYIEYRDEFLRRYYGSTRA

SEQ ID NO: 55728 - protein, 418 aa, Gordonia alkanivorans
  REGION 1..418: note = tr|F9VW29|F9VW29_9ACTN Queuine tRNA-ribosyltransferase OS=Gordonia alkanivorans NBRC 16433 OX=1027371 GN=tgt PE=3 SV=1
MSSTGTEVADPAYTVGTTLPGTRGRTGVISTPHGAIQTPAFVPVGTKATVKTVLPESVAELGAQAVLANAYHLYLQPGPEIIDQAGGLGAFMNWSGPTYTDSGGFQVMSLGAGFKKVIAMEVSPDDSLIAEGKERLSRVDDDGVTFKSHLDGSSHRFTPEVSMQIQHQLGADIIFAFDELTTLMNTRAYQENSLERTRLWAIRCLAEHNRLSVERAHRPQQALWGVIQGAQYEDLRRKASRDLVALSEADREAGGKGFGGYGIGGALEKHNLGTIVGWVNDELPEDAPKHLLGISEPDDIFTAIENGVDTFDCVSPTRVARNGAIYSLDGRYNITNAKYRNDFRQLDPEIENYTSQYSRAYLHHLFKAKEGLGPTLATLHNVSFIVTLVDRARQAIEDGTYVEYRDEFLRRYYGSTRD

SEQ ID NO: 55729 - protein, 424 aa, Gordonia amarae
  REGION 1..424: note = tr|G7GM87|G7GM87_9ACTN Queuine tRNA-ribosyltransferase OS=Gordonia amarae NBRC 15530; OX = 1075090 GN=tgt PE=3 SV=1
MTHGPSSDTQPAHSDAVDYTVGTSLPGTLGRTGVIHTPHGDIQTPAFVPVGTKATVKTVLPESVAALGAQAVLANAYHLYLQPGPDIIDAAGGLGAFMNWSGPTYTDSGGFQVMSLGAGFKKVISMDATDAPDDDRIAPGKERLSNVDDDGVTFKSHLDGSKHRFTPEVSMQIQHQLGADIIFAFDELTTLMNTRAYQESSLERTRLWAIRCLAEHNRLSVERSHRPQQSLWGVIQGAQYEDLRRKASRDLVALSEADRAAGGKGFGGYGIGGALEKDNLGTIVGWVNSELPQDAPKHLLGISEPDDIFTAIENGVDTFDCVSPTRVARNGAIYSRDGRYNVTNAKYRKDFGPLDADTENYTSQYSRAYLHHLFKAKEGLAATLATLHNVSFIVNLVDGARRAIESGDYLAYRDDFLGRYYANS

SEQ ID NO: 55730 - protein, 419 aa, Gordonia amicalis
  REGION 1..419: note = tr|L7KW36|L7KW36_9ACTN Queuine tRNA-ribosyltransferase OS=Gordonia amicalis NBRC 100051 = JCM 11271 OX=1220574 GN=tgt PE=3 SV=1
MSSTGTEVTDPAYTVGTTLPGTRGRTGVIATAHGEIQTPAFIPVGTKATVKTVLPESVSALGAQAVLANAYHLYLQPGPEIIDQAGGLGAFMNWRGPTYTDSGGFQVMSLGAGFKKVIAMEVSNPDDELTANGKERLSRVDDDGVTFKSHLDGSAHRFTPEVSMQIQHQLGADIIFAFDELTTLMNTRAYQESSLERTRLWALRCLVEHNRLSVERAHRPQQSLWGVIQGAQYEDLRRKASRDLVALSEADRDAGGKGFGGYGIGGALEKHNLGTIVGWVNDELPEDAPKHLLGISEPDDIFTAIENGVDTFDCVSPTRVARNGAIYSLDGRYNVTNAKYRNDFRQLDPEIDNYTSQYSRAYLHHLFKAKEGLGPTLATLHNVSFIVTLVDRARQAIENGTYVEYRDEFLRRYYGSMRD

SEQ ID NO: 55731 - protein, 400 aa, Gordonia araii
  REGION 1..400: note = tr|G7GXJ2|G7GXJ2_9ACTN Queuine tRNA-ribosyltransferase OS=Gordonia araii NBRC 100433; OX = 1073574 GN=tgt PE=3 SV=1
MGRTGVISTPHGDIATPAFIPVGTKATVKTVVPEAVAELGAQAVLANAYHLYLQPGPGIVDAAGGLGRFMNWPGPTYTDSGGFQVMSLGVGFKKVIEMSAGHAPDDEKIADGKERLAAVDDDGVTFKSHIDGTTHRFTPELSMQIQHQLGADIIFAFDELTTLMNTRGYQESSLERTRLWAIRCLAEHNRLSVERGHRPQQSLWAVIQGAQYEDLRRKASRDLAELGARDEAAGGKGFGGFGIGGALEKDNLGTIVGWVNSELPEDKPKHLLGISEPDDIFVAIENGIDTFDCVSPTRVARNGAIYTRHGRVNITNARFRDDFAPLDAELTNYTSQYSRAYLHHLFKAKEGLGPTLATLHNLSFVIEMVDGARRAIEDGCYREYRDDFLGRYYDGAATGG

SEQ ID NO: 55732 - protein, 417 aa, Gordonia bronchialis
  REGION 1..417: note = tr|D0LDC5|D0LDC5_GORB4 Queuine tRNA-ribosyltransferase OS=Gordonia bronchialis (strain ATCC 25592 / DSM 43247 / JCM 3198 / NCTC 10667) OX=526226; GN = tgt PE=3 SV=1
MSSLQTPDQSFAVGTRLPGAKGRTGVITTPHGQIHTPAFVPVGTKATVKTVLPESVAALGAQAVLANAYHLYLQPGPEIIDEAGGLGAFMNWPGPTYTDSGGFQVMSLGAGFKKVISMDPNHTPDDELTANGKERLSRVDDDGVTFKSHLDGSAHRLTPEVSMQIQHQLGADIIFAFDELTTLMNTREYQENSLERTRLWAIRCLAEHNRLTAQRSHRPPQSLWGVIQGAQYEDLRRKASRDLVEMSRRDVEQGGRGFGGYGIGGALTKDDLGTIVGWVNDELPEDAPKHLLGISEPDDIFTAIENGADTFDCVSPTRVARNGAIYSLDGRYNITNARYRKDFRPLDPEIENYTSQYSRAYLHHLFKAKEGLAATLATLHNVSFVVTLVDRARQAIEDGNYAEYRDEFLGRYYAGAS

SEQ ID NO: 55733 - protein, 425 aa, Gordonia effusa
  REGION 1..425: note = tr|H0R4Z6|H0R4Z6_9ACTN Queuine tRNA-ribosyltransferase OS=Gordonia effusa NBRC 100432; OX = 1077974 GN=tgt PE=3 SV=1
MLAVTAPAEQQDGNRPGFTYGTSLPGTLGRTGVISTPHGEIATPAFVPVGTKATVKTVLPEAVASLGAQAVLANAYHLYLQPGYDIIDQAGGLGAFMNWAGPTYTDSGGFQVMSLGAGFKKVISMDVSGQQDDGKIAEGRERLARVDDDGVTFKSHLDGSAHRFTPELSMRIQHGLGADIIFGFDELTTLMNTRGYQENSLERTRLWAIRCLAEHNRLSAERAHRPQQSLWGVIQGAQYEDLRRKAARDLTAMSEQDVADGGKGFGGFGIGGALEKQNLGTIVGWVNSELPQDKPKHLLGISEPDDIFTAIENGADTFDCVSPTRVARNGAIYSLDGRYNITNARFRTDFGSLDPEIENYTSQYSRAYLHHLFKAKEGLAATLATLHNVSFVINMVDGARRAIENGDYFEYRDAFLGRYYAGKTP

SEQ ID NO: 55734 - protein, 415 aa, Gordonia hirsuta
  REGION 1..415: note = tr|L7LES3|L7LES3_9ACTN Queuine tRNA-ribosyltransferase OS=Gordonia hirsuta DSM 44140 = NBRC 16056 OX=1121927 GN=tgt PE=3 SV=1
MTTSEFVARSTLHGTAGRTGIIRTPHGDIATPAFIPVGTKATVKTVLPEAVAALGAQAVLANAYHLYLQPGPEIVDAAGGLGAFMNWPGPTYTDSGGFQVMSLGVGFKKVISMDVEGRQDDSAVAEGKERLADVDDDGVTFKSHLDGSRHRFTPEVSMQIQHQLGADIIFAFDELTTLMNTRGYQESSLERTRQWAIRCLAEHNRLSTARTHRPQQSLWGVVQGAQYEDLRRKATRDLLELSRIDRDAGGKGFGGYGIGGALEKANLGTIVGWVTDELPEDAPRHLLGISEPDDIFTAIENGADTFDCVSPTRVARNGAIYSFDGRYNITNARYKADFSPLDAELDNYSTQYTRAYLHHLFRAKEGLAATLATLHNLSFTVTLVDRARRAIDAGNYFEYRDEFLARYYAGAARRT

SEQ ID NO: 55735 - protein, 423 aa, unidentified
  source 1..423: note = Gordonia iterans
  REGION 1..423: note = tr|A0A2S0KJT7|A0A2S0KJT7_9ACTN Queuine tRNA-ribosyltransferase OS=Gordonia iterans OX=1004901; GN = tgt PE=3 SV=1
MRRVTTSPSEFTPRVRLQGTAGRTGTLSTPHGEIATPAFVPVGTKATVKTVLPESVAALGAQAVLANAYHLYLQPGPEIVDQAGGLGAFMNWPGPTYTDSGGFQVMSLGVGFKKVISMDVPAGGQAVRQDDSAVAPGKERLANVDDDGVTFKSHIDGSRHRFTPEVSMQIQHQLGADIIFAFDELTTLMNTRGYQEESLERTRQWAIRCLAEHNRLSVERSHRPQQALWGVVQGAQYEDLRRKATRDLVELSRIDQENGGKGFGGYGIGGALEKTNLGTIVGWVTDELPEEAPRHLLGISEPDDVFTAIENGADTFDCVSPTRVARNGAIYSFDGRYNITNAKYRNDFRPLDEELDNYSTQYTRAYLHHLFRAKEGLASTLATLHNLSFTITLVDRARRAIEEGNYFEYRDEFLARYYARSAR

SEQ ID NO: 55736 - protein, 424 aa, Gordonia lacunae
  REGION 1..424: note = tr|A0A2C9ZJS3|A0A2C9ZJS3_9ACTN Queuine tRNA-ribosyltransferase OS=Gordonia lacunae OX=417102; GN = tgt PE=3 SV=1
MLDVSSTGTEIADPTYAVGTTLAGTRGRTGTITTPHGPIHTPAFVPVGTKATVKTVLPESVSALGAQAVLANAYHLYLQPGPEIIDAAGGLGAFMNWRGPTYTDSGGFQVMSLGAGFKKVISMEATGTPDDDLTANGKERLSRVDDDGVTFKSHLDGSAHRFTPEVSMQIQHQLGADIIFAFDELTTLMNTREYQVNSLERTRLWAIRCLVEHNRLSVERAHRPQQSLWGVIQGAQYEDLRRKAARDLVALSEADRAAGGKGFGGYGIGGALEKDNLGTIVGWVNDELPEDSPKHLLGISEPDDIFTAIENGVDTFDCVSPTRVARNGAIYSLDGRYNVTNAKYRSDFRSLDPEVENYTSQYSRAYLHHLFKAKEGLGPTLATLHNVSFIVTLVDRAREAIENGTYTEYRDEFLRRYYGAPTRS

SEQ ID NO: 55737 - protein, 428 aa, Gordonia malaquae
  REGION 1..428: note = tr|M3UV49|M3UV49_9ACTN Queuine tRNA-ribosyltransferase OS=Gordonia malaquae NBRC 108250; OX = 1223542 GN=tgt PE=3 SV=1
MVPTVANLEQWFLVTSSEFIRRATLDGTAGRTGTIVTPHGEIQTPAFVPVGTKATVKTVVPEQVAALGAQAVLSNAYHLYLQPGADIVDEAGGLGRFMNWPGPTYTDSGGFQVMSLGVGFKKVISMDAAGPQDDTIIAEGKERLANVDDDGVTFKSHIDGTSHRFTPEVSMQIQHQLGADIIFAFDELTTLMNTRGYQEQSLERTRQWAIRCLAEHNRLSTERSHRPQQALWGVIQGAQYEDLRRKATRDLVELSRIDRDNGGKGFGGYGIGGALEKDNLGTIVGWVTEEMPDDAPRHLLGISEPDDIFTAIENGADTFDCVSPTRVARNGAIYSFDGRYNITNAKFKRDFTPLDAELDNYSTQYTRAYLHHLFKAKEGLASTLATLHNLSFTITLVDRARKAIEDGNYFEYRDEFLGRYYAGTKRNG

SEQ ID NO: 55738 - protein, 418 aa, Gordonia namibiensis
  REGION 1..418: note = tr|K6VVV0|K6VVV0_9ACTN Queuine tRNA-ribosyltransferase OS=Gordonia namibiensis NBRC 108229 OX=1208314 GN=tgt PE=3 SV=1
MSSTGTEVADPAYTVGTTLPGTRGRTGVINTPHGAIQTPAFVPVGTKATVKTVLPESVAELGAQAVLANAYHLYLQPGPEIIDQAGGLGAFMNWSGPTYTDSGGFQVMSLGAGFKKVIAMEVSPDDSLIAEGKERLSRVDDDGVTFKSHLDGSAHRFTPEVSMQIQHQLGADIIFAFDELTTLMNTRAYQENSLERTRLWAIRCLAEHNRLSVERAHRPQQALWGVIQGAQYEDLRRKASRDLVALSEADREAGGKGFGGYGIGGALEKHNLGTIVGWVNDELPEDAPKHLLGISEPDDIFTAIENGVDTFDCVSPTRVARNGAIYSLDGRYNITNAKYRNDFRQLDPEIENYTSQYSRAYLHHLFKAKEGLGPTLATLHNVSFIVTLVDRARQAIENGTYIEYRDEFLRRYYGSTRD

SEQ ID NO: 55739 - protein, 416 aa, Gordonia neofelifaecis
  REGION 1..416: note = tr|F1YPK7|F1YPK7_9ACTN Queuine tRNA-ribosyltransferase OS=Gordonia neofelifaecis NRRL B-59395 OX=644548 GN=tgt PE=3 SV=1
MMASVTTSHFTPRARLDGTAGRTGTISTPHGEIQTPAFVPVGTKATVKTVLPESVAALGAQAVLANAYHLYLQPGPEIVDQAGGLGSFMNWPGPTYTDSGGFQVMSLGAGFKKVISMDLVGEQDDERIAEGKERLANVDDDGVTFKSHLDGSMHRFTPEVSMGIQHQLGADIIFAFDELTTLMNTRGYQESSLERTRQWAIRCLAEHNRLSTERSHRPQQALWGVVQGAQYEDLRRKATRDLVELSRIDRDNGGKGFGGYGIGGALEKANLGTIVGWVTDELPDDAPRHLLGISEPDDVFTAIENGADTFDCVSPTRVARNGAIYSFDGRYNITNAKYRNDFRPLDEELDNYSTQYTRAYLHHLFKAKEGLASTLATLHNLSFTITLVDRARKAIEDGNYFEYRDEFLRRYYAGTR

SEQ ID NO: 55740 - protein, 430 aa, Gordonia otitidis
  REGION 1..430: note = tr|H5TMX3|H5TMX3_9ACTN Queuine tRNA-ribosyltransferase OS=Gordonia otitidis NBRC 100426; OX = 1108044 GN=tgt PE=3 SV=1
MTPPDTADTNSTGLHLRPDHSYSVGTRLDGSLGRTGVITTPHGDIRTPAFVPVGTKATVKTVLPEAVEALGAQAVLANAYHLYLQPGPDIVDAAGGLGAFMNWSGPTYTDSGGFQVMSLGAGFKKVISMDVTGEQDDEKIAEGRERLSRVDDDGVTFKSHLDGSSHRFTPELSMQIQHQLGADIIFAFDELTTLMNTRGYQENSLERTRQWAIRCLAEHNRLSVERGHRPQQSLWGVLQGAQYEDLRRKAARDLTELSRRDQDAGGKGFGGFGIGGALEKANLGTIVGWVNSELPEDKPKHLLGISEPDDIFTAIENGADTFDCVSPTRVARNGAIYSLDGRYNITNARYRNDFRSLDPEITNYTSQYSRAYLHHLFKAKEGLAATLATLHNVAFVVQMVDGARRAIESGDYYAYRDEFLGRYYAGNRDN

SEQ ID NO: 55741 - protein, 419 aa, Gordonia paraffinivorans
  REGION 1..419: note = tr|M3TTL8|M3TTL8_9ACTN Queuine tRNA-ribosyltransferase OS=Gordonia paraffinivorans NBRC 108238 OX=1223543 GN=tgt PE=3 SV=1
MSSTESFVADRPFTVGTTLPGTRGRTGVISTPHGQIRTPAFIPVGTKATVKTVLPESVADLGAQAVLANAYHLYLQPGPEIIDQAGGLGKFMNWHGPTYTDSGGFQVMSLGAGFKKVIAMEVGNPDDTLTANGRERLSRVDDDGVTFKSHLDGSAHRFTPEVSMRIQHQLGADIIFAFDELTTLMNTRAYQENSLERTRLWAIRCLAEHNRLSAERAHRPQQALWGVVQGAQYEDLRRKASRDLVALSEADRAAGGKGFGGYGIGGALEKHNLGTIVGWVNDELPEDAPKHLLGISEPDDIFTAIENGVDTFDCVSPTRVARNGAIYSLDGRYNITNAKYRNDFRPLDPEIENYTSQYSRAYIHHLFKAKEGLAATLATLHNVSFIVQLVDRARQAIEDGNYVEYRDEFLRRYYASKKD

SEQ ID NO: 55742 - protein, 419 aa, Gordonia paraffinivorans; identical to SEQ ID NO: 55741
  REGION 1..419: note = tr|A0A2U1ZEP1|A0A2U1ZEP1_9ACTN Queuine tRNA-ribosyltransferase OS=Gordonia paraffinivorans; OX = 175628 GN=tgt PE=3 SV=1

SEQ ID NO: 55743 - protein, 415 aa, unidentified
  source 1..415: note = Gordonia phthalatica
  REGION 1..415: note = tr|A0A0N9N049|A0A0N9N049_9ACTN Queuine tRNA-ribosyltransferase OS=Gordonia phthalatica OX=1136941; GN = tgt PE=3 SV=1
MAAVTSSLFTPRATLDGTAGRTGTISTPHGEIQTPAFVPVGTKATVKTVLPESVAALGAQAVLANAYHLYLQPGPEIVDEAGGLGRFMNWPGPTYTDSGGFQVMSLGVGFKKVISMEAVGPEDDHKVAEGKERLANVDDDGVTFKSHLDGSKHRFTPEVSMQIQHQLGADIIFAFDELTTLMNTRGYQESSLERTRQWAIRCLAEHNRLSQERAHRPQQALWGVIQGAQYEDLRRKATRDLVELSRIDRENGGKGFGGYGIGGALEKSNLGTIVGWVTDELPDDAPRHLLGISEPDDIFTAIENGADTFDCVSPTRVARNGAIYSFDGRYNITNRKYRNDFRPLDEELDNYSTQYTRAYLHHLFKAKEGLASTLATLHNLSFTVTLVDRARKAIEDGNYFDYRDDFLARYYAGSR

SEQ ID NO: 55744 - protein, 415 aa, Gordonia polyisoprenivorans
  REGION 1..415: note = tr|H0RIS5|H0RIS5_9ACTN Queuine tRNA-ribosyltransferase OS=Gordonia polyisoprenivorans NBRC 16320 = JCM 10675 OX=1077976 GN=tgt PE=3 SV=1
MSSHDTFRIGTRLPGTLGRTGVITTPHGEIATPAFVPVGTKATVKTVLPESVAALGAQAVLANAYHLYLQPGPEIIDAAGGLGAFMNWRGPTYTDSGGFQVMSLGAGFKKVISMDVTGEQDDHKIAEGRERLSHVDDDGVTFKSHLDGSFHRFTPEVSMQIQHQLGADIIFAFDELTTLMNTRGYQESSLERTRLWAIRCLAEHNRLSVERSHRPQQALWGVLQGAQYEDLRRKAARDLTELSRIDRENGGKGFGGYGIGGALEKDNLGTIVGWVNTELPENAPKHLLGISEPDDIFTAIENGADTFDCVSPTRVARNGAVYTRDGRVNITNARYRKDFGPIDPEITNYTSQYTRAYLHHLFKAKEGLAATLATLHNVSFVIDMVDGARRAIENGDYEAYRDDFLGRYYAGRAAR

SEQ ID NO: 55745 - protein, 422 aa, Gordonia polyisoprenivorans
  REGION 1..422: note = tr|A0A259VQU9|A0A259VQU9_9ACTN Queuine tRNA-ribosyltransferase OS=Gordonia polyisoprenivorans; OX = 84595 GN=tgt PE=3 SV=1
MACEDAPVSSHDTFRIGTRLPGTLGRTGVITTPHGEIATPAFVPVGTKATVKTVLPESVAALGAQAVLANAYHLYLQPGPEIIDAAGGLGAFMNWRGPTYTDSGGFQVMSLGAGFKKVISMDVTGEQDDHKIAEGRERLSHVDDDGVTFKSHLDGSFHRFTPEVSMQIQHQLGADIIFAFDELTTLMNTRNYQENSLERTRLWAIRCLAEHNRLSVERSHRPQQALWGVLQGAQYEDLRRKAARDLTELSRIDRENGGKGFGGYGIGGALEKDNLGTIVGWVNTELPENAPKHLLGISEPDDIFTAIENGADTFDCVSPTRVARNGAVYTRDGRVNITNARYRKDFGPIDPEITNYTSQYTRAYLHHLFKAKEGLAATLATLHNVSFVIDMVDGARRAIENGDYEAYRDDFLGRYYAGRAAR

SEQ ID NO: 55746 - protein, 421 aa, Gordonia rhizosphera
  REGION 1..421: note = tr|K6X0L0|K6X0L0_9ACTN Queuine tRNA-ribosyltransferase OS=Gordonia rhizosphera NBRC 16068; OX = 1108045 GN=tgt PE=3 SV=1
MSSSKTPLTPDHSYTVGTPLPGTMGRTGVIETPHGRIHTPAFVPVGTKATVKTVLPESVAALGAQAVLANAYHLYLQPGPEIIDEAGGLGAFMNWPGPTYTDSGGFQVMSLGAGFKKVISMDVAGEQDDEITADGKERLSAVDDDGVTFKSHLDGSAHRFTPEVSMQIQHQLGADIIFAFDELTTLMNTRTYQENSLERTRLWAIRCLAEHNRLSTERVHRPPQSLWGVIQGAQYEDLRRKAARDLVAMSNRDQAEGGRGFGGYGIGGALTKDDLGTIVGWVNEELPEDTAKHLLGISEPDDIFTAIENGADTFDCVSPTRVARNGAIYSLDGRYNITNARYRKDFRPLDPEIENYTSQYSRAYLHHLFKAKEGLAATLATLHNVSFIVTLVDRARQAIEDGNYVEYRDEFLARYYAGVRA

SEQ ID NO: 55747 - protein, 418 aa, Gordonia rubripertincta
  REGION 1..418: note = tr|A0A222TD32|A0A222TD32_GORRU Queuine tRNA-ribosyltransferase OS=Gordonia rubripertincta; OX = 36822 GN=tgt PE=3 SV=1
MSSTGTEVADPAYTVGTTLPGTRGRTGVINTPHGAIQTPAFVPVGTKATVKTVLPESVSELGAQAVLANAYHLYLQPGPEIVDQAGGLGAFMNWSGPTYTDSGGFQVMSLGAGFKKVIAMEVSPDDSLIAEGKERLSRVDDDGVTFKSHLDGSAHRFTPEVSMQIQHQLGADIIFAFDELTTLMNTRAYQENSLERTRLWAIRCLAEHNRLSVERAHRPQQALWGVIQGAQYEDLRRKASRDLVALSDADRETGGKGFGGYGIGGALEKHNLGTIVGWVNDELPEDAPKHLLGISEPDDIFTAIENGVDTFDCVSPTRVARNGAIYSLDGRYNVTNAKYRNDFRQLDPEIENYTSQYSRAYLHHLFKAKEGLGPTLATLHNVSFIVTLVDRARQAIENGTYIEYRDEFLRRYYGSTRD

SEQ ID NO: 55748 - protein, 440 aa, Gordonia rubripertincta
  REGION 1..440: note = tr|A0A449GSA2|A0A449GSA2_GORRU Queuine tRNA-ribosyltransferase OS=Gordonia rubripertincta; OX = 36822 GN=tgt PE=3 SV=1
MPGPARVAGLGWASATCEDAAVSSTESFVADRPFTVGTTLPGTRGRTGVISTPHGQIRTPAFIPVGTKATVKTVLPESVADLGAQAVLANAYHLYLQPGPEIIDQAGGLGKFMNWHGPTYTDSGGFQVMSLGAGFKKVIAMEVGNPDDTLTANGRERLSRVDDDGVTFKSHLDGSAHRFTPEVSMRIQHQLGADIIFAFDELTTLMNTRAYQENSLERTRLWAIRCLAEHNRLSAERAHRPQQALWGVVQGAQYEDLRRKASRDLVALSEADRAAGGKGFGGYGIGGALEKHNLGTIVGWVNDELPEDAPKHLLGISEPDDIFTAIENGVDTFDCVSPTRVARNGAIYSLDGRYNITNAKYRNDFRPLDPEIENYTSQYSRAYIHHLFKAKEGLAATLATLHNVSFIVQLVDRARQAIEDGNYVEYRDEFLRRYYASKKD

SEQ ID NO: 55749 - protein, 421 aa, Gordonia sihwensis
  REGION 1..421: note = tr|L7LPI7|L7LPI7_9ACTN Queuine tRNA-ribosyltransferase OS=Gordonia sihwensis NBRC 108236; OX = 1223544 GN=tgt PE=3 SV=1
MMACVTTSHFAPRTRLEGTTGRTGTITTPHGEIQTPAFIPVGTKATVKTVLPESVAALGAQAVLANAYHLYLQPGPEIVDQAGGLGRFMNWPGPTYTDSGGFQVMSLGAGFKKVIAMDLVGEQDDHKIADGKERLANVDDDGVTFKSHLDGSMHRFTPEVSMQIQHRLGADIIFAFDELTTLMNTRGYQERSLERTRQWAIRCLAEHNRLSVERSHRPQQALWGVVQGAQYEDLRRKATRDLVELSRIDRENGGKGFGGYGIGGALEKANLGTIVGWVTDELPDDAPRHLLGISEPDDIFTAIENGADTFDCVSPTRVARNGAIYSFDGRYNITNAKYRNDFRSLDEELDNYSTQYTRAYLHHLFKAKEGLASTLATLHNLSFTITLVDRARRAIDEGDYVEYRDEFLRRYYAGTRQAEAR

SEQ ID NO: 55750 - protein, 422 aa, Gordonia soli
  REGION 1..422: note = tr|M0QH64|M0QH64_9ACTN Queuine tRNA-ribosyltransferase OS=Gordonia soli NBRC 108243; OX = 1223545 GN=tgt PE=3 SV=1
MTISSTGLTPDHSFTVGATLPGTRGRTGTISTPHGEIQTPAFVPVGTKATVKTVLPESVAALGAQAVLANAYHLYLQPGPEIIDAAGGLGRFMNWPGPTYTDSGGFQVMSLGAGFKKVIAMEIEKTSPDDSIIAPGKERLALVDDDGVTFKSHLDGSTHRFTPEVSMQIQHQLGADIIFAFDELTTLMNTRAYQETSLERTRLWAIRCLAEHNRLSLERAHRPQQSLWGVIQGAHYEDLRRQASRDLVAASDRDQSEGGRGFGGYGIGGALEKSNLGTIVGWVTDELPDDKPRHLLGISEPDDVFTAIENGADTFDCVSPTRVARNGAIYSLDGRYNVTNARYRDDFRPLDGEVENYTSQYSRAYLHHLFKAKEGLASTLATLHNVAFIVAMVDRAREAIVEGDYEAYRDDFLGRYYGGTRG

SEQ ID NO: 55751 - protein, 419 aa, Gordonia sp.
  REGION 1..419: note = tr|A0A290XJQ7|A0A290XJQ7_9ACTN Queuine tRNA-ribosyltransferase OS=Gordonia sp. 1D OX=1737359; GN = tgt PE=3 SV=1
MSSTGTEVTDPAYTVGTTLPGTRGRTGVIATAHGEIQTPAFIPVGTKATVKTVLPESVAALGAQAVLANAYHLYLQPGPEIIDQAGGLGAFMNWRGPTYTDSGGFQVMSLGAGFKKVIAMEVSNPDDELTANGKERLSRVDDDGVTFKSHLDGSAHRFTPEVSMQIQHQLGADIIFAFDELTTLMNTRAYQESSLERTRLWALRCLVEHNRLSVERAHRPQQSLWGVIQGAQYEDLRRKASRDLVALSEADRDAGGKGFGGYGIGGALEKHNLGTIVGWVNDELPEDAPKHLLGISEPDDIFTAIENGVDTFDCVSPTRVARNGAIYSLDGRYNVTNAKYRNDFRQLDPEIDNYTSQYSRAYLHHLFKAKEGLGPTLATLHNVSFIVTLVDRARQAIENGTYVEYRDEFLRRYYGSMRD

SEQ ID NO: 55752 - protein, 417 aa, Gordonia sp.
  REGION 1..417: note = tr|A0A1A0L7K5|A0A1A0L7K5_9ACTN Queuine tRNA-ribosyltransferase OS=Gordonia sp. 852002-10350_SCH5691597 OX=1834085 GN=tgt PE=3 SV=1
MHLHPEHSYAVGTRLDGSLGRTGVITTPHGEIHTPAFVPVGTKATVKTVLPEAVAALGAQAVLANAYHLYLQPGPEIVDAAGGLGAFMNWSGPTYTDSGGFQVMSLGTGFKKVISMDVTGEQDDEKIAEGRERLSRVDDDGVTFKSHLDGSSHRFTPELSMQIQHQLGADIIFAFDELTTLMNTRGYQENSLERTRQWAIRCLAEHNRLSVERGHRPQQSLWGVLQGAQYEDLRRKAARDLTELSRRDQDSGGKGFGGFGIGGALEKANLGTIVGWVNSELPEDKPKHLLGISEPDDIFTAIENGADTFDCVSPTRVARNGAIYSLDGRYNITNARYRTDFRSLDPEITNYTSQYSRAYLHHLFKAKEGLGATLATLHNVAFVVQMVDGARRAIESGDYYAYREEFLGRYYAGNRND

SEQ ID NO: 55753 - protein, 432 aa, Gordonia sputi
  REGION 1..432: note = tr|H5U5F4|H5U5F4_9ACTN Queuine tRNA-ribosyltransferase OS=Gordonia sputi NBRC 100414; OX = 1089453 GN=tgt PE=3 SV=1
MTPPDIDAPDTNPTGLHLHPEHSYAVGTRLDGSLGRTGVITTPHGEIHTPAFVPVGTKATVKTVLPEAVAALGAQAVLANAYHLYLQPGPEIVDAAGGLGAFMNWSGPTYTDSGGFQVMSLGTGFKKVISMDVTGEQDDEKIAEGRERLSRVDDDGVTFKSHLDGSSHRFTPELSMQIQHQLGADIIFAFDELTTLMNTRGYQENSLERTRQWAIRCLAEHNRLSVERGHRPQQSLWGVLQGAQYEDLRRKAARDLTELSRRDQDSGGKGFGGFGIGGALEKANLGTIVGWVNSELPEDKPKHLLGISEPDDIFTAIENGADTFDCVSPTRVARNGAIYSLDGRYNITNARYRTDFRSLDPEITNYTSQYSRAYLHHLFKAKEGLGATLATLHNVAFVVQMVDGARRAIESGDYYAYREEFLGRYYAGNRND

SEQ ID NO: 55754 - protein, 424 aa, Gordonia terrae
  REGION 1..424: note = tr|A0A2I1R790|A0A2I1R790_9ACTN Queuine tRNA-ribosyltransferase OS=Gordonia terrae OX=2055 GN=tgt; PE = 3 SV=1
MQDVSSTGTELADPTYAIGTTLPGTRGRTGTITTPHGPIHTPAFVPVGTKATVKTVLPESVSALGAQAVLANAYHLYLQPGPEIIDAAGGLGAFMNWRGPTYTDSGGFQVMSLGAGFKKVISMEATGTPDDDLTANGKERLSRVDDDGVTFKSHLDGSTHRFTPEVSMQIQHQLGADIIFAFDELTTLMNTRDYQVNSLERTRLWAIRCLDEHNRLSVERAHRPQQALWGVIQGAQYEDLRRKAARDLVALSEADRGAGGKGFGGYGIGGALEKDNLGTIVGWVNDELPEDSPKHLLGISEPDDIFTAIENGVDTFDCVSPTRVARNGAIYSLDGRYNVTNAKYRSDFRPLDPEVENYTSQYSRAYLHHLFKAKEGLGPTLATLHNVSFIVTLVDRAREAIENGTYTEYRDEFLRRYYGASRDA

SEQ ID NO: 55755 - protein, 424 aa, Gordonia terrae
  REGION 1..424: note = tr|H5UG51|H5UG51_9ACTN Queuine tRNA-ribosyltransferase OS=Gordonia terrae NBRC 100016; OX = 1089454 GN=tgt PE=3 SV=1
MQDVSSTGTELADPTYAIATTLPGTRGRTGTITTPHGPIHTPAFVPVGTKATVKTVLPESVSALGAQAVLANAYHLYLQPGPEIIDAAGGLGAFMNWRGPTYTDSGGFQVMSLGAGFKKVISMEATGTPDDDLTANGKERLSRVDDDGVTFKSHLDGSTHRFTPEVSMQIQHQLGADIIFAFDELTTLMNTRDYQVNSLERTRLWAIRCLDEHNRLSVERAHRPQQALWGVIQGAQYEDLRRKAARDLVALSEADRGAGGKGFGGYGIGGALEKDNLGTIVGWVNDELPEDSPKHLLGISEPDDIFTAIENGVDTFDCVSPTRVARNGAIYSLDGRYNVTNAKYRSDFRPLDPEVENYTSQYSRAYLHHLFKAKEGLGPTLATLHNVSFIVTLVDRAREAIENGTYTEYRDEFLRRYYGASRDA

SEQ ID NO: 55756 - protein, 419 aa, Gordonia westfalica
  REGION 1..419: note = tr|A0A1H2KNK4|A0A1H2KNK4_9ACTN Queuine tRNA-ribosyltransferase OS=Gordonia westfalica OX=158898; GN = tgt PE=3 SV=1
MSSTGTEVADPAYTVGTTLPGTRGRTGVITTPHGPIQTPAFVPVGTKATVKTVLPESVAALGAQAVLANAYHLYLQPGPEIIDRAGGLGAFMNWPGPTYTDSGGFQVMSLGAGFKKVIAMEVGNPDDELTANGKERLSRVDDDGVTFKSHLDGSAHRFTPEVSMQIQHQLGADIIFAFDELTTLMNTRAYQENSLERTRLWAIRCLAEHNRLSIERAHRPQQSLWGVIQGAQYEDLRRKASRDLVALSEADREAGGKGFGGYGIGGALEKHNLGTIVGWVNDELPEDEPKHLLGISEPDDIFTAIENGVDTFDCVSPTRVARNGAIYSFDGRYNITNAKYRNDFGQLDPEIDNYTSQYSRAYLHHLFKAKEGLGPTLATLHNVSFIVTLVDRARQAIENGTYVEYRDEFLRRYYGSTRD

SEQ ID NO: 55757 - protein, 381 aa, Gordonibacter pamelaeae
  REGION 1..381: note = tr|A0A369M413|A0A369M413_9ACTN Queuine tRNA-ribosyltransferase OS=Gordonibacter pamelaeae; OX = 471189 GN=tgt PE=3 SV=1
MALFDCTCEATSGHARALSYETAHGTFQTPMFMPVGTSATVKGVTAGQLHDLNSQVVLANTYHLSLRPGADVVAEAGGVHRFMNYDGPMLTDSGGFQVFSLADTLKLDDDGLTFRSIYDGSKIRWTPESNMAVQEALGADIAMQLDQCTPYPAEHAFVAKAVDLSANWARRCLAAHQRPDQTLFGIVQGGMEMDLRLESIRRLREIEEESLAAGGRRFGGFGIGGYSVGEDHEVMFETLGPVARACPEDRPRYLMGVGNPTTLVRAVREGVDMFDCVLPTRTARMGTAFSSTGRMNMRNAKFTRDFGPLDAACTCPTCQNHSRAYLRHLVKQNEMLGGILLSIHNLHYLIDLMRRAREAVLADAYEEFYQEWMASPAAKDY

SEQ ID NO: 55758 - protein, 381 aa, Gordonibacter sp.
  REGION 1..381: note = tr|A0A369LXH4|A0A369LXH4_9ACTN Queuine tRNA-ribosyltransferase OS=Gordonibacter sp. 28C; OX = 2078569 GN=tgt PE=3 SV=1
MALFDCACQARSGHARALSYETAHGSFHTPMFMPVGTSASVKGVTTGQLRELDAQVVLANTYHLSLRPGADVVAEAGGVHRFMNYDGPMLTDSGGFQVFSLADTLKLDDEGLTFRSIYDGTKVRWTPESNMAIQEQLGADIAMQLDQCTPYPAERSFVAKAVDLSANWARRCLAAHQRPDQTLFGIVQGGMELDLRLESVRRLREVEDESLAAGGRRFGGFGIGGYSVGEEHDVMFETLGQVARALPEDRPRYLMGVGNPTTLVRAVREGVDMFDCVLPTRTARMGTAFSSTGRMNMRNAKFTRDFGPLDAACTCPTCQNHSRAYIRHLVKQNEMLGGILLSVHNLHYLIDLMRRAREAVLADAYEEFYQAWMASPAAKDY

SEQ ID NO: 55759 - protein, 381 aa, Gordonibacter sp.
  REGION 1..381: note = tr|A0A1Y4GMW7|A0A1Y4GMW7_9ACTN Queuine tRNA-ribosyltransferase OS=Gordonibacter sp. An232A; OX = 1965593 GN=tgt PE=3 SV=1
MALFDCVCEAESGHARALAYETAHGTFRTPMFMPVGTSATVKGVTAGQLRDLQSQVVLANTYHLSLRPGADVVEAAGGVHRFMNYDGPMLTDSGGFQVFSLADTVKLDADGLTFRSIYDGAKVRWTPEENMRIQEQLGADIAMQLDQCAPYPAERAFVARAVDLSASWARRCLAAHTRPDQTLFGIVQGGMHLDLRLRSVEALRAIEEESLARGGRRFGGFGIGGYSVGEDHEVMFETLGQVARALPKDRPRYLMGVGNPTTLVRAVREGVDMFDCVLPTRTARMGTAFSSTGRMNLRNAKYTRDFGPLDPACTCPTCQNHSRAYLRHLVKQNEMLGGILLSLHNLHYLLDLMRRAREAVLAGAYEDFYEEWMASPAAKDY

SEQ ID NO: 55760 - protein, 381 aa, unidentified
  source 1..381: note = Gordonibacter urolithinfaciens
  REGION 1..381: note = tr|A0A423UJP0|A0A423UJP0_9ACTN Queuine tRNA-ribosyltransferase OS=Gordonibacter urolithinfaciens; OX = 1335613 GN=tgt PE=3 SV=1
MALFDCACEATSGHARALSYETAHGTFHTPMFMPVGTSATVKGVTAGQLRDLNSQVVLANTYHLSLRPGADVVAEAGGVHRFMNYDGPMLTDSGGFQVFSLADTLKLDDDGLTFRSIYDGSKIRWTPESNMAIQEQLGADIAMQLDQCTPYPAERAFVAKAVDLSANWARRCLAAHVRPDQTLFGIVQGGMELDLRLESIRRLREIEDESLARGARRFGGFGIGGYSVGEDHEVMFETLGPVARACPEDRPRYLMGVGNPTTLVRAVREGVDMFDCVLPTRTARMGTAFSSTGRMNMRNAKFARDFGPLDAACTCPTCQNHSRAYIRHLVKQSEMLGGILLSIHNLHYLIDLMRRAREAVLAGAYEEFYAAWMASPAAKDY

SEQ ID NO: 55761 - protein, 381 aa, unidentified
  source 1..381: note = Gordonibacter urolithinfaciens
  REGION 1..381: note = tr|A0A1Y4FSL8|A0A1Y4FSL8_9ACTN Queuine tRNA-ribosyltransferase OS=Gordonibacter urolithinfaciens; OX = 1335613 GN=tgt PE=3 SV=1
MALFDCACEATSGHARALSYETAHGTFHTPMFMPVGTSATVKGVTAGQLRDLNSQVVLANTYHLSLRPGADVVAEAGGVHRFMNYDGPMLTDSGGFQVFSLADTLKLDDDGLTFRSIYDGSKIRWTPESNMAIQEQLGADIAMQLDQCTPYPAERAFVAKAVDLSANWARRCLAAHVRPDQTLFGIVQGGMELDLRLESIRRLREIEDESLARGARRFGGFGIGGYSVGEDHEVMFETLGPVARACPEDRPRYLMGVGNPTTLVRAVREGVDMFDCVLPTRTARMGTAFSSTGRMNMRNAKFTRDFGPLDAACTCPTCQNHSRAYIRHLVKQNEMLGGILLSIHNLHYLIDLMRRAREAVLADAYEEFYAAWMASPAAKDY

SEQ ID NO: 55762 - protein, 383 aa, unidentified
  source 1..383: note = Gottschalkia acidurici
  REGION 1..383: note = tr|K0AZE3|K0AZE3_GOTA9 Queuine tRNA-ribosyltransferase OS=Gottschalkia acidurici (strain ATCC 7906 / DSM 604 / BCRC 14475 / CIP 104303 / NCIMB 10678 / 9a) OX=1128398GN=tgt PE=3 SV=1
MTVIKYELIKECSQTKARLGKIHTPHGSFDTPMFMPVGTKATVKAMTPEELKDIGSQIILGNTYHLYLRPGHELIEEAGGLHKFMNWDRPILTDSGGFQVFSLGGLRSIKEQGVEFRSHIDGSKHLITPEKSIEIQNSLGSDIMMAFDECVPYPSDWHYTKASLERTTRWAKRCKDANKNPDRQGIFGIIQGGMYKDLREQSAKEIIDLDFPGYAIGGLSVGEPGDVLLEALDYTMPFMPKDKPRYFMGAGSPDYLIELAIRGVDMADCVLPTRIARNGTALTTRGKVVIRNAKYSRDFTPLDPECDCYTCKNYSKAYIRHLFNVDEILGARLTTIHNLYFLLKLMENVRESIKDDRLLEFRREFYEKYGYPKYMNSLDFKTN

SEQ ID NO: 55763 - protein, 382 aa, unidentified
  source 1..382: note = Gottschalkia purinilytica
  REGION 1..382: note = tr|A0A0L0WCP6|A0A0L0WCP6_GOTPU Queuine tRNA-ribosyltransferase OS=Gottschalkia purinilytica; OX = 1503 GN=tgt PE=3 SV=1
MEPVIKYELIKECSQTKARLGKIYTPHGVIETPIFMPVGTRATVKAMTPEELKDIGSQIILGNTYHLYLRPGHDLIAEAGGLHKFMNWDKPILTDSGGFQVFSLGGLRKITEEGVEFKSHIDGSKHFITPEKSIEIQNALGSDIMMAFDECVPYPKDWHYVKESLERTTRWAKRCKDANKNPDRQAVFGIIQGGMYKDLREESARQIIDLDFPGYAVGGLSVGEPGDLLLEVLDHTMPFLPKDKPRYFMGAGSPDYLIELVLRGIDMADCVLPTRIARNGTALTTRGKVVVRNAKYSRDFTALDNECDCYTCKNYSKAYIRHLFNVDEILGARLTTIHNLHFLLKLMENIREAIKEDRLLEFRREFYDKYGYPNYIDKLKGF

SEQ ID NO: 55764 - protein, 372 aa, unidentified
  source 1..372: note = Gottschalkiaceae bacterium
  REGION 1..372: note = tr|A0A521J4X6|A0A521J4X6_9FIRM Queuine tRNA-ribosyltransferase OS=Gottschalkiaceae bacterium; OX = 2527676 GN=tgt PE=3 SV=1
MVFRYELIKEDRDSKARLGKIYTPHGVIETPIFMPVGTRATVKAMTPEELKDLGAQIILGNTYHLYLKPGHELIEEAGGLHKFMNWDRPILTDSGGFQVFSLGDLRKITEEGVEFRSHIDGSKHFISPEKSIQIQNSLGSDIIMAFDECAPYPSDWDYVKKSLERTTRWAKRCKDANANPDTQALFGIIQGGMYRDLREQSAKEIIDLDFPGYAVGGLSVGEPADLMCEMLDYTVPLLPKEKPRYLMGVGSPDYLFEAVIRGIDMADCVLPTRIARNGTVLTSQGKLVIRNATYSRDFTSLDPECDCYTCKNYSRAYIRHLFNVNEILGSRLATIHNLYFLIKLMENIREAIKEDRLLQYREEFYKKYGYIK

SEQ ID NO: 55765 - protein, 380 aa, Gracilibacillus boraciitolerans
  REGION 1..380: note = tr|W4VMS1|W4VMS1_9BACI Queuine tRNA-ribosyltransferase OS=Gracilibacillus boraciitolerans JCM 21714 OX=1298598 GN=tgt PE=3 SV=1
MTAIRYEHIKTCKQTGARLGKVHTPHGSFDTPCIYAGWNAGNRKNDEPEELKEMGANIILSNTYHLWLRPGEEIVKEAGGLHPFMNWDGAILTDSGGYQVFSLSDLRKIEEEGVHFRNHLNGEKLFLSPEKAIYIQNALGSDIMMALDECPPFPAEHDYMKKSVERTSRWAERCLNAHRQTDTQGLFGIIQGGGEYEDLRRLSAQDLTSMDFPGYAIGGLSVGESKDIMNRVLEFTTPLLPANKPRYLMGVGSPDSLIDGAIRGIDMFDCVLPTRIARNGTCMTSEGRLVVRNAKFARDFSPIDPNCDCHTCKNYSRAYIRHLVKANETFGFRLTTYHNLYFLLNLMKQVREAIMQDRLGDFKEVFFEQYGFNKPNAKNF

SEQ ID NO: 55766 - protein, 379 aa, Gracilibacillus dipsosauri
  REGION 1..379: note = tr|A0A317KYL3|A0A317KYL3_9BACI Queuine tRNA-ribosyltransferase OS=Gracilibacillus dipsosauri; OX = 178340 GN=tgt PE=3 SV=1
MSAITYEHIKTCKQTGARLGRVHTPHGSFDTPAFMPVGTLATVKTMSPEELKEMGANIILSNTYHLWLRPGHDIVKEAGGLHSFMNWNGAILTDSGGFQVFSLSDLRKIEEEGVHFRNHLNGEKLFLSPEKAMQIQNALGSDIMMAFDECPPYPAEHDYMKKSVERTSRWAERCLEAHERKDVQGLFGIVQGGEYEDLRRLSARDLTSLDFPGYAIGGLSVGEPKDVMNRVLEFTTPLLPSSKPRYLMGVGSPDSLIDGAIRGIDMFDCVLPTRIARNGTCMTSEGRLVVRNAKYARDFNPIDPNCDCHTCQNYTRAYIRHLVKANETFGFRLTTYHNLYFLLKLMEQVREAIKQDRLGDFREEFFEQYGFNKPNAKNF

SEQ ID NO: 55767 - protein, 379 aa, Gracilibacillus halophilus
  REGION 1..379: note = tr|N4WRU3|N4WRU3_9BACI Queuine tRNA-ribosyltransferase OS=Gracilibacillus halophilus YIM-C55.5 OX=1308866 GN=tgt PE=3 SV=1
MAAITYEHIKTCKQTGARLGKVHTPHGSFDTPSFMPVGTLATVKTMSPEELQEMQANIILSNTYHLWLRPGEDIVKEAGGLHQFMNWDGAILTDSGGFQVFSLSDLRDIVEEGVHFRNHISGAKLFLSPEKAMQIQNDLGADIMMAFDECPPYPASYEYMKKSVERTSRWAERCLEAHQRKNDQGLFGIIQGGEYEDLRKLSAQDLTSMDFPGYAIGGLSVGEPKDVMNRVLEFTTPLLPADKPRYLMGVGSPDSLVDGAIRGVDMFDCVLPTRIARNGTCMTSQGRLVVRNAKFARDFSPLDPECDCYTCRNYTRAYIRHLVKNNETFGMRLTTYHNLYFLLELMGQVREAIQQDRLGDFREAFFEQYGFNQPNAKNF

SEQ ID NO: 55768 - protein, 379 aa, Gracilibacillus kekensis
  REGION 1..379: note = tr|A0A1M7NYY1|A0A1M7NYY1_9BACI Queuine tRNA-ribosyltransferase OS=Gracilibacillus kekensis; OX = 1027249 GN=tgt PE=3 SV=1
MTAIRYEHIKTCKQTGARLGKVHTPHGTFDTPAFMPVGTLATVKTMSPEELKEMGANMILSNTYHLWLRPGEDIVKEAGGLHKFMNWDGAILTDSGGFQVFSLSDLRKIEEEGVHFRNHLSGEKLFLSPEKAMNIQNALGSDIMMAFDECPPYPAEHDYMKKSVERTSRWAERCLEAHDRKDVQGLFGIVQGGEYEDLRRLSAQDLTSMDFPGYAIGGLSVGEPKDVMNRVLEFTTPWLPTDKPRYLMGVGSPDSLIDGAIRGIDMFDCVLPTRIARNGTCMTSEGRLVVRNAKFARDFSPLDPNCDCHVCQNYTRAYIRHLVKANETFGFRLTTYHNLYFLLKLMEQVREAIMQDRLGDFKEAFFEQYGFNKPNAKNF

SEQ ID NO: 55769 - protein, 379 aa, Gracilibacillus orientalis
  REGION 1..379: note = tr|A0A1I4MPX8|A0A1I4MPX8_9BACI Queuine tRNA-ribosyltransferase OS=Gracilibacillus orientalis; OX = 334253 GN=tgt PE=3 SV=1
MTAIRYEHIKTCKQTGARLGKVHTPHGSFDTPAFMPVGTLATVKTMSPEELKEMGANMILSNTYHLWLRPGEDIVKEAGGLHQFMNWDGAILTDSGGFQVFSLSDLRNIEEEGVHFRNHISGDKLFLSPEKAMRIQNDLGSDIMMAFDECPPYPAEHDYMKKSVERTSRWAERCLEAHERKDVQGLFGIVQGGEYEDLRRLSAQDLTSLDFPGYAIGGLSVGEPKDVMNRVLEFTTPLLPSDKPRYLMGVGSPDSLIDGAIRGVDMFDCVLPTRIARNGTCMTSEGRLVVRNAKFARDFSPLDPNCDCHVCKNYTRAYIRHLVKSSETFGFRLTTYHNLYFLLKLMEQVRDAIKQDRLGDFKEEFFEQYGFNKPNAKNF

SEQ ID NO: 55770 - protein, 381 aa, Gracilibacillus ureilyticus
  REGION 1..381: note = tr|A0A1H9RN91|A0A1H9RN91_9BACI Queuine tRNA-ribosyltransferase OS=Gracilibacillus ureilyticus; OX = 531814 GN=tgt PE=3 SV=1
MTMTAITYEHIKTCKQTGARLGKVHTPHGSFDTPAFMPVGTLATVKTMSPEELKQMGANMILSNTYHLWLRPGHDIVKEAGGLHKFMNWDGAILTDSGGFQVFSLSDLRKIEEEGVHFRNHLNGEKLFLSPEKAMEIQNALGSDIMMAFDECPPYPAEYEYMKKSVERTSRWAERCLEAHGRKEDQGLFGIVQGGEYEELRKLSASDLTSLDFPGYAIGGLSVGEPKDVMNRVLEFTTPLLPADKPRYLMGVGSPDSLIDGAIRGVDMFDCVLPTRIARNGTCMTSEGRLVVRNAKYARDFTPLDPNCDCHVCKNYTRAYIRHLVKANETFGFRLTTYHNLYFLLKLMEQVREAIMQDRLGDFREEFFEQYGFNKPNAKNF

SEQ ID NO: 55771 - protein, 377 aa, Gracilibacter sp.
  REGION 1..377: note = tr|A0A101W5R5|A0A101W5R5_9FIRM Queuine tRNA-ribosyltransferase OS=Gracilibacter sp. BRH_c7a; OX = 1734398 GN=tgt PE=3 SV=1
MWKVLAAVYMEILKKDSQTKARLGKVHTPHGIIDTPVFMPVGTQATVKTMSPEELKTIGAKIILSNTYHLFLRPGHELIKKAGGLHKFMNWDGAILTDSGGFQVFSLGDLRKITEEGVEFRSHIDGSKQFLNPEKAIEVQMALGSDIVMAFDECIPYPCTYEYARKSTDLTTRWLERCKKALVTTDKQSLFGIVQGGMFKDLRKKSAQDITQLDLPGYAIGGLSVGEPKDMMYEVLEETVPLLPENKPRYLMGVGSPDALIEGAMRGIDMFDCVLPTRIARNGTALTRYGKVVIRNAEYAMDLSQLDPTCSCYTCTNYSRAYLRHLLKADEILGLRLMTIHNLHFLLNLMEEIRQAIREDRLIQYKKDFFSDYGYEK

SEQ ID NO: 55772 - protein, 375 aa, unidentified
  source 1..375: note = Gracilimonas mengyeensis
  REGION 1..375: note = tr|A0A521CBI5|A0A521CBI5_9BACT Queuine tRNA-ribosyltransferase OS=Gracilimonas mengyeensis; OX = 1302730 GN=tgt PE=3 SV=1
MYTLKSTASTTKARLGQLETAHGVIETPIFMPVGTLGTVKGVSQDILKERVKAQIILGNTYHLYLRPGCDIIREAGGLHQFMNWDRPILTDSGGYQVFSLSDNRELDEEGAHFKSHIDGSSHSFTPENVVETQRILGSDIMMLLDECPPYPSSHEYAKNSMELTHRWAKRGRKAFLETEPLYGHKQAQFGIVQGGTYKDLRIESAKFMADQDFEGIAIGGLSVGEPTELLYEFTDLNTDYLPKDKARYLMGVGTPANLLHGVARGVDMFDCVMPTRNARNGSIFTRHGKVNIRNAQWKEHHELLDPDFPSDLCSKYTMAYVHHLIRNNEIFGLVLASIHNLTFYLWLMDEVRRRIADDTFGDWYEGMAEKLDEKL

SEQ ID NO: 55773 - protein, 375 aa, Gracilimonas sp.
  REGION 1..375: note = tr|A0A316TSD7|A0A316TSD7_9BACT Queuine tRNA-ribosyltransferase OS=Gracilimonas sp. 8A47; OX = 2079485 GN=tgt PE=3 SV=1
MYTLRKKAAQTKARLGTLQTDHGEIQTPIFMPVGTLGSVKAVSQDDLVNKIKAQIILGNTYHLYLRPGNEIMQAAGGLHGFMGWDKPILTDSGGYQIFSLSDIRDLKEKGATFQSHLDGSKHLFTPENVVDTQRILGSDIMMILDECPPWPAEYDYVKESMGLTHRWAKRGREHFLKTDPIYGHKQHQFGIVQGGTYKDLRKESSEFMASLDFEGLAIGGLSVGEPTDIMYEITDFNTDHLPEDKPRYLMGVGTPANLIQCVALGIDMFDCVMPTRNARNGTIFTRNGRVNVRNAKWKHHHKLLDPDFPSDLCRRYNMSYIHHLIKSDEILGLELTSLHNLTFYLWLMEQIREQIKNDTFQEWYPRMMEQVEQRI

SEQ ID NO: 55774 - protein, 376 aa, unidentified
  source 1..376: note = Gramella flava
  REGION 1..376: note = tr|A0A1L7I1W8|A0A1L7I1W8_9FLAO Queuine tRNA-ribosyltransferase OS=Gramella flava JLT2011; OX = 1229726 GN=tgt PE=3 SV=1
MKFELKGKDTGSKARAGKITTDHGVIETPIFMPVGTVASVKGVHQTELKEDINPDIILGNTYHLYLRPQTNILKKAGGLHKFMNWDRNILTDSGGYQVYSLSARRKIKEEGVKFKSHIDGSYHTFTPENVMEIQRAIGADIIMAFDECTPYPCDYHYAKRSMHMTHRWLDRCMTHLKKTPELYGYSQTLFPIVQGSTYKDLRMESAEYIANAGAEGNAIGGLSVGEPAEEMYAMTEVVTNILPEDKPRYLMGVGTPINILENIALGVDMFDCVMPTRNGRNGMLFTAHGTINIKNKKWEDDFSPLDEEGTSFVDTMYSKAYVRHLFSVNEMLGRQIASIHNLAFYLWLVREARKHILAGDFTPWKDKMVKQMDKRL

SEQ ID NO: 55775 - protein, 376 aa, unidentified
  source 1..376: note = Gramella forsetii
  REGION 1..376: note = tr|A0LYY4|A0LYY4_GRAFK Queuine tRNA-ribosyltransferase OS=Gramella forsetii (strain KT0803) OX=411154 GN=tgt PE=3 SV=1
MDFELLSTDAGSKARAGKITTDHGVIETPIFMPVGTVASVKGIHQRELKEDINPDIILGNTYHLYLRPQTDILRKAGGLHKFMNWDRNILTDSGGYQVYSLSARRKIKEEGVKFKSHIDGSYHTFTPENVMEIQRTIGADIIMAFDECTPYPCDYNYAKRSMHMTHRWLDRCINHLEKTPEIYDYKQTFFPIVQGSTYKDLRKQSAEYIANAGAEGNAIGGLSVGEPAEEMYAMTEVVTEILPEDKPRYLMGVGTPINILENIALGIDMFDCVMPTRNGRNGMLFTAHGTINIKNKKWEDDFSPIDPEGVSFVDSEYSKAYVRHLFSVNEMLGRQIASIHNLSFYLWLVREARKHILAGDFTPWKDKMVKQMDKRL

SEQ ID NO: 55776 - protein, 376 aa, Gramella gaetbulicola
  REGION 1..376: note = tr|A0A2T6AJQ9|A0A2T6AJQ9_9FLAO Queuine tRNA-ribosyltransferase OS=Gramella gaetbulicola OX=703340; GN = tgt PE=3 SV=1
MKFELLTTDAGSKARAGKITTDHGVIETPIFMPVGTVASVKGVHQSELKEDINPDIILGNTYHLYLRPQTEILKKAGGLHKFMNWDRNILTDSGGYQVYSLSARRKIKEEGVKFKSHIDGSYHTFTPENVMEIQRAIGADIIMAFDECTPYPCDYNYAKRSMHMTHRWLDRCINHLEKTPEIYDYKQTLFPIVQGSTYKDLRRQSAEYIANAGAEGNAIGGLSVGEPAEEMYAMTEVVTEILPEDKPRYLMGVGTPINILENIALGVDMFDCVMPTRNGRNGMLFTSHGTINIKNKKWEADFSPIDPEGVSFVDSMYSKAYVRHLFSVNEMLGRQIASIHNLSFYLWLVREARKHILAGDFPQWKDKMVKQMDKRL

SEQ ID NO: 55777 - protein, 376 aa, unidentified
  source 1..376: note = Gramella jeungdoensis
  REGION 1..376: note = tr|A0A4Y8AU17|A0A4Y8AU17_9FLAO Queuine tRNA-ribosyltransferase OS=Gramella jeungdoensis OX=708091; GN = tgt PE=3 SV=1
MQFELKSKDAQSKARAGIVTTDHGTIETPIFMPVGTVGTVKGVHQTELKNEINPDIILGNTYHLYLRPQTKILEQAGGLHKFMNWDRNILTDSGGYQVYSLSARRKIKEEGVKFKSHIDGSYHTFTPENVMEIQRSIGADIIMAFDECTPYPCDYNYAKRSMHMTHRWLKRCITHLDKTPFKYDYSQTFFPIVQGSTYKDLRKQSAEFIASVGAEGNAIGGLSVGEPAEEMYEMTEVVTAILPEDKPRYLMGVGTPINILENIALGIDMFDCVMPTRNARNGMLFTAHGTINIKNKKWEDDFSVIDEMGITYVDTLYSKAYLRHLFVAKELLGKQIASIHNLGFYLWLVREARKHILAGDFTEWKNQMVKQMDKRL

SEQ ID NO: 55778 - protein, 376 aa, unidentified
  source 1..376: note = Gramella salexigens
  REGION 1..376: note = tr|A0A1L3J1E9|A0A1L3J1E9_9FLAO Queuine tRNA-ribosyltransferase OS=Gramella salexigens OX=1913577; GN = tgt PE=3 SV=1
MDFELLTTDSGSKARAGTITTDHGKIETPIFMPVGTVASVKGVHQKELKEDINPDIILGNTYHLYLRPQTEILKKAGGLHKFMNWDRNILTDSGGYQVYSLSARRKIKEEGVKFKSHIDGSYHTFTPENVMEIQRAIGADIIMAFDECTPYPCDYNYAKRSMHMTHRWLDRCINHLEKTPEMYGYQQTLFPIVQGSTYKDLRRQSAEYIANAGAEGNAIGGLSVGEPAEEMYAMTEVVTEILPEDKPRYLMGVGTPINILENIALGVDMFDCVMPTRNGRNGMLFTSHGTINIKNKKWEADFSPIDEEGVSFVDSQYSKAYVRHLFSVNEMLGRQIASIHNLSFYLWLVREARKHILAGDFTEWKNKMVKQMDKRL

SEQ ID NO: 55779 - protein, 376 aa, Gramella sp.
  REGION 1..376: note = tr|A0A1H1L1U2|A0A1H1L1U2_9FLAO Queuine tRNA-ribosyltransferase OS=Gramella sp. MAR_2010_102; OX = 1250231 GN=tgt PE=3 SV=1
MKFELLTTDPGSKARAGKITTDHGVIETPIFMPVGTVASVKGVHQKELKEDINPDIILGNTYHLYLRPKTEILKKAGGLHKFMNWDRNILTDSGGYQVYSLSARRKIKEEGVKFKSHIDGSYHTFTPENVMEIQRAIGADIIMAFDECTPYPCDYNYAKRSMHMTHRWLDRCINHLEKTPEIYDYKQTFFPIVQGSTYKDLRKQSAEYIANSGAEGNAIGGLSVGEPAEEMYAMTEVVTEILPEDKPRYLMGVGTPINILENIALGIDMFDCVMPTRNGRNGMLFTAHGTINIKNKKWEADFSPIDPEGESFVDSMYSKAYVRHLFSVNEMLGRQIASIHNLSFYLWLVREARKHILAGDFPQWKDKMVKQMDKRL

SEQ ID NO: 55780 - protein, 376 aa, Gramella sp.
  REGION 1..376: note = tr|A0A2R3Z0Y8|A0A2R3Z0Y8_9FLAO Queuine tRNA-ribosyltransferase OS=Gramella sp. SH35 OX=2126553; GN = tgt PE=3 SV=1
MKFDLLGTDPGSKARAGKIETDHGTIETPIFMPVGTVASVKGVHQKELKEDINPDIILGNTYHLYLRPQTDILKKAGGLHTFMNWDRNILTDSGGYQVYSLSARRKIKEEGVKFKSHIDGSYHTFTPENVMEIQRAIGADIIMAFDECTPYPCDYRYAQKSMHMTHRWLDRCMAHLEKTPELYGYQQTLFPIVQGSTYKDLRKQSAEYIANAGAEGNAIGGLSVGEPAEEMYEMTEIVTDILPVDKPRYLMGVGTPINILENIALGVDMFDCVMPTRNGRNGMLFTSQGTINIKNKKWEADFSPIDEEGITFVDTQYSKAYVRHLFSVNEMLGRQIASIHNLGFYLWLVREARKHILAGDFVDWKNKMVRQMDKRL

SEQ ID NO: 55781 - protein, 377 aa, Granulibacter bethesdensis
  REGION 1..377: note = tr|W6I2Y2|W6I2Y2_9PROT Queuine tRNA-ribosyltransferase OS=Granulibacter bethesdensis; OX = 364410 GN=tgt PE=3 SV=1
MLMSLTLSLQAEDGRARAATLHTAHGDVPTPTFMPVGTAATVKAMMMDSVRATGAGIVLGNTYHLMLRPGADRVAALGGLHRFMDWPGPILTDSGGFQVMSLSSLRKLDKDGVTFQSHIDGSRHRLTPESSIGIQHKLDATITMAFDECTKFPATHEEAAASMELSMRWAARCRDAFVPRDGYGLFGIVQGSVYHDLRTQSVTALGDDFHGYAVGGLAVGEGQEAMFATLDHTLPLLPRGKPRYLMGVGTPDDILGAVMRGVDMFDCVMPTRAGRTARAYTSQGVMNMRNARYADDARPIDPACDCPACTRHSRAYLHHLFRAGEMLGPMLLTWHNLNYYQSLMRGLRSAIMEGRLEQHAVTLRAAWAAGDREKQDG

SEQ ID NO: 55782 - protein, 377 aa, Granulibacter bethesdensis
  REGION 1..377: note = sp|Q0BVG4|TGT_GRABC Queuine tRNA-ribosyltransferase; OS = Granulibacter bethesdensis (strain ATCC BAA-1260 / CGDNIH1) OX=391165 GN=tgt PE=3 SV=1
MLMSLTLSLQAEDGRARAATLHTAHGDVPTPTFMPVGTAATVKAMMMDSVRATGAGIVLGNTYHLMLRPGADRVAALGGLHRFMDWPGPILTDSGGFQVMSLSSLRKLDKDGVTFQSHIDGSRHRLTPESSIGIQHKLDATITMAFDECTKFPATHEEAASSMELSMRWAARCRDAFVPRDGYGLFGIVQGSVYNDLRTQSVTALGDDFHGYAVGGLAVGEGQEAMFATLDHTLPLLPRGKPRYLMGVGTPDDILGAVMRGVDMFDCVMPTRAGRTARAYTSQGVMNMRNARYADDGRPIDPACDCPACTRHSRAYLHHLFRAGEMLGPMLLTWHNLNYYQSLMRGLRSAIMEGRLEQHAVTLRAAWAAGDREKQDG

SEQ ID NO: 55783 - protein, 381 aa, Granulicatella adiacens
  REGION 1..381: note = tr|C8NEY3|C8NEY3_9LACT Queuine tRNA-ribosyltransferase OS=Granulicatella adiacens ATCC 49175 OX=638301 GN=tgt PE=3 SV=1
MTEPAVKYRLIKTEKHTGARLGEIITPHGTFPTPMFMPVGTLATVKSMSPEELDEMGANIILSNTYHLWLRPGADIVDEAGKLHNFMNWKKGILTDSGGFQVFSLSDMRRIEEEGVHFRNHLNGSKLFISPEISIDVQNKLGADIIMSFDECPDFHHTHDYVKDSIARTTRWAERGLKAHKSPDSQALFGILQGAGYKDLRIAHAKDMISLDFPGYSIGGLSVGETKQEMNEVLDYLTPLIPSNKPRYLMGVGSPDSLIDGVIRGVDMFDCVLPTRIARNGTCMTSSGRLVVKNAKYERDFRPLDEKCNCYTCRNYTRAYIRHLFKTDETFGLRLTSYHNLYFLLNLMKQVRQAIMDDNLLEFREAFFEEYGFNKENARNF

SEQ ID NO: 55784 - protein, 381 aa, Granulicatella balaenopterae
  REGION 1..381: note = tr|A0A1H9MW46|A0A1H9MW46_9LACT Queuine tRNA-ribosyltransferase OS=Granulicatella balaenopterae; OX = 137733 GN=tgt PE=3 SV=1
MTEPAIKYRLIKTEKHTGARLGEIITPHGTFPTPMFMPVGTLATVKSMAPEELDEMGANIILSNTYHLWLRPGADIVDEAGKLHNFMNWNKGILTDSGGFQVFSLSDMRQIEEEGVHFRNHLNGSKEFLSPEVSIDVQNKLGADIIMSFDECPDFHQPYEYVKDSIARTTRWAERGLKAHKSPETQGLFGILQGAGYKDLRLDHAKDMISLDFPGYSIGGLSVGETKQEMNEVLDYVTPLIPDNKPRYLMGVGSPDALIDGVIRGVDMFDCVLPTRIARNGTCMTSQGRLVVKNAKYERDFGPIDPKCNCYTCRNYSRAYVRHLFKTNETFGLRLTSYHNLYFLINLMKDVRQAIMDDNLLEFREAFFEEYGLNVANPKNF

SEQ ID NO: 55785 - protein, 381 aa, Granulicatella elegans
  REGION 1..381: note = tr|D0BJW5|D0BJW5_9LACT Queuine tRNA-ribosyltransferase OS=Granulicatella elegans ATCC 700633 OX=626369 GN=tgt PE=3 SV=1
MTQSAVTYRLIKTEKHTGARLGEIITPHGTFPTPMFMPVGTLATVKSMSPEELDEMGANIILSNTYHLWLRPGADIVDEAGKLHNFMNWKKGILTDSGGFQVFSLSDMRRIEEEGVHFRNHLNGSKLFLSPEISIDVQNKLGADIIMSFDECPDFHHTHDYVKNSIARTTRWAERGLKAHKSPETQALFGILQGAGYKDLRMDHAKDMISLDFPGYSIGGLSVGETKQEMNEVLDYVTPLIPSHKPRYLMGVGSPDSLIDGVIRGVDMFDCVLPTRIARNGTCMTSAGRLVVKNAKYERDFRPIDEKCNCYTCRNYSRAYIRHLFKADETFGLRLTSYHNLYFLLNLMKQVRQAIMDDNLLEFREAFFEEYGFNKENARNF

SEQ ID NO: 55786 - protein, 381 aa, Granulicatella sp.
  REGION 1..381: note = tr|A0A420YR80|A0A420YR80_9LACT Queuine tRNA-ribosyltransferase OS=Granulicatella sp. OX=2049028; GN = tgt PE=3 SV=1
MTEPAVKYRLIKTEKHTGARLGEIITPHGTFPTPMFMPVGTLATVKSMSPEELDEMGANIILSNTYHLWLRPGADIVDEAGKLHNFMNWKKGILTDSGGFQVFSLSDMRRIEEEGVHFRNHLNGSKLFLSPEISIDVQNKLGADIIMSFDECPDFHHTHDYVKDSIARTTRWAERGLKAHKSPDTQALFGILQGAGYKDLRIAHAKDMISLDFPGYSIGGLSVGETKQEMNEVLDYLTPLIPSNKPRYLMGVGSPDSLIDGVIRGVDMFDCVLPTRIARNGTCMTSSGRLVVKNAKYERDFRPLDEKCNCYTCRNYTRAYIRHLFKTDETFGLRLTSYHNLYFLLNLMKQVRQAIMDDNLLEFREAFFEEYGFNKENARNF

SEQ ID NO: 55787 - protein, 381 aa, Granulicatella sp.
  REGION 1..381: note = tr|A0A4Y9IYV0|A0A4Y9IYV0_9LACT Queuine tRNA-ribosyltransferase OS=Granulicatella sp. WM01; OX = 2558277 GN=tgt PE=3 SV=1
MSEPAIKYRLIKKEKHTGARLGEIITPHGTFPTPMFMPVGTLATVKSIAPEELDIMGANIILSNTYHLWLRPGEDIVEEAGGLHRFMNWNKGILTDSGGFQVFSLSDMRKITEEGVHFRNHLNGSKMFLSPEKAINIQNKLGPDIMMSFDECPPFHETHDYVEKSIHRTTRWAERGLKAHQNPDRQGLFGILQGAGYKDLRLQHAKDMVSLDFPGYSIGGLSVGETKQEMNSVLDYLTNVMPEHKPRYLMGVGSPDALIDGVIRGVDMFDCVLPTRIARNGTCMTSQGRLVVKNAQYERDFRPIDEKCNCYTCRSYTRAYVRHLFKADETFGLRLTSYHNLYFLLNLMKQVRQAILDDDLLAFKEAFFEEYGLNVENPKNF

SEQ ID NO: 55788 - protein, 378 aa, unidentified
  source 1..378: note = Granulicella mallensis
  REGION 1..378: note = tr|G8NU59|G8NU59_GRAMM Queuine tRNA-ribosyltransferase OS=Granulicella mallensis (strain ATCC BAA-1857 / DSM 23137 / MP5ACTX8) OX=682795 GN=tgt; PE = 3 SV=1
MSLKFEVANTTEQGGRRGALSLPHGVVQTPVFMPVGTAATVKAVPQDALETLGGRGAEIILANTYHLYLRPGHELIRSLGGVHKFMSWRRPMLTDSGGFQVFSLAKLRKITEDGVEFRSHLDGSKHFFSPEHSMTVQIALGADIMMVFDECVETPASWERTRDSMALTHAWAARSKAYWEAHRHEVPWHEERGGQHQALFGIVQGGMYADLRRESADRLVEMDLPGYAIGGLAVGEPREVTREMIALTLEHLPKDKPRYVMGVGYPDEIEEYARMGVDMMDCVLPTRAGRHGLLFIREDPNDRRSAVVRLNIKKQDNAQDQRPIDEGCKCSVCQRYTRAYLRHLFASGEPLGATLNSIHNLSFYLETMERVRVDLAGA

SEQ ID NO: 55789 - protein, 373 aa, Granulicella pectinivorans
  REGION 1..373: note = tr|A0A1I6LED3|A0A1I6LED3_9BACT Queuine tRNA-ribosyltransferase OS=Granulicella pectinivorans; OX = 474950 GN=tgt PE=3 SV=1
MDLTFDVLKTSEAGGRRAVLGLPHGDVQTPVFMPVGTVASVKAVPQDVLEVNGANGKGAQIILANTYHLYLRPGHELVRRMGGVHQFMSWRRPMLTDSGGFQVFSLKGLRKISEEGVEFRSHLDGGKHFFSPEHSMGVQIALGADIMMAFDECVETPATWERTRESMGLTHRWAERSKAYFEEHKTEVPWFEARGGRTQSLFGIVQGGMYADLRKESAEKMVEIGFPGYAIGGLAVGEPREVTREMIARTLEHLPKDKPRYVMGVGYPDEIEEYARMGVDMMDCVLPTRAGRHGLLFARVDGRIERLNIKKKEFAEDQGPIDETCACMVCQRYTRAYLRHLYAAQEPLSAVLNSIHNLAFYLDTMERVRGDLA

SEQ ID NO: 55790 - protein, 379 aa, Granulicella rosea
  REGION 1..379: note = tr|A0A239DCI6|A0A239DCI6_9BACT Queuine tRNA-ribosyltransferase OS=Granulicella rosea OX=474952; GN = tgt PE=3 SV=1
MSLNFQLHNTTAPGGRRATLTLPHGPVETPVFMPVGTAATVKAVPQDVMERIGQNGTGARIILANTYHLYLRPGHELIREMGGVHKFMSWDRPMLTDSGGFQVFSLSKLRKISPEGVEFRSHLDGSKHFFSPEHSMKVQIALGADIMMVFDECVEHPATYERTRESLGLTHAWAARSKAYFDEHKHEVPWHEERGGQHQNLFGIVQGGMYADLRKESAERLVEMDFPGYAIGGLAVGEPREVTREMIARTLEWLPKDKPRYVMGVGYPDEIEEYARMGVDMMDCVLPTRAGRHGLVFTRNEDGAIERLNIKRTENARDPRPIDANCTCMVCARYTRAYLRHLFTSGEALSATLLSIHNLAFYLDTMTRVRADLAASPAV

SEQ ID NO: 55791 - protein, 378 aa, unidentified
  source 1..378: note = Granulicella sibirica
  REGION 1..378: note = tr|A0A4Q0T6Q1|A0A4Q0T6Q1_9BACT Queuine tRNA-ribosyltransferase OS=Granulicella sibirica; OX = 2479048 GN=tgt PE=3 SV=1
MSLTFNIQNTTPEGGRRATLNLPHGPVETPVFMPVGTVASVKAVPQDILETNGAQGKGAQIILANTYHLYLRPGHELVRRMGGVHKFMSWNRPMLTDSGGFQVFSLKGLRKITPEGVEFRSHLDGSKHFFSPEHSISVQIALGADIIMAFDECVETPATWERTRESMGLTHAWAARSKDYFEAHKHEVPWHEAKSGATQNLFGIVQGGMYADLRRESAERLVEIGFPGYAIGGLAVGEPREVTREMIARTLEHLPADKPRYVMGVGYPDEIEEYARMGVDMMDCVLPTRAGRHGLLFARNPETGLIERMNIKKKEYAEDQGPIDPACTCQVCARYTRAYLRHLYSAQEPLSAVLNSIHNLAFYLDTMDRVRAACNSGN

SEQ ID NO: 55792 - protein, 370 aa, Granulicella sp.
  REGION 1..370: note = tr|A0A3N1JN78|A0A3N1JN78_9BACT Queuine tRNA-ribosyltransferase OS=Granulicella sp. GAS466; OX = 2485170 GN=tgt PE=3 SV=1
MSILFEIQKTAEGGGRRGVLALPHGAVQTPVFMPVGTAASVKAVEQGLLEELGANEKGAQIILANTYHLYLRPGHELVRRMGGVHRFMSWRRPMLTDSGGFQVFSLSKLRKITPDGVEFRSHLDGSKHFFSPEHSMDVQIALGADIAMVFDECVEHPASYERTRASMGLTHAWARRSKDHFESHKHLVPWHEELGGATQSLFGIVQGGMYADLRRESAERLVELDLPGYAIGGLAVGEPREVTREMIALTLEFLPKDKPRYVMGVGYPDEIEEYAKIGVDMMDCVLPTRAGRHGLLFTSKGRINIKKLEYAEDQGPIDAACRCMVCQRYTRAYLRHLFAAGEALAAVLNSVHNLAFYLDTMERVRGELAG

SEQ ID NO: 55793 - protein, 376 aa, Granulicella sp.; identical to SEQ ID NO: 51065
  REGION 1..376: note = tr|A0A1D2UFK2|A0A1D2UFK2_9BACT Queuine tRNA-ribosyltransferase OS=Granulicella sp. SCN 62-9; OX = 1660100 GN=tgt PE=3 SV=1

SEQ ID NO: 55794 - protein, 374 aa, unidentified
  source 1..374: note = Granulicella tundricola
  REGION 1..374: note = tr|E8X5L2|E8X5L2_GRATM Queuine tRNA-ribosyltransferase OS=Granulicella tundricola (strain ATCC BAA-1859 / DSM 23138 / MP5ACTX9) OX=1198114 GN=tgt; PE = 3 SV=1
MSLEFEVSRTAEGGGRRGRLALPHGVVETPVFMPVGTAATVKAVPQDTLEVLGKDGVGAQIILANTYHLYLRPGHELIRRMGGVHKFMSWTRPMLTDSGGFQVFSLSKLRKITPDGVEFRSHLDGSKHFFSPEHSMAVQIALGADVMMVFDECVEHPATYERTRESMGLTHAWAARSKDYFKAHKAEVPWHEELGGKTQSLFGIVQGGMYADLRRESAERLVEMDLPGYAIGGLAVGEPREVTREMIARTLEWLPKDKPRYVMGVGYPDEIEEYARMGVDMMDCVLPTRAGRHGLVFVRVDGVPVRLNIKKLEFAEDKGPIDPTCGCMVCSRYSRGYLRHLFASGEALAGTLLSVHNLAFYLDTMARVRAGLAG

SEQ ID NO: 55795 - protein, 371 aa, Granulosicoccus antarcticus
  REGION 1..371: note = tr|A0A2Z2P1P5|A0A2Z2P1P5_9GAMM Queuine tRNA-ribosyltransferase OS=Granulosicoccus antarcticus IMCC3135 OX=1192854 GN=tgt PE=3 SV=1
MNFSFDLLGTDGNARRGRLHFDRGTVETPAFMPVGTYGTVKSVTPEEIRSVGAEIILGNTFHLWLRPGTDIIKLHGDLHDFMHWSGPILTDSGGFQVFSLAKLRKIDESGVRFRSPIDGSEVFLSPEESMRIQTDLGSDIVMAFDECTPYPATHDQAATSMELSMRWARRCKDAFAELENPNALFGIVQGGMYEDLRKQSCDALVELDFPGYAVGGLAVGEEKSIRDSVLDTTLPHLPANRPRYLMGVGKPEDIVASVIRGIDMFDCVLPTRNARNDYIYTHKGDLRLRNARFRTDTQPIDSDCSCYTCQNYSRAYLYHLSKCSEILGSRLNTIHNLHYYQQLMQNIRQALDAGQMDQFTREFEIQRATGA

SEQ ID NO: 55796 - protein, 375 aa, unidentified
  source 1..375: note = Grimontella sp.
  REGION 1..375: note = tr|A0A318GDL5|A0A318GDL5_9GAMM Queuine tRNA-ribosyltransferase OS=Grimontella sp. AG753; OX = 2183905 GN=tgt PE=3 SV=1
MKFELDTTDGRARRGRLVFDRGVVETPAFMPVGTYGTVKGMTPEEVEATGAQIILGNTFHLWLRPGQEIMKLHGDLHDFMQWKGPILTDSGGFQVFSLGDIRKITEKGVHFRNPINGEPIFLDPEKSMEIQYDLGSDIVMIFDECTPYPADWDYAKRSMEMSLRWAKRSRDRFDSLENPNALFGIIQGSVYEDLRDISVKGLVEIGFDGYAVGGLAVGEPKADMHRILEHVCPQIPADKPRYLMGVGKPEDLVEGVRRGIDMFDCVMPTRNARNGHLFVTNGVVKIRNAKYKSDTGSLDPECDCYTCRNYSLAYLHHLDRCNEILGARLNTIHNLRYYQRLMAGLRKAIEEGKLESFVTDFYQRQGRDVPPLNVA

SEQ ID NO: 55797 - protein, 375 aa, unidentified
  source 1..375: note = Grimontia celer
  REGION 1..375: note = tr|A0A128ERQ0|A0A128ERQ0_9GAMM Queuine tRNA-ribosyltransferase OS=Grimontia celer OX=1796497; GN = tgt PE=3 SV=1
MKYELIKKEGRARRGRLVFERGTVETPAFMPVGTYGTVKGMTPEEVADTGAQILLGNTFHLWLRPGQEIMRAHGDLHDFMNWQGPILTDSGGFQVFSLGAMRKITEEGVHFRNPVNGDKIFMDAEKSMEIQYDLGSDIVMIFDECTPYPATHEEAKKSMEMSLRWAQRSRNHFDKMGNKNALFGIVQGSVYEDLRDVSVEGLTNIGFDGYAVGGLAVGEPKEDMHRVLEHTCPKLPEDKPRYLMGVGKPEDLVEGVRRGIDMFDCVMPTRNARNGHLFVTGGVIKIRNAKHKSDTTALDPECDCYTCRNYSKAYLHHLDRCNEILGARLNTIHNLRYYQRLMESLRNAIDEGRLETFVKEFYERRGREVPPLKED

SEQ ID NO: 55798 - protein, 375 aa, Grimontia hollisae
  REGION 1..375: note = tr|A0A377HPY7|A0A377HPY7_GRIHO Queuine tRNA-ribosyltransferase OS=Grimontia hollisae OX=673; GN = tgt PE=3 SV=1
MKFELIKKEGRARRGRLVFERGTVETPAFMPVGTYGTVKGMTPEEVADTGAQILLGNTFHLWLRPGQEVMRAHGDLHDFMNWQGPILTDSGGFQVFSLGKMRKITEEGVHFRNPVNGDKIFMDAEKSMEIQYDLGSDIVMIFDECTPYPATHEEAKKSMEMSLRWAQRSRNHFDKLGNKNALFGIVQGSVYEDLRDISVEGLTKIGFDGYAVGGLAVGEPKEDMHRVLEHTCPKLPEDKPRYLMGVGKPEDLVEGVRRGIDMFDCVMPTRNARNGHLFVTGGVIKIRNAKYKNDTTALDPECDCYTCRNYSKAYLHHLDRCNEILGARLNTIHNLRYYQRLMESLRNAIDEGRLETFVKEFYERRGREVPPLKED

SEQ ID NO: 55799 - protein, 375 aa, Grimontia hollisae
  REGION 1..375: note = tr|D0I7R5|D0I7R5_GRIHO Queuine tRNA-ribosyltransferase OS=Grimontia hollisae CIP 101886; OX = 675812 GN=tgt PE=3 SV=1
MKFELIKKEGRARRGRLVFERGTVETPAFMPVGTYGTVKGMTPEEVADTGAQILLGNTFHLWLRPGQEVMRAHGDLHDFMNWQGPILTDSGGFQVFSLGKMRKITEEGVHFRNPVNGDKIFMDAEKSMEIQYDLGSDIVMIFDECTPYPATHEEAKKSMEMSLRWAQRSRSHFDKLGNKNALFGIVQGSVYEDLRDISVEGLTKIGFDGYAVGGLAVGEPKEDMHRVLEHTCPKLPEDKPRYLMGVGKPEDLVEGVRRGIDMFDCVMPTRNARNGHLFVTGGVIKIRNAKYKNDTTALDPECDCYTCRNYSKAYLHHLDRCNEILGARLNTIHNLRYYQRLMESLRNAIDEGRLETFVKEFYERRGREVPPLKED

SEQ ID NO: 55800 - protein, 375 aa, unidentified
  source 1..375: note = Grimontia indica
  REGION 1..375: note = tr|R1IZE2|R1IZE2_9GAMM Queuine tRNA-ribosyltransferase OS=Grimontia indica OX=1056512; GN = tgt PE=3 SV=1
MKYELIKKEGRARRGRLVFERGTVETPAFMPVGTYGTVKGMTPEEVADTGAQILLGNTFHLWLRPGQEVMRAHGDLHDFMNWQGPILTDSGGFQVFSLGAMRKITEEGVHFRNPVNGDKIFMDAEKSMEIQYDLGSDIVMIFDECTPYPATHEEAKKSMEMSLRWAQRSRNHFDKMGNKNALFGIVQGSVYEDLRDVSVEGLTNIGFDGYAVGGLAVGEPKEDMHRVLEHTCPKLPEDKPRYLMGVGKPEDLVEGVRRGIDMFDCVMPTRNARNGHLFVTGGVIKIRNAKHKSDTTALDPECDCYTCRNYSKAYLHHLDRCNEILGARLNTIHNLRYYQRLMESLRNAIDEGRLETFVKEFYERRGREVPPLKED

SEQ ID NO: 55801 - protein, 375 aa, unidentified
  source 1..375: note = Grimontia marina
  REGION 1..375: note = tr|A0A128F4N8|A0A128F4N8_9GAMM Queuine tRNA-ribosyltransferase OS=Grimontia marina OX=646534; GN = tgt PE=3 SV=1
MKYELIKKEGRARRGRLVFERGTVETPAFMPVGTYGTVKGMTPEEVADTGAQILLGNTFHLWLRPGQEIMRAHGDLHDFMNWQGPILTDSGGFQVFSLGAMRKITEEGVHFRNPVNGDKIFMDAEKSMEIQYDLGSDIVMIFDECTPYPATHEEAKKSMEMSLRWAQRSRNHFDKMGNKNALFGIVQGSVYEDLRDVSVEGLTNIGFDGYAVGGLAVGEPKEDMHRVLEHTCPKLPEDKPRYLMGVGKPEDLVEGVRRGIDMFDCVMPTRNARNGHLFVTGGVIKIRNAKHKSDTTALDPECDCYTCCNYSKAYLHHLDRCNEILGARLNTIHNLRYYQRLMESLRNAIDEGRLEAFVKEFYERRGREVPPLKED

SEQ ID NO: 55802 - protein, 375 aa, Grimontia sp.; identical to SEQ ID NO: 55800
  REGION 1..375: note = tr|A0A0F6A322|A0A0F6A322_9GAMM Queuine tRNA-ribosyltransferase OS=Grimontia sp. AD028 OX=1581149; GN = tgt PE=3 SV=1

SEQ ID NO: 55803 - protein, 371 aa, Gulbenkiania indica
  REGION 1..371: note = tr|A0A0K6H4L5|A0A0K6H4L5_9NEIS Queuine tRNA-ribosyltransferase OS=Gulbenkiania indica OX=375574; GN = tgt PE=3 SV=1
MLKFTVHKTSGGARRGTLTLNHGTVETPVFQPVGTYGSVKAMSPLELEDIGAQIILGNTFHLWLRPGLEVIEAFGGLHDFIGWDRPILTDSGGFQVFSLGALNKISEEGVTFQSPVNGDRLFLSPEKSMEIQRTLNSDIVMIFDECTPGQVDHKRAAESMRMSLRWAERSRRAFDDLKNPNALFGIVQGNLYGDLRRESLDGLMDIGFDGIAIGGLSVGEPKPEMYRMLAELKDMLPAEKPHYLMGVGTPEDLVYGVANGVDMFDCVMPTRNARNGWIFTRWGDIKIKNARYKDDKRPLDETCGCYTCRHFSRAYLHHLHRVGEILGARLNTIHNLHYYQDLMRDIRSAIEADRFEDFRLTFAAERARGVN

SEQ ID NO: 55804 - protein, 381 aa, unidentified
  source 1..381: note = Guyparkeria sp.
  REGION 1..381: note = tr|A0A426QPB8|A0A426QPB8_9GAMM Queuine tRNA-ribosyltransferase OS=Guyparkeria sp. SCN-R1; OX = 2341113 GN=tgt PE=3 SV=1
MKFELHECTRAKGDAERLAGPRRGQIRFARGVIDTPAFMPVGTYGTVKAVTPEELIDLGAQIVLGNTFHLMLRPGTDIIRLHGDLHDFMHWERPILTDSGGFQVFSLADMRKITEEGVRFASPVNGDRVMLTPESSMQVQHELGSDIQMIFDECTPYPATPEVAGASMRLSLRWAARSKTAFESLRPEGSDRALFGIVQGGMHEPLRRESAAGLVELGFDGYAVGGLSVGEPLEERNAVLEFTLPELPADRPRYLMGVGKPEDLVESVARGVDMFDCVMPTRNARNGHLFTRYGDVRLKNARYATDIRPLDEDCDCYTCRHYSRAYLKHLHRAREVLGARLCTIHNLHYYQVLMAEMRSAIEGDDFDGFRARFCSDRDRGV

SEQ ID NO: 55805 - protein, 377 aa, unidentified
  source 1..377: note = Gynuella sunshinyii
  REGION 1..377: note = tr|A0A0C5VMZ1|A0A0C5VMZ1_9GAMM Queuine tRNA-ribosyltransferase OS=Gynuella sunshinyii YC6258; OX = 1445510 GN=tgt PE=3 SV=1
MSRECFMKFEVKATVGKARRATLHFPRGKVETPAFMPVGTYGTVKGMLPKDIEEIGAHIILGNTFHLMLRPGTEVIREHGDLHDFNGWQRPILTDSGGFQVFSLGEMRKITEQGVTFQSPVNGARVELSPEISMQVQRDLGSDIVMIFDECTPYPATEKEARESMEMSLRWAKRSKEAHADNPAALFGIIQGGMYENLRMQSMNGLTEIDFDGYAIGGLSVGEPKEEMFKVLDYLPDRMPADKPRYLMGVGTPEDLVEGVRRGVDMFDCVMPTRNARNGHLFTSEGVVKIRNSKHRHDTSSLDPECDCYTCKNFSRAYLHHLDKCKEMLGAQLNTIHNLRYYQTLMAGLRGAIEEGNLSAFVDQFYQKRGANTPPLA

SEQ ID NO: 55806 - protein, 379 aa, unidentified
  source 1..379: note = Haematobacter genomosp.
  REGION 1..379: note = tr|A0A212A6Y7|A0A212A6Y7_9RHOB Queuine tRNA-ribosyltransferase OS=Haematobacter genomosp. 1; OX = 366618 GN=tgt PE=3 SV=1
MSETFGFTVAATDGKARTGVISTPRGEIRTPAFMPVGTAATVKAMMPESVAATGADILLGNTYHLMLRPTAERIDRLGGLHRFMNWDKPILTDSGGFQVMSLTALRKLNEDGVRFKSHIDGSEHWLTPERSMEIQRLLGSDIVMCFDECPALPATEAEVAKSMRLSMRWAQRSRDAFGDRPGHALFGIMQGGVTQELREESAGALKAIGFDGYAIGGLAVGEGQEAMFGVLDYAPGTLPEDKPRYLMGVGKPDDIVGAVVRGVDMMDCVLPSRSGRTGQAWTRRGQVNIKNARHQDDPRPLDEDCTCPACRNYSRAYLHHVFRAQEIISSMLLTWHNLHYYQELMAGLRAAISEGRLSDFVAAFEAQRAEGDIEPLTLT

SEQ ID NO: 55807 - protein, 379 aa, Haematobacter massiliensis
  REGION 1..379: note = tr|A0A086XW18|A0A086XW18_9RHOB Queuine tRNA-ribosyltransferase OS=Haematobacter massiliensis; OX = 195105 GN=tgt PE=3 SV=1
MSETFGFRVAATDGKARTGVISTPRGEIRTPAFMPVGTAATVKAMMPESVAATGADILLGNTYHLMLRPTAERIDRLGGLHRFMNWDKPILTDSGGFQVMSLTALRKLNEEGVRFKSHIDGSEHWLTPERSMEIQRLLGSDIVMCFDECPALPATEAEVAKSMRLSMRWAQRSRDAFGDRPGHALFGIMQGGVTQELREESAEALKAIGFDGYAIGGLAVGEGQAAMFGVLDYAPQTLPEDKPRYLMGVGKPDDIVGAVVRGVDMMDCVLPSRSGRTGQAWTRRGQVNIKNARHQDDPRPLDEDCTCPACRNYSRAYLHHVFRAQEIISSMLLTWHNLHYYQELMAGLRGAISEGRLSDFVAAFEAQRSAGDIEPLTLT

SEQ ID NO: 55808 - protein, 379 aa, Haematobacter missouriensis
  REGION 1..379: note = tr|A0A212APL4|A0A212APL4_9RHOB Queuine tRNA-ribosyltransferase OS=Haematobacter missouriensis; OX = 366616 GN=tgt PE=3 SV=1
MSETFGFTVAATDGKARTGVISTPRGEIRTPAFMPVGTAATVKAMMPESVAATGADILLGNTYHLMLRPTAERIDRLGGLHRFMNWDKPILTDSGGFQVMSLTALRKLNEEGVRFKSHIDGSEHWLTPERSMEIQRLLGSDIVMCFDECPALPATEAEVAKSMHLSMRWAQRSRDAFGDRPGHALFGIMQGGVTQELREESAEALKAIGFDGYAIGGLAVGEGQEAMFGVLDYAPGTLPQDKPRYLMGVGKPDDIVGAVVRGVDMMDCVLPSRSGRTGQAWTRRGQVNIKNARHQDDPRPLDEDCTCPACRNYSRAYLHHVFRAQEIISSMLLTWHNLHYYQELMAGLRAAISAGRLSDFVAAFEAQRAAGDIEPLSLT

SEQ ID NO: 55809 - protein, 381 aa, unidentified
  source 1..381: note = Haematospirillum jordaniae
  REGION 1..381: note = tr|A0A143DD21|A0A143DD21_9PROT Queuine tRNA-ribosyltransferase OS=Haematospirillum jordaniae; OX = 1549855 GN=tgt PE=3 SV=1
MTAFSFSVLKTDGAARLGRIETAHGPVDTPTFMPVGTAGTVKGMLPESVASTGAQMILGNTYHLMLRPGADRVQSLGGLHQMMNWPGPILTDSGGFQVMSLAKLRKMTEDGVTFRSHIDGSSWTLTPEYSTDIQYKLDATVTMAFDECTPWPVDKKTAAHSMRLSMRWAVRSRSAFVPREGYGQFGIVQGSVFPDLRAESMARLREIDFEGYAVGGLAVGEGQELMFQTLDSTVPDMPVGKPRYLMGVGKPSDMVGAVARGIDMFDCVMPTRSGRTAQAFTRRGTVNLRNARHQDDPRPLEENCSCPACRQYTRAYLHHLIRAGEMLGPMLLTWHNIQHYQDIMKDLRSAIGQGTLSQYRTQFEASQALGDIEPLTVEKPE

SEQ ID NO: 55810 - protein, 382 aa, Haemophilus aegyptius
  REGION 1..382: note = tr|A0A3S5ERQ1|A0A3S5ERQ1_HAEAE Queuine tRNA-ribosyltransferase OS=Haemophilus aegyptius OX=197575; GN = tgt PE=3 SV=1
MKYELDKTSGNARRGRLVFERPQGIFSVETPAFMPVGTYGTVKGMTPEEVRATGAEILLGNTFHLWLRPGQEIMRKHGDLHDFMQWHRPILTDSGGFQVFSLGKLRKITEEGVKFQNPINGERIFLSPEKSMEIQYDLGSDIVMIFDECTPYPATFDYAKKSMEMSLRWAKRSRDRFDELGNKNALFGIIQGGVFEELRKVSLEGLVNIGFDGYAVGGLAVGEPKEDMHRILEYICPQIPADKPRYLMGVGKPEDLVEGVRRGIDMFDCVMPTRNARNGHLFVTDGIVKIRNAKYRDDTSPLDPHCDCYTCKNYTKAYLYHLDKCGEILGARLNTIHNLRYYQRLMAEIRQAIEDDRFDDFVVEFYARMGKPVPPLQLADKS

SEQ ID NO: 55811 - protein, 381 aa, Haemophilus ducreyi
  REGION 1..381: note = tr|A0A448KJN3|A0A448KJN3_HAEDC Queuine tRNA-ribosyltransferase OS=Haemophilus ducreyi OX=730; GN = tgt PE=3 SV=1
MKYELKSTSGMARRGRLTFSRPQGECYVETPAFMPVGTYGTVKGMTPEEVKATGAQILLGNTFHLWLRPGQEIMKMHGDLHDFMQWHGPILTDSGGFQVFSLGKLRKIKEEGVTFQNPISGEKIFLSPEKSMEIQYDLGSDIVMIFDECTPYPATFEYAKKSMEMSLRWAKRSRIRFDELANPRALFGIIQGSTYEELRRESVKGLINIGFDGYAVGGLAVGEPKEEMHRILEFTTPLLPQDKPRYLMGVGKPEDLVEGVRRGIDMFDCVMPTRNARNGHLFVSDGVVKIRNAKYKNDTTPLDAECDCYTCKNYTKAYLYHLDKCGEILGASLNTIHNLRYYQRLMVQIRQAIEQDCFDEFVVEFYAKIGKEVPPLHLKSE

SEQ ID NO: 55812 - protein, 382 aa, Haemophilus ducreyi
  REGION 1..382: note = sp|Q7VLQ4|TGT_HAEDU Queuine tRNA-ribosyltransferase; OS = Haemophilus ducreyi (strain 35000HP / ATCC 700724); OX = 233412 GN=tgt PE=3 SV=1
MMKYELKSTSGMARRGRLTFSRPQGECYVETPAFMPVGTYGTVKGMTPEEVKATGAQILLGNTFHLWLRPGQEIMKMHGDLHDFMQWHGPILTDSGGFQVLSLGKLRKIKEEGVTFQNPISGEKIFLSPEKSMEIQYDLGSDIVMIFDECTPYPATLEYAKKSMEMSLRWAKRSRTRFDELANPRALFGIVQGSTYEELRRESVKGLINIGFDGYAVGGLAVGEPKEEMHRILEFTTPLLPQDKPRYLMGVGKPEDLVEGVRRGIDMFDCVMPTRNARNGHLFVSDGVVKIRNAKYKNDTTPLDAECDCYTCKNYTKAYLYHLDKCGEILGARLNTIHNLRYYQRLMAQIRQAIEQDCFDEFVVEFYAKIGKEVPPLHLKSE

SEQ ID NO: 55813 - protein, 379 aa, unidentified
  source 1..379: note = [Haemophilus] felis
  REGION 1..379: note = tr|A0A1T0AWV1|A0A1T0AWV1_9PAST Queuine tRNA-ribosyltransferase OS=[Haemophilus] felis OX=123822; GN = tgt PE=3 SV=1
MKYELDKTSGNARRGRLVFERPQGTFTVETPAFMPVGTYGTVKGMTPEEVRATGAEILLGNTFHLWLRPGQEVMRKHGDLHDFMQWHRPILTDSGGFQVFSLGKLRKITEEGVKFQNPINGERIFLSPEKSMEIQYDLGSDIVMIFDECTPYPATFDYAKKSMEMSLRWAKRSRDRFDELGNKNALFGIIQGGIYEELRKISVEGLVNIGFDGYAVGGLAVGEPKEDMHRILEYVCPQIPADKPRYLMGVGKPEDLVEGVRRGIDMFDCVMPTRNARNGHLFVSNGIVKIRNAKYRDDTSTLDPECDCYTCKNYTKAYLYHLDKCNEILGARLNTIHNLRYYQRLMAHIRQAIEEDRFEAFVQEFYAKIGKPVPPMQKA

SEQ ID NO: 55814 - protein, 376 aa, Haemophilus haemoglobinophilus
  REGION 1..376: note = tr|A0A1V4AZU9|A0A1V4AZU9_9PAST Queuine tRNA-ribosyltransferase OS=Haemophilus haemoglobinophilus; OX = 733 GN=tgt PE=3 SV=1
MKFTLHKTNGVARRGTMTFSRPQGEFSVETPAFMPVGTYGTVKGMTPEEVRATGAEILLGNTFHLWLRPGQEVMRQHGDLHDFMQWHRPILTDSGGFQVFSLGKLRKITEEGVKFQNPINGERIFLSPEKSMEIQYDLGSDIVMIFDECTPYPATFDYAKKSMEMSLRWAKRSRDRFDELGNENALFGIVQGSTFEELRKISVEGLINIGFDGYAVGGLAVGEPKEDMHRILEYVCPQLPADKPRYLMSVGKPEDLVEGVRRGIDMFDCVMPTRNARNGHLFVSNGIVKIRNAKYRNDTTPLDPECDCYTCKNYTKAYLYHLDKCGEILGSRLNTIHNLRYYQRLMAQIRQAIEEDRFDDFVVEFYNKIGKPVPAL

SEQ ID NO: 55815 - protein, 382 aa, Haemophilus haemolyticus
  REGION 1..382: note = tr|A0A502JNZ8|A0A502JNZ8_HAEHA Queuine tRNA-ribosyltransferase OS=Haemophilus haemolyticus OX=726; GN = tgt PE=3 SV=1
MKYELDKTSGNARRGRLVFERPQGTFSVETPAFMPVGTYGTVKGMTPEEVRATGAEILLGNTFHLWLRPGQEVMRKHGDLHDFMQWHRPILTDSGGFQVFSLGKLRKITEEGVKFQNPINGERIFLSPEKSMEIQYDLGSDIVMIFDECTPYPATFDYAKKSMEMSLRWAKRSRDRFDELGNKNALFGIIQGGVFEELRKVSLEGLVNIGFDGYAVGGLAVGEPKEDMHRILEYICSQIPTDKPRYLMGVGKPEDLVEGVRRGIDMFDCVMPTRNARNGHLFVTDGIVKIRNAKYRDDTSPLDPECDCYTCKNYTKAYLYHLDKCGEILGARLNTIHNLRYYQRLMAEIRQAIEEDRFDDFVVEFYARMGKPVPPLQLADKS

SEQ ID NO: 55816 - protein, 382 aa, Haemophilus haemolyticus
  REGION 1..382: note = tr|A0A0M3G954|A0A0M3G954_HAEHA Queuine tRNA-ribosyltransferase OS=Haemophilus haemolyticus OX=726; GN = tgt PE=3 SV=1
MKYELDKTSGNARRGRLVFERPQGTFSVETPAFMPVGTYGTVKGMTPEEVRATGAEILLGNTFHLWLRPGQEVMRKHGDLHDFMQWHRPILTDSGGFQVFSLGKLRKITEEGVKFQNPINGERIFLSPEKSMEIQYDLGSDIVMIFDECTPYPATFDYAKKSMEMSLRWAKRSRDRFDELGNKNALFGIIQGGVFEELRKVSLEGLVNIGFDGYAVGGLAVGEPKEDMHRILEYICPQIPADKPRYLMGVGKPEDLVEGVRRGIDMFDCVMPTRNARNGHLFVTDGIVKIRNAKYRDDTSPLDPECDCYTCKNYTKAYLYHLDKCGEILGARLNTIHNLRYYQRLMAEIRQAIEDDRFDDFVVEFYARMGKPVPPLQLADKS

SEQ ID NO: 55817 - protein, 382 aa, Haemophilus influenzae; identical to SEQ ID NO: 55816
  REGION 1..382: note = sp|P44594|TGT_HAEIN Queuine tRNA-ribosyltransferase; OS = Haemophilus influenzae (strain ATCC 51907 / DSM 11121 / KW20 / Rd) OX=71421 GN=tgt PE=3 SV=1

SEQ ID NO: 55818 - protein, 382 aa, Haemophilus influenzae
  REGION 1..382: note = sp|A5UG47|TGT_HAEIG Queuine tRNA-ribosyltransferase; OS = Haemophilus influenzae (strain PittGG) OX=374931 GN=tgt; PE = 3 SV=1
MKYELDKTSGNARRGRLVFERPQGTFSVETPAFMPVGTYGTVKGMTPEEVRATGAEILLGNTFHLWLRPGQEIMRKHGDLHDFMQWHRPILTDSGGFQVFSLGKLRKITEEGVKFQNPINGERIFLSPEKSMEIQYDLGSDIVMIFDECTPYPATFDYAKKSMEMSLRWAKRSRARFDELGNKNALFGIIQGGVFEELRKVSLEGLVNIGFDGYAVGGLAVGEPKEDMHRILEYICPQIPADKPRYLMGVGKPEDLVEGVRRGIDMFDCVMPTRNARNGHLFVTDGIVKIRNAKYRDDTSPLDPECDCYTCKNYTKAYLYHLDKCGEILGARLNTIHNLRYYQRLMAEIRQAIEDDRFDDFVVEFYARMGKPVPPLQLADKS

SEQ ID NO: 55819 - protein, 382 aa, Haemophilus paracuniculus
  REGION 1..382: note = tr|A0A1T0AR50|A0A1T0AR50_9PAST Queuine tRNA-ribosyltransferase OS=Haemophilus paracuniculus; OX = 734 GN=tgt PE=3 SV=1
MKYELLTQSGNARRGRLTFSRPKGEYTVETPAFMPVGTYGTVKGMTPEEVAQTGAEILLGNTFHLWLRPGQEIMRQHGDLHDFMQWHGPILTDSGGFQVFSLGKLRKIKEEGVTFQNPISGEKIFLSPEKSMEIQYDLGSDIVMIFDECTPYPATFDYAKQSMEMSLRWAKRSRDRFDELQNPNALFGIIQGGVYEELRKVSVEKLVEIGFDGYAVGGLAVGEPKEDMHRILEYVCPQIPADKPRYLMGVGKPEDLVEGVRRGIDMFDCVMPTRNARNGHLFVSNGIVKIRNAKYRNDLSPLDPECDCYTCKNYTKAYLYHLDKCGEILGARLNTIHNLRYYQRLMAQIREAIEQDRFDQFVIEFYQKIGKEVPPLQSEIND

SEQ ID NO: 55820 - protein, 382 aa, Haemophilus parahaemolyticus
  REGION 1..382: note = tr|A0A369ZLE3|A0A369ZLE3_HAEPH Queuine tRNA-ribosyltransferase OS=Haemophilus parahaemolyticus; OX = 735 GN=tgt PE=3 SV=1
MQYELKKTNGNARRGRLTFSRPKGEFHVETPAFMPVGTYGTVKGMTPEEVAATGAQILLGNTFHLWLRPGQEIMKMHGDLHDFMQWHGPILTDSGGFQVFSLGKLRKIKEEGVTFQNPINGEKIFLSPEKSMEIQYDLGSDIVMIFDECTPYPATFDYAKKSMEMSLRWAKRSRDRFDELENPRALFGIVQGGTYEELRKISAEGLVNIGFDGYAVGGLAVGEPKEEMHRILEFTTPLLPADKPRYLMGVGKPEDLVEGVRRGIDMFDCVMPTRNARNGHLFVSDGVVKIRNAKYKSDTSPLDPECDCYTCKNYTKAYLYHLDKCGEILGARLNTIHNLRYYQRLMAQIRQAIDEDRFDDFVVEFYAKIGKEVPPMQKEQAE

SEQ ID NO: 55821 - protein, 382 aa, Haemophilus parahaemolyticus
  REGION 1..382: note = tr|A0A5C1QQD7|A0A5C1QQD7_HAEPH Queuine tRNA-ribosyltransferase OS=Haemophilus parahaemolyticus; OX = 735 GN=tgt PE=3 SV=1
MQYELKKTNGNARRGRLTFSRPKGEFYVETPAFMPVGTYGTVKGMTPEEVAATGAQILLGNTFHLWLRPGQEIMKMHGDLHDFMQWHGPILTDSGGFQVFSLGKLRKIKEEGVTFQNPINGEKIFLSPEKSMEIQYDLGSDIVMIFDECTPYPATFDYAKKSMEMSLRWAKRSRDRFDELENPRALFGIVQGGTYEELRKISAEGLVNIGFDGYAVGGLAVGEPKEEMHRILEFTTPLLPADKPRYLMGVGKPEDLVEGVRRGIDMFDCVMPTRNARNGHLFVSDGVVKIRNAKYKSDTSPLDPECDCYTCKNYTKAYLYHLDKCGEILGARLNTIHNLRYYQRLMAQIRQAIDEDRFDNFVVEFYAKIGKEVPPMQKEQAE

SEQ ID NO: 55822 - protein, 382 aa, Haemophilus parainfluenzae
  REGION 1..382: note = tr|A0A1B8T4L4|A0A1B8T4L4_HAEPA Queuine tRNA-ribosyltransferase OS=Haemophilus parainfluenzae; OX = 729 GN=tgt PE=3 SV=1
MKYELDKTSGSARRGRLVFERPQGTFTVETPAFMPVGTYGTVKGMTPEEVRATGAEILLGNTFHLWLRPGQEVMRKHGDLHDFMQWHRPILTDSGGFQVFSLGKLRKITEEGVKFQNPINGERIFLSPEKSMEIQYDLGSDIVMIFDECTPYPATFDYAKKSMEMSLRWAKRSRDRFDELGNKNALFGIIQGGVFEELRKVSLEGLVDIGFDGYAVGGLAVGEPKEDMHRILEYICPQIPADKPRYLMGVGKPEDLVEGVRRGIDMFDCVMPTRNARNGHLFVTDGIVKIRNAKYRDDTSPLDPECDCYTCKNYTKAYLYHLDKCGEILGARLNTIHNLRYYQRLMAEIRQAIEDDRFNDFVVEFYARMGKPVPPLQLADKS

SEQ ID NO: 55823 - protein, 382 aa, Haemophilus parainfluenzae
  REGION 1..382: note = tr|F0ES62|F0ES62_HAEPA Queuine tRNA-ribosyltransferase OS=Haemophilus parainfluenzae ATCC 33392 OX=888828 GN=tgt PE=3 SV=1
MKYELDKTSGSARRGRLVFERPQGTFSVETPAFMPVGTYGTVKGMTPEEVRATGAEILLGNTFHLWLRPGQEVMRKHGDLHDFMQWHRPILTDSGGFQVFSLGKLRKITEEGVKFQNPINGERIFLSPEKSMEIQYDLGSDIVMIFDECTPYPATFDYAKKSMEMSLRWAKRSRDRFDELGNKNALFGIIQGGVFEELRKVSLEGLVNIGFDGYAVGGLAVGEPKEDMHRILEYICPQIPADKPRYLMGVGKPEDLVEGVRRGIDMFDCVMPTRNARNGHLFVTDGIVKIRNAKYRDDTSPLDPECDCYTCKNYTKAYLYHLDKCGEILGARLNTIHNLRYYQRLMAEIRQAIEDDRFDDFVVEFYARMGKPVPPLQLADKS

SEQ ID NO: 55824 - protein, 379 aa, Haemophilus paraphrohaemolyticus
  REGION 1..379: note = tr|A0A369ZME5|A0A369ZME5_9PAST Queuine tRNA-ribosyltransferase OS=Haemophilus paraphrohaemolyticus OX=736 GN=tgt PE=3 SV=1
MKYELKKTSGNARRGRLTFARPKGEFHVETPAFMPVGTYGTVKGMTPEEVEETGAQILLGNTFHLWLRPGQEIMKMHGDLHDFMQWHGPILTDSGGFQVFSLGKLRKIKEEGVTFQNPINGEKIFLSPEKSIEIQYDLGSDIVMIFDECTPYPATFDYAKKSMEMSLRWAKRSRDRFDELENPRALFGIVQGGTYEELRKISAEGLVNIGFDGYAVGGLAVGEPKEEMHRILEFTTPLLPADKPRYLMGVGKPEDLVEGVRRGIDMFDCVMPTRNARNGHLFVSDGVVKIRNAKYKSDTSPLDPECDCYTCKNYTKAYLYHLDKCGEILGSRLNTIHNLRYYQRLMAHIRQAIDEDRFDDFVVEFYAKIGKDVPPMQKA

SEQ ID NO: 55825 - protein, 379 aa, Haemophilus paraphrohaemolyticus
  REGION 1..379: note = tr|I2NFS9|I2NFS9_9PAST Queuine tRNA-ribosyltransferase OS=Haemophilus paraphrohaemolyticus HK411 OX=1095743 GN=tgt PE=3 SV=1
MQYELKKTNGNARRGRLTFSRPKGEFHVETPAFMPVGTYGTVKGMTPEEVAATGAQILLGNTFHLWLRPGQEIMKMHGDLHDFMQWHGPILTDSGGFQVFSLGKLRKIKEEGVTFQNPINGEKIFLSPEKSMEIQYDLGSDIVMIFDECTPYPATFDYAKKSMEMSLRWAKRSRDRFDELENPRALFGIVQGGTYEELRKISAEGLVNIGFDGYAVGGLAVGEPKEEMHRILEFTTPLLPADKPRYLMGVGKPEDLVEGVRRGIDMFDCVMPTRNARNGHLFVSDGVVKIRNAKYKSDTSPLDPECDCYTCKNYTKAYLYHLDKCGEILGARLNTIHNLRYYQRLMAHIRQAIDEDRFDDFVVEFYAKIGKEVPPMQKA

SEQ ID NO: 55826 - protein, 385 aa, Haemophilus parasuis; identical to SEQ ID NO: 55681
  REGION 1..385: note = sp|B8F3W0|TGT_HAEPS Queuine tRNA-ribosyltransferase; OS = Haemophilus parasuis serovar 5 (strain SH0165); OX = 557723 GN=tgt PE=3 SV=1

SEQ ID NO: 55827 - protein, 385 aa, Haemophilus parasuis
  REGION 1..385: note = tr|A0A084EZL0|A0A084EZL0_HAEPR Queuine tRNA-ribosyltransferase OS=Haemophilus parasuis OX=738; GN = tgt PE=3 SV=1
MKYELKKTNGNARRGRLTFSRPKGEYHVETPAFMPVGTYGTVKGMTPEEVAQTGAQILLGNTFHLWLRPGQEIMRQHGDLHDFMQWHGPILTDSGGFQVFSLGKLRKIKEEGVYFQNPISGEKVFLSPEKSMEIQHDLGSDIVMIFDECTPYPATFDYAKQSMEMSLRWAKRSRDRFDELQNPNALFGIIQGGVYEELRKVSVEKLVEIGFDGYAVGGLAVGEPKEDMHRILEYVCPQIPADKPRYLMGVGKPEDLVEGVRRGIDMFDCVMPTRNARNGHLFVTNGIVKIRNAKYRNDISPLDPECDCYTCKNYTKAYLYHLDKCGEILGARLNTIHNLRYYQRLMAEIRQAIDEDRFDDFVVEFYQRIGKEVPPLQLAKEGENA

SEQ ID NO: 55828 - protein, 382 aa, Haemophilus pittmaniae
  REGION 1..382: note = tr|F9QBE2|F9QBE2_9PAST Queuine tRNA-ribosyltransferase OS=Haemophilus pittmaniae HK 85; OX = 1035188 GN=tgt PE=3 SV=1
MKYELDKTSGSARRGRLVFERPQGTFSVETPAFMPVGTYGTVKGMTPEEVRATGAEILLGNTFHLWLRPGQEVMRKHGDLHDFMQWHRPILTDSGGFQVFSLGKLRKITEEGVKFQNPINGERIFLSPEKSMEIQYDLGSDIVMIFDECTPYPATFDYAKKSMEMSLRWAKRSRDRFDELGNKNALFGIIQGGVFEELRKVSLEGLVNIGFDGYAVGGLAVGEPKEDMHRILEYICPQIPADKPRYLMGVGKPEDLVEGVRRGIDMFDCVMPTRNARNGHLFVTDGIVKIRNAKYRDDTSPLDPECDCYTCKNYTKAYLYHLDKCGEILGARLNTIHNLRYYQRLMAEIRQAIEDDRFDDFVVEFYARIGKPVPPLQLAQES

SEQ ID NO: 55829 - protein, 382 aa, Haemophilus pittmaniae; identical to SEQ ID NO: 55828
  REGION 1..382: note = tr|A0A377J119|A0A377J119_9PAST Queuine tRNA-ribosyltransferase OS=Haemophilus pittmaniae; OX = 249188 GN=tgt PE=3 SV=1

SEQ ID NO: 55830 - protein, 376 aa, unidentified
  source 1..376: note = Haemophilus somnus
  REGION 1..376: note = sp|Q0I4R8|TGT_HAES1 Queuine tRNA-ribosyltransferase; OS = Haemophilus somnus (strain 129Pt) OX=205914 GN=tgt PE=3; SV = 1
MKFTLHKTNGMARRGTMTFNRPQGEFTVETPAFMPVGTYGTVKGMTPEEVRVTGAEILLGNTFHLWLRPGQEIMRQHGDLHDFMQWHRPILTDSGGFQVFSLGKLRKITEEGVKFQNPINGERIFLSPEKSMEIQYDLGSDIVMIFDECTPYPATFDYAKKSMEMSLRWAKRSRERFDELGNKNALFGIVQGSTFEDLRKLSIEGLINIGFDGYAVGGLAVGEPKEDMHRILAYVCPQLPADKPRYLMGVGKPEDLVEGVRRGIDMFDCVMPTRNARNGHLFVSNGIVKIRNAKYRNDTTSLDPECDCYTCKHYTKAYLYHLDKCGEILGARLNTIHNLHYYQRLMAQIRQAIEEDRFEDFVVEFYKKIGKSVPTR

SEQ ID NO: 55831 - protein, 382 aa, Haemophilus sp.
  REGION 1..382: note = tr|A0A1S1FT34|A0A1S1FT34_9PAST Queuine tRNA-ribosyltransferase OS=Haemophilus sp. HMSC61B11; OX = 1608882 GN=tgt PE=3 SV=1
MKYELDKTSGSARRGRLVFERPQGTFSVETPAFMPVGTYGTVKGMTPEEVRATGAEILLGNTFHLWLRPGQEVMRKHGDLHDFMQWHRPILTDSGGFQVFSLGKLRKITEEGVKFQNPINGERIFLSPEKSMEIQYDLGSDIVMIFDECTPYPATFDYAKKSMEMSLRWAKRSRDRFDELGNKNALFGIIQGGVFEELRKVSLEGLVNIGFDGYAVGGLAVGEPKEDMHRILEYICPQIPADKPRYLMGVGKPEDLVEGVRRGIDMFDCVMPTRNARNGHLFVTDGIVKIRNAKYRDDTSPLDPECDCYTCKNYTKAYLYHLDKCGEILGARLNTIHNLRYYQRLMAEIRQAIEDDRFDDFVVEFYARMGKPVPPLQLADNS

SEQ ID NO: 55832 - protein, 382 aa, Haemophilus sp.
  REGION 1..382: note = tr|A0A1F0UD20|A0A1F0UD20_9PAST Queuine tRNA-ribosyltransferase OS=Haemophilus sp. HMSC073C03; OX = 1739452 GN=tgt PE=3 SV=1
MKYELDKTSGNARRGRLVFERPQGTFSVETPAFMPVGTYGTVKGMTPEEVRATGAEILLGNTFHLWLRPGQDVMRKHGDLHDFMQWHRPILTDSGGFQVFSLGKLRKITEDGVKFQNPINGERIFLSPEKSMEIQYDLGSDIVMIFDECTPYPATFDYAKKSMEMSLRWAKRSRDRFDELGNKNALFGIIQGGVFEELRKVSLEGLVNIGFDGYAVGGLAVGEPKEDMHRILEYICPQIPADKPRYLMGVGKPEDLVEGVRRGIDMFDCVMPTRNARNGHLFVTDGIVKIRNAKYRDDTSPLDPECDCYTCKNYTKAYLYHLDKCGEILGARLNTIHNLRYYQRLMAEIRQAIEDDRFDDFVVEFYARMGKPVPPLQLSDKS

SEQ ID NO: 55833 - protein, 379 aa, unidentified
  source 1..379: note = Haemophilus sputorum
  REGION 1..379: note = tr|J5HRU5|J5HRU5_9PAST Queuine tRNA-ribosyltransferase OS=Haemophilus sputorum HK 2154; OX = 1078483 GN=tgt PE=3 SV=1
MKYELKKTNGNARRGRLIFSRPKGEYVVETPAFMPVGTYGTVKGMTPEEVAATGAQILLGNTFHLWLRPGQEVMKMHGDLHDFMQWHGPILTDSGGFQVFSLGKLRKIKEEGVTFQNPISGEKIFLSPEKSMEIQYDLGSDIVMIFDECTPYPATFDYAKKSMEMSLRWAKRSRDRFDELENPRALFGIVQGGTFEELRKVSVEGLVNIGFDGYAVGGLAVGEPKEEMHRILEFTTPLLPQDKPRYLMGVGKPEDLVEGVRRGIDMFDCVMPTRNARNGHLFVSDGVVKIRNAKYKNDTSTLDPECDCYTCKNYTKAYLYHLDKCGEILGARLNTIHNLRYYQRLMAQIRQAIEEDRFNDFVVEFYAKIGKEVPPMQKA

SEQ ID NO: 55834 - protein, 379 aa, unidentified
  source 1..379: note = Haemophilus sputorum
  REGION 1..379: note = tr|A0A369YE70|A0A369YE70_9PAST Queuine tRNA-ribosyltransferase OS=Haemophilus sputorum OX=1078480; GN = tgt PE=3 SV=1
MKYELKKTNGNARRGRLIFSRPKGEYVVETPAFMPVGTYGTVKGMTPEEVAATGAQILLGNTFHLWLRPGQEVMKMHGDLHDFMQWHGPILTDSGGFQVFSLGKLRKIKEEGVTFQNPISGEKIFLSPEKSMEIQYDLGSDIVMIFDECTPYPATFDYAKKSMEMSLRWAKRSRDRFDELENPRALFGIVQGGTFEELRKVSVEGLVNIGFDGYAVGGLAVGEPKEEMHRILEFTTPLLPQDKPRYLMGVGKPEDLVEGVRRGIDMFDCVMPTRNARNGHLFVSDGVVKIRNAKYKNDTSTLDPECDCYTCKNYTKAYLYHLDKCGEILGARLNTIHNLRYYQRLMAQIRQAIEEDRFDDFVVEFYAKIGKEVPPMQKA

SEQ ID NO: 55835 - protein, 375 aa, Hafnia alvei
  REGION 1..375: note = tr|A0A2J9HFV7|A0A2J9HFV7_HAFAL Queuine tRNA-ribosyltransferase OS=Hafnia alvei OX=569 GN=tgt PE=3; SV = 1
MKYELDTTDGRARRGRLIFERGVVETPAFMPVGTYGTVKGMTPEEVKETGAQILLGNTFHLWLRPGQEIMKLHGDLHDFMQWKGPILTDSGGFQVFSLGKMRKIKEEGVHFRHPINGSPIFLSPEKSMEIQYDLGSDIVMIFDECTPYPADWDYAKSSMEMSLRWAKRSRQRFDELGNKNSLFGIIQGGVYEDLRDVSLKGLVDIGFDGYAVGGLAVGEPKEDMHRILEHVCPQIPEDKPRYLMGVGKPEDLVEGVRRGIDMFDCVMPTRNARNGHLFVTNGIVKIRNAQYKDDVTTLDAECDCYTCRNYSRAYLHHLDRCNEILGARLNTIHNLRYYQRLMAGLRQAIEDGKLDEFVADFYGRQGKPVPPVGAE

SEQ ID NO: 55836 - protein, 375 aa, Hafnia alvei
  REGION 1..375: note = tr|A0A1C6YZR0|A0A1C6YZR0_HAFAL Queuine tRNA-ribosyltransferase OS=Hafnia alvei OX=569 GN=tgt PE=3; SV = 1
MKYELDTTDGRARRGRLIFDRGVVETPAFMPVGTYGTVKGMTPEEVKETGAQILLGNTFHLWLRPGQEIMKLHGDLHDFMQWKGPILTDSGGFQVFSLGKMRKIKEEGVHFRHPINGSPIFLSPEKSMEIQYDLGSDIVMIFDECTPYPADWDYAKSSMEMSLRWAKRSRQRFDELGNKNSLFGIIQGGVYEDLRDVSLKGLVDIGFDGYAVGGLAVGEPKEDMHRILEHVCPQIPEDKPRYLMGVGKPEDLVEGVRRGIDMFDCVMPTRNARNGHLFVTNGIVKIRNAQYKDDVTTLDAECDCYTCRNYSRAYLHHLDRCNEILGARLNTIHNLRYYQRLMAGLRQAIEDGKLDEFVADFYGRQGKPVPPVGAK

SEQ ID NO: 55837 - protein, 375 aa, Hafnia paralvei
  REGION 1..375: note = tr|A0A4S1D0R3|A0A4S1D0R3_9GAMM Queuine tRNA-ribosyltransferase OS=Hafnia paralvei OX=546367; GN = tgt PE=3 SV=1
MKYELDTTDGRARRGRLIFDRGVVETPAFMPVGTYGTVKGMTPEEVKETGAQILLGNTFHLWLRPGQEIMKLHGDLHDFMQWKGPILTDSGGFQVFSLGKMRKIKEEGVHFRHPINGSPIFLSPEKSMEIQYDLGSDIVMIFDECTPYPADWDYAKSSMEMSLRWAKRSRQRFDELGNKNALFGIIQGGVYEDLRDVSLKGLVEIGFDGYAVGGLAVGEPKEDMHRILEHVCPQIPEDKPRYLMGVGKPEDLVEGVRRGIDMFDCVMPTRNARNGHLFVTNGIVKIRNAQYKDDTTTLDAECDCYTCRNYSRAYLHHLDRCNEILGARLNTIHNLRYYQRLMAGLRQAIEDGKLEEFVADFYGRQGKPVPPVGAK

SEQ ID NO: 55838 - protein, 375 aa, Hafnia paralvei
  REGION 1..375: note = tr|A0A2A2M795|A0A2A2M795_9GAMM Queuine tRNA-ribosyltransferase OS=Hafnia paralvei OX=546367; GN = tgt PE=3 SV=1
MKYELDTTDGRARRGRLIFDRGVVETPAFMPVGTYGTVKGMTPEEVKETGAQILLGNTFHLWLRPGQEIMKLHGDLHDFMQWKGPILTDSGGFQVFSLGKMRKIKEEGVHFRHPINGSPIFLSPEKSMEIQYDLGSDIVMIFDECTPYPADWDYAKSSMEMSLRWAKRSRQRFDELGNKNALFGIIQGGVYEDLRDVSLKGLVEIGFDGYAVGGLAVGEPKEDMHRILEHVCPQISEDKPRYLMGVGKPEDLVEGVRRGIDMFDCVMPTRNARNGHLFVTNGIVKIRNAQYKDDTTTLDAECDCYTCRNYSRAYLHHLDRCNEILGARLNTIHNLRYYQRLMAGLRQAIEDGKLEEFVADFYGRQGKPVPPVGAK

SEQ ID NO: 55839 - protein, 375 aa, Hahella chejuensis
  REGION 1..375: note = tr|Q2SDV1|Q2SDV1_HAHCH Queuine tRNA-ribosyltransferase OS=Hahella chejuensis (strain KCTC 2396) OX=349521 GN=tgt PE=3 SV=1
MSRTCHMQFEIDNADGKARRGRLKFPRGVVETPAFMPVGTYGTVKSMTPRDIKDIGAHIILGNTFHLMLRPGTEIIRQHGDLHDFMQWDGPILTDSGGFQVFSLGDLRKITEEGVKFKSPIDGSPIFMDPERSMQVQRDLGSDIVMIFDECTPYPATETEAADSMRLSLRWAKRSKLAHGNSPSALFGIVQGGMYPHLREESLAGLTEIGFDGYAIGGLSVGEPKDEMMKVLDYLPPAMPEDKPRYLMGVGKPEDIVEAVLRGVDMFDCVMPTRNARNAHLFTSYGVLKLRNSRYRTDTRPLDENCDCYTCRNFSRSYLHHLDRCGEMLGAQLNTIHNLRYYQNLMSGLRHAIEQSKLCDFVADFYHRQEQGIPA

SEQ ID NO: 55840 - protein, 369 aa, Hahella sp.
  REGION 1..369: note = tr|A0A3T0VW84|A0A3T0VW84_9GAMM Queuine tRNA-ribosyltransferase OS=Hahella sp. KA22 OX=1628392; GN = tgt PE=3 SV=1
MQFEIDNADGKARRGRLKFPRGVVETPAFMPVGTYGTVKSMTPRDIKDIGAHIILGNTFHLMLRPGTEIIRQHGDLHDFMQWDGPILTDSGGFQVFSLGDLRKITEEGVKFKSPIDGSPIFMDPERSMQVQRDLGSDIVMIFDECTPYPATEKEAADSMRLSLRWAKRSKLAHGNSPSALFGIVQGGMYPHLREESLAGLTEIGFDGYAIGGLSVGEPKDEMIKVLDYLPPAMPEDKPRYLMGVGKPEDIVEAVLRGVDMFDCVMPTRNARNAHLFTSFGVLKLRNSRYRADTRPLDENCDCYTCRNFSRSYLHHLDRCGEMLGAQLNTIHNLRYYQNLMSGLRHAIERSKLCDFVADFYHRQEQGIPA

SEQ ID NO: 55841 - protein, 375 aa, Hahella sp.
  REGION 1..375: note = tr|A0A261GQM9|A0A261GQM9_9GAMM Queuine tRNA-ribosyltransferase OS=Hahella sp. CCB-MM4 OX=1926491; GN = tgt PE=3 SV=1
MSRTCFMKFDVSTTDGKARRGRLTFPRGVVETPAFMPVGTYGTVKGMTPRDIKEIGAHIILGNTFHLWLRPGTEIMREHGDLHDFMQWQGPILTDSGGFQVFSLGDIRKITEEGVKFKSPIDGSTIFMDPEKSMEVQRALGSDIVMIFDECTPFPATETEAAQSMRLSLRWAKRSKDAHGDSPSALFGIVQGGMYENLRYESLDGLQKIGFDGYAIGGLSVGEPKEEMIKVLDYLPEKMPADKPRYLMGVGKPEDLVEGVLRGVDMFDCVMPTRNARNGHLFTSHGVVKIRNSRYKNDTRPLDPECDCYTCQTFTRGYLYHLDKCGEMLGAHLNTIHNLRYYQNLMSGLRQAIEEGKLSAFVEQFYQKQEAGIPA

SEQ ID NO: 55842 - protein, 374 aa, unidentified
  source 1..374: note = Hahellaceae bacterium
  REGION 1..374: note = tr|A0A2D8RDW0|A0A2D8RDW0_9GAMM Queuine tRNA-ribosyltransferase OS=Hahellaceae bacterium; OX = 2048971 GN=tgt PE=3 SV=1
MKFEVSASCESPRGHTARRGVLSFPRGDIQTPAFMPVGTYGTVKGMLPRDILETGADIILGNTFHLWLRPGTEVVKRFGSLHEFMQWPKPILTDSGGFQVFSLGKLRKITEAGVAFRSPLDGSQVFLDPETSIGIQHDLGADIVMIFDECTPYPATHDEAEQSMQLSLRWAARSRAAHGDNASALFGIVQGGMYADLRAQSLKGLEAIGFDGYAIGGLSVGEPKDEMIGVLDYLPSQLPADKPRYLMGVGKPEDIVEAVCRGVDMFDCVMPTRNARNGHLFTDAGVVKIRNSRYRSDDRPLDPNCDCHTCRHFSRAYLHHLDRCGEILGSQLNTIHNLRHYQRLMDGLRGAIEAGTLSAFVSSFYARLAAGLPD

SEQ ID NO: 55843 - protein, 378 aa, Halalkalibacillus sp.
  REGION 1..378: note = tr|A0A2I0QXP5|A0A2I0QXP5_9BACI Queuine tRNA-ribosyltransferase OS=Halalkalibacillus sp. B3227; OX = 2018042 GN=tgt PE=3 SV=1
MAISYEHIKTCKQTGARLGRVHTPHGSFDTPVFMPVGTLATVKTMAPEELKEMGANMILSNTYHLWLRPGEDIIEEAGGLHKFMNWDGSILTDSGGFQVFSLSDMRKIKEEGVHFRNHLNGEKLFLSPEKAMHIQNSLGSDIMMAFDECPPYPASYEYMKSSVERTSRWAERCLEAHQKPDSQGLFGIVQGGEYEELRKQSAKDLVSMDFPGYAIGGLSVGEPKDVMNRVLEFTTPILPSDKARYLMGVGSPDSLIDGAIRGIDMFDCVLPTRIARNGTCMTSNGRLVVRNAKFARDFTPLDENCDCYTCRNYTKAYIRHLIKTNETLGLRLTTYHNLYFLVKLMEDVRQAIREDRLGDFRDEFFERYGFNKPNAKNF

SEQ ID NO: 55844 - protein, 370 aa, Halanaerobium congolense
  REGION 1..370: note = tr|A0A1G8NQQ2|A0A1G8NQQ2_9FIRM Queuine tRNA-ribosyltransferase OS=Halanaerobium congolense; OX = 54121 GN=tgt PE=3 SV=1
MFDFELRKENKKSEARLGEITTDHGKIETPIFMPVGTQATVKAMSSRELKEIGSQIILGNTYHLYLRPGDELIAKAGGLHRFMNWDRPILTDSGGFQVFSLANLREIEEEGVYFQSHLDGSKHFISPEKSMQIQQNLGSDIVMAFDECPPYPAEKEYVENSLNRTLRWAERCKKEMESAEGQALFGIIQGGVYPELRQQSVEETTKLDFPGYSIGGLSVGEPKEKMYKMLEHTTPLMPKDKPRYLMGVGTPEDLIEGIYHGIDMFDCVMPTRIARHGQIFTHVGRKTIRNATYKEDFSPLDSECDCHVCQNYSRGYVRHLLKRNEILGVRLTTYHNLYFMLKLSEEIREAINNDNFINFREEFYSKYELK

SEQ ID NO: 55845 - protein, 370 aa, Halanaerobium congolense
  REGION 1..370: note = tr|A0A1G6PLC1|A0A1G6PLC1_9FIRM Queuine tRNA-ribosyltransferase OS=Halanaerobium congolense; OX = 54121 GN=tgt PE=3 SV=1
MFDFELRKENKKSEARLGEITTDHGKIETPIFMPVGTQATVKAMSSRELKEIGSQIILGNTYHLYLRPGDELIAKAGGLHRFMNWDRPILTDSGGFQVFSLANLREIEEEGVYFQSHLDGSKHFISPEKSMQIQQNLGSDIVMAFDECPPYPAEKEYVENSLNRTLRWAERCKKEMESAEGQALFGIIQGGVYPELRQQSVEETTKLDFPGYSIGGLSVGEPKEKMYKMLEHTTPLMPKDKPRYLMGVGTPEDLIEGIYHGIDMFDCVMPTRIARHGQIFTHVGRKTIRNATYKEDFSPLDSECDCHVCQNYSRGYVRHLLKRNEILGVRLTTYHNLYFMLKLSEEIREAISNDNFINFREKFYSKYELK

SEQ ID NO: 55846 - protein, 369 aa, unidentified
  source 1..369: note = Halanaerobium hydrogeniformans
  REGION 1..369: note = tr|E4RIK3|E4RIK3_HALHG Queuine tRNA-ribosyltransferase OS=Halanaerobium hydrogeniformans; OX = 656519 GN=tgt PE=3 SV=1
MFDFELLKESKKTEARLTKITTSHGSIETPIFMPVGTQATVKAMSSRELKEINSQIILANTYHLYLRPGDELIKKAGGLHDFMSWDLPILTDSGGFQVFSLSDMREIKEEGVYFRSHLDGSKHFISPEKSMQIQKNLGSDIVMAFDECPPYPAEKSYVEKSLNRTLRWAERSKKEMENSEQALFGIIQGGVYPELRKKSVKEMTKLNFPGYSIGGVSVGEPKEEIYKILDYTTPIMPKDKPRYLMGVGTPEDLLEGVYYGIDMFDCVMPTRIARHGQVFTAEGRLTVRNATYAEDFNPLDPDCDCYVCQNYSRAYIRHLIKRNEILGVRLTSYHNLYFMLKFSEKIRKAIKEDSFLDFREEFYQKYKLK

SEQ ID NO: 55847 - protein, 370 aa, Halanaerobium kushneri
  REGION 1..370: note = tr|A0A1N6V7B5|A0A1N6V7B5_9FIRM Queuine tRNA-ribosyltransferase OS=Halanaerobium kushneri OX=56779; GN = tgt PE=3 SV=1
MFDFKLFKKNKNSQARLGEITTDHGKIETPIFMPVGTQATVKAMSSRELKEIGSQIILGNTYHLYLRPGDDLIAKAGGLHKFMNWDRPILTDSGGFQVFSLANLREIEEEGVYFQSHLDGSKHFISPEKSMQIQKNLGSDIVMAFDECPPYPAEKEYVEKSLNRTLRWAERCKKEMETARGQALFGIIQGGVYPELRKQSVEETTKFDFPGYSIGGLSVGEPKEEMYKMLDYTTPLMPEDKPRYLMGVGTPEDLIEGIYHGIDMFDCVMPTRIARHGQIFTHQGRKTIRNATYKEDFSPLDSECDCHVCQNYSRGYVRHLLKRNEILGVRLTTYHNLYFMLKFSEEIRQAIKDDRFIDFREEFYDKYELK

SEQ ID NO: 55848 - protein, 370 aa, Halanaerobium praevalens
  REGION 1..370: note = tr|E3DQD7|E3DQD7_HALPG Queuine tRNA-ribosyltransferase OS=Halanaerobium praevalens (strain ATCC 33744 / DSM 2228 / GSL) OX=572479 GN=tgt PE=3; SV = 1
MFDFKLIKENKNSKARLGEITTDHGKIETPIFMPVGTQATVKAMSSRELKEIKAQIILGNTYHLFLRPGDELIAKAGGLHQFMNWDRPILTDSGGFQVFSLADLREIEEEGVYFRSHLDGSKQFISPEKSMQIQKNLGSDIVMAFDECPPYPATRDYVENSLNRTLRWAERCKKEMENAKGQALFGIIQGGVYPELRKQSVEETTKLDFPGYSIGGLSVGEPKEEMYKMLDYTTPLMDKNKPRYLMGVGTPEDLIEGIYHGVDMFDCVMPTRIARHGQVFTHTGRKTVRNATYKEDFNPLDAECDCHVCQNYSRAYIRHLLKRNEILGVRLTSYHNLYFLLNFAAEIRDAISNDNFINFREEFYNKYKLK

SEQ ID NO: 55849 - protein, 370 aa, Halanaerobium saccharolyticum
  REGION 1..370: note = tr|M5E2R8|M5E2R8_9FIRM Queuine tRNA-ribosyltransferase OS=Halanaerobium saccharolyticum subsp. saccharolyticum DSM 6643 OX=1293054 GN=tgt PE=3 SV=1
MFDFKLFKENKRSKARLGEITTDHGKIQTPIFMPVGTQATVKAMSSRELKEIGSQIILGNTYHLYLRPGDELIAKAGGLHQFMNWDRPILTDSGGFQVFSLADLREIEEEGVYFQSHLDGSKHFISPEKSMQIQKNLGSDIVMAFDECPPYPAEKEYVENSLNRTLRWAERCKKEMEGVENQALFGIIQGGVYPELRKQSVEETTKLDFPGYSIGGLSVGETKDEMYKMLDHTTPLMPKDKPRYLMGVGTPEDLIEGIYHGIDMFDCVMPTRIARHGQIFTHSGRKTIRNATYKQDFTPLDSECDCHVCQNYSRGYVRHLIKRNEILGVRLTTYHNLYFMLKLSEEIREAIRNDKFIDFREEFYDKYELK

SEQ ID NO: 55850 - protein, 370 aa, Halanaerobium saccharolyticum
  REGION 1..370: note = tr|A0A2T5RNL2|A0A2T5RNL2_9FIRM Queuine tRNA-ribosyltransferase OS=Halanaerobium saccharolyticum; OX = 43595 GN=tgt PE=3 SV=1
MFDFKLFKENKKSQARLGEITTDHGKIETPIFMPVGTQATVKAMSSRELKEIGSQIILGNTYHLYLRPGDELIAKAGGLHQFMNWDRPILTDSGGFQVFSLANLREIEEEGVYFQSHLDGSKHFISPEKSMQIQQNLGSDIVMAFDECPPYPAERKYVENSLNRTLRWAERCKEEMKGAEGQALFGIIQGGVYPELRKQSVEETVKFDFPGYSIGGLSVGEPKEEMYKMLDHTTPLMPKDKPRYLMGVGTPEDLIEGIYHGIDMFDCVMPTRIARHGQIFTHQGRKTIRNATFKEDFSPLDSECDCHVCQNYSRGYVRHLLKRNEILGVRLTTYHNLYFMLKLSEEIRKAIKNDNFINFREEFYNKYELK

SEQ ID NO: 55851 - protein, 370 aa, Halanaerobium salsuginis
  REGION 1..370: note = tr|A0A1I4GBZ3|A0A1I4GBZ3_9FIRM Queuine tRNA-ribosyltransferase OS=Halanaerobium salsuginis; OX = 29563 GN=tgt PE=3 SV=1
MFNFKLIKEDKASKARLGEITTNHGKIETPIFMPVGTQATVKAMSSRELEEINAQIILGNTYHLYLRPGDDLIARAGGLHKFMNWQRPILTDSGGFQVFSLAKLREIKEEGVYFRSHLDGSKQFISPEKSMQIQKNLGSDIVMAFDECPPYPASRDYVDKSLQRTLRWAERCQAEMEGIENQALFGIIQGGIYPELRKQSVEEMLKFDFPGYSIGGLSVGEPKEEMYKMLDYTTPLMAKNKPRYLMGVGTPEDLVEGIYHGIDMFDCVMPTRIARHGQIFTAVGRKTIRNAVYAEDFSPLDPECDCHVCQNYSRAYVRHLLKRNEILGVRLTTYHNLYFMLNFAQQIRQALAAGKFIDFRDEFYQNYQLK

SEQ ID NO: 55852 - protein, 358 aa, Halanaerobium sp.
  REGION 1..358: note = tr|A0A424Y892|A0A424Y892_9FIRM Queuine tRNA-ribosyltransferase (Fragment) OS=Halanaerobium sp. MSAO_Bac5 OX=2293859 GN=D5S01_09475 PE=3 SV=1
NTEARLAEITTSHGKIETPIFMPVGTQATVKAMSSRELKEINSQIILANTYHLYLRPGDELIKKAGGLHDFMSWDRPILTDSGGFQVFSLSDMREIKEEGVYFRSHLDGSKHFISPEKSMQIQKNLGSDIVMAFDECPPYPAEKSYVEKSLNRTLRWAERSKKEMENSEQALFGIIQGGVYPELRKESVKEICKLDFPGYSIGGVSVGEPKEEIYKILDYTTPIMPKNKPRYLMGVGTPEDLLEGVYYGIDMFDCVMPTRIARHGQVFTAEGRLTVRNAVYAEDFNPLDSDCDCHVCQNYTRGYIRHLLKRNEILGVRLTSYHNLYFMLEFSEKIRKAIKEDRFLDFREEFYQKYKLK

SEQ ID NO: 55853 - protein, 370 aa, Halanaerobium sp.
  REGION 1..370: note = tr|A0A315R366|A0A315R366_9FIRM Queuine tRNA-ribosyltransferase OS=Halanaerobium sp. OX=1895664; GN = tgt PE=3 SV=1
MFDFKLFKENKKSQARLGEITTDHGKIETPIFMPVGTQATVKAMSSRELKEIGSQIILGNTYHLYLRPGDDLIAKAGGLHQFMNWDRPILTDSGGFQVFSLANLREIEEEGVYFQSHLDGSKHFISPEKSMQIQQNLGSDIVMAFDECPPYPAERKYVEKSLNRTLRWAERCKEEMKGAEGQALFGIIQGGVYPELRKQSVEETVKFDFPGYSIGGLSVGEPKEEMYKMLDHTTPLMPKDKPRYLMGVGTPEDLIEGIYHGIDMFDCVMPTRIARHGQIFTHQGRKTIRNATFKEDFSPLDSECDCHVCQNYSRGYVRHLLKRNEILGVRLTTYHNLYFMLKLSEEIRKAIKNDNFINFREEFYNKYELK

SEQ ID NO: 55854 - protein, 377 aa, Halarsenatibacter silvermanii
  REGION 1..377: note = tr|A0A1G9JS94|A0A1G9JS94_9FIRM Queuine tRNA-ribosyltransferase OS=Halarsenatibacter silvermanii; OX = 321763 GN=tgt PE=3 SV=1
MGFIEMTINFSVESRSSDSPARTGTLELENGMFETPIFMPVGTRATVKSLSPEELKKCGTGILLANTYHLYLRPGADVVAEAGGLHEFMNWSRPILTDSGGFQVFSLSDMNEVTEDGVQFQSHLDGSKHFITPEKSVEIQKKLGADIIMAFDECVSYPADREYVEKSLNRTLRWAERSLKAAEDLQDHQHIFGIVQGGTYPDLRKKSARRTRKLDFPGYAIGGLSVGEENKLMYQMLDVTVPELPSKKPRYLMGVGTPRDLIEGVKRGVDMFDCVLPTRLARHGSLYTSRGRINITNAAFKKDFNPPDKDCSCYVCRNYSSAYLRHLIKRNELYGLRLASYHNLYFFLDLMRKLRYNIRRDTLDDFVESFYSGWAEE

SEQ ID NO: 55855 - protein, 367 aa, Haliangium ochraceum
  REGION 1..367: note = tr|D0LJ84|D0LJ84_HALO1 Queuine tRNA-ribosyltransferase OS=Haliangium ochraceum (strain DSM 14365 / JCM 11303 / SMP-2) OX=502025 GN=tgt PE=3 SV=1
MQQTDGFSFEILARAGNARAGVLHTPHGDIPTPVFMPVGTLGTVKAMTARELCTPPLDARIILGNTYHLYLRPGLDVLRAHGGLHGFAGWQRPILTDSGGYQVFSLARLGAIDDEGVTFQSHIDGTRHRLTPELSMEIQGVLGSDIAMVFDQCPPGDADDALHDLAMKRTTAWAERCQRVSRPPGQALFGIVQGGVDVERRQRHLEQLVPLDFDGYAIGGLSVGERKEDMYRVLDAFAHRMPDDKPRYLMGVGTPEDLATGVAAGVDMFDCVMPTRNARNGTLFTSQGKVNIKASKHKSDTGPLDPACPCETCATVSRAYLRHLYLAREILFNRLATLHNLVFYAETMRRLRRSILEGAEVGSRERP

SEQ ID NO: 55856 - protein, 367 aa, Haliea salexigens
  REGION 1..367: note = tr|A0A3C1KIQ2|A0A3C1KIQ2_9GAMM Queuine tRNA-ribosyltransferase OS=Haliea salexigens OX=287487; GN = tgt PE=3 SV=1
MQFEQLGTDGAARRGRLTFPRGTVETPAFMPVGTYGTVKGMLPRDIHAVGAEIILGNTFHLWLRPGTDIIEQHGDLHDFMGWNGPILTDSGGFQVFSLGAMRKISEQGVRFQSPVDGSKVFLDPETSMAIQRKLGSDIVMIFDECTPYPATEAEARASMELSLRWAQRSRAAHGDSAAALFGIVQGGMYESLRAESLAGLEAMGFDGYAIGGLSVGEPKEDMIAVLEALQYSLPAHKPRYLMGVGTPSDLLQGVLRGVDMFDCVMPTRNARNGFIFTSRGVLKLRNARHKTSTLPLDEHCDCYTCQNFSRAYLHHLDKCNEILGSQLNTLHNLRYYQNHMAGIRAAIEQGRLAEFAADFYAGQAEGV

SEQ ID NO: 55857 - protein, 383 aa, Haliea sp.
  REGION 1..383: note = tr|A0A519JKQ2|A0A519JKQ2_9GAMM Queuine tRNA-ribosyltransferase OS=Haliea sp. OX=1932666 GN=tgt; PE = 3 SV=1
MLNFDVLKTDPAEGSYLGSHARRGTLTLNHGVVQTPIFMPVGTYGTVKGVMPQSLHDMGAQIILGNTFHLWMRPGLDVMQQFGGLHKFESWHKPILTDSGGFQVWSLGEMRKISEEGVKFASPVNGDKLFLTPEISMQIQTILNSDIVMQFDECTPYDTKGHITTEAEARYSMELSRRWAQRCEAEFARLENPNALFGIVQGGMFENLRQESLDALVEMDFPGYAVGGVSVGEPKEEMQRIMAHTPHRLPADKPRYLMGVGTPEDLVEGVASGVDMFDCVMPTRNARNGHMFTRFGDLKIRNSRYKTEDAPVDATCSCYTCRNFSRAYLHHLDRCGEMLGPMLSSIHNLHYYLNLMQEIRDALDAGSFGAFALQFRQDRQRGV

SEQ ID NO: 55858 - protein, 367 aa, Haliea sp.
  REGION 1..367: note = tr|A0A2D4TD88|A0A2D4TD88_9GAMM Queuine tRNA-ribosyltransferase OS=Haliea sp. OX=1932666 GN=tgt; PE = 3 SV=1
MQFEQLGTDGAARRGRLTFPRGTVETPAFMPVGTYGTVKGMLPRDIHAVGAEIILGNTFHLWLRPGTDIIEQHGDLHDFMGWNGPILTDSGGFQVFSLGAMRKISEQGVRFQSPVDGSKVFLDPETSMAIQRKLGSDIVMIFDECTPYPATEAEARASMELSLRWAQRSRAAHGASAAALFGIVQGGMYESLRAESLAGLEAMGFDGYAIGGLSVGEPKEDMIAVLEALQYSLPAHKPRYLMGVGTPSDLLQGVLRGVDMFDCVMPTRNARNGFIFTSRGVLKLRNARHKTSTLPLDEHCDCYTCQNFSRAYLHHLDKCNEILGSQLNTLHNLRYYQNHMAGIRAAIEQGRLAEFAADFYAGQAEGV

SEQ ID NO: 55859 - protein, 369 aa, unidentified
  source 1..369: note = Halieaceae bacterium
  REGION 1..369: note = tr|A0A2E6YT80|A0A2E6YT80_9GAMM Queuine tRNA-ribosyltransferase OS=Halieaceae bacterium OX=2026743; GN = tgt PE=3 SV=1
MEFHVSHQDGFARRGQIDFPRGSVQTPAFMPVGTYGTVKGMLPRDIIEIGAEIILGNTFHLWLRPGTDIIREHGDLHDFMGWEGPILTDSGGFQVFSLDELRKVTEEGVAFKSPVNGDRVFLDPETSMQIQRDLGSDIVMIFDECTPYPATESDAERSMELSLRWAERSKRAHGDNSAALFGIIQGGMYPELRTRSLEALQEIGFDGFAVGGLSVGEPKEEMVKVLDHLAGLLPAGKPHYLMGVGTPADLLEGVRRGIDMFDCVMPTRNARNGHLFTSTGVLKLRNARHKSSTEPVDANCDCYTCKHFSRSYLAHLDKCNEILGSQLATIHNLRFYQQHMAGIRAAIEAGQLDEFARDFYARQNECSTG

SEQ ID NO: 55860 - protein, 373 aa, unidentified
  source 1..373: note = Halieaceae bacterium
  REGION 1..373: note = tr|A0A356VMR7|A0A356VMR7_9GAMM Queuine tRNA-ribosyltransferase OS=Halieaceae bacterium OX=2026743; GN = tgt PE=3 SV=1
MSRECHMQFEQLGTDGAARRGRLTFPRGTVETPAFMPVGTYGTVKGMLPRDIHAVGAEIILGNTFHLWLRPGTDIIEQHGDLHDFMGWNGPILTDSGGFQVFSLGAMRKISEQGVRFQSPVDGSKVFLDPETSMAIQRKLGSDIVMIFDECTPYPATEAEARASMELSLRWAQRSRAAHGDSAAALFGIVQGGMYESLRAESLAGLEAIGFDGYAIGGLSVGEPKEDMIAVLEALQYSLPAHKPRYLMGVGTPSDLLQGVLRGVDMFDCVMPTRNARNGFIFTSRGVLKLRNARHKTSTLPLDEHCDCYTCQNFSRAYLHHLDKCNEILGSQLNTLHNLRYYQNHMAGIRAAIEQGRLAEFAADFYAGQAEGV

SEQ ID NO: 55861 - protein, 373 aa, unidentified
  source 1..373: note = Halioglobus japonicus
  REGION 1..373: note = tr|A0A2N5YGS9|A0A2N5YGS9_9GAMM Queuine tRNA-ribosyltransferase OS=Halioglobus japonicus OX=930805; GN = tgt PE=3 SV=1
MTRECRMQFERLGDDGNARRGRLTFPRGTIETPAFMPVGTYGTVKGMLPRDIKEIGAEIILGNTFHLWLRPGTDIIEQHGDLHDFMGWDGPILTDSGGFQVFSLGDMRKISEDGVKFQSPVDGSRVFLDPEKSMEIQRKLGSDIVMIFDECTPYPATVDEARDSMELSLRWAKRSKQAHGDSSAALFGIVQGGMYPELRQESLDGLTDIGFDGYAIGGLSVGEPKDEMMHVLEAMQPIMPADKPRYLMGVGTPADLLEGVRRGVDMFDCVMPTRNARNGNLFTSRGQLKLRNARHKTSTLPIDEDCNCYTCQNFSRGYLHHLDKCNEILGSQLNTIHNLHYYQQHMQGIRAAIEDQNLEDFAANYYEAQARGV

SEQ ID NO: 55862 - protein, 373 aa, unidentified
  source 1..373: note = Halioglobus lutimaris
  REGION 1..373: note = tr|A0A2N5X0P1|A0A2N5X0P1_9GAMM Queuine tRNA-ribosyltransferase OS=Halioglobus lutimaris; OX = 1737061 GN=tgt PE=3 SV=1
MSRQCHMQFERLGEDGDARRGRLRFPRGTVETPAFMPVGTYGTVKGMLPRDIRGVGAEIILGNTFHLWLRPGTDVIEQHGDLHDFMGWDGPILTDSGGFQVFSLGDMRKISEEGVKFQSPVDGSKVFLDPETSMAIQRSLGADIVMIFDECTPYPATEQEARDSMELSLRWALRSKTAHGDSPSALFGIVQGGMYPHLRADSLAGLDDIGFDGYAIGGLSVGEPKDEMMAVLDVMQPLLPADKPRYLMGVGTPADLLEGVRRGVDMFDCVMPTRNARNGNIFTSRGVLKLRNARHKTSTLPLDEECSCYTCEHFSRAYLHHLDKCNEILGSQLNTIHNLHYYQHHMAGIRAAIANGSLAEFAQHFYTEQARGV

SEQ ID NO: 55863 - protein, 367 aa, unidentified
  source 1..367: note = Halioglobus sp.
  REGION 1..367: note = tr|A0A166HMN4|A0A166HMN4_9GAMM Queuine tRNA-ribosyltransferase OS=Halioglobus sp. HI00S01; OX = 1822214 GN=tgt PE=3 SV=1
MQFERLGDDGNARRGRLTFPRGTIETPAFMPVGTYGTVKGMLPRDIKEIGAEIILGNTFHLWLRPGTDIIEQHGDLHDFMGWDGPILTDSGGFQVFSLGDMRKISEDGVKFQSPVDGSRVFLDPEKSMEIQRKLGSDIVMIFDECTPYPATVDEARDSMELSLRWAKRSKQAHGDSSAALFGIVQGGMYPELRQESLDGLTDIGFDGYAIGGLSVGEPKDEMMHVLEAMQPIIPADKPRYLMGVGTPADLLEGVRRGVDMFDCVMPTRNARNGNLFTSRGQLKLRNARHKTSTLPIDEDCNCYTCQNFSRGYLHHLDKCNEILGSQLNTIHNLHYYQQHMQGIRAAIEDQNLDDFAANYYEAQARGV

SEQ ID NO: 55864 - protein, 373 aa, unidentified
  source 1..373: note = Halioglobus sp.
  REGION 1..373: note = tr|A0A3L7E2Z6|A0A3L7E2Z6_9GAMM Queuine tRNA-ribosyltransferase OS=Halioglobus sp. U0301; OX = 2283635 GN=tgt PE=3 SV=1
MSRHCHMRFERLGSDGNARRGRLHFPRGTVETPAFMPVGTYGTVKGMLPRDIREIGAEIILGNTFHLWLRPGTDIIEQHGDLHDFMHWDGPILTDSGGFQVFSLGDMRKITEEGVKFQSPVDGSPVFLDPEKSMAIQRSLGADIVMIFDECTPYPASEEAARASMELSLRWAARSKAAHGDSPAALFGIVQGGMYEHLRTESLAGLTDIGFDGYAIGGLSVGEPKEEMMAVLEVMQPIMPVDRPRYLMGIGTPADLLEGVRRGVDMFDCVMPTRNARNGNIFTSRGVLKLRNARHKTSTLPLDEECGCYTCQNFSRAYLHHLDKCNEILGSQLNTIHNLYFYQQHMQGIRTAIEQGRLDEFASGFYAAQDRGV

SEQ ID NO: 55865 - protein, 377 aa, Haliscomenobacter hydrossis
  REGION 1..377: note = tr|F4L476|F4L476_HALH1 Queuine tRNA-ribosyltransferase OS=Haliscomenobacter hydrossis (strain ATCC 27775 / DSM 1100 / LMG 10767 / O) OX=760192; GN = tgt PE=3 SV=1
MFSFNIDHKDPQSSARAGVIQTAHGEIQTPIFMPVGTAGTVKAVHQHELETEIKAQIILGNTYHLYLRPGIEILQQVGGLHKFNGWNHPILTDSGGYQVYSLGNTRKIKEEGVTFNSHIDGSPHFFSPERAIDIQRIIGADIIMAFDECTPYPCEYGYAKKSMEMTHRWLARCCERFDNTQGLYGYEQTLFPIVQGSTYTDLRIQSAEAIAAFNRPANAIGGLSVGEPAEDMYAMTELVCGVLPADKPRYLMGVGTPVNILESIALGIDMFDCVLPTRNARHGLLYTAEGILNMRNAKWKDDFSPIDANSPCHSSRFYSKAYLRHLIHSSEILGMQIATLQNLSFFLWLVTEARAHIQAGDFRAWKEMMVPKLETRL

SEQ ID NO: 55866 - protein, 376 aa, unidentified
  source 1..376: note = Haloarcobacter mediterraneus
  REGION 1..376: note = tr|A0A4Q1AWP6|A0A4Q1AWP6_9PROT Queuine tRNA-ribosyltransferase OS=Haloarcobacter mediterraneus; OX = 2023153 GN=tgt PE=3 SV=1
MEFKIDATSHHKARACTIKTAHSEIKTPVFMPVGTQGTVKALDANDLLSMGAKIILGNTYHLYLRPGSKLIKKFGGLHGFSKFPNSFLTDSGGFQAFSLSDNSKPDENGITFKSHIDGSKHYFTPQSVLDTQYDLGSDIMMILDDLVALPNTKERIKKSIERTTKWAKEAISYHKEQQAKGIGVNQNIFAIIQGGTDKEFRKMSAEQLCALSDYDGFAIGGLSVGEPNQDMYDTVEWTTDFMPLDKPRYLMGVGTPEDLIENIERGVDMFDCVMPTRNARNGTLFTSTGRVNIKKAMYKEDNSPIDEECDCYTCQNFSKAYLNHLYRAGEITYFRLASLHNIRYYLNLMSQAREAILADNWVEFKKEFYEKRSSKK

SEQ ID NO: 55867 - protein, 378 aa, Halobacillus aidingensis
  REGION 1..378: note = tr|A0A1H0P1Z0|A0A1H0P1Z0_HALAD Queuine tRNA-ribosyltransferase OS=Halobacillus aidingensis; OX = 240303 GN=tgt PE=3 SV=1
MAITYELIKTCKQTGARLGKVHTPHGSFETPMFMPVGTLATVKTMSPEELERMGAQIILSNTYHLWLRPGEDIIEEAGGLHKFMNWNGSILTDSGGFQVFSLSDLRKIEEEGVHFRNHISGEKLFLSPEKAMHIQNSLGPDIMMAFDECPPYPAEHKYMKDSVERTSRWAERCLEAHQRPHDQGLFGIIQGGEYEDLRRQSARDLTSLDFPGYAIGGLSVGEPKDVMNRVLEFTTPLMPDQKPRYLMGVGSPDSLIDGSIRGIDMFDCVLPTRIARNGTLMTSEGRLVVRNAKYARDFRPIDENCDCHTCRNYSRAYIRHLVKANETFGFRLTTYHNLYFLLNLMRQVREAIREDRLGDFREEFFEMYGFNKPNAKNF

SEQ ID NO: 55868 - protein, 378 aa, Halobacillus alkaliphilus
  REGION 1..378: note = tr|A0A1I2JF56|A0A1I2JF56_9BACI Queuine tRNA-ribosyltransferase OS=Halobacillus alkaliphilus; OX = 396056 GN=tgt PE=3 SV=1
MAITYELIKTCKQTGARLGKVHTPHGSFETPMFMPVGTLATVKTMSPEELEQMGAPIILSNTYHLWLRPGEDIVEEAGGLHSFMNWNGSILTDSGGFQVFSLSDLRQIEEEGVHFRNHISGEKLFLSPEKAMQIQNSLGADIMMAFDECPPYPAEHDYMKKSVERTSRWAERCLEGHQRPHDQGLFGIIQGGEYEDLRRQSARDLTSMDFPGYAIGGLSVGEPKDVMNRVLDFTAPLLPDEKPRYLMGVGSPDSLIDGSMRGIDMFDCVLPTRIARNGTCMTSNGRLVVRNAKFARDFRPIDENCDCHTCRNYSRAYIRHLVKSSETFGFRLTTYHNLYFLLKLMRQVREAIKEDRLGDFREEFFEQYGFNKPNAKNF

SEQ ID NO: 55869 - protein, 378 aa, Halobacillus dabanensis
  REGION 1..378: note = tr|A0A1I3P6P0|A0A1I3P6P0_HALDA Queuine tRNA-ribosyltransferase OS=Halobacillus dabanensis; OX = 240302 GN=tgt PE=3 SV=1
MAITYELIKTCKQTGARLGKVHTPHGSFETPMFMPVGTLATVKTMSPEELEQMGAQIILSNTYHLWLRPGEDIIQEAGGLHNFMNWNGSILTDSGGFQVFSLSDLRKIEEEGVHFRNHISGEKLFLSPEKAMHIQNALGPDIMMAFDECPPYPAEHKYMKDSVERTSRWAERCLEAHQRPHDQGLFGIIQGGEYEDLRRQSAQDLTSMDFPGYAIGGLSVGEPKDVMNRVLEFTTPLMPDQKPRYLMGVGSPDSLIDGSIRGVDMFDCVLPTRIARNGTLMTSEGRLVVRNAKFARDFRPIDENCDCHTCRNYSRAYIRHLVKANETFGFRLTTYHNLYFLLNLMRQVREAIREDRLGDFRDEFFEQYGFNKPNAKNF

SEQ ID NO: 55870 - protein, 378 aa, Halobacillus faecis
  REGION 1..378: note = tr|A0A511WLF0|A0A511WLF0_9BACI Queuine tRNA-ribosyltransferase OS=Halobacillus faecis OX=360184; GN = tgt PE=3 SV=1
MAITYELIKTCKQTGARLGKVHTPHGSFETPMFMPVGTLATVKTMSPEELERMGAQIILSNTYHLWLRPGEDIIEEAGGLHKFMNWNGSILTDSGGFQVFSLSDLRKIEEEGVHFRNHISGEKLFLSPEKAMHIQNALGPDIMMAFDECPPYPAEHKYMKDSVERTSRWAERCLEAHKRPHDQGLFGIIQGGEYEDLRRQSARDLTSMDFPGYAIGGLSVGEPKDVMNRVLEFTTPLMPDQKPRYLMGVGSPDSLIDGSIRGIDMFDCVLPTRIARNGTLMTSEGRLVVRNAKFARDFRPIDENCDCHTCRNYSRAYIRHLVKANETFGFRLTTYHNLYFLLNLMRQVREAIREDRLGDFREEFFEMYGFNKPNAKNF

SEQ ID NO: 55871 - protein, 378 aa, Halobacillus halophilus
  REGION 1..378: note = tr|I0JPB6|I0JPB6_HALH3 Queuine tRNA-ribosyltransferase OS=Halobacillus halophilus (strain ATCC 35676 / DSM 2266 / JCM 20832 / NBRC 102448/ NCIMB 2269) OX=866895 GN=t gt PE=3 SV=1
MAITYELIKTCKQTGARLGKVHTPHGSFETPMFMPVGTLATVKTMSPEELEQMGAPIILSNTYHLWLRPGEDIVEEAGGLHSFMNWNGSILTDSGGFQVFSLSDLRQIEEEGVHFRNHISGEKLFLSPEKAMHIQNSLGADIMMAFDECPPYPAEHDYMKKSVERTSRWAERCLEGHQRPHDQGLFGIIQGGEYEDLRRQSARDLTSMDFPGYAIGGLSVGEPKDVMNRVLDFTAPLLPDEKPRYLMGVGSPDSLIDGSMRGIDMFDCVLPTRIARNGTCMTSNGRLVVRNAKFARDFRPIDENCDCHTCRNYSRAYIRHLVKSSETFGFRLTTYHNLYFLLKLMRQVREAIKEDRLGDFREEFFEQYGFNKPNAKNF

SEQ ID NO: 55872 - protein, 378 aa, Halobacillus karajensis
  REGION 1..378: note = tr|A0A024P7Y3|A0A024P7Y3_9BACI Queuine tRNA-ribosyltransferase OS=Halobacillus karajensis; OX = 195088 GN=tgt PE=3 SV=1
MAITYELIKTCKQTGARLGKVHTPHGSFETPMFMPVGTLATVKTMSPDELERMGAQIILSNTYHLWLRPGEDIVEEAGGLHEFMNWNGSILTDSGGFQVFSLSDLRKIEEEGVHFRNHISGEKLFLSPEKAMHIQNSLGADIMMAFDECPPYPAEHKYMKDSVERTSRWAERCLEAHQRPHNQGLFGIIQGGEYEDLRRQSAQDLTSMDFPGYAIGGLSVGEPKDVMNRVLEFTTPFLPDQKPRYLMGVGSPDSLIDGSIRGIDMFDCVLPTRIARNGTLMTSEGRLVVRNAKYARDFRPIDENCDCYTCRNYSRAYIRHLVKANETFGFRLTTYHNLYFLLKLMGRVREAIREDRLGDFREEFFEMYGFNKPNAKNF

SEQ ID NO: 55873 - protein, 378 aa, Halobacillus litoralis
  REGION 1..378: note = tr|A0A410MHF3|A0A410MHF3_9BACI Queuine tRNA-ribosyltransferase OS=Halobacillus litoralis OX=45668; GN = tgt PE=3 SV=1
MAVTYELIKTCKQTGARLGKVHTPHGSFETPMFMPVGTLATVKTMSPEELERMGAQIILSNTYHLWLRPGEDIVQEAGGLHDFMNWNGSILTDSGGFQVFSLSDLREIEEKGVHFRNHISGEKLFLSPEKAMHIQNALGADIMMAFDECPPYPAEHKYMKQSVERTSRWAERCLEGHQRPDAQGLFGIIQGGEYEDLRRQSAQDLTSMDFPGYAIGGLSVGEPKDVMNRVLDFTTPLLPTQKPRYLMGVGSPDSLIDGSIRGIDMFDCVLPTRIARNGTLMTSEGRLVVRNAKFARDFRPIDENCDCHTCRNYSRAYIRHLVKANETFGFRLTTYHNLYFLLKLMRQVREAIREDRLGDFREEFFEQYGFNKPNAKNF

SEQ ID NO: 55874 - protein, 378 aa, Halobacillus mangrovi
  REGION 1..378: note = tr|A0A1W5ZUK8|A0A1W5ZUK8_9BACI Queuine tRNA-ribosyltransferase OS=Halobacillus mangrovi OX=402384; GN = tgt PE=3 SV=1
MAITYELIKTCKQTGARLGKVHTPHGSFETPMFMPVGTLATVKTMSPEELERMGAQIILSNTYHLWLRPGEDIVEEAGGLHSFMNWNGSILTDSGGFQVFSLSDLRQIEEEGVHFRNHISGEKLFLSPEKAMQIQNSLGADIMMAFDECPPYPAEHDYMKKSVERTSRWAERCLEGHKRPHDQGLFGIIQGGEYEDLRRQSARDLTSLDFPGYAVGGLSVGEPKDVMNKVLDFTTPLLPTDKPRYLMGVGSPDSLIDGSLRGIDMFDCVLPTRIARNGTCMTSNGRLVVRNAKFARDFRPIDENCDCHTCRNYSRAYIRHLVKANETFGFRLTTYHNLYFLLKLMRQVREAIREDRLGDFREEFFEQYGFNKPNAKNF

SEQ ID NO: 55875 - protein, 378 aa, Halobacillus salinus
  REGION 1..378: note = tr|A0A4Z0H2U7|A0A4Z0H2U7_9BACI Queuine tRNA-ribosyltransferase OS=Halobacillus salinus OX=192814; GN = tgt PE=3 SV=1
MAITYELIHTCKQTGARYGKVHTPHGSFETPMFMPVGTLATVKTMSPDELERMGAPIILSNTYHLWLRPGEDIVKEAGGLHNFMNWDGSILTDSGGFQVFSLSDLRKIEEEGVHFRNHISGEKLFLSPEKAMRIQNDLGADIMMAFDECPPYPAEHKYMKDSVERTSRWAERCLEAHQRPHDQGLFGIIQGGEYEDLRRQSAKDLTSMDFPGYAVGGLSVGEPKDVMNRVLEFTTPLLPSEKPRYLMGVGSPDSLVDGSIRGIDMFDCVLPTRIARNGTCMTSNGRLVVRNAKFARDFRPLDENCDCYTCRNYSRAYIRHLVKANETFGIRLTTYHNLYFLLKLMGQVRDAIREDRLGDFREEFFEQYGFNKPNAKNF

SEQ ID NO: 55876 - protein, 378 aa, Halobacillus sp.
  REGION 1..378: note = tr|A0A0B0D4C1|A0A0B0D4C1_9BACI Queuine tRNA-ribosyltransferase OS=Halobacillus sp. BBL2006; OX = 1543706 GN=tgt PE=3 SV=1
MAITYELIKTCKQTGARLGKVHTPHGSFETPMFMPVGTLATVKTMSPEELERMGAQIILSNTYHLWLRPGEDIVEEAGGLHSFMNWNGSILTDSGGFQVFSLSDLRQIEEEGVHFRNHISGEKLFLSPEKAMKIQNSLGADIMMAFDECPPYPAEHEYMKKSVERTSRWAERCLEGHQRPNDQGLFGIIQGGEYEDLRRQSAQDLTSLDFPGYAVGGLSVGEPKDVMNRVLDFTTPLLPKEKPRYLMGVGSPDSLIDGSIRGIDMFDCVLPTRIARNGTCMTSNGRLVVRNAKFARDFRPIDENCDCHTCRNYSRAYIRHLVKANETFGFRLTTYHNLYFLLKLMRQVREAIREDRLGDFREEFFEQYGFNKPNAKNF

SEQ ID NO: 55877 - protein, 378 aa, Halobacillus sp.
  REGION 1..378: note = tr|A0A3S3ZLX9|A0A3S3ZLX9_9BACI Queuine tRNA-ribosyltransferase OS=Halobacillus sp. SKP4-6; OX = 2498856 GN=tgt PE=3 SV=1
MAITYELIKTCKQTGARLGKVHTPHGSFDTPMFMPVGTLATVKTMSPEELERMGAPIILSNTYHLWLRPGEDIVKEAGGLHKFMNWNGSILTDSGGFQVFSLSDLRKIEEEGVHFRNHISGEKLFLSPEKAMQIQNDLGADIMMAFDECPPYPAEHEYMKKSVERTSRWAERCLEGHKRPNDQGLFGIVQGGEYEDLRRQSAMDLTSMDFPGYAVGGLSVGEPKDVMNRVLEFTTPLLPSEKPRYLMGVGSPDSLIDGSIRGIDMFDCVLPTRIARNGTCMTSTGRLVIRNAKFARDFRPIDENCDCYTCRNYSRAYIRHLVKANETFGFRLTTYHNLYFLLNLMGQVREAIREDRLGDFRDQFFEQYGFNKPNAKNF

SEQ ID NO: 55878 - protein, 379 aa, Halobacillus trueperi
  REGION 1..379: note = tr|A0A3E0JCX0|A0A3E0JCX0_9BACI Queuine tRNA-ribosyltransferase OS=Halobacillus trueperi OX=156205; GN = tgt PE=3 SV=1
MMAITYELIKTCKQTGARLGKVHTPHGSFETPMFMPVGTLATVKTMSPEELERMGAQIILSNTYHLWLRPGEDIIEEAGGLHKFMNWNGSILTDSGGFQVFSLSDLRKIEEEGVHFRNHISGEKLFLSPEKAMHIQNSLGPDIMMAFDECPPYPAEHKYMKDSVERTSRWAERCLEAHQRPHDQGLFGIIQGGEYEDLRRQSARDLTSMDFPGYAIGGLSVGEPKDVMNRVLEFTTPLMPDQKPRYLMGVGSPDSLIDGSIRGIDMFDCVLPTRIARNGTLMTSEGRLVVRNAKYARDFRPIDENCDCHTCRNYSRAYIRHLVKANETFGFRLTTYHNLYFLLNLMRQVREAIREDRLGDFREEFFEMYGFNKPNAKNF

SEQ ID NO: 55879 - protein, 386 aa, unidentified
  source 1..386: note = Halobacteriovoraceae bacterium
  REGION 1..386: note = tr|A0A2E2EFZ8|A0A2E2EFZ8_9PROT Queuine tRNA-ribosyltransferase OS=Halobacteriovoraceae bacterium; OX = 2026745 GN=tgt PE=3 SV=1
MDIREAIKANFKYKVIHKDKNSNARAGVIITPHGEIPTPVFMPVGTHGAIKALQPNQLTDLNIPIILSNTYHLHLTPGSELIKKAGGLHKFMAWDRPILTDSGGFQVFSLQGNSITEEGSKFKGPKGQDILLTPETSIGIQQNLGSDIMMAFDECIPYPAKKPYVQKSIARTHRWLDRCIQSWDNPNQALFGIIQGSTYDEFRDECLEEVVKRDLPGYAIGGVSVGEGPELMRKIVSYTGPKMPEDKPRYVMGVGMPEDLLMIWEHGIDMSDCIIPTKFARGGTLFSNRGKIRITHKNYRRDFFPIEPNLDDYVNKNFSRAYIKHLFDSNEILGQILATAHNIAFYKSLADRARTAILEDRFLEFKEEFLKGYLKDDGNKAKKKKR

SEQ ID NO: 55880 - protein, 370 aa, unidentified
  source 1..370: note = Halobacteriovoraceae bacterium
  REGION 1..370: note = tr|A0A2E2EFJ7|A0A2E2EFJ7_9PROT Queuine tRNA-ribosyltransferase OS=Halobacteriovoraceae bacterium; OX = 2026745 GN=tgt PE=3 SV=1
MKTYQLEAVSGNARAATIETEHGEIKTPIFMPVGTRASVKSLWQEDLEELNAQIILGNTYHLYLRPGHELIEKMGGLHKWMTWKKPILTDSGGFQVFSLSDLNKVSEEGVKFQSHIDGSYHMLSPEKSMEIQKALGSDIVMIFDECPKLPATKERLRESMELTLRWAKRCKDYELKPHQSLFSIIQGGLHEDLRQECMERLMELDFPGYALGGLSVGEKNEEMVSFLNSFTPKMPENKPRYLMGVGKPLDILNGIRAGIDMFDCVLPTRNARNGQFLTTHGPLNIKKQRFIADSLPPDIECDCKVCRRYSRSYIRHLYNVGEYLAGQLVSFHNIYFYLKLVEKAREAIFKDKFDEYYKEFYKNYTSQRWK

SEQ ID NO: 55881 - protein, 379 aa, unidentified
  source 1..379: note = Halobacteriovorax marinus
  REGION 1..379: note = tr|A0A1Y5FCS5|A0A1Y5FCS5_9PROT Queuine tRNA-ribosyltransferase OS=Halobacteriovorax marinus; OX = 97084 GN=tgt PE=3 SV=1
MSRIQDQVKEHFQFEVTHVDKNSKARAGMIRTPNGDIPTPVFMPVGTHGAVKAQQPQVLEDMDTKVILSNTYHLHLSPGSDLIKKAGGLHKWMSWPRPILTDSGGFQVFSLQKKSIKEEGAEFRDQNGKTVLLSPETSIEIQQNLGSDIMMAFDECIPYPATKEYTKTSIDRTHRWLDRCIETWTNPKQALFGIIQGSTYDEYRKECVDELVKRDLPGYAIGGVSVGEGPELMEKIVKFAAPLMPVDKPRYVMGVGNPEDLLMIWEHGIDMSDCIIPTKFARGGTFFTNRGKIRIKHKNYRRDFFPIEPNCDCYTCKNFTRSYVKHLFDSNEILGAILATTHNIAFYKNLAESAREAILEDRFTEFKKNFLEKYNGNKK

SEQ ID NO: 55882 - protein, 372 aa, unidentified
  source 1..372: note = Halobacteriovorax marinus
  REGION 1..372: note = tr|E1X0T3|E1X0T3_HALMS Queuine tRNA-ribosyltransferase OS=Halobacteriovorax marinus (strain ATCC BAA-682 / DSM 15412 / SJ) OX=862908 GN=tgt; PE = 3 SV=1
MTTMYKNVAYDGKARAGVVTTAHGEIETPIFMPVGTRASVKCMWQHELEEVGAQIILGNTYHLYLRPGHELIEKVGGGLHGFMNWKKPILTDSGGYQVFSLSSMNKLSEEGVRFQSHIDGSYHMISPEKSMEIQRALGSDIVMNFDECPALPATKERLRESMELTLRWAKRCRDYELKEHQNLFGIIQGGLHFDLRTECMERLTEMNFEGYALGGLSVGEKNEEMVEFCSDFVHTMPKDKPRYLMGVGKPLDILTGIKNGLDMFDCVLPTRNARNGQFLTHHGPLNIKKERFKEDTLPPDPDCSCKVCSNYSRSYIRHLYNTGEYLAGQLISYHNLHFFLDMTKQARAHIIAGTFDEYYKTFYNNYTSNQWT

SEQ ID NO: 55883 - protein, 373 aa, unidentified
  source 1..373: note = Halobacteriovorax sp.
  REGION 1..373: note = tr|A0A2D5YRB9|A0A2D5YRB9_9PROT Queuine tRNA-ribosyltransferase OS=Halobacteriovorax sp.; OX = 2020862 GN=tgt PE=3 SV=1
MIKVEAKDNKARACTITTAHGEIQTPIFMPVGTRASVKCMWQDQLEEMGAEIILGNTYHLYLRPGHELIERVGGDLHGFMNWKRPILTDSGGYQVFSLSSINKVTEEGVTFASHIDGSRHLISPEKSMEIQKALGSDIVMVFDECPALPATKERLRESMELTLRWAKRCRDYELRPTQNLFGIIQGGLHHDLRLECMERLNEMGFEGLALGGLSVGEKNEEMVSFLDGFVHLMPEDKPRYLMGVGKPLDILNGIRAGLDMFDCVLPTRNARNGQFLTHDGPLNIKNERFKEDTEAPDPDCECKVCKNYTRSYIRHLFTCGEYLAGNLITYHNLHFMLKMVKDARQNIIAGSFDDFYQSFYKRYSSKKWQGKPK

SEQ ID NO: 55884 - protein, 372 aa, unidentified
  source 1..372: note = Halobacteriovorax sp.
  REGION 1..372: note = tr|A0A2S3QSA7|A0A2S3QSA7_9PROT Queuine tRNA-ribosyltransferase OS=Halobacteriovorax sp. DA5; OX = 2067553 GN=tgt PE=3 SV=1
MIKVEGYSGKARATTITTEHGEIKTPIFMPVGTRASVKCMWQEDLYEMNAQIILGNTYHLYLRPGHELIEKVGGGLHGFMNWDRPILTDSGGFQVFSLSDINKITEEGVTFSSHIDGSKHLISPEKSMEIQKGLGSDIVMAFDECPKLPATKETLRESMELTLRWAKRCIDYKLRDYQKLFGIVQGGLHHDLRTECMQRLEEMDFPGLALGGLSVGEKNEEMVDFLNGFVHTMPDQKPRYLMGVGKPLDILNGIRAGIDMFDCVLPTRNARNGQFLTHDGPLNIKNLRFREDTLPPDPSCDCKVCKTYSRSYIRHLYTTGEFLSGNLITYHNLYFMIKMTQDAREAILADRFDDYYKEFYNRYTSRKWASGQ

SEQ ID NO: 55885 - protein, 371 aa, Halobacteroides halobius
  REGION 1..371: note = tr|L0KB56|L0KB56_HALHC Queuine tRNA-ribosyltransferase OS=Halobacteroides halobius (strain ATCC 35273 / DSM 5150 / MD-1) OX=748449 GN=tgt; PE = 3 SV=1
MSFEYKLKKNCCDTKARVGELSTPHGKIDTPIFMPVGTKATVKSMSPEELEEIKSQIILSNTYHLYLRPGHELIEEAGGLHEFMNWEHPILTDSGGFQVFSLGDLNEITEKGVTFQSHLDGSKHFISPEKSIEIQMSLGADIIMAFDECAPYPAKRDYVKNSLERTTRWLERCIAAHTRDDQALFGIMQGGMYRDLREESAQQITQFDLPGYAIGGLSVGEPKEEMLEVLDYAPDLLPEDKPRYLMGVGTPFDLFEGVMRGVDMFDCVFPTRIARNGAVFTSHGRITIRNAKFKKDFTPLDHECDCYVCNNYTRGYIRHLIKRNEILGLRLTTYHNLYFLLDMMEKIRQAIKEDRFLEYRAQFYKKYGLEE

SEQ ID NO: 55886 - protein, 369 aa, Halocella sp.
  REGION 1..369: note = tr|A0A3Q9B5Z2|A0A3Q9B5Z2_9FIRM Queuine tRNA-ribosyltransferase OS=Halocella sp. SP3-1 OX=2382161; GN = tgt PE=3 SV=1
MSFSFELLHQEKETAARMGKITTVHGEIETPIFMPVGTQATVKSMTPEELWEIGSQIILANTYHLYLRPGSKLIAEAGGLHEFMHWDGPILTDSGGFQVFSLSDLNEITEEGVYFRSHLDGSKHFISPEISMEIQRDLGSDIVMAFDECPPHPADYDYLAKSLEMTIRWAERCKKEMQDTEQALFGIVQGGVYRDLRKASVEALLDIGFPGYAIGGLSVGEKKEEMLEVLDFTVPVMPEDKPRYLMGVGTPEDLLEGVKRGIDMFDCVLPTRIARHGAVFTSHGRITVRNAEYARDFTPLDHECDCYVCQNYTRGYIRHLIKRNEILGARLTTYHNLYFLINLMEEMRDAIQRDRFMEFYRKFYQKYKI

SEQ ID NO: 55887 - protein, 376 aa, unidentified
  source 1..376: note = Halocynthiibacter arcticus
  REGION 1..376: note = tr|A0A126V4E2|A0A126V4E2_9RHOB Queuine tRNA-ribosyltransferase OS=Halocynthiibacter arcticus; OX = 1579316 GN=tgt PE=3 SV=1
MTQKFTFDLQATDGQARTGVISTPRGDIRTPAFMPVGTAATVKAMLPESVAATGADILLGNTYHLMLRPTAERIDRLGGLHKFMNWDKPILTDSGGFQVMSLAGLRKMSEEGVKFSSHIDGSKHMLTPERSMEIQKLLGSDIVMCFDECPALPATDAEVSKSMQMSMRWAQRSRDAFGDRPGHALFGIQQGGVTQDLRAESAEKLREIGFDGYAVGGLAVGEGQEAMFGVLDYAPDMLPTDRPRYLMGVGKPDDIVGAVARGIDMMDCVLPSRSGRTGQLFTRNGVINIKNARHADDPRPLDEACTCPACSNYSRAYLHHVFRSQEMISGMLLTWHNLHYFQELMSDMRAAIAVGAFEAFQKKFHEDRAAGDIEPL

SEQ ID NO: 55888 - protein, 374 aa, unidentified
  source 1..374: note = Halodesulfovibrio marinisediminis
  REGION 1..374: note = tr|A0A1N6FWB2|A0A1N6FWB2_9DELT Queuine tRNA-ribosyltransferase OS=Halodesulfovibrio marinisediminis DSM 17456 OX=1121457 GN=tgt PE=3 SV=1
MAKIGEFTLHATDGAARTGELQTAHGVVQTPIFMPVGTVGSVKGIAPDDLNNIGAEIILGNTYHLYLRPGDDLVARHGGLQKFNSWNKPILTDSGGFQVFSLSDLRKIKEEGVTFRSHLDGSKHLFTPEKVIQIQRNLNSDIMMVLDECVGFGADKEYTARSLEMTTRWAKRCREEYPRGAGDNLLFAITQGGFFKDLRERSIAQLTSEDFDGFALGGLSVGESKEKMMEILYHSAPLLPKDKPRYLMGVGTPLDIINGINAGIDMFDCVLPTRNARNGTLYTSQGKISIKRKEYAEDDGPLDPNCNCYTCRTFSRAYLRHLFQAKELLSFRLNSIHNLTYFLDTVRGARKAIREGRFAEYKKSYEAIYPNEVV

SEQ ID NO: 55889 - protein, 374 aa, unidentified
  source 1..374: note = Halodesulfovibrio spirochaetisodalis
  REGION 1..374: note = tr|A0A1B7XMZ4|A0A1B7XMZ4_9DELT Queuine tRNA-ribosyltransferase OS=Halodesulfovibrio spirochaetisodalis OX=1560234 GN=tgt PE=3 SV=1
MANIGEFTLHATDGAARTGELQTAHGVVQTPIFMPVGTVGSVKGIAPDDLNDMGAEIILGNTYHLYLRPGDELVARRGGLQKFNSWNKPILTDSGGFQVFSLSDLRKIKEEGVTFRSHLDGSKHLFTPEKVIQIQRNLNSDIMMVLDECVGYGADKAYTARSLEMTTRWAKRCREEYPRGAGDNLLFAITQGGFHKDLRERSIAQLTSEDFDGFALGGLSVGESKEKMMEILYHSAPLLPKDKPRYLMGVGTPLDIINGINAGIDMFDCVLPTRNARNGTLYTSLGKISIKRKEYAEDDGPLDPNCNCYTCRNFSRAYLRHLYHAKELLSFRLNSIHNLTYFLDTVRGARKAIHAGTFAEYKKSYEAIYPNEVV

SEQ ID NO: 55890 - protein, 379 aa, Halolactibacillus alkaliphilus
  REGION 1..379: note = tr|A0A511WZ19|A0A511WZ19_9BACI Queuine tRNA-ribosyltransferase OS=Halolactibacillus alkaliphilus; OX = 442899 GN=tgt PE=3 SV=1
MTAIRYELIKTCKQTGARLGRVHTPHGSFETPVFMPVGTQATVKTMSPEELTDMGAGIILSNTYHLWLRPGEDIIEEAGGLHKFMNWDGSILTDSGGFQVFSLSDLRRIEEEGVHFRNHISGEKLFLSPEKAMHIQNSLGSDIMMAFDECPPYPAEHKYMKNSVERTSRWAERCLEAHKRPHDQGLFGIVQGGEYEDLRKQSAKDLTSLDFPGYAIGGLSVGEPKDVMNRVLEFTTPLLPDEKPRYLMGVGSPDSLIDGAIRGIDMFDCVLPTRIARNGTLMTSEGRLVVRNAKYARDFSPIDPNCDCYTCKNYTRAYVRHLIKTDETFGLRLTSYHNLYFLVKLMEQVRQAIREDRLGDFREEFFEQYGFNKPNAKNF

SEQ ID NO: 55891 - protein, 379 aa, Halolactibacillus halophilus
  REGION 1..379: note = tr|A0A1I5KZ27|A0A1I5KZ27_9BACI Queuine tRNA-ribosyltransferase OS=Halolactibacillus halophilus; OX = 306540 GN=tgt PE=3 SV=1
MTAVRYELIKTCKQTGARLGRVHTPHGSFETPVFMPVGTLATVKTMSPEELTDIGAGIILSNTYHLWLRPGEDIIEEAGGLHKFMNWDGSILTDSGGFQVFSLSDLRKIEEEGVHFRNHISGEKLFLSPEKAMHIQNSLGSDIMMAFDECPPYPAEHKYMKNSVERTSRWAERCLEAHKRPQDQGLFGIVQGGEYEDLRRQSAKDLTSLDFPGYAIGGLSVGEPKDVMNRVLEFTTPLLPNEKPRYLMGVGSPDSLIDGAIRGVDMFDCVLPTRIARNGTLMTSQGRLVVRNAKYARDFSPIDPNCDCYTCKNYTRAYVRHLIKTDETFGLRLTSYHNLYFLVKLMEQVRQAIREDRLGDFREEFFEQYGFNKPNAKNF

SEQ ID NO: 55892 - protein, 379 aa, Halolactibacillus miurensis
  REGION 1..379: note = tr|A0A1I6PKH5|A0A1I6PKH5_9BACI Queuine tRNA-ribosyltransferase OS=Halolactibacillus miurensis; OX = 306541 GN=tgt PE=3 SV=1
MTAIRYELIKTCKQTGARLGRVHTPHGSFETPVFMPVGTLATVKTMSPEELTEIGAGIILSNTYHLWLRPGEDIIEEAGGLHKFMNWDGSILTDSGGFQVFSLSDLRKIEEEGVHFRNHISGEKLFLSPEKAMQIQNSLGSDIMMAFDECPPYPAEHKYMKNSVERTSRWAERCLEAHKRPQDQGLFGIVQGGEYEDLRRQSAKDLTSLDFPGYAIGGLSVGEPKDVMNRVLEFTTPLLPNEKPRYLMGVGSPDSLIDGAIRGVDMFDCVLPTRIARNGTLMTSQGRLVVRNAKYARDFSPIDPNCDCYTCKNYTRAYVRHLIKTDETFGLRLTSYHNLYFLVKLMEQVRQAIREDRLGDFREEFFEQYGFNKPNAKNF

SEQ ID NO: 55893 - protein, 375 aa, unidentified
  source 1..375: note = Halomicronema excentricum
  REGION 1..375: note = tr|A0A4Q7E2E2|A0A4Q7E2E2_9CYAN Queuine tRNA-ribosyltransferase OS=Halomicronema excentricum str. Lakshadweep OX=2294035 GN=tgt PE=3 SV=1
MKPFEYQVEATCQYTAARAGKFQTPHGIVETPRFMPVGTLANVKTVTPDQLQHTGAQMVLANTYHLHLQPGEALVEMAGGVHQFMGWHGPMLTDSGGFQVFSLSDIRTISEAGVQFKSPRDGRIINMTPEESIRIQNALGADVIMAFDECPPYPASREAVAVATDRTYRWLQRCIAAHQRPDQALFGIVQGGVYPDLRAQAAAALKELDLPGYAIGGVSVGEPPELIEKIVRATTPLLPPHKPRYLMGVGTHREMVQAIAAGMDLFDCVIPTRLARHGTAIVQGERWNLKNARFRQDLTPLDETCGCYTCRTFTRAYLCHLIHAHEILAHTLLSIHNITALVSFTQRIREAILSDRFVEEFGHWLSPETALSELA

SEQ ID NO: 55894 - protein, 338 aa, unidentified
  source 1..338: note = Halomicronema hongdechloris
  REGION 1..338: note = tr|A0A1Z3HFR9|A0A1Z3HFR9_9CYAN Queuine tRNA-ribosyltransferase OS=Halomicronema hongdechloris C2206 OX=1641165 GN=tgt PE=3 SV=1
MPVGTLANIKTVTPAQLKMTGAEMVLANTYHLHLQPGEDIVAEAGGLHRFMAWDGPILTDSGGFQVFSLSQIRTITETGVTFQSPRDGRMIQLTPETSIQIQNRLGADVIMAFDECLPYPSAYEVTAAATHRTHRWLQRCVEANQRPDQALFGIVQGGIYLDLRQQAAAALSEFNLPGYAIGGVSVGEPPDLIAKIVQVTTPLLPADKPRYLMGVGTYREMAQAIAAGIDLFDCVIPTRLARHGSALVAGERWNLKNARFRRDHAALDDACPCYTCRYFSRAYLCHLIHAQELLAFTLLSIHNITELVRFTQRIRESILANTFVADFAAWLRSEPTAQ

SEQ ID NO: 55895 - protein, 378 aa, unidentified
  source 1..378: note = Halomonadaceae bacterium
  REGION 1..378: note = tr|A0A139CBH4|A0A139CBH4_9GAMM Queuine tRNA-ribosyltransferase OS=Halomonadaceae bacterium T82-2; OX = 1783518 GN=tgt PE=3 SV=1
MRNDCFMNFEHLASDGRARRGRLTFPRGTVETPAFMPVGTYGTVKGMTPQSVKEIGAEIILGNTFHLWLRPGMEVIEAHGDLHDFAQWDKPILTDSGGFQVFSLGAMRKITEEGVHFRSPVDGAKVFMGPEESMAVQRSLGSDIVMIFDECTPYPATETEARLSMERSLRWAERSRAAHGSSPSALFGIVQGGMYPELRERSLKGLVDIGFDGLAIGGLSVGEPKEEMIRVLDYLPTWMPADKPRYLMGVGKPEDLVEGVRRGVDMFDCVMPTRNGRNGHLFTAEGTVKIRNAKHRHDTRPLEEGCDCYTCQHFSRSYLHHLDRCGEMLGSMLNTIHNLRYYQRVMAGLRGAIEAGTLADFVAAFYARRGLPVPDAPR

SEQ ID NO: 55896 - protein, 375 aa, unidentified
  source 1..375: note = Halomonadaceae bacterium
  REGION 1..375: note = tr|A0A2E2BM79|A0A2E2BM79_9GAMM Queuine tRNA-ribosyltransferase OS=Halomonadaceae bacterium; OX = 2026746 GN=tgt PE=3 SV=1
MTFERLATDGRARRGRLSFPRGTVETPAFMPVGTYGTVKGMTPQSVEEIGAEIILGNTFHLWLRPGTEVIEEHGDLHDFAHWNKPILTDSGGFQVFSLGKTRKITEEGVHFRSPVDGSKVFMGPEESMAVQRSLGSDVVMIFDECTPYPATHDEAKRSMEMSLRWAKRSRDAHGDSPSALFGIIQGGMYADLRKTSLEGLDEIGFDGYAIGGLSVGEPKEEMIKVLDYLPEWMPDDKPRYLMGVGKPEDLVEGVRRGVDMFDCVMPTRNGRNGHLFTFEGTIKIRNARHRHDTSPLEADCDCYTCQNFSRGYLHHLDRCGEMLGAMLNTIHNLRHYQRLMAGLRGAIEAGTLANFVEAYYGRRGLPVPPLEPTPE

SEQ ID NO: 55897 - protein, 378 aa, unidentified
  source 1..378: note = Halomonas aestuarii
  REGION 1..378: note = tr|A0A1J0VEI6|A0A1J0VEI6_9GAMM Queuine tRNA-ribosyltransferase OS=Halomonas aestuarii OX=1897729; GN = tgt PE=3 SV=1
MRKDSFMTFERLAGDGRARRGRLTFPRGTVETPAFMPVGTYGTVKGMTPQSVKEIGAEIILGNTFHLWLRPGTEVIEEHGDLHDFAQWDKPILTDSGGFQVFSLGAMRKITEQGVHFRSPVDGSKVFMGPEESMAVQRSLGSDVVMIFDECTPYPATHDEAKRSMEMSLRWAKRSRDAHGDSPSALFGIIQGGMYPDLREASLKGLDEIGFDGYAIGGLSVGEPKEEMIKVLDYLPEWMPVDKPRYLMGVGKPEDLVEGVRRGVDMFDCVMPTRNGRNGHLFTAEGTVKIRNARHRHDTRPLEEGCDCYTCQHFSRSYLHHLDRCGEMLGSMLNTIHNLRHYQRLMAGLRGAIEAGTLANFVEGFYTQRGLPVPPAPN

SEQ ID NO: 55898 - protein, 401 aa, Halomonas alkaliantarctica
  REGION 1..401: note = tr|A0A4R7YNY1|A0A4R7YNY1_9GAMM Queuine tRNA-ribosyltransferase OS=Halomonas alkaliantarctica; OX = 232346 GN=tgt PE=3 SV=1
MLIVDPLALHPSRQTNEINELLYMRNECFMRFERLADDGRARRGRLHFPRGTVETPAFMPVGTYGTVKGMTPDSVKEIGAEIILGNTFHLWLRPGTEVIEAHGDLHDFAQWDKPILTDSGGFQVFSLGETRKITEQGVHFRSPVDGSKVFMGPEESMAVQRSLGSDVVMIFDECTPYPATFDEAEKSMELSLRWAKRSRDAHGDSPSALFGIIQGGMHPELRERSLKGLLEIGFDGLAIGGLSVGEPKEEMIKVLDYLPTWMPDDKPRYLMGVGKPEDLVEGVRRGVDMFDCVMPTRNARNGHLFTSDGTVKIRNAKHRFDTRPLDEECDCHTCQNFSRGYLHHLDRCNEMLGSMLNTIHNLRYYQRVMADLRAAIEAGTLTTFVEGFYARRGLPVPALAT

SEQ ID NO: 55899 - protein, 372 aa, Halomonas alkaliphila
  REGION 1..372: note = tr|A0A386WXV1|A0A386WXV1_9GAMM Queuine tRNA-ribosyltransferase OS=Halomonas alkaliphila OX=272774; GN = tgt PE=3 SV=1
MRFERLADDGRARRGRLHFPRGTVETPAFMPVGTYGTVKGMTPDSVKEIGAEIILGNTFHLWLRPGTDVIEAHGDLHDFAQWDKPILTDSGGFQVFSLGEMRKITEQGVHFRSPVDGSKVFMGPEESMAVQRSLGSDVVMIFDECTPYPATFEEAEKSMELSLRWAKRSRDAHGNSPSALFGIIQGGMHPELRERSLKGLLEIGFDGLAIGGLSVGEPKEEMIKVLDYLPTWMPDDTPRYLMGVGKPEDLVEGVRRGVDMFDCVMPTRNARNGHLFTSEGTVKIRNAKHRFDTQPLDAECDCYTCKNFSRGYLHHLDRCNEMLGSMLNTIHNLRYYQRVMADLRAAIEAGTLTTFVEGFYAQRGLPVPPLAN

SEQ ID NO: 55900 - protein, 372 aa, Halomonas andesensis
  REGION 1..372: note = tr|A0A433KJG3|A0A433KJG3_9GAMM Queuine tRNA-ribosyltransferase OS=Halomonas andesensis OX=447567; GN = tgt PE=3 SV=1
MHFERLADDGRARRGRLHFPRGTVETPTFMPVGTYGTVKGMTPDSVKEIGAEIILGNTFHLWLRPGTDVIEAHGDLHDFAQWDKPILTDSGGFQVFSLGEMRKITEQGVHFRSPVDGSKVFMGPEESMAVQRALGSDVVMIFDECTPYPATFEEAEKSMELSLRWAKRSRDAHGDSPSALFGIIQGGMHPELRERSLKGLLDIGFDGLAIGGLSVGEPKEEMIKVLDYLPTWMPDDTPRYLMGVGKPEDLVEGVRRGVDMFDCVMPTRNARNGHLFTSEGTVKIRNAKHRFDTRPLDEACDCYTCKNFSRGYLHHLDRCNEMLGSMLNTIHNLRYYQRVMADLRAAIEAGTLTTFVEGFYAQRGLPVPPLAN

SEQ ID NO: 55901 - protein, 373 aa, Halomonas anticariensis
  REGION 1..373: note = tr|S2LB44|S2LB44_HALAF Queuine tRNA-ribosyltransferase OS=Halomonas anticariensis (strain DSM 16096 / FP35) OX=1121939 GN=tgt PE=3 SV=1
MNFERLASDGRARRGRLHFPRGTVETPAFMPVGTYGTVKGMTPASVEEIGAEIILGNTFHLWLRPGTEVIEAHGDLHDFAQWQKPILTDSGGFQVFSLGEMRKITEEGVHFRSPVDGAKVFMGPEESMAVQRSLGSDIVMIFDECTPYPATLEQAETSMELSLRWAKRSRIAHGDSPSALFGIIQGGMYPALRERSLAGLLEIGFDGLAIGGLSVGEPKEQMIEVLDYLPTWMPEDKPRYLMGVGKPEDLVEGVRRGVDMFDCVMPTRNARNGHLFTFEGTIKIRNAKHRHDTRPLEEDCDCYTCQHFSRGYLHHLDRCGEMLGSMLNTIHNLRHYQRVMAGLRGAIEAGTLANFVERFYTQRGLPVPPAPTA

SEQ ID NO: 55902 - protein, 381 aa, Halomonas aquamarina
  REGION 1..381: note = tr|A0A1H8HAN2|A0A1H8HAN2_9GAMM Queuine tRNA-ribosyltransferase OS=Halomonas aquamarina OX=77097; GN = tgt PE=3 SV=1
MRNECFMRFERLAEDGRARRGRLHFPRGTVETPAFMPVGTYGTVKGMTPESVKEIGAEIILGNTFHLWLRPGTDVIEAHGDLHDFAQWDKPILTDSGGFQVFSLGEMRKITEQGVHFRSPVDGSKVFMGPEESMAVQRSLGSDVVMIFDECTPYPATFEEAEKSMELSLRWAKRSRDAHGDSPSALFGIIQGGMHPELRERSLKGLLEIGFDGLAIGGLSVGEPKEEMIKVLDYLPTWMPDDTPRYLMGVGKPEDLVEGVRRGVDMFDCVMPTRNARNGHLFTSDGTVKIRNAKHRFDTRPLDEECDCHTCQNFSRGYLHHLDRCNEMLGSMLNTIHNLRYYQRVMADLRAAIEAGTLTTFVESFYARRGLPVPPLAESDT

SEQ ID NO: 55903 - protein, 378 aa, Halomonas arcis
  REGION 1..378: note = tr|A0A1H0BGI7|A0A1H0BGI7_9GAMM Queuine tRNA-ribosyltransferase OS=Halomonas arcis OX=416873; GN = tgt PE=3 SV=1
MRNDCFMRFERLADDGRARRGRLHFPRGTVETPAFMPVGTYGTVKGMTPESVKEIGAEIILGNTFHLWLRPGTQVIEAHGDLHDFAQWDKPILTDSGGFQVFSLGETRKITEQGVHFRSPVDGSKVFMGPEESMAVQRSLGSDVVMIFDECTPYPATFEEAEKSMELSLRWAKRSREAHGDSPSALFGIIQGGMHPELRERSLKGLLDIGFDGLAIGGLSVGEPKEEMIKVLDYLPTWMPDDTPRYLMGVGKPEDLVEGVRRGVDMFDCVMPTRNARNGHLFTAEGTVKIRNAVHRFDTQPLEEGCDCHTCQHFSRGYLHHLDRCNEMLGSMLNTIHNLRYYQRVMADLRAAIEAGTLTNFVEGFYARRGLPVPPLAN

SEQ ID NO: 55904 - protein, 378 aa, unidentified
  source 1..378: note = Halomonas beimenensis
  REGION 1..378: note = tr|A0A291P3E5|A0A291P3E5_9GAMM Queuine tRNA-ribosyltransferase OS=Halomonas beimenensis OX=475662; GN = tgt PE=3 SV=1
MRDECFMTFEHLASDGRARRGRLSFPRGTVETPAFMPVGTYGTVKGMTPQSVKEIGAEIILGNTFHLWLRPGTEVIEGHGDLHDFAQWDKPILTDSGGFQVFSLGEMRKITEEGVHFRSPVDGSRVFMGPEESMAVQRSLGSDIVMIFDECTPYPASLEEARRSMEMSLRWARRSRDAHGDSPSALFGIIQGGMYPELREQSLKGLEAIGFDGYAIGGLSVGEPKEEMLAVLDYLPEWMPADKPRYLMGVGKPEDLVEGVRRGVDMFDCVMPTRNARNGHLFTGEGTIKIRNAKHRHDTRPLDEDCDCYTCQHFSRAYLHHLDRCGEMLGSMLNTIHNLRHYQRLMAGLRGAIEAGTLAHFVDGFYAQRGLPVPPAPN

SEQ ID NO: 55905 - protein, 372 aa, Halomonas boliviensis
  REGION 1..372: note = tr|A0A265E3N7|A0A265E3N7_9GAMM Queuine tRNA-ribosyltransferase OS=Halomonas boliviensis LC1; OX = 1072583 GN=tgt PE=3 SV=1
MRFEHLADDGRARRGRLHFPRGTVETPAFMPVGTYGTVKGMTPDSVKEIGAEIILGNTFHLWLRPGTEVIEAHGDLHDFAQWDKPILTDSGGFQVFSLGETRKITEQGVHFRSPVDGSKVFMGPEESMAVQRSLGSDVVMIFDECTPYPATFDEAEKSMELSLRWAKRSRDAHGDSPSALFGIIQGGMHPELRERSLKGLLEIGFDGLAIGGLSVGEPKEEMIKVLDYLPTWMPDDKPRYLMGVGKPEDLVEGVRRGVDMFDCVMPTRNARNGHLFTSEGTVKIRNAKHRFDTRPLDEECDCHTCKSFSRGYLHHLDRCNEMLGSMLNTIHNLRYYQRVMADLRAAIEAGTLTTFVEGFYARRGLPVPPLAN

SEQ ID NO: 55906 - protein, 372 aa, Halomonas campaniensis; identical to SEQ ID NO: 55899
  REGION 1..372: note = tr|A0A060BCP0|A0A060BCP0_9GAMM Queuine tRNA-ribosyltransferase OS=Halomonas campaniensis; OX = 213554 GN=tgt PE=3 SV=1

SEQ ID NO: 55907 - protein, 379 aa, Halomonas campaniensis
  REGION 1..379: note = tr|A0A246RYQ9|A0A246RYQ9_9GAMM Queuine tRNA-ribosyltransferase OS=Halomonas campaniensis; OX = 213554 GN=tgt PE=3 SV=1
MRNECFMRFERLADDGRARRGRLHFPRGTVETPAFMPVGTYGTVKGMTPDSVKEIGAEIILGNTFHLWLRPGTEVIEAHGDLHDFAQWDKPILTDSGGFQVFSLGETRKITEQGVHFRSPVDGSKVFMGPEESMAVQRSLGSDVVMIFDECTPYPATFEEAEKSMELSLRWAKRSRDAHGDSPSALFGIIQGGMHPELRERSLKGLLEIGFDGLAIGGLSVGEPKEEMIKVLDYLPTWMPDEKPRYLMGVGKPEDLVEGVRRGVDMFDCVMPTRNARNGHLFTSEGTVKIRNAKHRFDTRPLDEECDCHTCQNFSRGYLHHLDRCNEMLGSMLNTIHNLRYYQRVMADLRAAIEAGTLTTFVEGFYARRGLPVPPLSQP

SEQ ID NO: 55908 - protein, 378 aa, Halomonas caseinilytica
  REGION 1..378: note = tr|A0A1M6VH85|A0A1M6VH85_9GAMM Queuine tRNA-ribosyltransferase OS=Halomonas caseinilytica; OX = 438744 GN=tgt PE=3 SV=1
MRNECFMTFERLASDGRARRGRLTFPRGTVETPAFMPVGTYGTVKGMTPQSVQEIGAEIILGNTFHLWLRPGTEVIEAHGDLHDFAQWDKPILTDSGGFQVFSLGEMRKITEQGVHFRSPVDGAKVFMGPEESMAVQRALGSDIVMIFDECTPYPATFDEARRSMEMSLRWAQRSRDAHGASPSALFGIIQGGMYPALREASLKGLGEIGFDGYAIGGLSVGEPKEEMLEVLDYLPEWMPDDKPRYLMGVGKPEDLVEGVRRGVDMFDCVMPTRNARNGHLFTAEGTVKIRNARHRHDTGPLEEGCDCYTCRNFSRAYLHHLDRCGEMLGSMLNTVHNLRHYQRLMAGLRGAIEAGTLAHFVEGFYAQRGLPVPPVPN

SEQ ID NO: 55909 - protein, 378 aa, unidentified
  source 1..378: note = Halomonas chromatireducens
  REGION 1..378: note = tr|A0A109UKR6|A0A109UKR6_9GAMM Queuine tRNA-ribosyltransferase OS=Halomonas chromatireducens; OX = 507626 GN=tgt PE=3 SV=1
MRNESFMSFERLASDGRARRGRLTFPRGTVETPAFMPVGTYGTVKGMTPASVEEIGAEIILGNTFHLWLRPGTEVIEGHGDLHDFSQWHKPILTDSGGFQVFSLGKMRKITEEGVQFRSPVDGAKVFMGPEESIAVQRSLGSDVVMIFDECTPYPATEQEAELSMERSLRWAKRSREAHGDSPSALFGIIQGGMYPELRRRSLDGLLEIGFDGLAIGGLSVGEPKEEMIGVLNYLPEWMPEEYPRYLMGVGKPEDLVEGVRRGVDMFDCVMPTRNARNGHLFTAEGTVKIRNAKHRHDTRPLEEGCDCYTCQNFSRGYLHHLDRCGEMLGSMLNTIHNLRHYQRLMAGLRGAIEAGTLADFVEGYYEQRGLPVPPAPN

SEQ ID NO: 55910 - protein, 378 aa, Halomonas cupida
  REGION 1..378: note = tr|A0A1M7IMV7|A0A1M7IMV7_9GAMM Queuine tRNA-ribosyltransferase OS=Halomonas cupida OX=44933; GN = tgt PE=3 SV=1
MRNECFMRFEQLASDGRARRGRITFPRGTIETPTFMPVGTYGTVKGMTPVSVEEIGAEIILGNTFHLWLRPGTEVIEAHGDLHDFAQWQKPILTDSGGFQVFSLGEMRKITEEGVHFRSPVDGSKVFMGPEESMAVQRSLGSDIVMIFDECTPWPATFEEAKRSMEMSLRWAKRSRTAHGDSPSALFGIIQGGMYPELREQSLKGLDEIGFDGYAIGGLSVGEPKEEMIKVLDYLPEWMPADKPRYLMGVGKPEDLVEGVRRGVDMFDCVMPTRNARNGHLFTFEGTVKIRNAKHRHDTRPLEDDCDCYTCQHFSRSYLHHLDRCGEMLGSMLNTIHNLRHYQRVMAGLRGAIEAGTLADFVEGFYAQRGMPVPPAPN

SEQ ID NO: 55911 - protein, 378 aa, Halomonas daqiaonensis
  REGION 1..378: note = tr|A0A1H7QZ93|A0A1H7QZ93_9GAMM Queuine tRNA-ribosyltransferase OS=Halomonas daqiaonensis; OX = 650850 GN=tgt PE=3 SV=1
MRDESFMTFERLASDGRARRGRLTFPRGTVETPAFMPVGTYGTVKGMTPVSVEEIGAEIILGNTFHLWLRPGTEVIEAHGDLHDFAQWDKPILTDSGGFQVFSLGAMRKITEQGVHFRSPVDGAKVFMGPEESMAVQRSLGSDVVMIFDECTPYPATEREAARSMELSLRWAKRSREAHGDSPSALFGIIQGGMYPEQREASLKGLLEIGFDGLAIGGLSVGEPKHEMNEVLDYLPTWMPDDTPRYLMGVGKPEDLVEGVRRGIDMFDCVMPTRNGRNGHLFTAEGTVKIRNAKHRFDTRPLEAGCDCYTCGHFSRAYLHHLDRCGEMLGSMLNTVHNLRHYQRLMAGLRGAIEAGTLANFVEGFYAQRGLPVPPTPN

SEQ ID NO: 55912 - protein, 378 aa, Halomonas daqingensis
  REGION 1..378: note = tr|A0A1H5U451|A0A1H5U451_9GAMM Queuine tRNA-ribosyltransferase OS=Halomonas daqingensis OX=419596; GN = tgt PE=3 SV=1
MRNECFMSFERLASDGRARRGRLTFPRGTVETPAFMPVGTYGTVKGMTPKSVEEIGAEIILGNTFHLWLRPGTEVIEAHGDLHDFAQWHKPILTDSGGFQVFSLGEMRKITEEGVHFRSPVDGAKVFMGPEESMAVQRSLGSDVVMIFDECTPYPATEKEAEVSMERSLRWARRSRDAHGSSPSALFGIIQGGMYPELRRRSLEGLMEIGFDGLAIGGLSVGEPKEEMIGVLNYLPEWMPEEYPRYLMGVGKPEDLVEGVRRGVDMFDCVMPTRNARNGHLFTAAGTIKIRNAKHRHDTRPLEDDCDCYTCQNFSRSYLHHLDRCGEMLGSMLNTIHNLRYYQRLMAGLRGAIEAGTLADFVAGYYAQRGLPVPDAPD

SEQ ID NO: 55913 - protein, 378 aa, Halomonas desiderata
  REGION 1..378: note = tr|A0A243T6Z2|A0A243T6Z2_9GAMM Queuine tRNA-ribosyltransferase OS=Halomonas desiderata SP1; OX = 1191209 GN=tgt PE=3 SV=1
MRNECFMSFERLASDGRARRGRLTFPRGTVETPAFMPVGTYGTVKGMTPKSVEEIGAEIILGNTFHLWLRPGTEVIEAHGDLHDFAQWHKPILTDSGGFQVFSLGEMRKITEEGVHFRSPVDGAKVFMGPEESMAVQRSLGSDVVMIFDECTPYPATEKEAEVSMERSLRWAKRSRDAHGSSPSALFGIIQGGMYPELRRRSLEGLMEIGFDGLAIGGLSVGEPKEEMIGVLNYLPEWMPEEYPRYLMGVGKPEDLVEGVRRGVDMFDCVMPTRNARNGHLFTAAGTIKIRNAKHRHDTRPLEDDCDCYTCQNFSRSYLHHLDRCGEMLGSMLNTIHNLRYYQRLMAGLRGAIEAGTLADFVAGYYAQRGLPVPDAPD

SEQ ID NO: 55914 - protein, 378 aa, Halomonas elongata
  REGION 1..378: note = tr|E1V6F6|E1V6F6_HALED Queuine tRNA-ribosyltransferase OS=Halomonas elongata (strain ATCC 33173 / DSM 2581 / NBRC 15536 / NCIMB 2198 / 1H9); OX = 768066 GN=tgt PE=3 SV= 1
MRNECFMTFERLATDGRARRGRLTFPRGTVETPAFMPVGTYGTVKGMTPQSVKEIGAEIILGNTFHLWLRPGTEVIEGHGDLHDFAQWDKPILTDSGGFQVFSLGEMRKITEQGVHFRSPVDGAKVFMGPEESMAVQRSLGSDIVMIFDECTPYPASFDEAKRSMEMSLRWAQRSRDAHGDSPSALFGIIQGGMYPALREASLKGLDEIGFDGYAIGGLSVGEPKEKMIGVLDYLPEWMPADKPRYLMGVGKPEDLVEGVRRGVDMFDCVMPTRNARNGHLFTAEGTVKIRNARHRHDTGPLEEGCDCYTCQHFSRAYLHHLDRCGEMLGSMLNTIHNLRHYQRLMAGLRGAIEAGTLANFVEGFYAQRGLPVPPAPN

SEQ ID NO: 55915 - protein, 378 aa, Halomonas elongata
  REGION 1..378: note = tr|A0A1B8P6Y2|A0A1B8P6Y2_HALEL Queuine tRNA-ribosyltransferase OS=Halomonas elongata OX=2746; GN = tgt PE=3 SV=1
MRNECFMTFERLATDGRARRGRLTFPRGTVETPAFMPVGTYGTVKGMTPQSVKEIGAEIILGNTFHLWLRPGTEVIEGHGDLHDFAQWDKPILTDSGGFQVFSLGEMRKITEQGVHFRSPVDGAKVFMGPEESMAVQRSLGSDIVMIFDECTPYPASFDEAKRSMEMSLRWAQRSRDAHGDSPSALFGIIQGGMYPTLREASLKGLDEIGFDGYAIGGLSVGEPKEEMIGVLDYLPEWMPADKPRYLMGVGKPEDLVEGVRRGVDMFDCVMPTRNARNGHLFTAEGTVKIRNARHRHDTGPLEEGCDCYTCQHFSRAYLHHLDRCGEMLGSMLNTVHNLRHYQRLMAGLRGAIEAGTLANFVEGFYAQRGLPVPPAPN

SEQ ID NO: 55916 - protein, 378 aa, unidentified
  source 1..378: note = Halomonas endophytica
  REGION 1..378: note = tr|A0A2N7U1U6|A0A2N7U1U6_9GAMM Queuine tRNA-ribosyltransferase OS=Halomonas endophytica; OX = 2033802 GN=tgt PE=3 SV=1
MRKESFMTFERLASDGRARRGRLTFPRGTVETPAFMPVGTYGTVKGMTPASVEEIGAEIILGNTFHLWLRPGTEVIEGHGDLHDFSQWQKPILTDSGGFQVFSLGEMRKITEAGVHFRSPVDGAKVFMGPEESMAVQRSLGSDVVMIFDECTPYPATEKEAELSMERSLRWAQRSRDAHGDSPSALFGIIQGGMYPELRKRSLDGLLEIGFDGLAIGGLSVGEPKEEMLKVLNYLPEWMPEEYPRYLMGVGKPEDLVEGVRRGVDMFDCVMPTRNARNGHLFTFEGTVKIRNARHRHDTRPLEDDCDCYTCQHFSRGYLHHLDRCGEMLGSMLNTIHNLRHYQRLMAGLRGAIEAGTLADFVEGYYAQRGLPVPPVPN

SEQ ID NO: 55917 - protein, 378 aa, Halomonas eurihalina
  REGION 1..378: note = tr|A0A5D9CRK9|A0A5D9CRK9_HALER Queuine tRNA-ribosyltransferase OS=Halomonas eurihalina OX=42566; GN = tgt PE=3 SV=1
MRNECFMTFERLATDGRARRGRLTFPRGTVETPAFMPVGTYGTVKGMTPQSVEEIGADIILGNTFHLWLRPGTEVIEGHGDLHDFAQWDKPILTDSGGFQVFSLGEMRKITEQGVHFRSPVDGAKVFMGPEESMAVQRSLGSDIVMIFDECTPYPASFDEAKRSMEMSLRWAQRSRDAHGDSPSALFGIIQGGMYPALREASLKGLDAIGFDGYAIGGLSVGEPKEEMIEVLDYLPEWMPADKPRYLMGVGKPEDLVEGVRRGVDMFDCVMPTRNARNGHLFTAEGTVKIRNAKHRHDTGPLEEGCDCYTCQHFSRAYLHHLDRCGEMLGSMLNTVHNLRHYQRLMAGLRGAIEAGTLANFVEGFYAQRGLPVPPAPN

SEQ ID NO: 55918 - protein, 378 aa, Halomonas gudaonensis
  REGION 1..378: note = tr|A0A1G9A806|A0A1G9A806_9GAMM Queuine tRNA-ribosyltransferase OS=Halomonas gudaonensis OX=376427; GN = tgt PE=3 SV=1
MRNDCFMTFEHLASDGRARRGRLRFPRGTVETPAFMPVGTYGTVKGMTPAMVEEIGAEIILGNTFHLWLRPGTEVIEAHGDLHDFAQWQGPILTDSGGFQVFSLGDIRKITEQGVHFRSPVDGAKVFMGPEESMAVQRALGSDVVMIFDECTPYPADFETAEASMELSLRWAKRSREAHGDSPSALFGIIQGGMHPELRERSLKGLLDIGFDGLAIGGLSVGEPKEEMMRALDYLPTWMPPEHPRYLMGVGKPEDLVEGVRRGIDMFDCVMPTRNARNGHLFTATGTVKIRNARHRHDTGPLEADCDCYTCRHFSRAYLHHLDRCNEMLGAMLNTIHNLRYYQRLMAGLRGAIEAGTLANFVEGFYAQRGLPVPPAPN

SEQ ID NO: 55919 - protein, 372 aa, Halomonas halmophila
  REGION 1..372: note = tr|A0A4Y4F5D9|A0A4Y4F5D9_9GAMM Queuine tRNA-ribosyltransferase OS=Halomonas halmophila OX=252; GN = tgt PE=3 SV=1
MTFERHASDGRARRGTLTFPRGRVETPAFMPVGTYGTVKGMTPQSVQEIGAEIILGNTFHLWLRPGTEVIEQHGDLHDFAQWDKPILTDSGGFQVFSLGEMRKITEQGVHFRSPVDGAKVFMGPEESMAVQRSLGSDIVMIFDECTPYPATFEEAKRSMEMSLRWAQRSRDAHGDSPSALFGIIQGGMYPELREASLKGLDEIGFDGYAIGGLSVGEPKEEMIEVLDYLPEWMPDDKPRYLMGVGKPEDLVEGVRRGVDMFDCVMPTRNARNGHLFTAEGTVKIRNARHRHDTGPLEAGCDCYTCQNFSRAYLHHLDRCGEMLGSMLNTVHNLRHYQRLMAGLRGAIEAGTLANFVEVFYAQRGLPLPPAPN

SEQ ID NO: 55920 - protein, 372 aa, Halomonas halophila
  REGION 1..372: note = tr|A0A510ZFT5|A0A510ZFT5_9GAMM Queuine tRNA-ribosyltransferase OS=Halomonas halophila OX=29573; GN = tgt PE=3 SV=1
MNFEHLASDGRARRGRLSFPRGTVETPAFMPVGTYGTVKGMTPESVKEIGAEIILGNTFHLWLRPGTEVIEEHGDLHDFAQWDKPILTDSGGFQVFSLGEMRKITEQGVHFRSPVDGSKVFMGPEESMAVQRSLGSDIVMIFDECTPYPATEDEARKSMEMSLRWAQRSRDAHGDSPSALFGIIQGGMYPELREASLEGLEKIGFDGYAIGGLSVGEPKEEMIKVLDYLPEWMPADKPRYLMGVGKPEDLVEGVRRGVDMFDCVMPTRNARNGHLFTGEGTVKIRNAKHRHDTRPLDEECDCYTCRNFSRAYLHHLDRCGEMLGSMLNTIHNLRHYQRLMAGLRGAIEAGTLANFVEGFYAQRGLPVPPAPN

SEQ ID NO: 55921 - protein, 378 aa, unidentified
  source 1..378: note = Halomonas heilongjiangensis
  REGION 1..378: note = tr|A0A2N7TIA2|A0A2N7TIA2_9GAMM Queuine tRNA-ribosyltransferase OS=Halomonas heilongjiangensis; OX = 1387883 GN=tgt PE=3 SV=1
MRNECFMSFERLASDGRARRGRLTFPRGTVETPAFMPVGTYGTVKGMTPASVEEIGAEIILGNTFHLWLRPGMEVIEAHGDLHDFAQWDRPILTDSGGFQVFSLGAMRKITEQGVHFRSPVDGAKVFMGPEESMAVQRSLGSDVVMIFDECTPYPATEQDAALSMERSLRWATRSREAHGDSPSALFGIIQGGMYPSLRERSLAGLLEIGFDGLAIGGLSVGEPKEEMIRVLDYLPTWMPDDKPRYLMGVGKPEDLVEGVRRGVDMFDCVMPTRNARNGHLFTAEGTVKIRNAKHRHDTRPLEEGCDCYTCQHFSRGYLHHLDRCGEMLGSMLNTIHNLRHYQRLMAGLRGAIEAGTLANFVEGFYAQRGLPVPPAPN

SEQ ID NO: 55922 - protein, 378 aa, unidentified
  source 1..378: note = Halomonas huangheensis
  REGION 1..378: note = tr|W1NAC2|W1NAC2_9GAMM Queuine tRNA-ribosyltransferase OS=Halomonas huangheensis; OX = 1178482 GN=tgt PE=3 SV=1
MRNECFMSFEQLATDGRARRGRISFPRGTIETPTFMPVGTYGTVKGMTPASVEEIGAEIILGNTFHLWLRPGTDVIEAHGDLHDFAQWHKPILTDSGGFQVFSLGEMRKITEEGVHFRSPVDGSKVFMGPEESMAVQRSLGSDIVMIFDECTPWPATFEEAKRSMEMSLRWANRSRIAHGDSPSALFGIIQGGMYPELREQSLKGLDEIGFDGYAIGGLSVGEPKEEMIKVLDYLPEWMPADKPRYLMGVGKPEDLVEGVRRGVDMFDCVMPTRNARNGHLFTFEGTVKIRNAKHRHDTGPLEEGCDCYTCQNFSRGYLHHLDRCGEMLGSMLNTIHNLRHYQRVMAGLRGAIEAGTLADFVEDFYAQRGLPVPPAPN

SEQ ID NO: 55923 - protein, 375 aa, Halomonas hydrothermalis
  REGION 1..375: note = tr|A0A291JU36|A0A291JU36_9GAMM Queuine tRNA-ribosyltransferase OS=Halomonas hydrothermalis; OX = 115561 GN=tgt PE=3 SV=1
MRFERLAEDGRARRGRLHFPRGTVETPAFMPVGTYGTVKGMTPESVKEIGAEIILGNTFHLWLRPGTDVIEAHGDLHDFAQWDKPILTDSGGFQVFSLGEMRKITEQGVHFRSPVDGSKVFMGPEESMAVQRSLGSDVVMIFDECTPYPATFEEAEKSMELSLRWAKRSRTAHGDSPSALFGIIQGGMYPELRERSLKGLLDIGFDGLAIGGLSVGEPKEEMIKVLDYLPTWMPDDTPRYLMGVGKPEDLVEGVRRGVDMFDCVMPTRNARNGHLFTSDGIVKIRNAKHRFDTRPLDEECDCHTCQNFSRGYLHHLDRCNEMLGSMLNTIHNLRYYQRVMADLRAAIEAGTLTTFVEGFYARRGLPVPPLAGPET

SEQ ID NO: 55924 - protein, 378 aa, Halomonas ilicicola
  REGION 1..378: note = tr|A0A1M4T7B2|A0A1M4T7B2_9GAMM Queuine tRNA-ribosyltransferase OS=Halomonas ilicicola DSM 19980; OX = 1121942 GN=tgt PE=3 SV=1
MRNDCFMKFDRLASDGRARRGRLTFPRGTVETPAFMPVGTYGTVKGMTPQSVEEIGAEIILGNTFHLWLRPGTEVIEAHGDLHDFSQWQGPILTDSGGFQVFSLGAMRKITEAGVHFRSPVDGAKVFMGPEESMAVQRSLGSDVVMIFDECTPYPATPDEAQRSMELSLRWAERSRIAHGDSPSALFGIIQGGMYPELRKRSLEGLEAIGFDGLAIGGLSVGEPKAEMIEVLDYLPTWMPEDKPRYLMGVGKPEDLVEGVRRGIDMFDCVMPTRNARNGHLFTAEGTIKIRNARHRHDTRPLEADCDCYTCRHFSRGYLHHLDRCGEMLGAMLNTIHNLRHYQRLMAGLRGAIEAGTLANFVGMFYARRGLPVPDAPH

SEQ ID NO: 55925 - protein, 378 aa, Halomonas korlensis
  REGION 1..378: note = tr|A0A1I7I874|A0A1I7I874_9GAMM Queuine tRNA-ribosyltransferase OS=Halomonas korlensis OX=463301; GN = tgt PE=3 SV=1
MRDESFMTFEHLASDGRARRGRLTFPRGSVETPAFMPVGTYGTVKGMTPAAVEEIGAEIILGNTFHLWLRPGTEVIEAHGDLHDFAQWQKPILTDSGGFQVFSLGETRKITEQGVHFRSPVDGAKVFMGPEESMAVQRALGSDVVMIFDECTPYPATEQEAEVSMERSLRWAKRSREAHGDSSSALFGIIQGGMYPELRRRSLEGLLEIGFDGLAIGGLSVGEPKHEMIATLDYLPDWMPAQYPRYLMGVGKPEDLVEGVRRGIDMFDCVMPTRNARNAHLFTFDGTVKIRNAKHRHDTRPLEAGCDCYTCQHFSRGYLHHLERCGEMLGSMLNTVHNLRHYQRLMAGLRGAIEAGTLANFVEGFYAQRGLPVPPAPN

SEQ ID NO: 55926 - protein, 381 aa, Halomonas meridiana
  REGION 1..381: note = tr|A0A0D7UZ22|A0A0D7UZ22_9GAMM Queuine tRNA-ribosyltransferase OS=Halomonas meridiana OX=29570; GN = tgt PE=3 SV=1
MRNECFMRFERLAEDGRARRGRLHFPRGTVETPAFMPVGTYGTVKGMTPESVKEIGAEIILGNTFHLWLRPGTDVIEAHGDLHDFAQWDKPILTDSGGFQVFSLGEMRKITEQGVHFRSPVDGSKVFMGPEESMAVQRSLGSDVVMIFDECTPYPATFEEAEKSMELSLRWAKRSRDAHGDSPSALFGIIQGGMHPELRERSLKGLLEIGFDGLAIGGLSVGEPKEEMIKVLDYLPTWMPDDTPRYLMGVGKPEDLVEGVRRGVDMFDCVMPTRNARNGHLFTSEGTVKIRNAKHRFDTRPLDEECDCHTCQNFSRGYLHHLDRCNEMLGSMLNTIHNLRYYQRVMADLRAAIEAGTLTTFVESFYARRGLPVPPLAGAES

SEQ ID NO: 55927 - protein, 381 aa, Halomonas meridiana; identical to SEQ ID NO: 55902
  REGION 1..381: note = tr|A0A1N6DAX5|A0A1N6DAX5_9GAMM Queuine tRNA-ribosyltransferase OS=Halomonas meridiana OX=29570; GN = tgt PE=3 SV=1

SEQ ID NO: 55928 - protein, 378 aa, Halomonas muralis
  REGION 1..378: note = tr|A0A1G9RY95|A0A1G9RY95_9GAMM Queuine tRNA-ribosyltransferase OS=Halomonas muralis OX=119000; GN = tgt PE=3 SV=1
MRNECFMSFERLANDGRARRGRLSFPRGTVETPAFMPVGTYGTVKGMTPQSVKDIGAEIILGNTFHLWLRPGVEVIEAHGDLHDFAQWDRPILTDSGGFQVFSLGAMRKITEQGVHFRSPVDGAKVFMGPEESMAVQRSLGSDVVMIFDECTPYPATEEEAKHSMERSLRWAERSRIAHGDSPSALFGIIQGGMYPELRERSLKGLLETGFDGLAIGGLSVGEPKEAMIEVLDYLPTWMPDEMPRYLMGVGKPEDLVEGVRRGIDMFDCVMPTRNARNGHLFSAEGTVKIRNAKHRHDTRPIEEGCDCYTCQHFSRGYLHHLDRCGEMLGSMLNTIHNLRHYQRVMSGLRGAIEAGTLANFVETFYARRDMPVPDAPS

SEQ ID NO: 55929 - protein, 372 aa, unidentified
  source 1..372: note = Halomonas nigrificans
  REGION 1..372: note = tr|A0A2A4HRW4|A0A2A4HRW4_9GAMM Queuine tRNA-ribosyltransferase OS=Halomonas nigrificans; OX = 2042704 GN=tgt PE=3 SV=1
MRFERLAEDGRARRGRLHFPRGTVETPAFMPVGTYGTVKGMTPDSIKEIGAEIILGNTFHLWLRPGTDVIEAHGDLHDFAQWDKPILTDSGGFQVFSLGEMRKITEQGVHFRSPVDGSKVFMGPEESMAVQRSLGSDVVMIFDECTPYPATFEEAEKSMELSLRWAKRSRDAHGDSPSALFGIIQGGMHPELRERSLKGLLEIGFDGLAIGGLSVGEPKEEMIKVLDYLPTWMPDETPRYLMGVGKPEDLVEGVRRGVDMFDCVMPTRNARNGHLFTSEGTVKIRNAKHRFDTRPLDEECDCYTCKNFSRGYLHHLDRCNEMLGSMLNTIHNLRYYQRVMADLRAAIEAGTLTTFVEGFYAQRGLPVPPLAN

SEQ ID NO: 55930 - protein, 372 aa, Halomonas nitroreducens
  REGION 1..372: note = tr|A0A431V1M2|A0A431V1M2_9GAMM Queuine tRNA-ribosyltransferase OS=Halomonas nitroreducens; OX = 447425 GN=tgt PE=3 SV=1
MTFEPLASDGRARRGRLTFPRGTVETPAFMPVGTYGTVKGMTPQAVEEIGAEIILGNTFHLWLRPGTEVIEAHGDLHDFAQWDKPILTDSGGFQVFSLGEMRKITEEGVHFRSPVDGAKVFMGPEESMAVQRSLGSDIVMIFDECTPYPATLEEARRSMEMSLRWARRSRDAHGDSPSALFGIIQGGMYPQLREQSLKGLEAIGFDGYAIGGLSVGEPKAEMIEVLDYLPEWMPADKPRYLMGVGKPEDLVEGVRRGVDMFDCVMPTRNARNGHLFTAEGTVKIRNAKHRHDTAPLEADCDCYTCQHFSRAYLHHLDRCGEMLGSMLNTIHNLRHYQRLMAGLRGAIEAGTLANFVEGFYARRGLPVPPAPN

SEQ ID NO: 55931 - protein, 344 aa, unidentified
  source 1..344: note = Halomonas olivaria
  REGION 1..344: note = tr|A0A3T1DIP0|A0A3T1DIP0_9GAMM Queuine tRNA-ribosyltransferase OS=Halomonas olivaria OX=390919; GN = tgt PE=3 SV=1
MRNECFMRFERLADDGRARRGRLHFPRGTVETPAFMPVGTYGTVKGMTPDSVKEIGAEIILGNTFHLWLRPGTEVIEAHGDLHDFAQWDKPILTDSGGFQVFSLGETRKITEQGVHFRSPVDGSKVFMGPEESMAVQRSLGSDVVMIFDECTPYPATFEEAEKSMELSLRWAKRSRDAHGDSPSALFGIIQGGMHPELRERSLKGLLEIGFDGLAIGGLSVGEPKEEMIKVLDYLPTWMPDEKPRYLMGVGKPEDLVEGVRRGVDMFDCVMPTRNARNGHLFTSEGTVKIRNAKHRFDTRPLDEECDCHTCQHFSGAICIIWIAVMKCSARCSIPSTTYATTSV

SEQ ID NO: 55932 - protein, 378 aa, Halomonas pacifica
  REGION 1..378: note = tr|A0A510X5V6|A0A510X5V6_9GAMM Queuine tRNA-ribosyltransferase OS=Halomonas pacifica OX=77098; GN = tgt PE=3 SV=1
MRNDCFMTFEHLASDGRARRGRLTFPRGTVETPAFMPVGTYGTVKGMTPASVKEIGAEIILGNTFHLWLRPGTEVIEAHGDLHDFAQWDKPILTDSGGFQVFSLGEMRKITEEGVHFRSPVDGAKVFMGPEESMAVQRSLGSDVVMIFDECTPYPATEREAELSMERSLRWAKRSRDAHGNSPSALFGIIQGGMYPELRRRSLDGLLEIGFDGLAIGGLSVGEPKEEMIKVLDYLPTWMPDDKPRYLMGVGKPEDLVEGVRRGVDMFDCVMPTRNARNGHLFTFEGTVKIRNAKHRHDTRPLEEDCDCYTCQHFSRAYLHHLDRCGEMLGSMLNTIHNLRHYQRLMAGLRGAIEAGTLANFVERYYARRGLPVPEAPQ

SEQ ID NO: 55933 - protein, 379 aa, Halomonas pantelleriensis
  REGION 1..379: note = tr|A0A1G9S966|A0A1G9S966_9GAMM Queuine tRNA-ribosyltransferase OS=Halomonas pantelleriensis; OX = 48727 GN=tgt PE=3 SV=1
MRNDCFMSFEQLASDGRARRGRLSFPRGTVETPAFMPVGTYGTVKGMTPQSVEEIGAEIILGNTFHLWLRPGTEVIEGHGDLHDFSQWHKPILTDSGGFQVFSLGEMRKITEQGVHFRSPVDGSKVFMGPEESMAVQRSLGSDVVMIFDECTPYPATKQEAEFSMQRSLRWAQRSRDAHGDSSSALFGIIQGGMYPALREASLKGLLDIGFDGLAIGGLSVGEPKEEMIKVLDYLPTWMPAEKPRYLMGVGKPEDLVEGVRRGVDMFDCVMPTRNARNGHLFTAEGTVKIRNAKHRHDTRPLEADCDCYTCQHFSRGYLHHLDRCGEMLGSMLNTIHNLRHYQRLMAGLRGAIEAGTLANFVEMFYARRGLPVPPAPEQ

SEQ ID NO: 55934 - protein, 378 aa, Halomonas saccharevitans
  REGION 1..378: note = tr|A0A1I7AZ25|A0A1I7AZ25_9GAMM Queuine tRNA-ribosyltransferase OS=Halomonas saccharevitans; OX = 416872 GN=tgt PE=3 SV=1
MRKESFMTFERLASDGRARRGRLTFPRGTVETPAFMPVGTYGTVKGMTPESVKEIGAEIILGNTFHLWLRPGTEVIEAHGDLHDFAQWDKPILTDSGGFQVFSLGAMRKITEQGVHFRSPVDGAKVFMGPEESMAVQRSLGSDVVMIFDECTPYPATEKEAELSMQRSLRWAKRSREAHGDSPSALFGIIQGGMYPELREASLKGLLEIGFDGLAIGGLSVGEPKEEMIKVLDYLPTWMPEDTPRYLMGVGKPEDLVEGVRRGVDMFDCVMPTRNARNGHLFTAEGTVKIRNAKHRYDTGPLEEGCDCYTCQNFSRSYLHHLDRCGEMLGSMLNTIHNLRHYQRLMAGLRGAIEAGTLANFVEGFYTQRGLPVPPAPN

SEQ ID NO: 55935 - protein, 378 aa, Halomonas shengliensis
  REGION 1..378: note = tr|A0A1H0CGK5|A0A1H0CGK5_9GAMM Queuine tRNA-ribosyltransferase OS=Halomonas shengliensis; OX = 419597 GN=tgt PE=3 SV=1
MRNDCFMTFERLASDGRARRGRLTFPRGTVETPAFMPVGTYGTVKGMTPASVEEIGAEIILGNTFHLWLRPGMEVIEAHGDLHDFAQWDKPILTDSGGFQVFSLGAMRKITEQGVHFRSPVDGAKVFMGPEESMAVQRSLGSDVVMIFDECTPYPATEKEARLSMERSLRWASRSREAHGASPSALFGIVQGGMYPELRERSLKGLMEIGFDGLAIGGLSVGEPKEEMIKVLDYLPTWMPEDTPRYLMGVGKPEDLVEGVRRGIDMFDCVMPTRNARNGHLFTAEGTVKIRNARHRHDTGPLEAECDCYTCRHFSRAYLHHLDRCGEMLGSMLNTIHNLRHYQRLMAGLRGAIEAGTLANFVEGFYARRGLPVPPAPN

SEQ ID NO: 55936 - protein, 378 aa, unidentified
  source 1..378: note = Halomonas songnenensis
  REGION 1..378: note = tr|A0A2T0V4J3|A0A2T0V4J3_9GAMM Queuine tRNA-ribosyltransferase OS=Halomonas songnenensis; OX = 1176243 GN=tgt PE=3 SV=1
MRNECFMRFERLADDGRARRGRLHFPRGTVETPAFMPVGTYGTVKGMTPASIKEIGAEIILGNTFHLWLRPGVEVIEAHGDLHDFAQWDKPILTDSGGFQVFSLGEMRKITEQGVHFRSPVDGSKVFMGPEESMAVQRSLGSDVVMIFDECTPYPATFEEAEKSMELSLRWAKRSRDAHGDSPSALFGIIQGGMHPELRERSLKGLLEIGFDGLAIGGLSVGEPKEEMIKVLDYLPTWMPDEKPRYLMGVGKPEDLVEGVRRGVDMFDCVMPTRNARNGHLFTADGTVKIRNAKHRHDTSPLEAECDCYTCKNFSRGYLHHLDRCNEMLGSMLNTIHNLRYYQRVMADLRAAIEAGTLTTFVEGFYARRGLPVPPLAE

SEQ ID NO: 55937 - protein, 372 aa, Halomonas sp.
  REGION 1..372: note = tr|A0A368U7U8|A0A368U7U8_9GAMM Queuine tRNA-ribosyltransferase OS=Halomonas sp. TQ8S OX=2282306; GN = tgt PE=3 SV=1
MRFERLADDGRARRGRLHFPRGTVETPAFMPVGTYGTVKGMTPDSVKEIGAEIILGNTFHLWLRPGTEVIEAHGDLHDFAQWDKPILTDSGGFQVFSLGETRKITEQGVHFRSPVDGAKVFMGPEESMSVQRSLGSDVVMIFDECTPYPATFDEAEKSMELSLRWAKRSYDAHGNSPSALFGIIQGGMHPELRERSLKGLLEIGFDGLAIGGLSVGEPKEEMIKVLDYLPDWMPDEMPRYLMGVGKPEDLVEGVRRGIDMFDCVMPTRNARNGHLFTAEGTVKIRNAKHRFDTRPLEEGCDCHTCKHFSRAYLHHLDRCNEMLGSMLNTVHNLRYYQRVMADLRAAIEAGTLTNFVEGFYARRGMPVPPAPN

SEQ ID NO: 55938 - protein, 375 aa, Halomonas sp.
  REGION 1..375: note = tr|A0A2D9LI25|A0A2D9LI25_HALSX Queuine tRNA-ribosyltransferase OS=Halomonas sp. OX=1486246 GN=tgt; PE = 3 SV=1
MRFERLAEDGRARRGRLHFPRGTVETPAFMPVGTYGTVKGMTPESVKEIGAEIILGNTFHLWLRPGTDVIEAHGDLHDFAQWDKPILTDSGGFQVFSLGEMRKITEQGVHFRSPVDGSKVFMGPEESMAVQRSLGSDVVMIFDECTPYPATFEEAEKSMELSLRWAKRSRDAHGDSPSALFGIIQGGMHPELRERSLKGLLEIGFDGLAIGGLSVGEPKEEMIKVLDYLPTWMPDDTPRYLMGVGKPEDLVEGVRRGVDMFDCVMPTRNARNGHLFTSDGTVKIRNAKHRFDTRPLDEECDCHTCQNFSRGYLHHLDRCNEMLGSMLNTIHNLRYYQRVMADLRAAIEAGTLTTFVESFYARRGLPVPPLAESDT

SEQ ID NO: 55939 - protein, 378 aa, Halomonas subglaciescola
  REGION 1..378: note = tr|A0A1M7G0W7|A0A1M7G0W7_9GAMM Queuine tRNA-ribosyltransferase OS=Halomonas subglaciescola; OX = 29571 GN=tgt PE=3 SV=1
MRNECFMRFERLAEDGRARRGRLHFPRGTVETPAFMPVGTYGTVKGMTPDSVEEIGAEIILGNTFHLWLRPGVKVIEAHGDLHDFAQWDKPILTDSGGFQVFSLGKTRKITEEGVHFRSPVDGDKVFMGPEESMAVQRSLGSDVVMIFDECTPYPATFSEAEHSMERSLRWAQRSRDAHGDSPSALFGIIQGGMHEGLRERSLKGLMDIGFDGLAVGGLSVGEPKEDMLKVLDYLPGWMPDDTPRYLMGVGKPEDLVEGVRRGVDMFDCVMPTRNARNGHLFSAGGTVKIRNAKHRFDTRPLEDDCDCHTCQHFSRGYLHHLDRCNEMLGSMLNTIHNLRHYQRLMADLRAAIEAGTLTSFVETFYAKRGLPVPPAPN

SEQ ID NO: 55940 - protein, 378 aa, Halomonas subterranea
  REGION 1..378: note = tr|A0A1H9U1H1|A0A1H9U1H1_9GAMM Queuine tRNA-ribosyltransferase OS=Halomonas subterranea OX=416874; GN = tgt PE=3 SV=1
MRNECFMRFERLAEDGRARRGRLHFPRGTVETPAFMPVGTYGTVKGMTPESVKEIGAEIILGNTFHLWLRPGTEVIEAHGDLHDFAQWDKPILTDSGGFQVFSLGEMRKITEQGVHFRSPVDGSKVFMGPEESMEVQRSLGSDVVMIFDECTPYPATFEEAEKSMELSLRWAKRSRDAHGDSPSALFGIIQGGMHPELRERSLKGLLDIGFDGLAIGGLSVGEPKDEMIKVLDYLPSWMPDDTPRYLMGVGKPEDLVEGVRRGVDMFDCVMPTRNARNGHLFTADGTVKIRNAVHRFDTRPLEEDCDCHTCQHFSRGYLHHLDRCNEMLGSMLNTIHNLRYYQRVMADLRAAIEAGTLTNFVEGFYARRGLPVPPLAN

SEQ ID NO: 55941 - protein, 263 aa, Halomonas sulfidaeris
  REGION 1..263: note = tr|A0A455U374|A0A455U374_9GAMM Queuine tRNA-ribosyltransferase OS=Halomonas sulfidaeris OX=115553; GN = HSBAA_09390 PE=3 SV=1
MRFERLAEDGRARRGRLHFPRGTVETPAFMPVGTYGTVKGMTPESVKEIGAEIILGNTFHLWLRPGTEVIEAHGDLHDFAQWDKPILTDSGGFQVFSLGETRKITEQGVHFRSPVDGSKVFMGPEESMAVQRSLGSDVVMIFDECTPYPATFDEAEKSMELSLRWAKRSRDAHGDSPSALFGIIQGGMHPALRERSLKGLLEIGFDGLAIGGLSVGEPKEEMIKVLDYLPTWMPDEKPRYLMGVGKPEDLVEGVRRGWICSIA

SEQ ID NO: 55942 - protein, 373 aa, Halomonas sulfidaeris
  REGION 1..373: note = tr|A0A365TRI6|A0A365TRI6_9GAMM Queuine tRNA-ribosyltransferase OS=Halomonas sulfidaeris OX=115553; GN = tgt PE=3 SV=1
MRFERLAEDGRARRGRLHFPRGTVETPAFMPVGTYGTVKGMTPDSVKEIGAEIILGNTFHLWLRPGTEVIEAHGDLHDFAQWDKPILTDSGGFQVFSLGETRKITEQGVHFRSPVDGSKVFMGPEESMAVQRSLGSDVVMIFDECTPYPATFDEAEKSMELSLRWAKRSRDAHGDSPSALFGIIQGGMHPELRERSLKGLLEIGFDGLAIGGLSVGEPKEEMIKVLDYLPTWMPDEKPRYLMGVGKPEDLVEGVRRGVDMFDCVMPTRNARNGHLFTSEGTVKIRNAKHRFDTRPLDEECDCHTCKSFSRGYLHHLDRCNEMLGSMLNTIHNLRYYQRVMADLRAAIEAGTLTTFVEGFYARRGLPVPPLSQP

SEQ ID NO: 55943 - protein, 381 aa, Halomonas taeanensis
  REGION 1..381: note = tr|A0A328XUT0|A0A328XUT0_9GAMM Queuine tRNA-ribosyltransferase OS=Halomonas taeanensis OX=284577; GN = tgt PE=3 SV=1
MRNECFMTFERLATDGRARRGRLSFPRGTVETPAFMPVGTYGTVKGMTPQSVEEIGAEIILGNTFHLWLRPGTEVIEAHGDLHDFAHWNKPILTDSGGFQVFSLGKTRKITEEGVHFRSPVDGSKVFMGPEESMAVQRSLGSDVVMIFDECTPYPATHDEAKRSMEMSLRWAKRSRDAHGDSPSALFGIIQGGMYADLREASLKGLDEIGCDGYAIGGLSVGEPKEEMIKVLDYLPEWMPADKPRYLMGVGKPEDLVEGVRRGVDMFDCVMPTRNGRNGHLFTFEGTIKIRNARHRYDTAPLEADCDCYTCQHFSRAYLHHLDRCSEMLGSMLNTIHNLRHYQRLMAGLRGAIEAGTLANFVEAYYGRRGMPVPLLEPNPE

SEQ ID NO: 55944 - protein, 381 aa, Halomonas taeanensis
  REGION 1..381: note = tr|A0A1G7SNG8|A0A1G7SNG8_9GAMM Queuine tRNA-ribosyltransferase OS=Halomonas taeanensis OX=284577; GN = tgt PE=3 SV=1
MRNECFMTFERLATDGRARRGRLSFPRGTVETPAFMPVGTYGTVKGMTPQSVEEIGAEIILGNTFHLWLRPGTEVIEEHGDLHDFAHWNKPILTDSGGFQVFSLGKTRKITEEGVHFRSPVDGSKVFMGPEESMAVQRSLGSDVVMIFDECTPYPATHDEAKRSMEMSLRWAKRSRDAHGDSPSALFGIIQGGMYADLRKTSLEGLDEIGFDGYAIGGLSVGEPKEEMIKVLDYLPEWMPDDKPRYLMGVGKPEDLVEGVRRGVDMFDCVMPTRNGRNGHLFTFEGTIKIRNARHRHDTSPLEADCDCYTCQNFSRGYLHHLDRCGEMLGAMLNTIHNLRHYQRLMAGLRGAIEAGTLANFVEAYYGRRGLPVPPLEPTPE

SEQ ID NO: 55945 - protein, 403 aa, Halomonas titanicae
  REGION 1..403: note = tr|L9UAE1|L9UAE1_9GAMM Queuine tRNA-ribosyltransferase OS=Halomonas titanicae BH1; OX = 1204738 GN=tgt PE=3 SV=1
MLLIVDPLALYPSRQTNEINELLYMRNECFMRFERLADDGRARRGRLHFPRGTVETPAFMPVGTYGTVKGMTPDSVKEIGAEIILGNTFHLWLRPGTEVIEAHGDLHDFAQWDKPILTDSGGFQVFSLGETRKITEQGVHFRSPVDGSKVFMGPEESMAVQRSLGSDVVMIFDECTPYPATFDEAEKSMELSLRWAKRSREAHGDSPSALFGIIQGGMHPELRERSLKGLLEIGFDGLAIGGLSVGEPKEEMIKVLDYLPTWMPDEKPRYLMGVGKPEDLVEGVRRGVDMFDCVMPTRNARNGHLFTSEGTVKIRNAKHRFDTRPLDEECDCHTCQHFSRGYLHHLDRCNEMLGSMLNTIHNLRYYQRVMADLRAAIEAGTLTAFVEGFYARRGLSVPPLSQP

SEQ ID NO: 55946 - protein, 373 aa, Halomonas titanicae
  REGION 1..373: note = tr|A0A558JCF3|A0A558JCF3_9GAMM Queuine tRNA-ribosyltransferase OS=Halomonas titanicae OX=664683; GN = tgt PE=3 SV=1
MRFERLADDGRARRGRLHFPRGTVETPAFMPVGTYGTVKGMTPDSVKEIGAEIILGNTFHLWLRPGTEVIEAHGDLHDFAQWDKPILTDSGGFQVFSLGETRKITEQGVHFRSPVDGSKVFMGPEESMAVQRSLGSDVVMIFDECTPYPATFDEAEKSMELSLRWAKRSREAHGDSPSALFGIIQGGMHPELRERSLKGLLEIGFDGLAIGGLSVGEPKEEMIKVLDYLPTWMPDEKPRYLMGVGKPEDLVEGVRRGVDMFDCVMPTRNARNGHLFTSEGTVKIRNAKHRFDTRPLDEECDCHTCQHFSRGYLHHLDRCNEMLGSMLNTIHNLRYYQRVMADLRAAIEAGTLTAFVEGFYARRGLSVPPLSQP

SEQ ID NO: 55947 - protein, 372 aa, unidentified
  source 1..372: note = Halomonas urumqiensis
  REGION 1..372: note = tr|A0A2N7UMY4|A0A2N7UMY4_9GAMM Queuine tRNA-ribosyltransferase OS=Halomonas urumqiensis; OX = 1684789 GN=tgt PE=3 SV=1
MTFERLASDGRARRGRLTFPRGSVETPAFMPVGTYGTVKGMTPESVAEIGAEIILGNTFHLWLRPGTEVIEAHGDLHDFAQWEKPILTDSGGFQVFSLGAMRKITEQGVHFRSPVDGAKVFMGPEESMAVQRSLGSDVVMIFDECTPYPATEQEASLSMQRSLRWARRSREAHGDSPSALFGIIQGGMYPELREQSLKGLLEIGFDGLAIGGLSVGEPKEEMIQVLDYLPTWMPDDKPRYLMGVGKPEDLVEGVRRGIDMFDCVMPTRNARNGHLFTALGTVKIRNARHRHDTGPLEDGCDCYTCQHFSRAYLHHLERCGEMLGAMLNTIHNLRYYQRLMAGLRGAIEAGTLANFVEGFYAQRGLPVPPAPN

SEQ ID NO: 55948 - protein, 378 aa, Halomonas ventosae
  REGION 1..378: note = tr|A0A4V3DP97|A0A4V3DP97_9GAMM Queuine tRNA-ribosyltransferase OS=Halomonas ventosae OX=229007; GN = tgt PE=3 SV=1
MRKDSFMTFERLASDGRARRGRLTFPRGTVETPAFMPVGTYGTVKGMTPASVEEIGAEIILGNTFHLWLRPGTEVIEAHGDLHDFAQWERPILTDSGGFQVFSLGAMRKITEQGVHFRSPVDGAKVFMGPEESMAVQRSLGSDVVMIFDECTPYPATEAEAAFSMERSLRWAQRSREAHGDSPSALFGIIQGGMYPGLRERSLEGLLEIGFDGLAIGGLSVGEPKEEMIRVLDYLPTWMPDDTPRYLMGVGKPEDLVEGVRRGVDMFDCVMPTRNGRNGHLFTAEGTVKIRNAKHRFDTRPLEAGCDCYTCQHFSRAYLHHLDRCGEMLGSMLNTIHNLRHYQRLMAGLRGAIEAGTLANFVEGFYAQRGLPVPPAPN

SEQ ID NO: 55949 - protein, 378 aa, Halomonas ventosae
  REGION 1..378: note = tr|A0A4R6HKL8|A0A4R6HKL8_9GAMM Queuine tRNA-ribosyltransferase OS=Halomonas ventosae OX=229007; GN = tgt PE=3 SV=1
MRKESFMTFERLASDGRARRGRLTFPRGTVETPAFMPVGTYGTVKGMTPVSVTEIGAEIILGNTFHLWLRPGIQVVEAHGDLHDFAQWDRPILTDSGGFQVFSLGAMRKITEQGVHFRSPVDGAKVFMGPEESMAVQRSLGSDVVMIFDECPPYPATEAEAELSMQRSLRWASRSRDAHGDSPSALFGIIQGGMYPQLREASLKGLLEIGFDGLAIGGLSVGEPKEEMMRVLEYLPSWMPDNTPRYLMGVGKPEDLVESVRRGIDMFDCVMPTRNGRNGHLFAAEGTVKIRNARHRFDTRPLEESCDCYTCRHFSRAYLHHLDRCGEMLGSMLNTIHNLRHYQRLMAGLRGAIEAGTLANFVEGFYAQRGLPVPPAPN

SEQ ID NO: 55950 - protein, 372 aa, Halomonas venusta
  REGION 1..372: note = tr|A0A3Q8WGF5|A0A3Q8WGF5_9GAMM Queuine tRNA-ribosyltransferase OS=Halomonas venusta OX=44935; GN = tgt PE=3 SV=1
MRFERLADDGRARRGRLHFPRGTVETPAFMPVGTYGTVKGMTPDSVKEIGAEIILGNTFHLWLRPGTDVIEAHGDLHDFAQWDKPILTDSGGFQVFSLGEMRKITEQGVHFRSPVDGSKVFMGPEESMAVQRSLGSDVVMIFDECTPYPATFEEAEKSMELSLRWAKRSREAHGDSPSALFGIIQGGMHPELRERSLKGLLEIGFDGLAIGGLSVGEPKEEMIKVLDYLPTWMPDDTPRYLMGVGKPEDLVEGVRRGVDMFDCVMPTRNARNGHLFTSEGTVKIRNAKHRFDTQPLDAECDCYTCKNFSRGYLHHLDRCNEMLGSMLNTIHNLRYYQRVMADLRAAIEAGTLTTFVEGFYAQRGLPVPPLAN

SEQ ID NO: 55951 - protein, 378 aa, Halomonas xianhensis
  REGION 1..378: note = tr|A0A1I2YVH8|A0A1I2YVH8_9GAMM Queuine tRNA-ribosyltransferase OS=Halomonas xianhensis OX=442341; GN = tgt PE=3 SV=1
MRNECFMKFERLASDGRARRGRLTFPRGTVETPAFMPVGTYGTVKGMTPQSVKEIGAEIILGNTFHLWLRPGTEVIEAHGDLHDFAQWDKPILTDSGGFQVFSLGAMRKITEEGVHFRSPVDGAKIFMGPEESMAVQRSLGSDIVMIFDECTPYPATEDEARKSMELSLRWAKRSRIAHGDSPSALFGIIQGGMYPELRKRSLEGLQEIGFDGLAIGGLSVGEPKEEMIKVLDYLPTWMPENKPRYLMGVGKPEDLVEGVRRGVDMFDCVMPTRNARNGHLFTAEGTVKIRNAKHRHDTRPLEAGCDCYTCQHFSRSYLHHLDRCGEMLGSMLNTIHNLRYYQRVMAGLRGAIEAGTLANFVETFYAQRGLPVPDEPR

SEQ ID NO: 55952 - protein, 378 aa, Halomonas xianhensis
  REGION 1..378: note = tr|A0A4R8FY20|A0A4R8FY20_9GAMM Queuine tRNA-ribosyltransferase OS=Halomonas xianhensis OX=442341; GN = tgt PE=3 SV=1
MRNECFMKFERLASDGRARRGRLTFPRGTVETPAFMPVGTYGTVKGMTPQSVKEIGAEIILGNTFHLWLRPGTEVIEAHGDLHDFAQWDKPILTDSGGFQVFSLGAMRKITEEGVHFRSPVDGAKVFMGPEESMAVQRSLGSDIVMIFDECTPYPATEDKARKSMELSLRWAKRSRLAHGDSPSALFGIIQGGMYPELRKRSLEGLQEIGFDGLAIGGLSVGEPKEEMIKVLDYLPTLMPDDKPRYLMGVGKPEDLVEGVRRGVDMFDCVMPTRNARNGHLFTAEGTVKIRNAKHRHDTRPLEEGCDCYTCQHFSRSYLHHLDRCGEMLGSMLNTIHNLRYYQRVMAGLRGAIEAGTLANFVETFYAQRGLPVPDEPR

SEQ ID NO: 55953 - protein, 367 aa, unidentified
  source 1..367: note = Halopeptonella vilamensis
  REGION 1..367: note = tr|A0A4Q8D0Z4|A0A4Q8D0Z4_9GAMM Queuine tRNA-ribosyltransferase OS=Halopeptonella vilamensis; OX = 531306 GN=tgt PE=3 SV=1
MQFETLASDGWARRGRLRFPRGVIDTPAFMPVGTYGTVKGMTPEEVEATGAQVLLGNTFHLMLRPGTEIIADHGGLHDFMHWPYPILTDSGGFQVFSLAQGRKLTEAGVAFRSPVDGSRVFLDAERSMEVQRALGSDIVMIFDECTAWPVDWSEAKRSMERSLRWAERSRDAHGDSQAALFGIVQGGMYNDLRSESLAGLEAIGFDGMAIGGLSVGEPPEERLRVLDALAPQLPAAKPHYLMGVGRPEDFVDCVARGIDMFDCVLPTRNARNGYLFTETGTLRLRNARFARDTRPIEPGCDCYTCQHYSRAYLRHLDRCHEMLGARLNTVHNLRYFQRLMTRIRAAIEAQAFDEFARSFHARRADMT

SEQ ID NO: 55954 - protein, 379 aa, Haloplasma contractile
  REGION 1..379: note = tr|F7PX10|F7PX10_9BACT Queuine tRNA-ribosyltransferase OS=Haloplasma contractile SSD-17B; OX = 1033810 GN=tgt PE=3 SV=1
MSAIRYELIHECKQTGARYGKLHTPHGVIETPIFMPVGTQATVKTLSPEELEDMSAQIILGNTYHLWLQPGDDLIQEAGGLHKFMKWDKPILTDSGGFQVFSLSKLRNIEEEGVHFRHHKSGEKLFLSPEKAISIQNNLGSDIMMSFDECVELPSTFEYTKNSLERTLRWAERGKNAHKNPDTQALFGIVQGGDYEELRRMSALELVKMDFPGYSIGGLSVGEPKEVMYKVLEWTVPFLPKDKPRYLMGVGSPDALLEGSIRGVDMFDCVLPTRIARHGTAMTSEGRVVIKNKVYERDFSPLDHECGCYTCKNYTRAYLRHLHKANEIFGQRLVSYHNLYFLLNLMENVREAIKEDRLLTFKEEFFEKYGLTSGNERGF

SEQ ID NO: 55955 - protein, 341 aa, Halorhodospira halochloris
  REGION 1..341: note = tr|A0A110B262|A0A110B262_HALHR Queuine tRNA-ribosyltransferase OS=Halorhodospira halochloris; OX = 1052 GN=tgt PE=3 SV=1
MPVGTYGTVKGLTPEEVSGLGAEVILANTFHLWLRPGTEIIRQHGGLHSFMGWSGPILTDSGGFQVYSLGKLRRVSEAGVEFRSPVDGAKVFMGPEESLAVQRELGSDIVMIFDECPAYPAQWDEVKRSMELSLRWAQRSRDAHGESAAALFGIVQGGVYPQLRSASLAGLLDIGFDGYAIGGLSVGEPSAERDAVLEHLEPQLPAKQPRYLMGVGKPEDLVECVRRGIDMFDCVMPTRNARNGFLFTSQGLLRLRNSRYRQDTRAVDPACDCYTCRHFSRAYLSHLQRCNEMLGSRLATLHNLRYYQTLMAGLRAAISEGRLASFVDDFYTAREQKPPRV

SEQ ID NO: 55956 - protein, 382 aa, Halorhodospira halophila
  REGION 1..382: note = tr|A1WXQ1|A1WXQ1_HALHL Queuine tRNA-ribosyltransferase OS=Halorhodospira halophila (strain DSM 244 / SL1) OX=349124 GN=tgt PE=3 SV=1
MQLDGAVTDTGALRFERMATDGAARRGRLHLPRGTIETPAFMPVGTYGTVKGLTPEELRELGAEIILGNTFHLWLRPGTEVVRLHGDLHDFMNWQGPILTDSGGFQVYSLGELRKVTEEGVHFRSPVDGARVFMGPEESMAVQRELGSDIVMIFDECPPYPAERSTVQRSMELSLRWAARSRQAHGDNPAALFGIVQGGVYPELRRASLQGLMDIGFDGYAIGGLSVGEPREERDAVLEDLEPRLPVDRPRYLMGVGKPEDLVECVRRGVDLFDCVIPTRNARNGFLFTSEGLVRLRNSRYRTDTAPVDPACDCYTCRNYSRAYLKHLERCNEMLGARLATLHNLYYYQQLMAGLRAAIRDGGLVGFVGDFYARRGQTPPTL

SEQ ID NO: 55957 - protein, 373 aa, Halospina denitrificans
  REGION 1..373: note = tr|A0A4R7JW24|A0A4R7JW24_9GAMM Queuine tRNA-ribosyltransferase OS=Halospina denitrificans; OX = 332522 GN=tgt PE=3 SV=1
MSTPVQMRFETLVSDGPARRGRLSFPRGDVETPAFMPVGTYGTVKGMTPRDLEAIGAHVILGNTFHLMLRPGTEVIAEHGDLHDFAGWERPILTDSGGFQVFSLGEMTRITEEGVAFRSPVDGAKVQLTPERSMEVQKALGADIVMIFDECTPYPATEEEARASMELSLRWASRSRAAHEGNPAALFGIVQGGMHESLRHASLEGLKAIGFDGYAIGGLSVGEPREEMHRILESLEPRMPPDAPRYLMGVGRPEDIVEAVNRGVDMFDCVMPTRNARNGHLFVHEGIVRIRNARHRHDTGPLDPYCDCYTCRHFSRAYLHHLDRCGEMLGAHLATIHNLYYYQTLMAGLREAIQAGTLSAFTNRFYQLRGDSR

SEQ ID NO: 55958 - protein, 367 aa, Halospina sp.
  REGION 1..367: note = tr|A0A5J5FL11|A0A5J5FL11_9GAMM tRNA guanosine(34) transglycosylase Tgt OS=Halospina sp. K52047b OX=2614160; GN = tgt PE=4 SV=1
MEFEHLASDGTARRGRLTFPRGTVETPAFMPVGTYGTVKGMLPRDLEATGAQIILGNTFHLMLRPGTEVIQAHGDLHDFAGWERPMLTDSGGFQVFSLSEMTKTTEAGVTFKSPINGSPVELTPEKSMQVQRALGSDIVMIFDECTPYPATEEEARRSMNLSLRWAERSREAHGDSPSALFGIVQGGMYESLRRESLEGLKNIGFEGYAIGGLSVGEPRGEMHRILEALEPAMPAGAPRYLMGVGRPEDIVEAVSRGVDMFDCVMPTRNARNGHLFTHEGVVRIRNARHRYDTGPVDPMCDCYTCRHFSRGYLHHLDRCGEMLGAQLASIHNLHYYQALMAGLREAIQAGTLATFIDRFYQLRGVAR

SEQ ID NO: 55959 - protein, 371 aa, Halotalea alkalilenta
  REGION 1..371: note = tr|A0A172YIE8|A0A172YIE8_9GAMM Queuine tRNA-ribosyltransferase OS=Halotalea alkalilenta OX=376489; GN = tgt PE=3 SV=1
MRFERIHSDGRARRGRLHFPRGTVETPAFMPVGTYGTVKGMTPRDVEAIGAEIILGNTFHLWLRPGVEVIEAHGDLHDFAQWQRPILTDSGGFQVFSLGAMRKITEQGVHFRSPVDGAKVFMGPEESMAVQRALGSDIVMIFDECTPYPATYDEAERSMELSLRWAKRSREAHGDSPSALFGIIQGGMYRELRERSLAGLGEIGFDGLAIGGLSVGEPKDEMLKVLDYLPTLMPEDKPRYLMGVGKPEDLVEGVRRGVDMFDCVMPTRNARNGHLFTAEGVVKIRNAAHRHSTEPLEAGCDCYTCGNFTRGYLHHLDRCGEMLGAQLNTIHNLRHYQRLMAGLRSAIEAGKLAAFVDDFYARRGLSTPALE

SEQ ID NO: 55960 - protein, 381 aa, unidentified
  source 1..381: note = Halothece sp.
  REGION 1..381: note = tr|K9YBP9|K9YBP9_HALP7 Queuine tRNA-ribosyltransferase OS=Halothece sp. (strain PCC 7418); OX = 65093 GN=tgt PE=3 SV=1
MMCAWMMRMTNISFKFSCQHSCPQTQARAGIFETPHGQVETPRFMPVGTVATVKGLTPAQLESAQAQMILANTYHLHLQPGEAIIERAGGLHSFMGWKQPILTDSGGFQVFSLSDLRKISENGVTFRSPRDGRYIDFTPERAIAVQNALGADVIMAFDECPPYPADYEAVRLATERTERWLERCITAHARPQDQALFGIVQGGVYWDLRTQAAKRLVEFDLPGYAIGGVSVGEPAELIHEIVAVSTPLLPWHKPRYLMGVGTYREMVNAIAHGIDLFDCVIPTRLGRHGTALVQGDRWNLKNARFREDFTSLDPDCPCYCCQSFSRAYLSHLVRSREMLGYLLLSLHNVTELIRFTQRIRTAILEDRFATEFASWLNISDP

SEQ ID NO: 55961 - protein, 373 aa, Halothermothrix orenii
  REGION 1..373: note = sp|B8CXG0|TGT_HALOH Queuine tRNA-ribosyltransferase; OS = Halothermothrix orenii (strain H 168 / OCM 544 / DSM 9562) OX=373903 GN=tgt PE=3 SV=1
MSISFNLLHREINTRARLGKLKTPHGDIDTPIFMPVGTQATVKSMTPDELENIKAQIILSNTYHLYLRPGSSLIDEAGGLHNFMNWQKPILTDSGGFQVFSLSDLREIKEEGVYFRSHLDGSRHFISPEKAIQIQMELGADIIMAFDECPPYPSDYDYVARSLERTVRWARRCKKAHEREDQALFGIIQGGVYRDLRKQSVEALIDIGFPGYAIGGLSVGEEKEKMLEVLDFTVPLMPENKPRYLMGVGAPEDLVEGVIRGVDMFDCVLPTRIARHGTVFTSQGRLTVRNAGYERDFTPLDPECDCYVCKNYTRAYIRHLIKRKEILGVRLTTYHNLYFLLSLMEKIRGAIKEDALLEFRDEFLRKYLNKASI

SEQ ID NO: 55962 - protein, 378 aa, unidentified
  source 1..378: note = Halothiobacillaceae bacterium
  REGION 1..378: note = tr|A0A545SJB8|A0A545SJB8_9GAMM Queuine tRNA-ribosyltransferase OS=Halothiobacillaceae bacterium; OX = 2268194 GN=tgt PE=3 SV=1
MKFDLHTTRGRARRGRLTFARGTVETPAFMPVGTYGTVKAMTPEELREIGAEIVLGNTFHLWLRPGVEIIRKHGDLHDFMHWSGPILTDSGGFQVFSLAGLRKISEEGVRFQSPVDGSKVHLDPETSMAVQHALGSDIVMIFDECTPYPATEKQARLSMELSLRWAARSKQAHVELQGEDPAALFGIVQGGMYPELREVSARGLMEIGFDGYAIGGLSVGEPEDERIKVLDATTHLLPQDRPRYLMGVGKPEDIVEAVRRGIDMFDCVMPTRNARNGHLFTQWGDLRIRNARHQDDTRPVDAHCGCYTCRNYSRAYLRHLDKCNEILGSRLNSIHNLHYYQFLMREIRQAIADDRFEAWADAFYRKRRAGIDAADAAG

SEQ ID NO: 55963 - protein, 374 aa, Halothiobacillus neapolitanus
  REGION 1..374: note = tr|D0KW95|D0KW95_HALNC Queuine tRNA-ribosyltransferase OS=Halothiobacillus neapolitanus (strain ATCC 23641 / c2) OX=555778 GN=tgt PE=3 SV=1
MQFDLIHTDGTARRGQLQFMRGTIQTPAFMPVGTYGTVKAVDPQEIEALGAEIILSNTFHLMLRPGTDVIRAHGDLHDFMGWNKPILTDSGGFQVFSLAEMRKITEEGARFQSPVDGSPVMLTPERSMQIQHELGSDIVMIFDECTPYPATEVQAAESMRLSLRWAARSRTAFDTLKPDNTDTALFGIVQGGMYPALRRESAIGLLNIGFDGYAIGGLSVGEPLDERNQVLEATTPLLPQDKPRYLMGVGKPEDLVESVARGMDMFDCVMPTRNARNGHLFTRYGDIKLRNARYASDTRPLDETCTCTTCQRFSRAYLKHLDKCKEVLGPRLNTIHNLHYYQTLMQEIRVAIEDNAFEAFRTTFHADRARGIDA

SEQ ID NO: 55964 - protein, 381 aa, Halothiobacillus sp.
  REGION 1..381: note = tr|A0A0W1RTA2|A0A0W1RTA2_9GAMM Queuine tRNA-ribosyltransferase OS=Halothiobacillus sp. XI15; OX = 1766620 GN=tgt PE=3 SV=1
MKFQLHDCTLAKPAGERVDGPRRGQVRFERGVIDTPAFMPVGTYGTVKAVTPEELVDLGAQIVLGNTFHLMLRPGTEIIGLHGDLHDFMHWERPILTDSGGFQVFSLADMRKITEEGVRFASPVNGDQVMLSPESSMQVQHELGSDIQMIFDECTPYPATPEVAGASMRLSLRWAKRSKQAFEALKPEGSDRALFGIVQGGMHESLRRESAAGLIDLGFDGYAVGGLSVGEPLEERNAVLEVTLPELPAERPRYLMGVGKPEDLVESVARGVDMFDCVMPTRNARNGHLFTRYGDVRLKNARFATDVRPLDEDCDCYTCRHYSRAYLKHLHKTREVLGARLATIHNLHYYQVLMAEMRAAIEADDFEAFRARFYADRDRGT

SEQ ID NO: 55965 - protein, 374 aa, Halothiobacillus sp.
  REGION 1..374: note = tr|A0A191ZI81|A0A191ZI81_9GAMM Queuine tRNA-ribosyltransferase OS=Halothiobacillus sp. LS2; OX = 1860122 GN=tgt PE=3 SV=1
MQFELKGSDGGARRGELRFVRGTIQTPAFMPVGTYGTVKSVDPLEVEALGAEIILGNTFHLMLRPGTDVIRAHGDLHDFMGWQKPILTDSGGFQVFSLADMRKITEEGARFQSPVDGSPVLLTPERSMQIQHELGSDIVMIFDECTPYPATPIEAGESMRLSLRWAQRSRAAFDQLKPDNTDTALFGIVQGGMYPALRQESAAGLQDIGFDGYAIGGLSVGEPMDERNHVLEATTPLLPNDRPRYLMGVGKPEDLVESVARGVDMFDCVMPTRNARNGHLFTRYGDIKLRNARYVRDTRPLDETCTCTTCQRYSRAYLKHLDRCGELLGSRLNTIHNLHYYQTLMREIRASIEAGQFEAFRRQFHADRARGIEA

SEQ ID NO: 55966 - protein, 367 aa, Halovibrio sp.
  REGION 1..367: note = tr|A0A2A2F8Z2|A0A2A2F8Z2_9GAMM Queuine tRNA-ribosyltransferase OS=Halovibrio sp. YL5-2 OX=2032626; GN = tgt PE=3 SV=1
MAFEHLANDGVARRGRLTFPRGTVETPAFMPVGTYGTVKGMLPRDLEATGAEIILGNTFHLMLRPGTEVIEAHGDLHDFAGWQRPMLTDSGGFQVFSLSEMTRTTEAGVTFKSPVNGSPVELTPEKSMQVQRALGSDIVMIFDECTPYPATEEEARRSMNLSLRWAERSREAHGDSPSALFGIVQGGMYESLRRESLEGLKNIGFEGYAIGGLSVGEPREEMHRILEALEPAMPSGAPRYLMGVGRPEDIVEAVSRGVDMFDCVMPTRNARNGHLFTHEGVVRIRNARHRYDTGPVDSMCDCYTCRHFSRGYLHHLDRCGEMLGAQLASIHNLHYYQALMAGLREAIQAGTLATFIDRFYQLRGVAR

SEQ ID NO: 55967 - protein, 381 aa, unidentified
  source 1..381: note = Halovibrio variabilis
  REGION 1..381: note = tr|A0A511UN06|A0A511UN06_9GAMM Queuine tRNA-ribosyltransferase OS=Halovibrio variabilis OX=31910; GN = tgt PE=3 SV=1
MRNECFMRFERLAEDGRARRGRLHFPRGTVETPAFMPVGTYGTVKGMTPDSVKEIGAEIILGNTFHLWLRPGTEVIEAHGDLHDFAQWDKPILTDSGGFQVFSLGETRKITEQGVHFRSPVDGSKVFMGPEESMAVQRSLGADVVMIFDECTPYPATFEEAEKSMELSLRWAKRSRDAHGESPSALFGIIQGGMHPELRERSLKGLLEIGFDGLAIGGLSVGEPKEEMIKVLDYLPTWMPDDKPRYLMGVGKPEDLVEGVRRGVDMFDCVMPTRNARNGHLFTSEGTVKIRNAKHRYDTRPLEEGCDCHTCQHFSRGYLHHLDRCNEMLGAMLNTIHNLRYYQRVMADLRAAIEAGTLTTFVEGFYARRGLPVPPLALPEN

SEQ ID NO: 55968 - protein, 370 aa, unidentified
  source 1..370: note = Hamiltonella defensa
  REGION 1..370: note = sp|C4K8M3|TGT_HAMD5 Queuine tRNA-ribosyltransferase; OS = Hamiltonella defensa subsp. Acyrthosiphon pisum (strain 5AT) OX=572265 GN=tgt PE=3 SV=1
MKYQLQKTDGRARLGKLIFERGLVDTPAFMPVGTYGSVKSMTPDEITETGAQIILGNTFHLWLRPGQDVIKLHGDLHDFMQWQGPILTDSGGFQVFSLNSMRKIEEKGVSFRHPLNGSEIFLSPEKSMEIQLDLGSDIVMVFDECPPYPSDLIYMKSSMEMSLRWANRSREHFNNLNNKNALFGIIQGGLSLELRETSLQGLLQIGFDGYAIGGLAVGEPKEEMYRVLDFLCPRIPDNKPRYLMGVGKPENLVEGVRRGIDMFDCVMPTRNARNGHLFVTHGVIKIRNTRYKTDISPLDPDCDCYTCRHYSRAYLHHLDRCNEILGARLNSIHNVRYYQRLMADLRHAIYEERLECFVEEFYKKIGLSIS

SEQ ID NO: 55969 - protein, 394 aa, unidentified
  source 1..394: note = Handelsmanbacteria sp.
  REGION 1..394: note = tr|A0A1F6CTN1|A0A1F6CTN1_HANXR Queuine tRNA-ribosyltransferase OS=Handelsmanbacteria sp. (strain RIFCSPLOWO2_12_FULL_64_10) OX=1817868 GN=tgt PE=3 SV=1
MTTDHFRFELQARDPDTGARAGILYTPHGEVPTPVFMPVGTQGTVKALCQQDLRSADVRIILGNTYHLYLRPGERLIAEAGGLHRFTGWDRAILTDSGGFQVHSLAALSKITEEGVVFRSHIDGSSHQFTPEKAIEIEHALGADIIMAFDECTAPLCSFDYAKQAGDRTLRWLRRCVERHDGLGRRSASGSAQALFGIVQGSAYPELRAAYADATVRFDLPGYAVGGTGLGERKEDTWTAVEVVTSRLPEDRPRYLMGIGLPEDLIDGVARGIDMFDCVVPTRNARNGTVFTRRGRMNFKSAAWARDFSPIDPDCRCYTCQHYSRAYLRHLYHAGEITGLRLATLHSVHFFMDLMRDMRSAILAGRFAKWRTEFLSTYRSDPSPQPPPPKGEGE

SEQ ID NO: 55970 - protein, 372 aa, Hansschlegelia sp.
  REGION 1..372: note = tr|A0A4Q9GM04|A0A4Q9GM04_9RHIZ Queuine tRNA-ribosyltransferase OS=Hansschlegelia sp. Dub; OX = 2528245 GN=tgt PE=3 SV=1
MSGIPFNIAATDGAARTGEIVFPRGEIRTPAFMPVGTAATVKALYADQVRATGADIVLGNVYHLMLRPGAERVAALGGLHKFMGWQRPILTDSGGFQVMSLSALRKLDRDGVTFRSHVDGSTHRLTPERSVEIQRLLGSDVTMQLDECVRLPAPKAEVERAMLLSADWAERSKVAFGDQEGRALFGIVQGGDSADLRKESARRLVDLGFDGYAVGGLAVGEPQETMLAMIEETIPELTSARPRYLMGVGTPDDLLKCVARGVDMFDCVMPTRAGRHGQVFTRFGKMNLKNARHADDPRPLDEESDCPAARDYSRAYLHHLVKTGEILGMMLLSWVNVAYYQSLMAGARRAIAAGAFSDYAAATTAAWEKGEK

SEQ ID NO: 55971 - protein, 376 aa, unidentified
  source 1..376: note = Hanstruepera neustonica
  REGION 1..376: note = tr|A0A2K1DZ10|A0A2K1DZ10_9FLAO Queuine tRNA-ribosyltransferase OS=Hanstruepera neustonica; OX = 1445657 GN=tgt PE=3 SV=1
MTFDLKAKDLQSKARAGLITTDHGKIETPIFMPVGTVASVKGVHQRELKNDINPDIILGNTYHLYLRPQTDILEQAGGLHKFMNWDRNILTDSGGYQVYSLSANRKIKEEGVKFKSHIDGSYHVFTPENVMEIQRSIGADIIMAFDECTPYPCDYNYAKRSMHMTHRWLDRCINHLEKTPLKYDYNQAFFPIVQGSTYKDLREQSAEYIANAGAVGNAIGGLSVGEPAEEMYAMTEVVTNILPEDKPRYLMGVGTPINILENIALGIDMFDCVMPTRNARNGMLFTAHGTINIKNKKWEADFSPVDDMGITFVDTDYTKAYLRHLFSVNERLGAQIATIHNLGFYLWLVREARKHILAGDFRDWKNKMVKQMDKRL

SEQ ID NO: 55972 - protein, 334 aa, Hapalosiphon sp.
  REGION 1..334: note = tr|A0A0M0SJJ4|A0A0M0SJJ4_9CYAN Queuine tRNA-ribosyltransferase OS=Hapalosiphon sp. MRB220; OX = 1704290 GN=tgt PE=3 SV=1
MPVGTLATVKTLTPAQLKETGAQMVLSNTYHLHLQPGEAIVSGGGGLHKFMGWNGPMLTDSGGFQVFSLSEMRKISEEGVTFRSPHDGQIIKFTPEKSIEIQNTLGADVIMAFDECPPATANRQEVEAATERTYRWLLRCIEAHQRQEDQALFGIVQGGVYLDLRAQAAEALKQLDLPGYAIGGVSVGEEPELIHQVVQATAPLLPYHKPRYLMGVGTYQEMVIAIASGVDLFDCVIPTRWARHGTAMVQGDRWNLKNAKFREDFTPLDETCPCYTCQNFTRAYISHLVRSQEILAYTLLSIHNITELIRFTQKIRAAILNDTFTTEFSKWLKN

SEQ ID NO: 55973 - protein, 364 aa, unidentified
  source 1..364: note = Hapalosiphonaceae cyanobacterium
  REGION 1..364: note = tr|A0A328IIR5|A0A328IIR5_9CYAN Queuine tRNA-ribosyltransferase OS=Hapalosiphonaceae cyanobacterium JJU2 OX=2109628 GN=tgt PE=3 SV=1
MAQCSHTKARVGVFHTPHGIVETPRFMPVGTLATVKTLTPAQLKETGAQMVLSNTYHLHLQPGEAIVSGGGGLHKFMGWNGPMLTDSGGFQVFSLSEMRKISEEGVTFRSPHDGQIIKFTPEKSIEIQNTLGADVIMAFDECPPATANRQEVEAATERTYRWLLRCIEAHQRREEQALFGIVQGGVYLDLRAQAAKALQKLDLPGYAIGGVSVGEEPELIHQVVQTTAPLLPYHKPRYLMGVGTYQEMVIAIASGVDLFDCVIPTRWARHGTAMVQGDRWNLKNAKFREDFTPLDETCPCYTCRNFTRAYISHLVRSQEILAYTLLSIHNITELIRFTQKIREAILNDTFTTEFSKWLKKGVME

SEQ ID NO: 55974 - protein, 376 aa, unidentified
  source 1..376: note = Harryflintia acetispora
  REGION 1..376: note = tr|A0A3E2SWZ7|A0A3E2SWZ7_9FIRM Queuine tRNA-ribosyltransferase OS=Harryflintia acetispora; OX = 1849041 GN=tgt PE=3 SV=1
MYTLIKQEGRARRGTFTTPHGTIQMPAFMNVGTAAAIKGGVSSLDLKELRCQVELCNTYHLHLRPGDDVVRALGGLHGFMNWEGPILTDSGGFQVFSLSSLRKIREEGVEFRSHLDGKRIFMGPEESMKIQSNLGSTIAMAFDECIENPAEYDYTKRSTERTARWLRRCRQELDRLNALEGTLNPRQMLFGINQGSTYDDLRIEHMKVIREIPCEGYAIGGLAVGESAGEMYHVIEQVEPFMPKDKPRYLMGVGTPANILESVRRGVDLFDCVMPSRNARHGHVFTWEGIRNLNNEKYKLDPLPLDESCQCPCCRSFSRAYLRHLLRAGEMLGMRLLVMHNLYFYNTLLEQIRQALDEGRYEEYCRRWLPVLSTRI

SEQ ID NO: 55975 - protein, 376 aa, unidentified
  source 1..376: note = Harryflintia acetispora
  REGION 1..376: note = tr|A0A4R1Q587|A0A4R1Q587_9FIRM Queuine tRNA-ribosyltransferase OS=Harryflintia acetispora; OX = 1849041 GN=tgt PE=3 SV=1
MYTLIKQEGRARRGTFTTPHGTIQMPAFMNVGTAAAIKGGVSSLDLKELRCQVELCNTYHLHLRPGDDVVRALGGLHGFMNWEGPILTDSGGFQVFSLSSLRKIREEGVEFRSHLDGKRIFMGPEESMKIQSNLGSTIAMAFDECIENPAEYDYTKRSTERTARWLRRCRQELDRLNALEGTLNPRQMLFGINQGSTYDDLRIEHMKVIREIPCEGYAIGGLAVGESAGEMYHVIEQVEPFMPKDRPRYLMGVGTPANILESVRRGVDLFDCVMPSRNARHGHVFTWEGIRNLNNEKYKLDPLPLDESCQCPCCRGFSRAYLRHLLRAGEMLGMRLLVMHNLYFYNSLLEQIRRALDEGRYEEYCRRWLPVLSTRI

SEQ ID NO: 55976 - protein, 380 aa, unidentified
  source 1..380: note = Hartmannibacter diazotrophicus
  REGION 1..380: note = tr|A0A2C9D740|A0A2C9D740_9RHIZ Queuine tRNA-ribosyltransferase OS=Hartmannibacter diazotrophicus; OX = 1482074 GN=tgt PE=3 SV=1
MTERFSFQIHATDGKARRGTITTPHGKVRTPAFMPVGTQGTVKAMFMDDVRSTGADVILGNTYHLMLRPGAERVARLGGLHAFSRWPHTILTDSGGFQVMSLAQIRKLTEKGVTFQSHIDGSRHEMTPERSIEIQGLLGSDIQMQLDECLRLPATAKEIDRAMRLSLRWAARSREKFVAMGGPEKGQGLYGIVQGGDDAALRAVSAAELASMPFEGYSIGGLAVGEPQDVMLQMLDIVCPLLPAEKPRYLMGVGTPDDIIKSVARGVDQFDCVMPTRAGRHGLAFTRFGKINLKNARHADDPRPLDEESSCPAARDYSRAYLHHLVRSGEALGAMLLTWANVAYYQSLMQGIRDAIEEGRYADFMAETSEAWARGDLQPL

SEQ ID NO: 55977 - protein, 375 aa, Hasllibacter halocynthiae
  REGION 1..375: note = tr|A0A2T0X7T5|A0A2T0X7T5_9RHOB Queuine tRNA-ribosyltransferase OS=Hasllibacter halocynthiae; OX = 595589 GN=tgt PE=3 SV=1
MALTFDLKATDGAARLGEVGTARGVVRTPAFMPVGTAGTVKGMLPGQVRGTGADIVLGNTYHLMLRPGAERVARLGGLHRFSGWEGPILTDSGGFQVMSLAGLRKITEEGVRFASHVDGTRHFLSPERSMEIQALLGSDIAMCFDECPALPAGRDRIAASMEMSMRWAARSREAFGHPGDRALFGIQQGGLEEDLRRESAERLREIGFEGYAVGGLAVGEGQEAMFGVLDHAPAQLPANRPRYLMGVGKPDDVVGAVKRGIDMMDCVLPTRSGRTGQGWTARGMVNLRNARHRDDPRPLEEGCPCPACAGGYSRAFLHHVVRSKEMIGGMLLTWHNLTYYGRLMAAMRGAIGAGRFADWERGFHARRAEGDLEPV

SEQ ID NO: 55978 - protein, 378 aa, unidentified
  source 1..378: note = Hathewaya histolytica
  REGION 1..378: note = tr|A0A4U9RK60|A0A4U9RK60_HATHI Queuine tRNA-ribosyltransferase OS=Hathewaya histolytica OX=1498; GN = tgt PE=3 SV=1
MGEYKLLKKVDKIRRGQFKTVHGTIQTPVFMNVGTLAAIKGAVSTMDLKEIDCQVELSNTYHLHLRPGDKVIREMGGLHEFMNWDRPILTDSGGFQVFSLSGNRKIEEEGVYFNSHIDGKKIFMGPEESMQIQSNLGSTIAMAFDECIPNPSTREYVINSVARTTRWLERCKEEMDKLNSLESTVNKHQMLFGINQGGTYDDIRIEHAKTISKMNLDGYAIGGLAVGETHEEMYRIIDSVVPHLPQDKPIYLMGVGIPSNILESVERGVDFFDCVLPARNGRHGHVFTKEGKINLFNAKFELDKRPIDEGCQCPACKHYTRAYIRHLFKAKEMLAMRLCVLHNLYFYNKLMQDIRDAIDGDYFYEFKEQKLREWNGRA

SEQ ID NO: 55979 - protein, 378 aa, unidentified
  source 1..378: note = Hathewaya proteolytica
  REGION 1..378: note = tr|A0A1M6P8P2|A0A1M6P8P2_9CLOT Queuine tRNA-ribosyltransferase OS=Hathewaya proteolytica DSM 3090; OX = 1121331 GN=tgt PE=3 SV=1
MGKYTLLKKSGKVRRGQFETVHGTIQTPVFMNVGTLAAIKGAVSSMDLEEIGCQVELSNTYHLHLRPGDKVVRELGGLHKFMNWKKPILTDSGGFQVFSLASIRTIKEEGVYFNSHIDGRKIFMGPEESMQIQSNLGSTIAMAFDECVSNPSPRDYVEKSVARTTRWLERCKVEMDRLNKLENTVNKQQMLFGINQGGVYEDIRAEHARTIAKMDLDGYAIGGLAVGESHEDMYRIIDAVVPNLPQDKPIYLMGVGTPENILEAVSRGVDFFDCVLPARNGRHGHLFTKDGGINIMNAKFELDTRPIDEGCNCPVCRHYTRAYIRHLFKAKEMLAMRLSVLHNLFFYNKLMEDIRDAIDGDYFEQFKEEKLQQWGCKK

SEQ ID NO: 55980 - protein, 378 aa, unidentified
  source 1..378: note = Hazenella coriacea
  REGION 1..378: note = tr|A0A4R3L9W5|A0A4R3L9W5_9BACL Queuine tRNA-ribosyltransferase OS=Hazenella coriacea OX=1179467; GN = tgt PE=3 SV=1
MAVRYELIKECKQSGARLGRLHTPHGTIDTPIFMPVGTQATVKTMSPEELKEMHAQIILSNTYHLFLRPGHEVVKEAGGLHSFMNWDRPILTDSGGFQVFSLSQLRNITEEGVSFRSHLSGEKLFIGPEKAMEIQNALGADIIMAFDECPPYPAEREYVQASTERTYRWLKRCIDAHQRPNDQALFGIVQGGMYQDLREESAKKLVELDLPGYSIGGLSVGEPKDIMYEVLGYTTPLLPKHKPRYLMGVGSPDALIQGSILGIDMFDCVLPTRIARNGTTMTSQGRIVIRNAKYARDFTPLDPECDCYTCRNYTRAYLRHLIKADETFGLRLTTYHNLHFLLQLMQQVRQAILEDRLLDFQEEFMVRYYGSTNPVTAF

SEQ ID NO: 55981 - protein, 373 aa, Helcococcus kunzii
  REGION 1..373: note = tr|H3NN92|H3NN92_9FIRM Queuine tRNA-ribosyltransferase OS=Helcococcus kunzii ATCC 51366; OX = 883114 GN=tgt PE=3 SV=1
MAVKYTLEKKSSECEARAGVISTPHGDIKTPVFMPVGTKATVKTMTPEELKDLGAQIILGNTYHLFLRPGDELIKKAGGLHKFMNWDRPILTDSGGFQVFSLSNINKITEEGVEFKSHIDGSSQFISPEKSISIQQNLGSDIMMAFDECVDPSATKEYVAQSLEMTLRWLDRCVASHTNKNQALFGIVQGGLFKDLRKRSVEETIKRDCQGFAIGGLSVGETKEEMIDILRFTTPLLPEDKPRYNMGVGTPDYLFESVEAGIDMADCVLPTRIARNGAAMTSEGQLNIRNSKFKEDFTPLDHECDCYTCKNYTRAYIRHLVNVNEILGARLITYHNLYFLTHLMDEIRQSIIEDRFLAFKNEFYNKYGYTKEK

SEQ ID NO: 55982 - protein, 373 aa, Helcococcus ovis
  REGION 1..373: note = tr|A0A4R9C125|A0A4R9C125_9FIRM Queuine tRNA-ribosyltransferase OS=Helcococcus ovis OX=72026; GN = tgt PE=3 SV=1
MAIKYELEKKSSQCEARAGVIHTPHGDIKTPVFMPVGTKATVKAMTPEELEDLGAQIILGNTYHLFLRPGDDLVKKAGGLHKFMNWNKPILTDSGGFQVFSLGHINKITEEGVVFQSHIDGSKQMITPEKSIEIQQNLGSDIMMAFDECVYPTATKEYVAQSLEMTLRWLDRCIETHTNKNQALFGIVQGGLFKDLRKKSAEETIKRNCQGFAVGGLSVGETKEEMIDILRFTTPLLPEDKPRYNMGVGTPDYLFESVEAGIDMADCVLPTRIARNGAAMTSHGKVTIKNAKYREDFTPLDPECDCYTCKNYTKAYIRHLVNVNEILGARLLSYHNLYFLTHLMENIRESILEDRFLEYKEEFYKKYGYTKED

SEQ ID NO: 55983 - protein, 371 aa, Helicobacter acinonychis
  REGION 1..371: note = sp|Q17YB5|TGT_HELAH Queuine tRNA-ribosyltransferase; OS = Helicobacter acinonychis (strain Sheeba) OX=382638; GN = tgt PE=3 SV=1
MDFQLQAVDKHARAGILNLVHSQVETPIFMPVGTQGCIKSLDAIDMQERLSAKLILANTYHMYLRPGEKVIEQLGGLHHFAQFHGSFLTDSGGFQAFSLSDNVKLQEDGIVFKSHLDGSKHFFTPTKVLDIQYSLNSDIMMVLDDLVGLPAPLKRLEESIKRSAKWANISLEYHKENNRPNNNLFAIIQGGTHLKMRSLSVGLTHGGFDGYAIGGLAVGESTNEMLETIAHTAPLLPKDKPRYLMGVGTPENILDAISLGVDMFDCVMPTRNARNATLFTHSGKISIKNAPYKLDNTPIEENCTCYTCKRYSKAYLHHLFRAKELTYARLASLHNLHFYLELVKNARNAILEKRFLSFKKEFLERYTMDRQ

SEQ ID NO: 55984 - protein, 367 aa, unidentified
  source 1..367: note = Helicobacter ailurogastricus
  REGION 1..367: note = tr|A0A0K2X3R3|A0A0K2X3R3_9HELI Queuine tRNA-ribosyltransferase OS=Helicobacter ailurogastricus; OX = 1578720 GN=tgt PE=3 SV=1
MDFTLDGVDKKARAGTLKLAHGKVATPIFMPVGTQASVKSLDALDLQDHLKAPIILGNTYHLYLRPGANLIQKLGGLHKFTKFQGNFLTDSGGFQAFSLKHNTKAHTEGIVFKSHIDGSTHLFTPSKVLDIQYALNSDICMVLDDLVGLPAPFMRLKLAVQKTTEWAKISLDHHKGHASRTNHIFAIVQGGIDSNLRRQSALELSALGFDGYAIGGLAVGESAQEMYATVAYTQEFLPKDKPRYLMGVGTPQDILEAIDLGVDMFDCVMPTRNARNGTLFTSLGKLSIKAQAHKESQEALDQNCACYTCKHYSKAYLHHLFKARELLYFRLASLHNLHFYLELVRGAREAILRGEYADYKSRILSVY

SEQ ID NO: 55985 - protein, 367 aa, unidentified
  source 1..367: note = Helicobacter ailurogastricus
  REGION 1..367: note = tr|A0A0K2Y6J3|A0A0K2Y6J3_9HELI Queuine tRNA-ribosyltransferase OS=Helicobacter ailurogastricus; OX = 1578720 GN=tgt PE=3 SV=1
MDFTLDGVDKKARAGTLKLAHGKVATPIFMPVGTQASVKSLDALDLQDHLKAPIILGNTYHLYLRPGANLIQKLGGLHKFTKFQGNFLTDSGGFQAFSLKHNTKAHTEGIVFKSHIDGSTHLFTPSKVLDIQYALNSDICMVLDDLVGLPAPFTRLKLAVQKTTEWAKISLDHHKGHASRTNHIFAIVQGGIDSNLRRQSALELSALGFDGYAIGGLAVGESAQEMYATVAYTQEFLPKDKPRYLMGVGTPQDILEAIDLGVDMFDCVMPTRNARNGTLFTSLGKLSIKAQAHKESQEALDQNCACYTCKRYSKAYLHHLFKARELLYFRLASLHNLHFYLELVRGAREAILRGEYADYKSRILSVY

SEQ ID NO: 55986 - protein, 374 aa, Helicobacter anseris
  REGION 1..374: note = tr|A0A3D8JAE9|A0A3D8JAE9_9HELI Queuine tRNA-ribosyltransferase OS=Helicobacter anseris OX=375926; GN = tgt PE=3 SV=1
MIFKVDKIDGNARATTLQTYHSTIHTPIFMPVGTQACVKGLDFYDLTNHLDTKIILANTYHLYLRPSSPCIKSLGGLHHFTKYPNSFLTDSGGFQAFSLSNNTKKDSQGIWFKSHIDGSKHFFTPKKVLDIQYELNSDIMMVLDDLVGLPASKERILQSVKTTTKWAEESLYYHKEQQSQGLGLNNNLFAIIQGGNNKELREQSAKELCALEGFDGYAIGGLAVGESAEEMYACIEYVNAFTPQHKPRYLMGVGTPENIIEAIDRGVDMFDCVMPSRNARNGSLFTSFGKINIKSSRYHLDTLPIDEACKCYTCRNFSRAYLHHLFRANEITYFRLATLHNLYYYLELTKSARMAILNNQWNDFKKDFYTKRQN

SEQ ID NO: 55987 - protein, 375 aa, unidentified
  source 1..375: note = Helicobacter apodemus
  REGION 1..375: note = tr|A0A4U8UG45|A0A4U8UG45_9HELI Queuine tRNA-ribosyltransferase OS=Helicobacter apodemus OX=135569; GN = tgt PE=3 SV=1
MEFNLQQVCGNARAGMLKLAHGEVLTPIFMPVGTQASVKALDFIDLLALKAPIILANTYHLYLRPNDEVIRQLGGLHNFSKFPKNFLTDSGGFQAFSLSNNVKVSNEGILFKSHIDGSKHFFTPKKVLDIQYNLNSDIMMVLDDLVGLPAPRERILESINKTSLWAEESIQYHNFKKYQAQEEGRAFNNHIFAINQGGVDRELREISAKDLCSMGDFDGYAIGGLAVGESNAMMYETLEFTLPFLPKDKPRYLMGVGTPRDIIEAIARGVDMFDCVMPTRNARNGTLFTSEGKIAIKSTRFKLDTKPLDEECFCYTCTNHTRAYLHHLFRAGEMSYFRLASIHNLAYYLSLVKNAREAIFQGRFEEFYKKVVEIY

SEQ ID NO: 55988 - protein, 375 aa, unidentified
  source 1..375: note = Helicobacter apodemus
  REGION 1..375: note = tr|A0A2U8FEN9|A0A2U8FEN9_9HELI Queuine tRNA-ribosyltransferase OS=Helicobacter apodemus OX=135569; GN = tgt PE=3 SV=1
MEFNLQQVCGNARAGMLKLAHGEVLTPIFMPVGTQASVKALDFMDLLALKAPIILANTYHLYLRPNDEVIKQLGGLHNFSKFPKNFLTDSGGFQAFSLSNNVKVSNEGILFKSHIDGSKHFFTPKKVLDIQYNLNSDIMMVLDDLVGLPAPRERILESINKTSLWAEESIQYHNFKKYQAQEEGRAFNNHIFAINQGGVDRELREISAKDLGSMGDFDGYAIGGLAVGESNAMMYETLEFTLPFLPKDKPRYLMGVGTPRDIIEAIARGVDMFDCVMPTRNARNGTLFTSEGKIAIKSTRFKLDTKPLDEECFCYTCTNHTRAYLHHLFRAGEMSYFRLASIHNLAYYLSLAKNAREAIFQGRFEEFYKKVVEIY

SEQ ID NO: 55989 - protein, 373 aa, Helicobacter aurati
  REGION 1..373: note = tr|A0A3D8J8H1|A0A3D8J8H1_9HELI Queuine tRNA-ribosyltransferase OS=Helicobacter aurati OX=137778; GN = tgt PE=3 SV=1
MQFIIEATQNKARACRFTLAHGVVETPIFMPVGTQGTLKGIDCVTANTILQTHLILANTYHLYLRPGIEVFLKAGGIHQFARFNGNYLTDSGGFQAFSMGTQAKTEDIGIAFRSHIDGSKHFFTPTKALEIQYAINSDIMMVLDDLAALPANRSRLLDSVTRTTHWAKQSIAYHNSQKNAKEIHNRLFAIMQGGVDYEMRKRSANELCTLDFDGYAIGGLAVGESQTEMYDCLDYALDFLPTNKPRYLMGVGTPQNLLECIERGVDMFDCVMPSRNARNACIFTSEGKIHIKSPSYKTDFSPLDSQCQCYTCKNYTRSYLHHLFRAKELSYHSLATIHNLFFYLQLMRESRKAILNGYWKEYKKNTLEKLSNH

SEQ ID NO: 55990 - protein, 374 aa, Helicobacter bilis
  REGION 1..374: note = tr|C3XEW1|C3XEW1_9HELI Queuine tRNA-ribosyltransferase OS=Helicobacter bilis ATCC 43879; OX = 613026 GN=tgt PE=3 SV=1
MRFQIQAKVGKARACSFTLTHGKVETPIFMPVGTQGVIKGLNSLDIKNILQTNLILANTYHLYLRPGIETLKKAGGIHNFANFHGNYLTDSGGFQAFSLGENVRHDDCGIAFKSHIDGSKHFFTPEKVLDIEYAINSDIMMILDDLVGLPATKERLLDSVKRTTKWAKQSIQYHNMQKEKHDLKNKIFAIMQGGTDYEMRKRSAAELTELGFDGYAIGGLAVGESSQEMYECLDYACDFLPETKPRYLMGVGTPENLLEGIDRGVDMFDCVMPTRNARNASIFTNQGRLNIKKACYKNDFTPLDSKCHCLTCLNFTRAYLHHLFRANEITYHSLASIHNLHFYITLLKDSRQAIINQTWQEFKKQKLSDFGQVD

SEQ ID NO: 55991 - protein, 374 aa, Helicobacter bilis
  REGION 1..374: note = tr|A0A4U8U0G8|A0A4U8U0G8_9HELI Queuine tRNA-ribosyltransferase OS=Helicobacter bilis OX=37372; GN = tgt PE=3 SV=1
MQFQIQAKVGKARACSFTLAHGKVETPIFMPVGTQGVIKGLNSLDIKNILQTNLILANTYHLYLRPGIETLKKAGGIHNFANFHGNYLTDSGGFQAFSLGENVKHEDCGIAFKSHIDGSRHFFTPEKVLDIEYAINSDIMMILDDLVGLPATKERLLDSVKRTTKWAKQSIQYHNMQKEKHDLKNKIFAIMQGGTDYEMRKRSAEKLTDLGFDGYAIGGLAVGESSQEMYECLDYACDFLPETKPRYLMGVGTPENLLEGIDRGVDMFDCVMPTRNARNASIFTHQGRLNIKKACYKNDFTPLDSKCHCFTCLNFTRAYLHHLFRANEITYHSLASIHNLHFYITLLKDSRQAIINQTWQEFKKQKLSDFGQVD

SEQ ID NO: 55992 - protein, 367 aa, Helicobacter bizzozeronii
  REGION 1..367: note = tr|F8KS50|F8KS50_HELBC Queuine tRNA-ribosyltransferase OS=Helicobacter bizzozeronii (strain CIII-1) OX=1002804 GN=tgt PE=3 SV=1
MDFCLEGQEGHARAGTLKLAHGIVPTPIFMPVGTQASVKSLDALDLQTHLKAPIILGNTYHLYLRPGASIIQNLGGLHGFSGFQGNFLTDSGGFQAFSLHTHTKEHPQGIVFKSHIDGSTHLFTPSKVLDTQYALNSDICMVLDDLVGLPAPFERLKLAVQKTTQWAKESLEHHKAHAGATNYIFAIVQGGTNPALRTQSALELSALDFDGYAIGGLAVGESAQEMYAIIEHTTEFLPPHKPRYLMGVGTPQDLLEAIERGVDMFDCVMPTRNARNGTLFTTCGKISIKAQAHKESPEPLDKNCSCYTCQHYSKAYLHHLFKARELSYFRLASLHNLHFYLELVRGAREAILKGEFAGYKARMLKFY

SEQ ID NO: 55993 - protein, 270 aa, Helicobacter bizzozeronii
  REGION 1..270: note = tr|H5VB69|H5VB69_HELBI Queuine tRNA-ribosyltransferase OS=Helicobacter bizzozeronii CCUG 35545 OX=1002805 GN=HBZS_109460 PE=3 SV=1
MALQSFKANFLTDSGGFQAFSLHTHTKEHPQGIVFKSHIDGSTHLFTPSKVLDTQYALNSDICMVLDDLVGLPAPFERLKLAVQKTTQWAKESLEHHKAHAGATNYIFAIVQGGTNPALRTQSALELSALDFDGYAIGGLAVGESAQEMYAIISHTTEFLPPHKPRYLMGVGTPQDLLEAIERGVDMFDCVMPTRNARNGTLFTRYGKLSIKAQAHKESPEPLDKNCACYTCQHYSKAYLHHLFKARELLYFRLASLHNLHFLFGISARG

SEQ ID NO: 55994 - protein, 382 aa, Helicobacter brantae
  REGION 1..382: note = tr|A0A3D8IWX6|A0A3D8IWX6_9HELI Queuine tRNA-ribosyltransferase OS=Helicobacter brantae OX=375927; GN = tgt PE=3 SV=1
MRFELQARDNLARAGKLTLSHGEVLTPVFMPVGTQGVIKGLDFIDVEQNLGAKIILGNTYHLYLRVGIEKMRALGGLHKFSGYSGNFLTDSGGFQAFSLGGKRREEGIEFASHIDGSKHFFTPEKVLDIEYALNSDIMMILDDLVGLPASEERIMQSIDRTTLWAKQSLDYHALQKSQGKAQTNNIFAIVQGGTTERFRYKSASELVALRSEVEGVEYEYDGYAIGGLAVGESSEEMYHTLDFTTPLLPSHKPRYLMGVGTPENLIEAIARGVDMFDCVMPTRNARNATIFTHFGKLSIKSPRYALDESPLDSQCDCYTCRNFSRAYIHHLFRSSEITYHRLASIHNLRYYLNLLSSAREAILKGEFMEFRKDFYAKRVGES

SEQ ID NO: 55995 - protein, 377 aa, Helicobacter canadensis
  REGION 1..377: note = tr|C5ZVX7|C5ZVX7_9HELI Queuine tRNA-ribosyltransferase OS=Helicobacter canadensis MIT 98-5491 OX=537970 GN=tgt PE=3 SV=1
MEFNLQKIDGKARAGVLKLAHGEIQTPIFMPVGTQACVKALDFNDLLALNAPIILGNTYHLYLRPGSEIVKQLGGLHHFSRFPRNFLTDSGGFQAFSLSDHVKVSDEGILFKSHIDGSKHFFTPQKVLEIQYDLNSDIMMILDDLVGLPASKERILKSINRTSKWANEAITFHNAQKIQAREQGREFTNHIFAINQGGTDREFREISAKDLTSMADFDGYAIGGLAVGEPNELMYETLEFTTPLLPKDKPRYLMGVGTPQDIVEAIARGVDMFDCVMPTRNARNGTIFTHFGKLSIKSPRFKLDTMPLDSKCHCYTCQNFSRAYLHHLFRAGEMTYFRLASIHNLAYYLDLVREAREAILKGEFQDFYQKFYSNLEN

SEQ ID NO: 55996 - protein, 371 aa, Helicobacter canis
  REGION 1..371: note = tr|V8CJP4|V8CJP4_9HELI Queuine tRNA-ribosyltransferase OS=Helicobacter canis NCTC 12740; OX = 1357399 GN=tgt PE=3 SV=1
MFELLHTDGSARAGRLNLAHSIVPTPVFMPVGTQACVKGLDATDLQEILQAKLILANTYHTYLRPGAEIMKEFGGVHKFSGFNGSFLSDSGGFQAFSLGTNVKKTDEGVWFCSHIDGSKHLFTPESVLDMQYALNSDIMMVLDDLIALPATQQRLAQSVETTTKWAKRSIDYHNAQKSQGKASTNHLFGIVQGGVSEQFRSQSALELRELEFDGYALGGLAVGESAEQMYATIAHTAPLLPESKPRYLMGVGTPENIIESIDRGVDMFDCVMPCRNARNGTLFTHFGKLNIKNTKHKHDQSPLDPLCTCYTCARYSRAYLHHLNKAQELTYHRLATLHNLSYYMTLVRGAREAILQDRWQSFKAEFYAKRA

SEQ ID NO: 55997 - protein, 372 aa, Helicobacter canis
  REGION 1..372: note = tr|A0A377J1F1|A0A377J1F1_9HELI Queuine tRNA-ribosyltransferase OS=Helicobacter canis OX=29419; GN = tgt PE=3 SV=1
MFELLHTNDGARAGKLHLAHSIVPTPVFMPVGTQACVKGLDATDLGEILQAKLILANTYHTYLRPGAAIMREFGGVHNFSGFNASFLSDSGGFQAFSLGANVKKTDSGVWFSSHIDGSKHLFTPESVLDMQYALNSDIMMVLDDLIALPATQERLALSVETTTKWAKRSIAYHKEQKDLGKASTNDLFGIVQGGVSEQFRTQSALELRELDFDGYALGGLAVGESAEEMYATIAHTTPLLPESKPRYLMGVGTPENLIEAIHRGVDMFDCVMPCRNARNGTLFTHFGKLNIKNSCYKNDPAPIDPACACYTCTRYSRAYLHHLNKAQELTYHRLATLHNLSYYLELMRAAREAIMHDKWLAFRAEFYAKRQA

SEQ ID NO: 55998 - protein, 370 aa, Helicobacter cetorum
  REGION 1..370: note = tr|I0EN64|I0EN64_HELC0 Queuine tRNA-ribosyltransferase OS=Helicobacter cetorum (strain ATCC BAA-429 / MIT 00-7128) OX=182217 GN=tgt PE=3 SV=1
MDFQLQKTDYSARAGVLNLKHSSVETPIFMPVGTQGCIKSLDAIDMQEHLQAKLILANTYHMYLRPQADIVKKLGGLHNFTQFQGSFLTDSGGFQAFSLNSNVKLEEDGIIFKSHIDGSKHLFTPTKVLDIQYALNSDIMMVLDDLVGLPAPIKRIEESIKRSARWANTSLEYHKRNNRPNNNLFAIIQGGTNLSMRSMSVELTLRDFDGYAIGGLAVGENTNEMYETIAHTAPLLPKDKPRYLMGVGTPENILEAISLGVDMFDCVMPTRNARNATLFTHFGKISIKNAQYKTDNTPIEENCTCYTCKHYSKAYLHHLFRAKELTYARLASLHNLHFYLELTRNARKAILEERFLDFKTEFLKNYHQLN

SEQ ID NO: 55999 - protein, 369 aa, Helicobacter cetorum
  REGION 1..369: note = tr|I0ERB3|I0ERB3_HELCM Queuine tRNA-ribosyltransferase OS=Helicobacter cetorum (strain ATCC BAA-540 / MIT 99-5656) OX=1163745 GN=tgt PE=3 SV=1
MNYQLQATDNHARAGVLELAHSSVETPIFMPVGTQGCIKSLDANDMQEHLNAKLILANTYHMYLRPGEKIVENLGGLHHFSQFQGSFLTDSGGFQAFSLNSNVKLQEDGIIFKSHIDGSKHYFTPTKVLDIQYALNSDIMMVLDDLVGLPAPLKRIEESIIRSAKWANLSLEYHKEKNRPNNHLFAIIQGGTNLKMRSLSVELTHKDFDGYAIGGLAVGESANEMYETIAHTAPLLPKDKPRYLMGVGTPENILEAISLGVDMFDCVMPTRNARNATLFTHFGKISIKNAQYKTDNTPIEENCSCYTCKRYSKAYLHHLFKAKELTYARLASLHNLHFYLELTKNARKAILEKRFLSFKKEFLENYRSS

SEQ ID NO: 56000 - protein, 383 aa, Helicobacter cholecystus
  REGION 1..383: note = tr|A0A3D8IUY3|A0A3D8IUY3_9HELI Queuine tRNA-ribosyltransferase OS=Helicobacter cholecystus; OX = 45498 GN=tgt PE=3 SV=1
MRFEVCNQDYHARALKLTFSHGEVLTPIFMPVGTQGVIKGLDYIDVQSHLNAKIILANTYHLYLRVGIERMKTLGGLHHFSGYSGNFLSDSGGFQAFSLGGKRKEGGIEFASHLDGSKHFFTPSKVLDIQYALNSDIMMILDDLVGLPANERRILQSIERTTQWAKQSLDYHALQKAQGKAQTNHIFAIVQGGVSEQYRTKSATELRELRSEVDGVTYEYDGYAIGGLAVGESSEEMYATLDFTLPLLPTHKPRYLMGVGTPENIIEAISRGVDMFDCVMPTRNARNATIFTSFGKLSIKSSRYALDENPLDSECDCYTCKHFSRAYLHHLFRCNELTYHRLATIHNLKYYLNLTQGAREAIMQNRFNEYKKEFYAKREICKD

SEQ ID NO: 56001 - protein, 380 aa, Helicobacter cinaedi
  REGION 1..380: note = tr|A0A377JW49|A0A377JW49_9HELI Queuine tRNA-ribosyltransferase OS=Helicobacter cinaedi OX=213; GN = tgt PE=3 SV=1
MQVSIEAKDGKARALTLTLAHSIVQTPIFMPVGTQGCVKALDSLDLAQNLNAKIILANTYHMYLRVGIERLKSFGGIHTFANFNGSYLSDSGGFQAFSLNKNVKLNENGVEFKSHIDGSKHFFSPSFVLDIQYALNSDIMMVLDDLVGLPASETRILDSIKRTTEWAKASLEYHEMKKSQGKAQTNNLFAIIQGGTSPKFREISATSLVNLGEFDGFAIGGLAVGESNEEMYSTISHTIPFMPESKPRYLMGVGTPENIIEAIYRGVDMFDCVMPTRNARNATLFTHFGKINIKGASFANDTSPIDEKCSCYTCQNYTRAYLCHLFRSQEITYHRLASLHNLHYYLNLVREAREAILQGAFAAYRQNFYHLREMEVPNEY

SEQ ID NO: 56002 - protein, 380 aa, Helicobacter cinaedi
  REGION 1..380: note = tr|A0A2Z5V0X3|A0A2Z5V0X3_9HELI Queuine tRNA-ribosyltransferase OS=Helicobacter cinaedi OX=213; GN = tgt PE=3 SV=1
MQVNIEAKDGKARALTLTLAHSIVQTPIFMPVGTQGCVKALDSLDLAQNLNAKIILANTYHMYLRVGIERLKAFGGIHTFANFNGSYLSDSGGFQAFSLNQNVKLNENGVEFKSHIDGSKHFFSPSFVLDIQYALNSDIMMVLDDLVGLPASETRILDSIKRTTEWAKASLEYHEMKKSQGKATTNNLFAIIQGGTSPKFREISATSLVNLGEFDGFAIGGLAVGESSEEMYSTISHTIPFMPESKPRYLMGVGTPENIIEAIYRGVDMFDCVMPTRNARNATLFTHFGKINIKGASFANDTSPIDEKCSCYTCQNYTRAYLCHLFRSQEITYHRLASLHNLHYYLNLVREAREAILQGAFAAYRQNFYQLREMEVPNEY

SEQ ID NO: 56003 - protein, 376 aa, Helicobacter equorum
  REGION 1..376: note = tr|A0A3D8IU55|A0A3D8IU55_9HELI Queuine tRNA-ribosyltransferase OS=Helicobacter equorum OX=361872; GN = tgt PE=3 SV=1
MQVCIDATDLQARALTLKLAHGEIQTPIFMPVGTQGCIKALDSYDVSTHLRAPIILANTYHMYLRCGIQKLKTFGGIHKFANFGGNYLSDSGGFQAFSLGSNVKLLENGVEFKSHIDGSKHIFTPQKVLDIQYALNSDIMMVLDDLVGLPAPKERIIESIKRTSLWAKQSLTYHLHQKSLGNAKTNHLFAIVQGGTDIQLRKESALSLTDMQDFDGYAIGGLAVGESAQEMYETIESTIPYLPQNKPRYLMGVGTPQNILESIERGVDMFDCVMPTRNARNATLFTNFGKIHIKNTRFGLDSAPLDPECNCYTCQNYSRAYLHHLYKSGEMSYYRLASIHNLHFYLTLVRESREAILGKNFHTYKAKKLEAMQRGC

SEQ ID NO: 56004 - protein, 367 aa, Helicobacter felis
  REGION 1..367: note = tr|E7A917|E7A917_HELFC Queuine tRNA-ribosyltransferase OS=Helicobacter felis (strain ATCC 49179 / NCTC 12436 / CS1) OX=936155 GN=tgt PE=3 SV=1
MDVKLDAQEGHARALSLNLAHGCVQTPIFMPVGTQASVKSLDAQDLQALHAPIILGNTYHLYLRPTPERIAKLGGLHGFSGFKGNFLTDSGGFQAFSLRSNTKEHEEGIVFKSHIDGSSHFFTPAKVLDIQYALNSDICMVLDDLVGLPASYDRLLKAVQKTTAWAQKSLEHHMRYARPNNHIFAIVQGGVNLELRTQSALDLSALDFDGFAIGGLAVGESAQEMYETIVHTTPLLPAHKPRYLMGVGTPQDLLEAIDLGVDMFDCVMPTRNARNGTLFTMQGKISIKNTHHKDSDMPLDSACACHTCTHYSKAYLHHLFKARELSYFRLASLHNLHFYLELVRGAREAILQGHYASYKTCMLERLG

SEQ ID NO: 56005 - protein, 376 aa, Helicobacter fennelliae
  REGION 1..376: note = tr|A0A2X3B971|A0A2X3B971_9HELI Queuine tRNA-ribosyltransferase OS=Helicobacter fennelliae OX=215; GN = tgt_1 PE=3 SV=1
MFFKIDSKDSAARAGTLTLAHSVVQTPVFMPVGTQACVKSIDALDIESILGAQIILANTYHTYLRPGIETLKHFGGVHKFSGFSGSFLSDSGGFQAFSLGQNVKKQDNGIVFSSHIDGSKHLFTPESVLDIQYALNSDIMMVLDDLIALPADSNRLKQSIDTTIKWAKQSISYHNQNKQQGLSLTNNLFGIVQGGVDLTFRKQCAQSLVELEFDGYALGGLAVGEETNAMYDTIAFSAPLLPESKPRYLMGVGTPQNLIEAIDRGIDMFDCVMPTRNARNGTLFTSFGKLNIKNQIHKNDENPIDLQCSCYTCKHFSRGYLHHLCKAREITYFRLATLHNLWYYLELMRNAREAILHQKWNQFKSEFYIKLNKEHT

SEQ ID NO: 56006 - protein, 189 aa, Helicobacter fennelliae
  REGION 1..189: note = tr|A0A2X3BRX7|A0A2X3BRX7_9HELI tRNA-guanine transglycosylase OS=Helicobacter fennelliae OX=215; GN = tgt2_1 PE=4 SV=1
MCKRLYLCLWGLKACVKALDFNDLENLGAKIILANTYHLYLRPNDEVVRTLGGLHGFSRFNGSFLTDSGGFQAFSLGGKPRENGIEFRSHIDGSTHFFTPKKVLDIQYNLNSDIMMILDDLIRLPAEQKRIADSIKRTIAWARESLEYHATRRESHLSNNIFAIIQGGVDLEARKICAFSGYRMQRSGI

SEQ ID NO: 56007 - protein, 377 aa, Helicobacter ganmani
  REGION 1..377: note = tr|A0A3D8IC64|A0A3D8IC64_9HELI Queuine tRNA-ribosyltransferase OS=Helicobacter ganmani OX=60246; GN = tgt PE=3 SV=1
MEFNLQRTDENARAGVLKLAHGEVPTPIFMPVGTQASVKALDFSDLLALNAPIILANTYHLYLRPNDEVIRELGGLHAFSKFPRNFLTDSGGFQAFSLNSNVKLYEDGIVFKSHIDGSSHFFSPQKVLDIQYNLNSDIMMILDDLVGLPASKERIRDSIARTTKWAKSAIDYHNYKKQSAANSGKILTNNIFAIVQGGTDKEFRESSAKNLTSLGDFDGYAIGGLAVGEPNEEMYATLDFTTPLLPKDKPRYLMGVGTPRDIIEGIARGVDMFDCVMPTRNARNGTIFTHFGKLAIKSPRFKLDTQPLDSKCSCYTCQNHSRAYLHHLFRAGEISYFRLASIHNLAFYLDLVREAREAILEGEFARFYKDSIESMSP

SEQ ID NO: 56008 - protein, 367 aa, Helicobacter heilmannii
  REGION 1..367: note = tr|A0A0K2Y6T5|A0A0K2Y6T5_HELHE Queuine tRNA-ribosyltransferase OS=Helicobacter heilmannii; OX = 35817 GN=tgt PE=3 SV=1
MDFTLNGTDKKARAGALKLAHGVVPTPIFMPVGTQASVKSLDALDLQIHLKAPIILGNTYHLYLRPGADLICKLGGLHGFSQFQGNFLTDSGGFQAFSLKHNTKEHAEGIVFKSHIDGSLHLFTPQKVLDIQYALNSDICMVLDDLVGLPAPFDRLKLAVEKTTKWAQSSLKHHKTHARASNHIFAIVQGGTDFNLRRQSALELGELDFDGYAIGGLAVGESAHEMQETIAHTTEFLTPHRPRYLMGVGTPQDILNAIELGVDMFDCVMPTRNARNGTLFTSLGKLSIKAQAQKASEEPLDPKCGCYTCKHYSKAYLHHLFKARELLYFRLASLHNLYFYLDLVRGAREAILKGAYADYKARMLEFY

SEQ ID NO: 56009 - protein, 367 aa, Helicobacter heilmannii
  REGION 1..367: note = tr|A0A0K2XWN5|A0A0K2XWN5_HELHE Queuine tRNA-ribosyltransferase OS=Helicobacter heilmannii; OX = 35817 GN=tgt PE=3 SV=1
MDFTLNGTDKKARAGALKLAHGVVPTPIFMPVGTQASVKSLDALDLQIHLKVPIILGNTYHLYLRPGADLICKLGGLHGFSQFQGNFLTDSGGFQAFSLKHNTKEHAEGIVFKSHIDGSLHLFTPQKVLDIQYALNSDICMVLDDLVGLPAPFDRLKLAVEKTTKWAQSSLKHHKTHARASNHIFAIVQGGTDFNLRRQSALELGELDFDGYAIGGLAVGESAHEMQETIAHTTEFLTPHRPRYLMGVGTPQDILNAIELGVDMFDCVMPTRNARNGTLFTSLGKLSIKAQAQKASEEPLDPKCTCYTCKHYSKAYLHHLFKARELLYFRLASLHNLHFYLGLVRGAREAILKGAYVDYKARMLSVY

SEQ ID NO: 56010 - protein, 381 aa, Helicobacter hepaticus
  REGION 1..381: note = sp|Q7VHX2|TGT_HELHP Queuine tRNA-ribosyltransferase; OS = Helicobacter hepaticus (strain ATCC 51449 / 3B1); OX = 235279 GN=tgt PE=3 SV=1
MQVTLQAQDGGARALSLKLAHSEVQTPVFMPVGTQGCVKALDSRDMSEILNAQIILVNTYHMYLRIGIERLKNFGGIARFAHFDRSYLSDSGGFQAFSLNKNAKVTNEGVAFKSHIDGSKHFFSPEYVLDIQYALNSDIMMVLDDLVGLPSSEERIADSIARTSDWAQKSLIYHQSQKARGLGLNNNLFAIIQGGVNEHFRTLCAKQLVDMGDFDGFAIGGLAVGETSEQMYKTISFTTPLMPVNKPRYLMGVGTPENIIESIALGVDMFDCVMPTRNARNATLFTHFGKINIKAAIFSNDQSPIDELCDCYTCQHFTRAYLCHLFRSQEMTYYRLASLHNLHYYLNLMREAREAILQGTFSAYRSSFYALREMEIPNNEY

SEQ ID NO: 56011 - protein, 380 aa, unidentified
  source 1..380: note = Helicobacter jaachi
  REGION 1..380: note = tr|A0A4U8TCC1|A0A4U8TCC1_9HELI Queuine tRNA-ribosyltransferase OS=Helicobacter jaachi OX=1677920; GN = tgt PE=3 SV=1
MQVTLKAQDDRARVLELTLPHSTIQTPIFMPVGTQGCVKALDSIDLSHILHTKLILANTYHMYLRVGLKRLKAFGGVHKFANFHGSYLSDSGGFQAFSLGKHVKIIESGIEFKSHIDGSKHFFSPEFVLDIQYALNSDIMMVLDDLVGLPASTERIADSIQRTSAWAQRSLLYHEAQKAQGKGLDNNLFAIIQGGTDRHFRALSCRQLTEMGDFDGFAIGGLAVGEDTQEMYDTINHLTPLMPPHKPRYLMGVGTPENIIESIALGVDMFDCVMPTRNARNATLFTHFGKINIKAASFINDTKPIDEACDCYTCTHYTRAYLCHLFRAQEITYHRLATLHNLHYYLTLAKGAREAILAGNFKDYRAAFYAKRAMEVPDEY

SEQ ID NO: 56012 - protein, 380 aa, unidentified
  source 1..380: note = Helicobacter japonicus
  REGION 1..380: note = tr|A0A4U8TRY4|A0A4U8TRY4_9HELI Queuine tRNA-ribosyltransferase OS=Helicobacter japonicus; OX = 425400 GN=tgt PE=3 SV=1
MQVALQAQEGKARALNLSLAKAQVQTPVFMPVGTQGCIKALDSNDVSEILGAKIILANTYHMYLRVGIERLKGFGGIHSFANFNGSYLSDSGGFQAFSLNQNTQICEEGISFKSHIDGSKHFFSPEFVLDIQYALNSDIMMVLDDLVGLPASVERLADSVRRTSDWAQRSINYHQKMKQEGRGLSNHLFAIIQGGTDTHFRTLSANSLTNMGDFDGFAIGGLAVGENIEDMYRCIAHTTELMPIHKPRYLMGVGTPENIIESINLGVDMFDCVMPTRNARNGTLFTHFGKINIKVAQYADDKSPIDTQCECYTCQRFSRAYLRHLFRANEITYHRLASLHNLHYYLHLTKGARAAILAGRFKEYRTRFYDLREMETPNEY

SEQ ID NO: 56013 - protein, 372 aa, unidentified
  source 1..372: note = Helicobacter macacae
  REGION 1..372: note = tr|V8CC86|V8CC86_9HELI Queuine tRNA-ribosyltransferase OS=Helicobacter macacae MIT 99-5501 OX=1357400 GN=tgt PE=3 SV=1
MFSLQASSGSARAGVLSLAHSLVQTPVFMPVGTQACVKSLDALDLQNLGAKIILANTYHTYLRPGAEVFSKFGGVHSFSGFGGSFLSDSGGFQAFSLGGNAKKLENGVEFASHIDGSRHLFTPQSVLDMQLALNSDVMMVLDDLIALPADRDRLAQSVDTTTRWARQSKIYYERKKSEGKAEGNHIFGIVQGGVSQEFRARSASELVELDFHGYALGGLAVGEETQQMYDTIEFSTPLLPRDKPRYLMGVGTPENLIEAISRGVDMFDCVMPTRNARNGTLFTSFGRINIKNQQYRFDEGAIDSECECYACKSVSRAYLHHLFRANELSYHRFASLHNLHYYLELMRGAREAIVADKWREFRAEFYAKREYL

SEQ ID NO: 56014 - protein, 380 aa, unidentified; identical to SEQ ID NO: 56001
  source 1..380: note = Helicobacter magdeburgensis
  REGION 1..380: note = tr|A0A4U8SZX3|A0A4U8SZX3_9HELI Queuine tRNA-ribosyltransferase OS=Helicobacter magdeburgensis; OX = 471858 GN=tgt PE=3 SV=1

SEQ ID NO: 56015 - protein, 378 aa, Helicobacter marmotae
  REGION 1..378: note = tr|A0A3D8I7G2|A0A3D8I7G2_9HELI Queuine tRNA-ribosyltransferase OS=Helicobacter marmotae OX=152490; GN = tgt PE=3 SV=1
MRTTLQAQDGKARALSLTLAHGEVQTPIFMPVGTQGCVKALDSIDMSQILGAKIILANTYHMYLRTSLQTLQAFGGIHNFAAFSGNILTDSGGFQAFSLNTNVKRSEDGISFKSHIDGSKHFFSPEFVLDIQYALNSDIMMVLDDLVGLPASDERIADSIRRTSLWAERSFIYHKANQAKGLGLNNHLFAIIQGGVNLHFRTLSCTQLLNMGDFDGFAIGGLAVGEETQAMYECIEHTTALMPRDKPRYLMGVGTPENIIESIALGVDMFDCVMPTRNARNATLFTHFGKINIKSQAFVNDQNPIDTLCDCYTCKHFSRAYLRHLFRANEITYHRLASIHNLHYYLRLTQGAREAILQGEFKAYRQKFYSLREMETPL

SEQ ID NO: 56016 - protein, 378 aa, Helicobacter muridarum
  REGION 1..378: note = tr|A0A099U0L0|A0A099U0L0_9HELI Queuine tRNA-ribosyltransferase OS=Helicobacter muridarum OX=216; GN = tgt PE=3 SV=1
MSIDFTIEAKHGAARASRFVLAHGVVETPIFMPVGTQGILKGIDCVSATNILQTKLILANTYHLYLRPGTDILSKASGIHSFANFNGNYLTDSGGFQAFSLGSNAKSDDTGITFQSHIDGSKHRFTPTKVIDIQYIINSDIMMVLDDLVALPASKSRILDSINRTTKWARQSIEYHNNQKNIREICNKIFAIMQGGIDYEMRKRSANELCELDFDGYAIGGLAVGESNKDMYNCLDYAVAFLPENKPRYLMGVGTPQNLLECIDRGVDMFDCVMPSRNARNACIFTQNGKINIKNAGYKIDFSPLDSECECYTCKHYSKAYLHHLFRAKELSYHSLATIHNLFFYMQLMSNARNAILHGYWDKYKNNMLRKLEGSLWH

SEQ ID NO: 56017 - protein, 376 aa, Helicobacter muridarum
  REGION 1..376: note = tr|A0A4U8TKM7|A0A4U8TKM7_9HELI Queuine tRNA-ribosyltransferase OS=Helicobacter muridarum OX=216; GN = tgt PE=3 SV=1
MDFTIEAKHGAARASRFVLAHGVVETPIFMPVGTQGILKGIDCVSATNILQTKLILANTYHLYLRPGTDILSKASGIHSFANFNGNYLTDSGGFQAFSLGSNAKSDDTGITFQSHIDGSKHRFTPTKVIDIQYIINSDIMMVLDDLVALPASKSRILDSINRTTKWARQSIEYHNNQKNIREICNKIFAIMQGGIDYEMRKRSANELCELDFDGYAIGGLAVGESNKDMYNCLDYAVAFLPENKPRYLMGVGTPQNLLECIDRGVDMFDCVMPSRNARNACIFTQNGKINIKNAGYKIDFSPLDSECECYTCKHYSKAYLHHLFRAKELSYHSLATIHNLFFYMQLMSNARNAILHGYWDKYKNNMLRKLEGSLWH

SEQ ID NO: 56018 - protein, 374 aa, Helicobacter mustelae
  REGION 1..374: note = tr|D3UGZ6|D3UGZ6_HELM1 Queuine tRNA-ribosyltransferase OS=Helicobacter mustelae (strain ATCC 43772 / LMG 18044 / NCTC 12198 / 12198) OX=679897; GN = tgt PE=3 SV=1
MHFKIDKIQNHARATTIQTAHSVIQTPIFMPVGTQACVKGLDFFDLTTHLQTRIILANTYHLYLRPGSENIAKLGGLHHFTKYPHSFLTDSGGFQAFSLSGNMKKSDQGIAFRSHIDGSRHFLTPQKVLDIQYQLNSDIIMVLDDLIGLPAEQNSILQSVQTTTKWAKESLEYHKKNQAEGLGLENHLFAIIQGGNSKTMREKSAQELCALEGFDGYAIGGLAVGESAEEMYDCIEYVNAYTPAHKPRYLMGVGTPENIIEAIDRGVDLFDCVMPSRNARNGSLFTSFGKLNIKSSQYKEQDAAIDEECDCYTCKNFSRAYLNHLFRANEITYFRLATIHNLHYYLTLTRGAREAILANEFQHFKREFYAKRRQ

SEQ ID NO: 56019 - protein, 371 aa, Helicobacter pametensis
  REGION 1..371: note = tr|A0A3P6LCZ8|A0A3P6LCZ8_9HELI Queuine tRNA-ribosyltransferase OS=Helicobacter pametensis; OX = 95149 GN=tgt PE=3 SV=1
MLKFTLHKKDGHARRATIELNHGSIETPVFMPVGTYGSVKAMTPQNLLDIGSQIILGNTYHLWLRPGLEVIEQFGGLHDFIGWNKPILTDSGGFQVFSLSDMRKLTEEGCTFKSPINGDKLFLSPEISMKIQTVLNSDIAMQLDECTPGEATREQAEKSLQMSLRWAERSKKAFEDLNNPNALFGIVQGAMYEDLREQSLRGLEQLNFPGLAIGGLSVGEPKPEMYRMLRAVGLMLPEHKPHYLMGVGTPEDLVYGVANGVDMFDCVMPTRNARNGWLFTRFGDIKIKNAKYKHDTHPLDESCTCYACTHFNRAYLHHLHRAGEILGAQLNTIHNLHFYQTIMAEMRETIEQGKFADWQEQFHENRGRGVD

SEQ ID NO: 56020 - protein, 377 aa, Helicobacter pullorum
  REGION 1..377: note = tr|C5EZV3|C5EZV3_9HELI Queuine tRNA-ribosyltransferase OS=Helicobacter pullorum MIT 98-5489 OX=537972 GN=tgt PE=3 SV=1
MEFNLQKNDGNARAGILKLAHGEVQTPIFMPVGTQACVKALDFADLLALDAPIILANTYHLYLRPGAEIIGELGGLHNFSKFPRNFLTDSGGFQAFSLSDNVKVSEDGILFKSHIDGSKHFFTPKKVLDIQYHLNSDIMMILDDLVGLPASKERIKQSINRTTQWAREAISYHNFKKIQAKESGVKLTNNIFAINQGGTDREFREASARDLTSMGDFDGYAIGGLAVGEPNKQMYETLDFTTPLLPRDKPRYLMGVGTPQDIVEAIARGVDMFDCVMPTRNARNGTIFTHFGKLSIKSSRFKLDTNPLDCKCHCYTCQNFSRAYLHHLFRAGEMSYFRLASIHNLAYYLDLVREAREAILQGKFIEFYKRFYSDLEN

SEQ ID NO: 56021 - protein, 377 aa, Helicobacter pullorum
  REGION 1..377: note = tr|A0A0N1EA05|A0A0N1EA05_9HELI Queuine tRNA-ribosyltransferase OS=Helicobacter pullorum OX=35818; GN = tgt PE=3 SV=1
MEFNLQKNDGNARAGILKLAHGEVQTPIFMPVGTQACVKALDFADLLALDAPIILANTYHLYLRPGAEIIGELGGLHNFSKFPRNFLTDSGGFQAFSLSDNVKVSEDGILFKSHIDGSKHFFTPKKVLDIQYHLNSDIMMILDDLVGLPASKERIKQSINRTTQWAKEAISYHNFKKIQAKESGVKLTNNIFAINQGGTDREFREASARDLTSMGDFDGYAIGGLAVGEPNKQMYETLDFTTPLLPRDKPRYLMGVGTPQDIVEAIARGVDMFDCVMPTRNARNGTIFTHFGKLSIKSSRFRLDTNPLDCKCHCYTCQNFSRAYLHHLFRAGEMSYFRLASIHNLAYYLDLVREAREAILQGKFIEFYKRFYSDLEN

SEQ ID NO: 56022 - protein, 371 aa, Helicobacter pylori
  REGION 1..371: note = sp|O08314|TGT_HELPY Queuine tRNA-ribosyltransferase; OS = Helicobacter pylori (strain ATCC 700392 / 26695); OX = 85962 GN=tgt PE=3 SV=2
MDFQLQATDNNARAGLLNLAHSQVATPVFMPVGTQGCIKSLDATDAQEILGAKLILANTYHMYLRPGEKVVEELGGLHRFAQFYGSFLTDSGGFQAFSLSDNVKLQEDGIVFKSHIDGSKHLFTPAKVLDIQYSLNSDIMMVLDDLVGLPAPLKRLEESIKRSAKWANMSLEYHKEKNRPSNNLFAIIQGGTHLKMRSLSVGLTHEGFDGYAIGGLAVGESADEMLETIAHTAPLLPKDKPRYLMGVGTPENILDAISLGVDMFDCVMPTRNARNATLFTHSGKISIKNAPYKLDNTPIEENCACYACKRYSKAYLHHLFRAKELTYARLASLHNLHFYLELVKNARNAILEKRFLSFKKEFLEKYNSRSH

SEQ ID NO: 56023 - protein, 371 aa, Helicobacter pylori
  REGION 1..371: note = tr|J0DBG4|J0DBG4_HELPX Queuine tRNA-ribosyltransferase OS=Helicobacter pylori Hp H-6; OX = 992061 GN=tgt PE=3 SV=1
MDFQLQAIDDNARAGVLNLAHSQVATPVFMPVGTQGCIKSLDATDAQEILGAKLILANTYHMYLRPGEKVVGQLGGLHRFAQFQGSFLTDSGGFQAFSLSDNVKLQEDGIVFKSHIDGSKHLFTPTKVLDIQYSLNSDIMMVLDDLVGLPAPLKRLEESIKRSAKWANLSLEYHKQKNRPSNNLFAIIQGGTHLKMRSLSVGLTHEGFDGYAIGGLAVGESVDEMLETIAHTAPLLPKDKPRYLMGVGTPENILDAIGLGVDMFDCVMPTRNARNATLFTHSGKISIKNAPYKLDNTPIEENCTCYTCKRYSKAYLHHLFRAKELTYARLASLHNLHFYLDLVKNARNAILEKRFLSFKKEFLEKYNSRSH

SEQ ID NO: 56024 - protein, 376 aa, unidentified
  source 1..376: note = Helicobacter saguini
  REGION 1..376: note = tr|A0A347VSR7|A0A347VSR7_9HELI Queuine tRNA-ribosyltransferase OS=Helicobacter saguini OX=1548018; GN = tgt PE=3 SV=1
MKFTLESIVNKARAGRFKLAHGEVLTPIFMPVGTQGVLKGLDSNDITTHLKTNLILANTYHLYLRPGAEILRKINGIHNFANFKGNYLTDSGGFQAFSLRANAKPNEQGIAFKSHIDGSRHFFTPQSVLDMQYAINSDIMMILDDLVGLPASKDRLLDSIKRTSEWARQSIEYHREQKARHEVGNKIFAIMQGGIDYEMRKRSSEDLVAMDFDGYAIGGLAVGESSEAMYGCLDYACDFLPENKPRYLMGVGTPQNLLECIDRGVDMFDCVMPTRNARNASIFTHFGRLNIKNARFRADFSPLDSKCECFVCRDYTRAFLHHLFRANEITYHRLASIHNLHFYLNLVREARLAIINKTWESYKKKRLEEMDSNENL

SEQ ID NO: 56025 - protein, 377 aa, Helicobacter sp.
  REGION 1..377: note = tr|A0A3D6E3Y1|A0A3D6E3Y1_9HELI Queuine tRNA-ribosyltransferase OS=Helicobacter sp. OX=218 GN=tgt; PE = 3 SV=1
MNFTLHVTDGRARAATLELAHGSIPTPIFMPVGTQASVKALDHTDLLEHIDAPIILGNTYHLYLRPGDENIAKLGGLHGFTKFPRNFLTDSGGFQAFSLNTNTKHSEEGIIFKSHIDGSKHLFTPEKVLEIEYNLNSDIMMVLDDLVGLPAPRERIKESIERTTRWAERSLLFHQAQKEQGKALTNHLFAIVQGGTDVEFREISSKALVGLGEFDGFAIGGLAVGEPNEEMYATLEYTTPWLPKHKPRYLMGVGTPEDIIEAIDRGVDMFDCVMPTRNARNGTLFTHFGKLSIKSPRYKLDENPIDSECDCYTCKHHSRAYLNHLYRSGEFSYFRLASIHNLRYYLNLVRGAREAILSRTWAEYRRQFYAKRGADEA

SEQ ID NO: 56026 - protein, 376 aa, Helicobacter sp.
  REGION 1..376: note = tr|A0A1B8J991|A0A1B8J991_9HELI Queuine tRNA-ribosyltransferase OS=Helicobacter sp. CLO-3 OX=211; GN = tgt PE=3 SV=1
MFKLSHTDGAARAGTLSLAHSTIQTPVFMPVGTQACVKSLDATDIKEHLGAKIILANTYHTYLRPGVEILQKFGGVHGFSGFDGSFLSDSGGFQAFSLSSNAKKVDEGVFFTSHIDGSKHLFTPESVLDIQYALNSDIMMILDDLIALPASKERLDKSIETTTIWARQSIEYHRAQKAQGKALTNHIFGIVQGGTSNEHRLRSANELVALEFDGYALGGLAVGEETQAMYDTIEFSAPLLPESKPRYLMGVGTPENLIEGVARGIDMFDCVMPSRNARNGTLFTTFGKLNIKNARYKDDENPLDSACGCYTCTRYSRAYLYHLFRAGEIAYFRLATLHNLWYYLTLLRLAREAIIAGRFEAFRREFYHLRMENAKS

SEQ ID NO: 56027 - protein, 366 aa, Helicobacter suis
  REGION 1..366: note = tr|A0A510HFM0|A0A510HFM0_9HELI Queuine tRNA-ribosyltransferase OS=Helicobacter suis OX=104628; GN = tgt PE=3 SV=1
MDFRLDRIDGKARATTLFLSHGMVQTPIFMPVGTQASVKSLDALDLQNLQAPIILANTYHLYLRPGAACIEQLGGLHGFTQFPGNFLTDSGGFQAFSLSSNAKPHDQGIVFKSHIDGSTHLFTPSKVLDIQYALNSDICMVLDDLVGLPAPIDRLKISVQKTTAWALESLKYHKEHAKPNHHIFAIVQGGIDQELRKQSALDLCDLDFDGFAIGGLAVGENAQEMYAAIEYTEAFLPTHKPRYLMGVGTPQDLLEAIERGVDMFDCVMPTRNARNGTLFSSEGKISIKSAQYKQSQDPLDLNCTCYTCKHYSKAYLSHLFRAKELLYFRLASLHNLFFYLQLVRGAREAILEGRYARFKAFWSERL

SEQ ID NO: 56028 - protein, 366 aa, Helicobacter suis; identical to SEQ ID NO: 56027
  REGION 1..366: note = tr|E7G552|E7G552_9HELI Queuine tRNA-ribosyltransferase OS=Helicobacter suis HS5 OX=710394; GN = tgt PE=3 SV=1

SEQ ID NO: 56029 - protein, 374 aa, Helicobacter trogontum
  REGION 1..374: note = tr|A0A4U8SBE7|A0A4U8SBE7_9HELI Queuine tRNA-ribosyltransferase OS=Helicobacter trogontum OX=50960; GN = tgt PE=3 SV=1
MQFQIQAKVGKARACSFTLAHGNVVTPIFMPVGTQGVIKGLNSLDVKHVLQTNLILANTYHLYLRPGIETLKKAGGIHNFANFHGNYLTDSGGFQAFSLGENVKHEDCGIAFKSHIDGSKHFFTPEKVLDIEYAINSDIMMILDDLTGLPATKERLLDSVKRTTKWAKQSISYHNMQKEKYDIKNKIFAIMQGGTDYDMRKRSASELIELAFDGYAIGGLAVGESSQEMYECLDYACDFLPDLKPRYLMGVGTPENLLEGIDRGVDMFDCVMPTRNARNATIFTNHGKINIKKTCYKNDFTPLDSQCNCLTCTNYTRAYLHHLFRANEITYHSLASIHNLYFYITLLKDSRQAILDQTWQQFKKQKLDDLAQIN

SEQ ID NO: 56030 - protein, 380 aa, Helicobacter typhlonius
  REGION 1..380: note = tr|A0A099UIF3|A0A099UIF3_9HELI Queuine tRNA-ribosyltransferase OS=Helicobacter typhlonius; OX = 76936 GN=tgt PE=3 SV=1
MQVELQAQDGKARALNLTLAHAQVQTPVFMPVGTQGCVKALDSLDMKNLLGAKIILANTYHMYLRVGIERLKNFGGIHKFANFGGNYLSDSGGFQAFSLNQNTKISDEGIGFKSHIDGSKHFFSPEFVLDMQYALNSDIMMVLDDLVGLPANDERLADSIRRTSDWAQRSFDYHQAQKARGVGLDNHLFAIIQGGISKHFRTLSARQLTNIGEFDGFAIGGLAVGESAEEMYKCIAHTTELMPCYKPRYLMGVGTPENIIESIALGVDMFDCVMPTRNARNATLFTHFGKINIKAAQYANDENPIDSKCDCYTCKNFSRAYLCHLFRSNEITYHRLASLHNLHYYLSLTKGARETILAGRFKEYRALFYNLREMEIPDEY

SEQ ID NO: 56031 - protein, 376 aa, unidentified
  source 1..376: note = Helicobacter valdiviensis
  REGION 1..376: note = tr|A0A2W6MTY9|A0A2W6MTY9_9HELI Queuine tRNA-ribosyltransferase OS=Helicobacter valdiviensis; OX = 1458358 GN=tgt PE=3 SV=1
MEFNLQKIDGEARAGSIKLAHGEVLTPIFMPVGTQASVKALDFKDLLELDCPIVLANTYHLYLRPSDEVVAKLGGLHNFSKFPRNFLTDSGGFQAFSLGGNVKVQEEGIVFKSHIDGSKHFFTPKKVLDIEYNLNSDIMMILDDLVGLPASKERIKESINRTSLWAKEAIEYHTFKKEQFKNEGRELSNNIFAINQGGTDREFREMSARDLTSMGEFDGYAIGGLAVGEPNELMYETLSFTVPLLPKNKPRYLMGVGTPRDIIEAIYRGVDMFDCVMPTRNARNGTIFTHFGKLSIKSSRFKLDDNPLDSKCSCYTCQNFSRAYLHHLFRAGEMSYFRLSSIHNLAFYLKLVRDAREAILKGEFRRLYQEICEIYN

SEQ ID NO: 56032 - protein, 377 aa, unidentified
  source 1..377: note = Helicobacter winghamensis
  REGION 1..377: note = tr|A0A2N3PHH2|A0A2N3PHH2_9HELI Queuine tRNA-ribosyltransferase OS=Helicobacter winghamensis; OX = 157268 GN=tgt PE=3 SV=1
MEFNLQKTDNNARAGILKLAHGEVPTPIFMPVGTQASVKALDFNDLLALNAPIILGNTYHLYLRPNDEIIATLGGLHSFTKFPRNFLTDSGGFQAFSLNSNVKHQEDGILFKSHIDGSRHFFSPQKVLDIQYNLNSDIMMILDDLVGLPASKERILESINRTTKWAKDAITYHNFKKQEAIDCGNPLTNNIFAIVQGGTDKEFREASARDLTSLGDFDGYAIGGLAVGEPNAEMYATLDFTTPLLPKDKPRYLMGVGTPQDIVEAIARGVDMFDCVMPTRNARNGTIFTHFGKLAIKSPRYKLDTQPLDPKCHCYTCTNHTRAYLHHLFRAGEMSYFRLSSIHNLAHYLNLVRNAREAILKGEFMQFYKKFYAELES

SEQ ID NO: 56033 - protein, 307 aa, unidentified
  source 1..307: note = Helicobacteraceae bacterium
  REGION 1..307: note = tr|A0A1J5F985|A0A1J5F985_9HELI Queuine tRNA-ribosyltransferase (Fragment) OS=Helicobacteraceae bacterium CG2_30_36_10 OX=1805215 GN=AUK54_02005 PE=3 SV=1
MEFTLEATSKNARAGTIKTAHSTIKTPVFMPVGTVGSVKSLDVNDVLNILGAEIILANTYHMYLRPGDETVAKMGKLHGFTAYPKSFLTDSGGFQAFSLSDISKASEKGIEFRSHIDGSKHFFTPTKVIDIQHNLGSDIMMILDDLVALPATQERIALSIERTTAWAKESIEYFRAKQKEGVGVEQNIFAIIQGGTDKAFRTKSATELCALDYDGFAIGGLSVGELNNEMYDMVEHTVQYMPRDKPRYLMGVGTPEDLIENIEHGIDMFDCVMPTRNARNGTLFTSFGRINIKGAKFKEDALPIDPE

SEQ ID NO: 56034 - protein, 372 aa, unidentified
  source 1..372: note = Helicobacteraceae bacterium
  REGION 1..372: note = tr|A0A1J4TX06|A0A1J4TX06_9HELI Queuine tRNA-ribosyltransferase OS=Helicobacteraceae bacterium CG1_02_36_14 OX=1805214 GN=tgt PE=3 SV=1
MEFTLETTSKNARAGTIKTAHSTIQTPVFMPVGTLGSVKSLDMDDVLNLLGADIILANTYHMYLRPGDKTVAKMGKLHGFTTYPKSFLTDSGGFQAFSLSDISKASEKGIEFRSHIDGSKHFFTPTKVIDIQHNLGSDIMMILDDLVALPATQERIALSIERTTAWAKESIEYFRAKQKEGVGVEQNIFAIIQGGTDKAFRTKSATELCALDYDGFAIGGLSVGELNNEMYDTVEHTTQYMPKDKPRYLMGVGTPEDLIENIERGIDMFDCVMPTRNARNGTLFTSFGRINIKGAKFKEDALPIDPECQCLTCKTYTRAYLNHLFRAGEISYFRLATIHNLHYYLNLMREIRVAIVEDRFAEYKTEFYRKRS

SEQ ID NO: 56035 - protein, 374 aa, Heliobacterium modesticaldum
  REGION 1..374: note = tr|B0TF77|B0TF77_HELMI Queuine tRNA-ribosyltransferase OS=Heliobacterium modesticaldum (strain ATCC 51547 / Ice1) OX=498761 GN=tgt PE=3 SV=1
MTAAVRYELIKECTRTSARAGILHTPHGSFETPIFMPVGTQATVKTMTPEEVRELGAGIILSNTYHLYLRPGSDLVREAGGLHKFMNWSHGILTDSGGFQVFSLGPLRKITEEGVRFKSHIDGSEHFFTPEKSIQIQMDLGADIIMAFDECPPYPAEREYAQKSLEMTIRWAKRCRAAHTRKDQALFAITQGGMYADLRKESAARLVELDFPGYGIGGLSVGEPKPLMYEMLDATVPELPKNKARYLMGVGSPDCLWEGVERGVDMFDCVLPTRVARNGLAFTSHGKVVIRNAEHARDFERLDPECSCYTCRHYSRAYLRHLYKAEEILAYRLLTIHNLHMLLNLMRNIRQSILEDRFYEAKKAFFDKYGEERG

SEQ ID NO: 56036 - protein, 373 aa, Heliophilum fasciatum
  REGION 1..373: note = tr|A0A4V2SX04|A0A4V2SX04_9FIRM Queuine tRNA-ribosyltransferase OS=Heliophilum fasciatum OX=35700; GN = tgt PE=3 SV=1
MSVRYELIAQCPETGARAGLLHTPRGTFKTPIFMPVGTQATVKTMTPEELQDLGAEIILSNTYHLYMRPGEALVKEAGGLHRFMNWPRGILTDSGGFQVFSLGPLRKITEEGVSFKSHIDGSQHFFSPEKVMQIQMDLGADIIMAFDECPPHPSTWEYARNSLDVTLRWARRCQQAHHREGQALFGITQGGMYADLRRESAQRFVEMDFPGYGIGGLSVGEPKPLMYEMLDVTVPELPANKPRYLMGVGSPDCLLEGVARGVDMFDCVLPTRVARNGLAMTSTGKVVIRNAQYARDFEPLDPNCSCSTCRNYSRAYLRHLYKAEEILAYRLLTMHNLHMLLQLMRDMRQAIIDGSFVAFKKSFLARYGQESQE

SEQ ID NO: 56037 - protein, 381 aa, unidentified
  source 1..381: note = Henriciella algicola
  REGION 1..381: note = tr|A0A399RGT1|A0A399RGT1_9RHOB Queuine tRNA-ribosyltransferase OS=Henriciella algicola OX=1608422; GN = tgt PE=3 SV=1
MATFPFEIKAREGKARTGVLKTLRGGIRTPAFMPVGTAATVKALYMDQVEQAGADIILGNTYHLMLRPGAERVKRLGGLHAFSGWRGPMLTDSGGFQVWSLSQLRKMDADGVTFRSHIDGSEHRLTPARSIEIQADLLGADISMQLDECTDFPCTHEEAERSLNLSLDWGARSLEAFGERDTQTLFGIVQGSNFPDLREKSAKGVVAQGFGGIALGGLAVGEGHDQMCATIDMTVPHLPGDKPRYVMGVGKPIDLVESVARGIDMFDCVLPTRAGRHGQAWTWDGPINLKNARFAEDTSPIDEAVPSPASQDYSKAYLHHLIKSGEYLGSMILSWHNTAFFQALMAEIRLAIEENRFEALRAELSRRWASTKSSARMPKDA

SEQ ID NO: 56038 - protein, 381 aa, unidentified
  source 1..381: note = Henriciella barbarensis
  REGION 1..381: note = tr|A0A399QQ86|A0A399QQ86_9RHOB Queuine tRNA-ribosyltransferase OS=Henriciella barbarensis; OX = 86342 GN=tgt PE=3 SV=1
MATFPFEIKAREGKARTGVLKTPRGDIRTPAFMPVGTAATVKAMYMDQVEQAGADIILGNTYHLMLRPGAERVERLGGLHAFSGWKGPMLTDSGGFQVWSLSQLRKMDADGVTFRSHIDGSEHRLTPARSIEIQADLLGADISMQLDECTDFPCTHEEAERSLDLSLDWGARSLEAFGDRDAQTLFGIVQGSNFPDLREKSAKGVVSQGFGGIALGGLAVGEGHDQMCATIDMTVPHLPEAKPRYVMGVGKPIDLVESVARGIDMFDCVLPTRAGRHGQAWTWEGPINLKNARFSEDMSPVDEAVPSPASQDYTRAYLHHLIKSGEYLGAMILSWHNTAFFQALMAEIRLSIVENRFEALRAELSHRWAATKSSARAPKSA

SEQ ID NO: 56039 - protein, 378 aa, Henriciella sp.
  REGION 1..378: note = tr|A0A399REW1|A0A399REW1_9RHOB Queuine tRNA-ribosyltransferase OS=Henriciella sp. JN25 OX=2305466; GN = tgt PE=3 SV=1
MATFPFEIKAREGAARTGVLKTARGDIRTPAFMPVGTAGTVKALYMDQVKQAGADIILGNTYHLMLRPGAERVKRLGGLHAFSGWSGPMLTDSGGFQVWSLSQLRKMDKDGVTFRSHIDGSEHRLTPARSIEIQADLLGADISMQLDECTDFPCSHEEALRSLELSLDWGGKSLGAFGQREGQTLFGIIQGSNFEDLRERSAKGVVSQGFGGIALGGLAVGEGHDQMCRTIDMTVPHLPDDKPRYVMGVGKPIDLVESVARGIDMFDCVLPTRAGRHGQAWTWDGPINLKNAQFAEDTSPIDAAVDCPASQDYSRAYLHHLIKAGEYLAPMILSWHNTAFFQALMAEIRLAISENRFEALRAHLSHRWAATKSRPKQD

SEQ ID NO: 56040 - protein, 378 aa, Henriciella sp.
  REGION 1..378: note = tr|A0A2E6L5Z9|A0A2E6L5Z9_9RHOB Queuine tRNA-ribosyltransferase OS=Henriciella sp. OX=1968823; GN = tgt PE=3 SV=1
MATFPFEIKAREGKARTGVLKTPRGDIRTPAFMPVGTAATVKALYMDQVAQAGADIILGNTYHLMLRPGAERVHRLGGLHEFSGWKGPMLTDSGGFQVWSLSQLRKMDKHGVTFRSHIDGSEHRLTPARSIEIQADLLGADISMQLDECTDFPCTHEEAERSLDLSLDWGARSLEAFGARESQTLFGIVQGSNYPDLREKSARGVVSQGFGGIALGGLAVGEGHDQMCDTIDMTVPHLPDEKPRYVMGVGKPIDLVESVARGIDMFDCVLPTRAGRHGQAWTWEGPINLKNARFAEDMSPVDAAVPCPASQDYTKAYLHHLIRAGEYLGAMVLSWHNTAFFQALMAEMRLAIAENRFEALRTELNARWSSTKSAPRSS

SEQ ID NO: 56041 - protein, 375 aa, unidentified
  source 1..375: note = Hephaestia caeni
  REGION 1..375: note = tr|A0A397NJV7|A0A397NJV7_9SPHN Queuine tRNA-ribosyltransferase OS=Hephaestia caeni OX=645617; GN = tgt PE=3 SV=1
MPRFDFAIHATDGAARTGAITMERGVIRTPAFMPVGTAATVKAMKPADVHAAGADIILGNTYHLMLRPGAERVHRLGGLHDFMGWDRPILTDSGGYQVMSLADLTKRSEDGVAFKSHLDGSRHLLSPERSIEIQRLLGSNIVMAFDELVPTTATREVQAAAMERSMRWAKRSRAAFDSGEDHAAHNAIFGIQQGALDEGLRKASADALTDIGFDGYAVGGLAVGEGQEAMFACLDYAPQQLPADKPRYLMGVGKPDDIVGAVERGIDMFDCVLPTRSGRTGQAFTRGGPINIRNARFGEDTGPLDPTCACPVCAGWSRAYLHHLVRAGEILGAMLMTEHNIWFYEALMADLRAAIADGRLTTFALDFRARYHAGA

SEQ ID NO: 56042 - protein, 376 aa, Herbaspirillum aquaticum
  REGION 1..376: note = tr|A0A225SM53|A0A225SM53_9BURK Queuine tRNA-ribosyltransferase OS=Herbaspirillum aquaticum; OX = 568783 GN=tgt PE=3 SV=1
MLEFTLLKTDGKARRGRVKLNHGTVETPIFMPVGTYGSVKAMSPLELKEINAQIILGNTFHLWLRPGLEVVSKFGGLHKFIGWDKPILTDSGGFQVFSLGEMRKITEEGVHFASPINGDRLFLSPEISMQIQRVLNSDIVMQFDECTPYEIDGRPATREEAGKSMRMSLRWAKRSKDEFDRGENPNALFGIVQGGMFEGLRDESLAGLEELGFDGFAIGGLSVGEPKEDMMRVLEHVGPRLPADKPHYLMGVGTPEDLVEGVSNGVDMFDCVMPTRNARNGWIFTRYGDVKIKNAKYKNDDRPFDESCDCYACKNFSRAYLHHLHRAGEILGARMNTVHNLHYYLQLMQEMRDAIDAGTFQAFVKKFKEDRARGVD

SEQ ID NO: 56043 - protein, 375 aa, Herbaspirillum hiltneri
  REGION 1..375: note = tr|A0A561JJX8|A0A561JJX8_9BURK Queuine tRNA-ribosyltransferase OS=Herbaspirillum hiltneri; OX = 341045 GN=tgt PE=3 SV=1
MLEFTLLKTDGNARRGRVKLNHGVVETPIFMPVGTYGSVKAMSPLELKEIDAHIILGNTFHLWLRPGLEVMAKFGGLHGFMGWDKPILTDSGGFQVFSLGDMRKITEEGVHFASPINGDKLFLSPEVSMQIQRVLNSDIVMQFDECTPYEIDGRPATQVEAAQSMRMSLRWAKRSMDEFKGGENPNALFGIVQGGMFETLRDESLAGLNELGFDGIAIGGLSVGEPKEDMMRVLEHIGPRLPADKPHYLMGVGTPEDLVAGVASGVDMFDCVMPTRNARNGWLFTRFGDIKIKNARYKEDTKPLDETCDCYACKNFSRAYLHHLHRTGEILGARLNTIHNLHYYLQIMKEIRAAIDDGKFTQFVAKFKEDRARGV

SEQ ID NO: 56044 - protein, 376 aa, Herbaspirillum huttiense; identical to SEQ ID NO: 56042
  REGION 1..376: note = tr|A0A561K7P9|A0A561K7P9_9BURK Queuine tRNA-ribosyltransferase OS=Herbaspirillum huttiense; OX = 863372 GN=tgt PE=3 SV=1

SEQ ID NO: 56045 - protein, 376 aa, Herbaspirillum huttiense
  REGION 1..376: note = tr|A0A4P7A522|A0A4P7A522_9BURK Queuine tRNA-ribosyltransferase OS=Herbaspirillum huttiense; OX = 863372 GN=tgt PE=3 SV=1
MLEFTLLKTDGKARRGRVKLNHGTVETPIFMPVGTYGSVKAMSPLELKEINAQIILGNTFHLWLRPGLEVVSKFGGLHKFIGWDKPILTDSGGFQVFSLGEMRKITEEGVHFASPINGDRLFLSPEISMQIQRVLNSDIVMQFDECTPYEIDGRPATREEAGKSMRMSLRWAKRSKDEFDRGENPNALFGIVQGGMFEGLRDESLAGLEELGFDGFAIGGLSVGEPKEDMMRVLEHVGPRLPADKPHYLMGVGTPEDLVEGVSNGVDMFDCVMPTRNARNGWIFTRYGDVKIKNAKYKNDDRPFDESCDCYACKNFSRAYLHHLHRAGEILGARMNTVHNLHYYLQLMQEMRDAIDAGTFQDFVRKFKEDRARGVD

SEQ ID NO: 56046 - protein, 375 aa, unidentified
  source 1..375: note = Herbaspirillum robiniae
  REGION 1..375: note = tr|A0A246WMB2|A0A246WMB2_9BURK Queuine tRNA-ribosyltransferase OS=Herbaspirillum robiniae; OX = 2014887 GN=tgt PE=3 SV=1
MLEFTLLKTDGKARRGRVKLNHGTVETPIFMPVGTYGSVKAMSPLELNEINAQIILGNTFHLWLRPGLEVVSKFGGLHKFIGWDKPILTDSGGFQVFSLGEMRKITEEGVHFASPINGDRLFLSPEISMQIQRVLNSDIVMQFDECTPYEIDGRPATREEAGKSMRMSLRWAKRSKDEFDQGENPNALFGIVQGGMFEGLRDESLAGLQELDFDGYAIGGLSVGEPKEDMMRVLEHVGPRLPADKPHYLMGVGTPEDLVEGVANGVDMFDCVMPTRNARNGWIFTRYGDVKIKNAKYKDDERPYDETCDCYACKNFSRAYLHHLHRAGEILGARMNTVHNLHYYLKLMEEMRAAIDAGQFQAFVSKFKEDRARGV

SEQ ID NO: 56047 - protein, 376 aa, Herbaspirillum rubrisubalbicans
  REGION 1..376: note = tr|A0A0U3BE91|A0A0U3BE91_9BURK Queuine tRNA-ribosyltransferase OS=Herbaspirillum rubrisubalbicans M1 OX=1078773 GN=tgt PE=3 SV=1
MLEFTLLKTDGKARRGRVKLNHGSVETPIFMPVGTYGSVKAMSPLELKEINAQIILGNTFHLWLRPGLEVVSKFGGLHKFIGWDKPILTDSGGFQVFSLGEMRKITEEGVHFASPINGDRLFLSPEISMQIQRVLNSDIVMQFDECTPYEIDGRPATREEAGKSMRMSLRWAKRSKDEFDRGENPNALFGIVQGGMFEGLRDESLAGLEQLGFDGFAIGGLSVGEPKEDMMRVLEHVGPRLPANKPHYLMGVGTPEDLVEGVANGVDMFDCVMPTRNARNGWIFTRYGDVKIKNAKYKNDDRPFDESCDCYACKNFSRAYLHHLHRAGEILGARMNTVHNLHYYLQLMQEMRDAIDAGTFQGFVKKFKEDRARGVD

SEQ ID NO: 56048 - protein, 376 aa, Herbaspirillum rubrisubalbicans
  REGION 1..376: note = tr|A0A328IUG7|A0A328IUG7_9BURK Queuine tRNA-ribosyltransferase OS=Herbaspirillum rubrisubalbicans; OX = 80842 GN=tgt PE=3 SV=1
MLEFTLLKTDGKARRGRVKLNHGSVETPIFMPVGTYGSVKAMSPLELKEINAQIILGNTFHLWLRPGLEVVSKFGGLHKFIGWDKPILTDSGGFQVFSLGEMRKITEEGVHFASPINGDRLFLSPEISMQIQRVLNSDIVMQFDECTPYEIDGRPATREEAGKSMRMSLRWAKRSKDEFDRGENPNALFGIVQGGMFEGLRDESLAGLEQLGFDGFAIGGLSVGEPKEDMMRVLEHVGPRLPANKPHYLMGVGTPEDLVEGVANGVDMFDCVMPTRNARNGWIFTRYGDVKIKNAKYKNDDRPFDESCDCYACKNFSRAYLHHLHRAGEILGARMNTVHNLHYYLQLMQEMRDAIDAGTFQDFVRKFKEDRARGVD

SEQ ID NO: 56049 - protein, 376 aa, Herbaspirillum seropedicae
  REGION 1..376: note = tr|D8INS5|D8INS5_HERSS Queuine tRNA-ribosyltransferase OS=Herbaspirillum seropedicae (strain SmR1) OX=757424 GN=tgt PE=3 SV=1
MLEFTLLKTDGKARRGRVKLNHGTVETPIFMPVGTYGSVKAMSPLELKEINAQIILGNTFHLWLRPGLEVVSRFGGLHKFIGWDKPILTDSGGFQVFSLGEMRKITEEGVHFASPINGDRLFLSPEISMQIQRVLNSDIVMQFDECTPYEIDGRPATREEAGKSMRMSLRWAKRSKDEFDRGENPNALFGIVQGGMFEGLRDESLAGLEELGFDGFAIGGLSVGEPKEDMMRVLEHVGPRLPADKPHYLMGVGTPEDLVEGVANGVDMFDCVMPTRNARNGWIFTRYGDVKIKNAKYKNDDRPFDESCDCYACKNFSRAYLHHLHRAGEILGARMNTVHNLHYYLQLMQEMRDAIDAGTFQDFVKKFKEDRARGVD

SEQ ID NO: 56050 - protein, 376 aa, Herbaspirillum seropedicae
  REGION 1..376: note = tr|A0A5B8E0T3|A0A5B8E0T3_HERSE Queuine tRNA-ribosyltransferase OS=Herbaspirillum seropedicae; OX = 964 GN=tgt PE=3 SV=1
MLEFTLLKTDGKARRGRVKLNHGTVETPIFMPVGTYGSVKAMSPLELKEINAQIILGNTFHLWLRPGLEVVSRFGGLHKFIGWDKPILTDSGGFQVFSLGEMRKITEEGVHFASPINGDRLFLSPEISMQIQRVLNSDIVMQFDECTPYEIDGRPATREEAGKSMRMSLRWAKRSKDEFDRGENPNALFGIVQGGMFEGLRDESLAGLEELGFDGFAIGGLSVGEPKEDMMRVLEHVGPRLPADKPHYLMGVGTPEDLVEGVANGVDMFDCVMPTRNARNGWIFTRYGDVKIKNAKYKNDDRPFDESCDCYACKNFSRAYLHHLHRAGEILGARMNTVHNLHYYLQLMQEMRDAIDAGAFQDFVKKFKEDRARGVD

SEQ ID NO: 56051 - protein, 375 aa, Herbaspirillum sp.
  REGION 1..375: note = tr|J2M2H2|J2M2H2_9BURK Queuine tRNA-ribosyltransferase OS=Herbaspirillum sp. CF444; OX = 1144319 GN=tgt PE=3 SV=1
MLEFTLLKTDGNARRGRVKLNHGVVETPIFMPVGTYGSVKAMSPLELKEIDAQIILGNTFHLWLRPGLEVMAKFGGLHGFMGWDKPILTDSGGFQVFSLGDMRKITEEGVHFASPINGDKLFLSPEVSMQIQRVLNSDIVMQFDECTPYEIDGRPATQVEAAQSMRMSLRWAKRSRDEFDKGENPNALFGIVQGGMFETLRDESLAGLNELDFDGIAIGGLSVGEPKEDMMRVLDHIGPRLPADKPHYLMGVGTPEDLVAGVASGVDMFDCVMPTRNARNGWLFTRFGDIKIKNARYKEDTKPLDETCDCYACKNFSRAYLHHLHRTGEILGARLNTIHNLHYYLQIMKEIRAAIDDGQFAQFVARFKEDRARGA

SEQ ID NO: 56052 - protein, 375 aa, Herbaspirillum sp.
  REGION 1..375: note = tr|A0A418X3W6|A0A418X3W6_9BURK Queuine tRNA-ribosyltransferase OS=Herbaspirillum sp. K2R10-39; OX = 2320862 GN=tgt PE=3 SV=1
MLNFKLIKTDGKARRGRLTLNHGVVETPIFMPVGTYGSVKAMSPLELHDIDAQIILGNTFHLWLRPGLDVVSKFDGLHRFIGWSKPILTDSGGFQVFSLGAMRKITEEGVKFASPINGDKLFLSPEISMQIQRVLNSDIVMQFDECTPYEINGRPATEAEAATSMRMSLRWGKRSRDEFDKGENPNALFGIVQGGMFEHLRDESLAGLQEIGYDGYAIGGLSVGEPKEDMMRVLEHVGPRLPADKPHYLMGVGTPEDLVAGVANGVDMFDCVMPTRNARNGWLFTRFGDLKIKNARYKDDEKPLDESCECYACRNFSRAYLYHLHRAGEILGARLNTIHNLHYYLQLMREMRAAIDADRFQAFVVQFHADRARGV

SEQ ID NO: 56053 - protein, 377 aa, unidentified
  source 1..377: note = Herbinix hemicellulosilytica
  REGION 1..377: note = tr|A0A428M6T1|A0A428M6T1_HERHM Queuine tRNA-ribosyltransferase OS=Herbinix hemicellulosilytica; OX = 1564487 GN=tgt PE=3 SV=1
MYRLIAQDGMAKSGEFVTVHGTIQTPVFMNVGTAAAIKGAVSTADLYEIGTQVQLSNTYHLHVRPGDKVIKQLGGLHSFMVWDRPILTDSGGFQVFSLAGLRKIKEEGVYFNSHIDGRKIFMGPEESIQIQSNLGSTIAMAFDECPPHPASREYMQDSVDRTTRWLVRCKKELQRLNSLEDTINKKQMLFGINQGGTYADIRIEHAKRITELELDGYALGGLAVGESHEEMYYIIEETVPYLPVDKPVYLMGVGTPANILEAVDRGVDFFDCVYPTRNGRHGHAYTNRGKMNLMNAKYEMDSQPIEEGCACPACSRYSRAYIRHLLKAKEMLGMRLLVLHNLYFYNHMMEEIRLAIREGRYKQYKKQKLESLASSEE

SEQ ID NO: 56054 - protein, 377 aa, unidentified
  source 1..377: note = Herbinix hemicellulosilytica
  REGION 1..377: note = tr|A0A0H5SJ76|A0A0H5SJ76_HERHM Queuine tRNA-ribosyltransferase OS=Herbinix hemicellulosilytica; OX = 1564487 GN=tgt PE=3 SV=1
MYKVVAQDGRAKSAEFHTVHGTIQTPVFMNVGTAAAIKGAVSTVDLNEIGTQVQLSNTYHLHLRPGDELIKKMGGLHKFMVWDKPILTDSGGFQVFSLAKLRKIEEEGVYFNSHIDGRKIFMGPEESIRIQSNLGSTIAMAFDECPPYPSERSYMINSVDRTTRWLVRCKKELDRLNGLEDTVNKNQMLFGINQGGTYVDIRIDHAKRITEMDLDGYAVGGLAVGESHEEMYYILEETVPYLPVNKPVYLMGVGTPANILEAVDRGVDFFDCVYPSRNGRHGHAYTGFGKINLLNAKFETDDRPIEEGCGCPACRTYSRAYIRHLLKAKEMLGMRLIVLHNLYFYNHLMEEIREAIRNNCYKQYKKSKLENLKRGVE

SEQ ID NO: 56055 - protein, 377 aa, unidentified
  source 1..377: note = Herbinix luporum
  REGION 1..377: note = tr|A0A0K8J3P1|A0A0K8J3P1_9FIRM Queuine tRNA-ribosyltransferase OS=Herbinix luporum OX=1679721; GN = tgt PE=3 SV=1
MYRLIEQDGRAKSAEFKTVHGTIQTPVFMNVGTLAAIKGAVSTIDLNNIGTQVQLSNTYHLHLRPGDQIVKKMGGLHKFMVWDKPILTDSGGFQVFSLAKLRKIQEEGVYFSSHIDGRKIFMGPEESMQIQSNLASTIAMAFDECPPHPAERSYMIDSVERTTRWLIRCIKEMDRLNSLEDTINKKQMLFGINQGGTYADIRIEHAKRISELNLAGYAIGGLAVGESHEEMYYILEETVPYLPLNKPVYLMGVGTPANILEAVDRGVDFFDCVYPSRNGRHGHAYTGFGKLNLMNAKYQLDDRPIEEGCACPACQHYSRAYIRHLLKAKEMLGMRLLVLHNLYFYNHMMEEIREAIRNKRYKEYKKQKLENFMGGED

SEQ ID NO: 56056 - protein, 375 aa, Herminiimonas arsenicoxydans
  REGION 1..375: note = sp|A4G1Z3|TGT_HERAR Queuine tRNA-ribosyltransferase; OS = Herminiimonas arsenicoxydans OX=204773 GN=tgt PE=3 SV=1
MLNFKLLNTDGNARRGQLTVNHGVIETPIFMPVGTYGSVKAMSPLELKEIDAQIILGNTFHLWLRPGNDIVAKFGGLHEFMGWDKPILTDSGGFQVFSLGEMRKITEEGVHFSSPINGDKLFLSPEVSMQIQRVLNSDIVMQFDECTPYEIDGRPATADEAAKSMRMSLRWAKRSIDEFNREENPNALFGIVQGGMFEHLRDESLAGLEDINFHGVAIGGLSVGEPKEDMLRVLQHVGPRLPANKPHYLMGVGTPEDLVQGVANGIDMFDCVMPTRNARNGWLFTRFGDIKIKNARYKDDKKPLDASCGCYACRNFSRAYLHHLHRTGEILGARLNTIHNLHYYLDLMREMREAISEGRFQLFVKQFHADRARGA

SEQ ID NO: 56057 - protein, 375 aa, Herminiimonas fonticola
  REGION 1..375: note = tr|A0A4R6G5I5|A0A4R6G5I5_9BURK Queuine tRNA-ribosyltransferase OS=Herminiimonas fonticola; OX = 303380 GN=tgt PE=3 SV=1
MLNFKLLNTDGNARRGQLTVNHGVIETPIFMPVGTYGSVKAMSPLELKEIDAQIILGNTFHLWLRPGNDIVAKFGGLHEFMGWDKPILTDSGGFQVFSLGEMRKITEEGVHFSSPINGDKLFLSPEVSMQIQRVLNSDIVMQFDECTPYEIDGRPATADEAAKSMRMSLRWAKRSIDEFNREENPNALFGIVQGGMFEHLRDESLAGLEDINFHGVAIGGLSVGEPKEDMLRVLEHVGPRLPANKPHYLMGVGTPEDLVQGVANGIDMFDCVMPTRNARNGWLFTRFGDIKIKNARYKDDKQPLDESCGCYACRNFSRAYLHHLHRTGEILGARLNTIHNLHYYLDLMREMREAISEGRFQLFVTQFHVDRARGT

SEQ ID NO: 56058 - protein, 375 aa, Herminiimonas sp.
  REGION 1..375: note = tr|A0A3N6ZW84|A0A3N6ZW84_9BURK Queuine tRNA-ribosyltransferase OS=Herminiimonas sp. KBW02; OX = 2153363 GN=tgt PE=3 SV=1
MLNFKLLKTDGKARRGQLTLNHGVIETPIFMPVGTYGSVKAMSPLELNEIDAQIILGNTFHLWLRPGNDIIAKFGGLHEFMGWDKPILTDSGGFQVFSLGEMRKITEEGVHFSSPINGDKLFLSPEVSMQIQRVLNSDIVMQFDECTPYEIDGRPATTEEAAKSMRMSLRWAKRSMDEFNREENPNALFGIVQGGMFENLRDESLAGLEELNFHGVAIGGLSVGEPKEDMMRVLEHVGPRLPANKPHYLMGVGTPEDLVAGVANGIDMFDCVMPTRNARNGWLFTRFGDIKIKNARYKDDKKPLDESCSCYACRNFSRAYLHHLHRTGEILGARLNTIHNLHYYLDLMREMREAISEGRFQLFVSQFHADRARGS

SEQ ID NO: 56059 - protein, 392 aa, Herpetosiphon aurantiacus
  REGION 1..392: note = sp|A9AW42|TGT_HERA2 Queuine tRNA-ribosyltransferase; OS = Herpetosiphon aurantiacus (strain ATCC 23779 / DSM 785 / 114-95) OX=316274 GN=tgt PE=3 SV=1
MNNFTYTLEHSDGEARAGQFSTPHGTIQTPVFMPVGTQATVKTLDPLEVEAIGSQIILSNTYHLYLRPSADLVAEMGGLHRFMQWPKPILTDSGGFQVFSLGPHSKIDEDGVTFKSHIDGSKHRFTPESAIGIQEKLGADIIMAFDECAPQPTTHAYTKAAMERTHRWLLRCIAAKTRADQALFGIVQGGVEADLRRESASFIAQQDVPGIGIGGLSVGEPKEQMYGMLEETTPLLPRNKPRYLMGVGSPEDLLEGVARGVDMFDCVLPTRLGRNGALFIPEGRLNIGNAKYAREDAPIDATCDCSTCQRFSRAYLRHLFRTEEVLGLRLATLHNLRFLIRLMEQAREAILQDRYQSFMDDWLSRFQTIPHAVREASRAARLNSLRTQGDKA

SEQ ID NO: 56060 - protein, 392 aa, Herpetosiphon geysericola
  REGION 1..392: note = tr|A0A0P6Y8I2|A0A0P6Y8I2_9CHLR Queuine tRNA-ribosyltransferase OS=Herpetosiphon geysericola; OX = 70996 GN=tgt PE=3 SV=1
MNNFTYTLEHSDGEARAGQLSTPHGTIQTPVFMPVGTQATVKTLDPLEVEAIGSQIILSNTYHLYLRPSADLVAEMGGLHRFMQWPKPILTDSGGFQVFSLGPHSKIDEDGVTFKSHIDGSKHRFTPESAIGIQEKLGADIIMAFDECAPQPTTHAYTKAAMERTHRWLLRCIAAKTRDDQALFGIVQGGVEADLRRESARFIAQQDIPGVGIGGLSVGEPKEQMYGMLEETTPLLPRNKPRYLMGVGSPEDLLEGVARGVDMFDCVLPTRLGRNGALFIPEGRLNIGNAKYAREDAPIDATCDCSTCQRFSRAYLRHLFRTEEVLGLRLATLHNLRFLIRLMEQAREAILQDRYQSFMDDWLSRFQTIPHAVREASRAARLNSLRTQGEKA

SEQ ID NO: 56061 - protein, 376 aa, Hespellia stercorisuis
  REGION 1..376: note = tr|A0A1M6LX54|A0A1M6LX54_9FIRM Queuine tRNA-ribosyltransferase OS=Hespellia stercorisuis DSM 15480 OX=1121950 GN=tgt PE=3 SV=1
MYQLIAKDGAAKRGRLHTVHGVIETPVFMNVGTAAAIKGAVSTEDLQQIKTQVELSNTYHLHVRPGDKVIKKLGGLHKFMVWDKPILTDSGGFQVFSLAELRRIKEEGVYFHSHIDGRKIFMGPEESMQIQSNLASTIAMAFDECPSSVADETYMRNSVARTTRWLERCKKEMARLNDQEDTINRQQMLFGINQGGVYADIRVEHAKQIRELDLDGYAVGGLAVGETHAEMYRILDAVVPYLPVEKPTYLMGVGTPANILEGVERGVDFFDCVYPSRNGRHGHVYTNHGKMNLFNAKFELDDNPIEEGCQCPACQKYSRAYIRHLLKAKEMLGMRLCVLHNLYFYNNMMEEIRAAIETGTFQKYKANKLEGMEQGE

SEQ ID NO: 56062 - protein, 373 aa, Hippea maritima
  REGION 1..373: note = tr|F2LVE8|F2LVE8_HIPMA Queuine tRNA-ribosyltransferase OS=Hippea maritima (strain ATCC 700847 / DSM 10411 / MH2) OX=760142 GN=tgt PE=3 SV=1
MSFSFELIAEDKQARAGTIDLGHTKVETPIFMPVGTNASVKAILPCMLKAVGAQIVLSNTYHLYLRPGIETIEKLSGLHRFMGWKRGILTDSGGFQVFSLSDLRNINPEGVYFKSHIDGSNHFFSPEYVVELQYRWGSDIAMVLDECPPYTMDKSYVKKSLDITINWAKRSIRARREHTVNALFGIVQGGVFDDLRKEAAIAMKDLEFDGFAIGGLSVGEPTEDMYRVVPIVNEFLPKNKPRYAMGIGRPENIIELIGMGVDMFDCVMPTRNARNGTLFTRFGVVNIKRQQYRDDDRPIEEGCGCYTCRNFSRGYLRHLHKAKELSFYTLASIHNLYYYINLVKSARKAILNGRFRSFKDEFYALMKEGEADE

SEQ ID NO: 56063 - protein, 376 aa, unidentified
  source 1..376: note = Histidinibacterium lentulum
  REGION 1..376: note = tr|A0A3N2R9V8|A0A3N2R9V8_9RHOB Queuine tRNA-ribosyltransferase OS=Histidinibacterium lentulum; OX = 2480588 GN=tgt PE=3 SV=1
MTTRFSFALHATDGAARTGVISTPRGEIRTPAFMPVGTAATVKAMLPESVRATGADILLGNTYHLMLRPTAERIARLGGLHRFMNWDRPILTDSGGFQVMSLAELRKLTEEGVTFRSHIDGARHELSPERSMEIQRLLGSDIVMAFDECPALPAERGRIEESMRLSMRWAQRSRDAFGDRPGHALFGIQQGGLEQDLRAESAEALRGIGFDGYAIGGLAVGEGQAAMFGCLDYAPGQLPQDKPRYLMGVGKPDDIVGAVKRGVDMMDCVLPSRSGRTGQAWTRRGQVNLKNARHADDPRPLDEACSCPACRGYSRAYLHHVFRAGEMISGMLLTWHNLHYYQDLMAGMREAIAGGRFEAWEAGFHAARAEGDIPAV

SEQ ID NO: 56064 - protein, 375 aa, unidentified
  source 1..375: note = Histidinibacterium sp.
  REGION 1..375: note = tr|A0A5J5GL05|A0A5J5GL05_9RHOB tRNA guanosine(34) transglycosylase Tgt OS=Histidinibacterium sp. 176SS1-4; OX = 2613962 GN=tgt PE=4 SV=1
MTRFSFALHATDGAARTGAITTPRGDIRTPAFMPVGTAATVKAMLPESVRATGADILLGNTYHLMLRPGAERVARLGGLHRFMNWERPILTDSGGFQVMSLAELRKLTEKGVTFRSHIDGSKHELTPERSMEIQRLLGSDIVMAFDECPSLPAEDARVAESMRLSMRWAERSREAFGDRPGHALFGIQQGGVTRELREESAEALKAIGFEGYAIGGLAVGEGQEAMFGVLDYAPGMLPVDRPRYLMGVGKPDDIVGAVKRGVDMMDCVLPSRSGRTGQAWTRRGQVNLKNARHADDPRPLDEECGCPACRGYSRAYLHHVFRAGEMISGMLLTWHNLHYYQDLMAGMREAISAGRFAEWEAGFHALRREGDIEPL

SEQ ID NO: 56065 - protein, 376 aa, Histophilus somni
  REGION 1..376: note = tr|A0A1Y0JY99|A0A1Y0JY99_HISSO Queuine tRNA-ribosyltransferase OS=Histophilus somni OX=731 GN=tgt; PE = 3 SV=1
MKFTLHKTNGMARRGTMTFNRPQGEFTVETPAFMPVGTYGTVKGMTPEEVRATGAEILLGNTFHLWLRPGQEIMRQHGDLHDFMQWHRPILTDSGGFQVFSLGKLRKITEEGVKFQNPINGERIFLSPEKSMEIQYDLGSDIVMIFDECTPYPATFDYAKKSMEISLRWAKRSRERFDELGNKNALFGIVQGSTFEDLRKLSIEGLINIGFDGYAVGGLAVGEPKEDMHRILAYVCPQLPADKPRYLMGVGKPEDLVEGVRRGIDMFDCVMPTRNARNGHLFVSNGIVKIRNAKYRNDTTSLDPECDCYTCKHYTKAYLYHLDKCGEILGARLNTIHNLHYYQRLMAQIRQAIEEDRFEDFVVEFYKKIGKSVPTR

SEQ ID NO: 56066 - protein, 376 aa, Histophilus somni
  REGION 1..376: note = tr|A0A4S2QVD4|A0A4S2QVD4_HISSO Queuine tRNA-ribosyltransferase OS=Histophilus somni OX=731 GN=tgt; PE = 3 SV=1
MKFTLHKTNGMARRGTMTFNRPQGEFTVETPAFMPVGTYGTVKGMTPEEVRATGAEILLGNTFHLWLRPGQEIMRQHGDLHDFMQWHRPILTDSGGFQVFSLGKLRKITEEGVKFQNPINGERIFLSPEKSMEIQYDLGSDIVMIFDECTPYPATFDYAKKSMEMSLRWAKRSRERFDELGNKNALFGIVQGSTFEDLRKLSIEGLINIGFDGYAVGGLAVGEPKEDMHRILAYVCPQLPADKPRYLMGVGKPEDLVEGVRRGIDMFDCVMPTRNARNGHLFVSNGIVKIRNAKYRNDTTSLDPECDCYTCKHYTKAYLYHLDKCGEILGARLNTIHNLRYYQRLMAQIRQAIEEDRFEDFVVEFYKKIGKSVPTR

SEQ ID NO: 56067 - protein, 384 aa, unidentified
  source 1..384: note = Hoeflea halophila
  REGION 1..384: note = tr|A0A286IFN1|A0A286IFN1_9RHIZ Queuine tRNA-ribosyltransferase OS=Hoeflea halophila OX=714899; GN = tgt PE=3 SV=1
MTAESDVTSDTFQFKLLATDGKARRGAISMPRGTIRTPAFMPVGTGGTVKAMYMDQVEDLGADIILGNTYHLMLRPGAERVAKLGGLHEFGRWQKPILTDSGGFQVMSLSALRKINEQGVTFQSHIDGSRHEMSPERSIEIQGLLDSDIQMQLDECVRLPAGETEIERAMEMSLRWADRCKVAFGDQPGKAMFGIVQGGDVPKLRERSAEGLSSLDLKGYAVGGLAVGEPQEVMLDMLDVICPLLPAEKPRYLMGVGTPDDMLKSVGRGIDMFDCVMPTRAGRHGLAFTRHGKINIKNARHAEDHRPLDEESSCPAARAYSRAYLHHLVRSNEILGMMLITWNNLSYYQDLMSGIRAAIAAQRFDDFSAETQERWAKGDIPPLG

SEQ ID NO: 56068 - protein, 377 aa, Hoeflea marina
  REGION 1..377: note = tr|A0A317PTF2|A0A317PTF2_9RHIZ Queuine tRNA-ribosyltransferase OS=Hoeflea marina OX=274592 GN=tgt; PE = 3 SV=1
MTETFEFKLIATDGQARRGEISMPRGSIRTPAFMPVGTGGTVKAMYMDQVRGTGADIILGNTYHLMLRPGAERMARLGGLHRFAGWNRPILTDSGGFQVMSLSGLRKLTEQGVTFQSHIDGSRHEMSPERSIEIQGLLGSDIQMQLDECVRLPATPTEIERAMEMSLRWAERCRVAFGEQPGKAMFGIVQGGDIPTLRERSAHGLKALDLKGYAVGGLAVGEPQEVMLDMLDVTCPILPSEKPRYLMGVGTPDDLLKSVGRGIDMFDCVMPTRAGRHGLAFTRHGKINLKNARHAEDHRPLDEESSCPAARDYSRAYLHHLVRSNEILGMMLVTWNNLSYYQDLMSGIRASIEAQRFADFSAETQEMWARGDIPPLG

SEQ ID NO: 56069 - protein, 377 aa, unidentified
  source 1..377: note = Hoeflea olei
  REGION 1..377: note = tr|A0A1C1YXV5|A0A1C1YXV5_9RHIZ Queuine tRNA-ribosyltransferase OS=Hoeflea olei OX=1480615 GN=tgt; PE = 3 SV=1
MSTQSFEFRLSATDGNARRGTISMPRGEIRTPAFMPVGTGGTVKAMYMDQVRDLGADIILGNTYHLMLRPGAERVARLGGLHHFARWDRPILTDSGGFQVMSLSALRKITEQGVTFQSHIDGSRHEMSPERSIEIQGLLGSDIQMQLDECVRLPASEDEIARAMEMSLRWAERCKTQFGDQPGKAMFGIVQGGDVPRLREQSAKGLADLDLKGYAVGGLAVGEPQQVMLDMLEVTCPLLPAEKPRYLMGVGTPDDILKSVARGIDMFDCVMPTRAGRHGLAFTRHGKINLKNARHAEDHRPLDEESSCPAARDYSRAYLHHLVRSNEILGMMLITWNNLSYYQDLMAGIRGAIEAGDFQAFSAATQAAWEAGDIPPL

SEQ ID NO: 56070 - protein, 377 aa, Hoeflea phototrophica
  REGION 1..377: note = tr|A9D9G2|A9D9G2_HOEPD Queuine tRNA-ribosyltransferase OS=Hoeflea phototrophica (strain DSM 17068 / NCIMB 14078 / DFL-43) OX=411684 GN=tgt PE=3; SV = 1
MTDTFQFKLKATDGKARRGEISMPRGTIRTPAFMPVGTGGTVKAMYMDQVRDLGADIILGNTYHLMLRPGAERVARLGGLHHFARWDGPILTDSGGFQVMSLSALRKITEHGVTFQSHIDGSRHEMSPERSIEIQGLLGSDIQMQLDECVRLPASESEIERAMEMSLRWAERCRVAFGDQPGKAMFGIVQGGDIPKLRERSAGGLTALDLKGYAVGGLAVGEPQEVMLDMLDVTCPALPVEKPRYLMGVGTPDDILKSVGRGIDMFDCVMPTRAGRHGLAFTRHGKINLKNARHAEDHRPLDEESSCPAARDYSRAYLHHLVRSNEILGMMLITWNNLSYYQDLMSGIRGAIEAQTFEAFSAETQERWARGDIPPLG

SEQ ID NO: 56071 - protein, 384 aa, Hoeflea sp.
  REGION 1..384: note = tr|A0A2G2DJK0|A0A2G2DJK0_9RHIZ Queuine tRNA-ribosyltransferase OS=Hoeflea sp. OX=1940281 GN=tgt; PE = 3 SV=1
MTAEADVTSDTFQFKLLATDGKARRGAISMPRGTIRTPAFMPVGTGGTVKAMYMDQVQDLGADIILGNTYHLMLRPGAERVAKLGGLHEFGRWQKPILTDSGGFQVMSLSALRKINEQGVTFQSHIDGSRHEMSPERSIEIQGLLDSDIQMQLDECVRLPAGETEIERAMDMSLRWAERCKSAFGDQPGKAMFGIVQGGDVPKLRERSAQGLSGLDLKGYAVGGLAVGEPQEVMLDMLDVTCPLLPADKPRYLMGVGTPDDMLKSVGRGIDMFDCVMPTRAGRHGLAFTRHGKINIKNARHAEDHRPLDEQSSCPAARDYSRAYLHHLVRSNEILGMMLITWNNLSYYQDLMSGIRGAIEAQRFEDFSAETQAAWAKGDIPPLG

SEQ ID NO: 56072 - protein, 378 aa, Hoeflea sp.
  REGION 1..378: note = tr|A0A0F7PM11|A0A0F7PM11_9RHIZ Queuine tRNA-ribosyltransferase OS=Hoeflea sp. IMCC20628; OX = 1620421 GN=tgt PE=3 SV=1
MTTDTFQFKLKATDGKARRGEITMPRGAIRTPAFMPVGTGGTVKAMYMDQVSDLGADIILGNTYHLMLRPGAERVAKLGGLHEFARWQKPILTDSGGFQVMSLSALRKINEHGVTFQSHIDGSRHEMSPERSIEIQGLLDSDIQMQLDECVRLPASETEIERAMEMSLRWAERCKTAFGDQPGKAMFGIVQGGDIPKLRERSAQGLSGLDLKGYAVGGLAVGEPQEVMLDMLDVTCPLLPSDKPRYLMGVGTPDDMLKSVGRGIDMFDCVMPTRAGRHGLAFTRHGKINIKNARHADDHRPLDEQSSCPAARDYSRAYLHHLVRSNEILGMMLITWNNLSYYQDLTAGIRGSIEAQRFEDFAAETQATWARGDIAPLG

SEQ ID NO: 56073 - protein, 403 aa, unidentified
  source 1..403: note = Holdemanella biformis
  REGION 1..403: note = tr|A0A413UFV9|A0A413UFV9_9FIRM Queuine tRNA-ribosyltransferase OS=Holdemanella biformis OX=1735; GN = tgt PE=3 SV=1
MEYKNDNKFYFEIEKRIPGHLGRAGIIHTPHGDIKTPAFMCVGTHGEVRFVSMEELKSIHAQAMLSNGYHLRNISPEIAANRGLSAWSKWDGPTLTDSGGFQVMSLGSGCGKVVSMKREDNMKNTEEEKRLAHVTEDGVHFHDPFTGQEDFIGPEESMQIQCRIGADIHMAYDELTSLADTYEYNVESLARTERWAKRSLDEHKKHCDDLGYHQSLYGVIQGGRWEDLRRSTCKKYAQMDFDGYGLGGAFLKETLGDILTWCNEELPENKPRHLLGLSHPDDILIGTENGADTFDCVAPTREARHGRLYTMHGPINLSKYRDSDEIIDEGCDCPTCQSKITLGKLRRLWKSQDRTESAKYFELASIHNLRFIIRLTEQARQAILDGTFKEFKESFLNSYYGNK

SEQ ID NO: 56074 - protein, 403 aa, unidentified
  source 1..403: note = Holdemanella biformis
  REGION 1..403: note = tr|B7C8P8|B7C8P8_9FIRM Queuine tRNA-ribosyltransferase OS=Holdemanella biformis DSM 3989; OX = 518637 GN=tgt PE=3 SV=1
MEYKNDNKFYFEIEKRIPGHLGRAGIIHTPHGDIKTPAFMCVGTHGEVRFVSMEELKSIHAQAMLSNGYHLRNISPEIAANGGLSAWSKWDGPTLTDSGGFQVMSLGSGCGKVVSMKREDNMKNTEEEKRLAHVTEDGVHFHDPFTGQEDFIGPEESMQIQCRIGADIHMAYDELTSLADTYEYNVESLARTERWAKRSLDEHKKHCDDLGYHQSLYGVIQGGRWEDLRRSTCKKYAQMDFDGYGLGGAFLKETLGDILTWCNEELPENKPRHLLGLSHPDDILIGTENGADTFDCVAPTREARHGRLYTMHGPINLSKYRDSDEIIDEGCDCPTCQSKITLGELRRLWKSQDRTESAKYFELASIHNLRFIIRLTEQARQAILDGTFKEFKESFLNSYYGNK

SEQ ID NO: 56075 - protein, 347 aa, Holdemania filiformis
  REGION 1..347: note = tr|B9YAX1|B9YAX1_9FIRM Queuine tRNA-ribosyltransferase OS=Holdemania filiformis DSM 12042; OX = 545696 GN=tgt PE=3 SV=1
MFMPVGTLATVKFLSPEEIKALGAGVILANTYHLWLRPGEDIVDKAGGVQKFMNYSGPMLTDSGGFQVFSLADRRKIKEEGVTFKSHLDGSTLFLSPEKSIQIQNKIGADIIMSFDECAPYPCSYDYMKNSVERTLRWAKRGKDAHQRPEEQALFGIVQGGEYQDLREMCAKTLAEMDFPGYSIGGTSVGESKETMYKMIDYSVKYLPWEKPRYLMGVGSVDAILEGILRNVDMFDCVLPTRIARHGTLMTSQGRVNIKKQEYEEDFGPLDPECDCYTCKNYSRAYLRHLFRCNEGLGSRLMSIHNLRFLLSLTEQARKAIREDRFGDFKAELFKKYNLNSVDSRGF

SEQ ID NO: 56076 - protein, 379 aa, Holdemania filiformis
  REGION 1..379: note = tr|A0A412FGU0|A0A412FGU0_9FIRM Queuine tRNA-ribosyltransferase OS=Holdemania filiformis OX=61171; GN = tgt PE=3 SV=1
MSAIRFEITHVCKQSGARCGILHTPHGDVETPMFMPVGTLATVKFLSPEEIKALGAGVILANTYHLWLRPGEDIVDKAGGVQKFMNYSGPMLTDSGGFQVFSLADRRKIKEEGVTFKSHLDGSTLFLSPEKSIQIQNKIGADIIMSFDECAPYPCSYDYMKNSVERTLRWAKRGKDAHQRPEEQALFGIVQGGEYQDLREMCAKTLAEMDFPGYSIGGTSVGESKETMYKMIDYSVKYLPWEKPRYLMGVGSVDAILEGILRNVDMFDCVLPTRIARHGTLMTSQGRVNIKKQEYEEDFGPLDPECDCYTCKNYSRAYLRHLFRCNEGLGSRLMSIHNLRFLLSLTEQARKAIREDRFGDFKAELFKKYNLNSVDSRGF

SEQ ID NO: 56077 - protein, 382 aa, unidentified
  source 1..382: note = Holophagaceae bacterium
  REGION 1..382: note = tr|A0A3D6EME3|A0A3D6EME3_9BACT Queuine tRNA-ribosyltransferase OS=Holophagaceae bacterium; OX = 2052165 GN=tgt PE=3 SV=1
MPKITSPDFSFIPAPGVPPGAARAGGFHTSHGDVLTPAFMPVGTQGTVKGITPAQLRDIGPQVILGNTYHLGLRPGDALVAQHGGLHRFMGWEGPILTDSGGFQVFSLASLRKMTEDGVTFQSHLDGSPQFLSPERSMEIQRNLGSDICMALDECPPGRMERSKLELSMARTTRWLARSRAVPLQPHQGLFAINQGGTHLDLRRRHLAEAMDLDAKTPFQGFAVGGLSVGEPKDEMNAVLAEFVKELPADRPRYLMGVGTPEDLLFGIEQGVDLFDCVLPSREARHGRILTSRGKLNLKNARHREADLPLDPACTCYTCRTFSRAYLHHLFRCGELLGFTLNTIHNLSYTVGLTRAARQALLENRFPAFAQSARTGWMTEEP

SEQ ID NO: 56078 - protein, 399 aa, unidentified
  source 1..399: note = Holospora curviuscula
  REGION 1..399: note = tr|A0A2S5R7B8|A0A2S5R7B8_9PROT Queuine tRNA-ribosyltransferase OS=Holospora curviuscula; OX = 1082868 GN=tgt PE=3 SV=1
MQLPYFVLQKTTPYGRLGTLVTAHGNISTPCFFFCATKATIKGIDAQAMETLRTPVLLANTYHLMLHPGPNVIAQAGGLGAFMGWRGPTYTDSGGYQIFSLGYGCVSQEIKGSPRSERYLRISEKGAEFFSYRDGTKWCLTPELSIHVQQALGADCIFTLDECTPYHISYDQTRVAMERSHRWAQRSLSEFLREDAPYKKSYQGLYGISQGGIYPQLRRTSVEFLNATDFFGHGIGGSLGTTSKEMGEVLDMALEGLCLNRPIHLLGIGKIEDIFDGVMKGIDTFDCVIPTRLGRHGGALIMPHYWKSAQESYHARTSINLLKSCFRNDHRPIDESCLCPTCQRYTRAYLHHLMKSKEITGGACLTLHNVFFMNTMMAAIREGIAADSVAQVRTHWLGR

SEQ ID NO: 56079 - protein, 399 aa, Holospora elegans
  REGION 1..399: note = tr|A0A023DXJ9|A0A023DXJ9_9PROT Queuine tRNA-ribosyltransferase OS=Holospora elegans E1 OX=1427503; GN = tgt PE=3 SV=1
MIFPKFEVKKTTSYGRLGTILTAHGKISTPSFFFCSTKATIKGVDTWIIEKLNTPVLLANTYHLMLHPGADVVADAGGVGSFMGWNGPTYTDSGGYQIFSLGYGCVSQEIKGSPRSKRYLKISEAGAEFLSYRDGSKWCLTPELSIHVQQALGADCIFTLDECTPYHISYEHTRASMEQSHRWAQRSLTAFLKEDSVYKKTHQGLYGISQGGIYPELRRVSVDFLNSMPFFGHGIGGSLGKTSVEMREVLDMALEKLCSDRPIHLLGIGKIEDIFDGIAKGIDTFDCVIPTRLGRHGGALIRPNYWSDAKEDYHSRSSINLLKSCFKNDHRPIDELCSCPTCLRYTRAYLHHLIKSKEITAGSALTIHNIFFMNTMMEEIRRGIDLNIMPEVRSKWLGR

SEQ ID NO: 56080 - protein, 398 aa, Holospora obtusa
  REGION 1..398: note = tr|W6TDZ8|W6TDZ8_HOLOB Queuine tRNA-ribosyltransferase OS=Holospora obtusa F1 OX=1399147; GN = P618_200989 PE=3 SV=1
MFPKFTVKKNTPYGRLGTIFTAHGNISTPSFFFCATKATIKGVDVWTMETLNTPVILANTYHLMLQPGAEVIAKSGSVGTFMGWSGPTYTDSGGYQIFSLGYGCVSQEIKGSPRSGRYLKISENGATFLSYRDGSTWCLTPELSIHVQQALGADCIFTLDECTPYHISYEQTRASMEQSHRWAKRSLTAFLKEDAPYKRSYQGLYGISQGGIYPDLRCQSVDFLNSMPFFGHGIGGSLGKTSAQMREVLDMALENLCPERPIHLLGIGKIQDIFDGIAKGIDTFDCVIPTRLGRHGGALIRPHYWSTAHEAYHSRASINLLKACFKNDHRPIDETCTCPTCQRYTRAYLHHLMKSKEISAGSALTIHNVFFMNSMMEAIRDGIALNSMKDVRLQWVGD

SEQ ID NO: 56081 - protein, 399 aa, Holospora undulata; identical to SEQ ID NO: 56079
  REGION 1..399: note = tr|A0A061JHP4|A0A061JHP4_9PROT Queuine tRNA-ribosyltransferase OS=Holospora undulata HU1; OX = 1321371 GN=tgt PE=3 SV=1

SEQ ID NO: 56082 - protein, 401 aa, unidentified
  source 1..401: note = Holosporales bacterium
  REGION 1..401: note = tr|A0A353PN11|A0A353PN11_9PROT Queuine tRNA-ribosyltransferase OS=Holosporales bacterium; OX = 2053559 GN=tgt PE=3 SV=1
MNSSQFNFEITKESPSSKARLGRLTTPHGIVETPAFIFCATKAAIKGATPDDMWREKTQIILSNTYHLMLQPGAELVAKMGGLHKFMGWNGPMLTDSGGFQIFSLGHGSVAEEVKGRRRSSRPKSLLSITEDGATFKSYLDGKTHVLTPEKSIQIQQDLGADLIVVLDECTPFHVDKTYTEKSMHMSHRWAERSLKEFQRGDPDHQALYGIVQGGVYPDLRKISADFVNNLPFFGHAIGGSLGADKAQMAEVIEMAIEPLDPQRPIHLLGIGGISDIFYGVRQGIDTFDCVHPTRLARHGGALVPPFVWETLGESSKGHEHMNLRNSRFREDERPIDESCDCHTCKTLSRAYLHHLLKARELLALKALTSHNVHFMNRLLSNIRKAIAAGSLDEELKKWVA

SEQ ID NO: 56083 - protein, 405 aa, unidentified
  source 1..405: note = Holosporales bacterium
  REGION 1..405: note = tr|A0A355VZ02|A0A355VZ02_9PROT Queuine tRNA-ribosyltransferase OS=Holosporales bacterium; OX = 2053559 GN=tgt PE=3 SV=1
MQSPKISSLDYPGFSFDITFQSQSSRARLGVLNTPHGSVETPAFIFCATKAAIKGLSPHQMKACGTQFILSNTYHLMLSPGSKLIQKMGGIHKFMGWDGPILTDSGGFQVFSLGHGSVASEIKGKRFGGRRKTLLEITEEGAEFKSYLDGKKHMLSPEKSIETQRELGTDFVVVFDECTPFHVEKSYTELSMHRSHRWEERSLAEFAKHHNGTQALYGIVQGGVYEDLRREATDFVNSQPFFAHAVGGSLGADKEQMYDVVSYTMSLLTPERPVHLLGIGGVRDIFEGVQQGIDTFDCVHPTRLARHGGALIRADQDIDTDKEHINLKNTRFKEDPEPIDATCECETCQTYSRSYLHYLLKAKELLAMQAITIHNVAYMNRLLQAVRGAIKSDTLLEERKKWVKG

SEQ ID NO: 56084 - protein, 374 aa, unidentified
  source 1..374: note = Hormoscilla sp.
  REGION 1..374: note = tr|A0A533NGD3|A0A533NGD3_9CYAN Queuine tRNA-ribosyltransferase OS=Hormoscilla sp. GUM007; OX = 2480854 GN=tgt PE=3 SV=1
MTNQFTFQSQAECSHTQARAGIFTTPHGIVETPRFMPVGTTATVKGVTSAQLLATGAQMVLANTYHLHIQPGEDLIAKAGGLHKFMDWNGPILTDSGGFQVFSLSELRTISEEGVTFRSPRDGRMINLTPERSIQIQNKLGADVIMAFDECPPYPASREAVEAATSRTRRWLERCLQTHKRPDQALFGIIQGGVYPDLRSAAAKSLVELDLPGYAIGGVSVGEPEALISQIVKVTAPLLPPHKPRYLMGIGTYREMAQAIASGVDLFDCVIPTRLARHGAVFVRGERWNIKNARFTEDFAPLDSECPCYTCQHFSRAYLNHLWRSRELLVYTLLSIHNLTELIRFTQRIRDAIIRDSFTREFSHLLTPVPENAV

SEQ ID NO: 56085 - protein, 374 aa, unidentified
  source 1..374: note = Hormoscilla sp.
  REGION 1..374: note = tr|A0A533NTR5|A0A533NTR5_9CYAN Queuine tRNA-ribosyltransferase OS=Hormoscilla sp. GUM202; OX = 2480853 GN=tgt PE=3 SV=1
MTNQFTFQSQAECSHTQARAGIFTTPHGIVETPRFMPVGTTATVKGVTSAQLLATGAQMVLANTYHLHIQPGEDLIAKAGGLHKFMDWNGPILTDSGGFQVFSLSELRTISEEGVTFRSPRDGRIINLTPERSIQIQNKLGADVIMAFDECPPYPANREVVEAATSRTRRWLERCLQTHKRPDQALFGIIQGGVYPDLRSAAAKSLVELDLPGYAIGGVSVGEPEALIAQIVKVTAPLLPPHKPRYLMGIGTYREMAQAIASGVDLFDCVIPTRLARHGAVFVRGERWNIKNARFTEDFAPLDSECPCYTCQHFSRAYLNHLWRSRELLVYTLLSIHNLTELIRFTQRIRDAIIRDSFTREFSHLLTPVPENAV

SEQ ID NO: 56086 - protein, 409 aa, unidentified
  source 1..409: note = Hoyosella subflava
  REGION 1..409: note = tr|F6EF86|F6EF86_HOYSD Queuine tRNA-ribosyltransferase OS=Hoyosella subflava (strain DSM 45089 / JCM 17490 / NBRC 109087 / DQS3-9A1) OX=443218; GN = tgt PE=3 SV=1
MPDSSQYFTITTPLDGKLGRTGTLRTPHGEIRTPAFIPVGTKATVKAVLPETVRGLGAQAVLANAYHLYLQPGADIVDEAGGLGKFMNWSGPTFTDSGGFQVLSMGAGFKKVLAMEVSQAKPEDIRAHQRERLAHVDDEGVTFKSHIDGSKHRFTPEVSMRIQHQLGADIIFAFDELTTLVDTREYQESSVERTHAWAQRCLDEHEQQTVDRPHRPYQALFGVVQGAQYEDLRRKAARGLTELRSFDGRPFDGYGIGGALEKHQLGTIVQWVNEELPDETPKHMLGISEPDDLFVAIENGADTFDCVSPSRVARNGAIYLPTGRVNMDKARYKRDFNPIDDTCDCYTCANYTRAYLHHLYKSKELLGSTLATIHNERFIVRLVDRIRDSIDGGYFADLRSEVLGTYYGA

SEQ ID NO: 56087 - protein, 373 aa, unidentified
  source 1..373: note = Humitalea rosea
  REGION 1..373: note = tr|A0A2W7ITZ1|A0A2W7ITZ1_9PROT Queuine tRNA-ribosyltransferase OS=Humitalea rosea OX=990373; GN = tgt PE=3 SV=1
MSALRWTAAGTDGGARAGVLRTAHGTVPTPVFMPVGTAGTVKAMTADSVRATGARMILGNTYHLMLRPGAERVARLGGLHRMADWHGPILTDSGGFQVMSLSGLRKMDADGVTFRSHIDGSAHRLTPERSIEIQHLLGADVTMCFDECTPFPATEAQTATSMRLSMAWAARCRAAFVPRDGYGLFGIVQGGVFNALRAESVAALTEIGFEGYAIGGLAVGEGQAEMYRVLEATVPLLPADRPRYLMGVGTPDDLIGAVARGIDMFDCVLPTRSGRTARAYTSRGVLNMRNARHAEDLSPLDPDCPCPACQKHSRAYIHHLIRADEILGPMLLTWHNIQYYQTLMGRLRAAILDGRFTEEAAAIRAGWQERAIA

SEQ ID NO: 56088 - protein, 376 aa, unidentified; identical to SEQ ID NO: 51238
  source 1..376: note = Hungateiclostridiaceae bacterium
  REGION 1..376: note = tr|A0A1C7GLY8|A0A1C7GLY8_9FIRM Queuine tRNA-ribosyltransferase OS=Hungateiclostridiaceae bacterium KB18 OX=1834198 GN=tgt PE=3 SV=1

SEQ ID NO: 56089 - protein, 372 aa, unidentified
  source 1..372: note = Hungateiclostridium clariflavum
  REGION 1..372: note = tr|G8LZ36|G8LZ36_HUNCD Queuine tRNA-ribosyltransferase OS=Hungateiclostridium clariflavum (strain DSM 19732 / NBRC 101661 / EBR45) OX=720554 GN=tgt; PE = 3 SV=1
MSAVRYELIKKCKQTGARLGRVHTPHGYFDTPAFMPVGTQATVKGMSPDELKAIDAQIILSNTYHLYMRPGHEIVKEAGGLHGFMNWDRPILTDSGGFQVFSLSDLRDIKEEGVTFKSHIDGSKHFFTPEMAIEVQNALGADIIMAFDECIPYPADFNYAKNSLERTTRWAKRCKDAHKNTDRQALFGIVQGGMYKELREQSAYELLELDFPGYAIGGLSVGEPAELMYEMLECTVPLLPEDKPRYLMGVGSPDYLIEGAIRGIDMFDCVLPTRIGRNGTVLTSRGRVIIRDAAYARDYSPLDPECDCYCCRNFTRAYIRHLIKAGEVLGIRLTTWHNLRFLLKLMEDVRKAIMEDRLGDFRNEFFSKFGYK

SEQ ID NO: 56090 - protein, 372 aa, unidentified
  source 1..372: note = Hungateiclostridium saccincola
  REGION 1..372: note = tr|A0A2K9E2Y9|A0A2K9E2Y9_9FIRM Queuine tRNA-ribosyltransferase OS=Hungateiclostridium saccincola; OX = 1677857 GN=tgt PE=3 SV=1
MSAIRYELIKKCKQTGARLGRVYTPHGYFDTPAFMPVGTQATVKGMSPDELKSIEAGIILSNTYHLHIRPGEDIIKEAGGLHKFMNWDRPILTDSGGFQVFSLGDFRKIEEEGVTFKSHVDGSKKFLSPESAIKIQNKLGADIIMAFDECIPYPAEFHYVKKSVERTTRWAKRCIKAHENPETQALFGIVQGGMYKELRRQSAYELLELDFPGYAIGGLSVGEPAEEMYEMLECTVPLLPEDKPRYLMGVGSPDYLVEGAIRGIDMFDCVLPTRIGRNGTVLTSRGRMIIRDALYARDQSPIDPDCDCYACKNFTRSYIRHLIKAKEVLGIRLTTWHNLRFLLNLMKNVREAIKEDRLLDFRNEFFKNFGYN

SEQ ID NO: 56091 - protein, 374 aa, unidentified
  source 1..374: note = Hungateiclostridium sp.
  REGION 1..374: note = tr|A0A4V1K2C3|A0A4V1K2C3_9FIRM Queuine tRNA-ribosyltransferase OS=Hungateiclostridium sp. N2K1; OX = 2487273 GN=tgt PE=3 SV=1
MSAIRYELIKKCKQTGARLGRVYTPHGYFDTPAFMPVGTQATVKGMSPDEMKSIEAQIILSNTYHLHMRPGEDIVKEAGGLHGFMNWDRPILTDSGGFQVFSLSDLRDIKEEGVTFKSHIDGSKHFISPEMATKIQNDLGADIIMAFDECIPYPADYDYAKKSLERTTRWAKRCKDAHQNPEKQALFGIVQGGMYKELREQSAYELLELDFPGYAIGGLSVGEPAEEMYSMLDVTVPLLPADKPRYLMGVGSPDYLIEGAIRGVDMFDCVLPTRIGRNGTVMTSRGRMIIRDAVYARDYTPMDPECDCYACRNFTRSYIRHLLKSGEVLGIRLTTWHNLRFLINLMKNVRQAIMEDRLLDFRNEFFNNFGYKKI

SEQ ID NO: 56092 - protein, 330 aa, unidentified
  source 1..330: note = Hungateiclostridium straminisolvens
  REGION 1..330: note = tr|W4V7M1|W4V7M1_9FIRM Queuine tRNA-ribosyltransferase OS=Hungateiclostridium straminisolvens JCM 21531 OX=1294263 GN=tgt PE=3 SV=1
MSPDEMKEIEAQIILSNTYHLHMRPGEDIVKEAGGLHGFMNWDRPILTDSGGFQVFSLSDLRDIKEEGVTFKSHIDGSKHFISPEMAMKIQNDLGADIIMAFDECIPYPADYDYAKKSLERTTRWAKRCKEAHRNPEKQALFGIVQGGMYKDLRQQSAYELLELDFPGYAIGGLSVGEPAEEMYAMLDVTVPLLPWDKPRYLMGVGSPDYLIEGAIRGIDMFDCVLPTRIGRNGTVMTSRGRMIVRDAVYARDYTPMDPECDCYACRNFTRAYIRHLLKSGEVLGIRLTTWHNLRFLINLMKNVRQAIMEDRLLDFRDEFFNNFGYKKYK

SEQ ID NO: 56093 - protein, 374 aa, unidentified
  source 1..374: note = Hungateiclostridium thermocellum
  REGION 1..374: note = sp|A3DE13|TGT_HUNT2 Queuine tRNA-ribosyltransferase; OS = Hungateiclostridium thermocellum (strain ATCC 27405 / DSM 1237 / JCM 9322 / NBRC 103400 / NCIMB 10682 / NRRL B -4536 / VPI 7372) OX=203119 GN=tgt PE=3 SV=1
MSAIRYELIKKCKQSGARLGRVYTPHGCFDTPAFMPVGTQATVKGMSPDEMKEIEAQIILSNTYHLHMRPGEDIVKEAGGLHGFMNWDRPILTDSGGFQVFSLSDLRDIKEEGVTFKSHIDGSKHFISPEMAIKIQNDLGADIIMAFDECIPYPADYDYAKKSLERTTRWAKRCKDAHRNPEKQALFGIVQGGMYKDLRQQSAYELLELDFPGYAIGGLSVGEPAEIMYEMLEVTVPLLPEDKPRYLMGVGSPDYLIEGATRGIDMFDCVLPTRIGRNGTVLTSKGRIIVRDAIYARDYTPIDPECDCYACRNFTRAYIRHLLKSGEVLGIRLTTWHNLRFLINLMKKVRQAIMEDRLLDFRDEFFSKFGYKKI

SEQ ID NO: 56094 - protein, 374 aa, unidentified
  source 1..374: note = Hungateiclostridium thermocellum
  REGION 1..374: note = tr|A0A4S5EYM2|A0A4S5EYM2_HUNTH Queuine tRNA-ribosyltransferase OS=Hungateiclostridium thermocellum OX=1515 GN=tgt PE=3 SV=1
MSAIRYELIKKCKQSGARLGRVYTPHGCFDTPAFMPVGTQATVKGMSPDEMKEIEAQIILSNTYHLHMRPGEDIVKEAGGLHGFMNWDRPILTDSGGFQVFSLSDLRDIKEEGVTFKSHIDGSKHFISPEMAIKIQNDLGADIIMAFDECIPYPADYDYAKKSLERTTRWAKRCKDAHRNPEKQALFGIVQGGMYKDLRQQSAYELLELDFPGYAIGGLSVGEPAEIMYEMLEVTVPLLPEDKPRYLMGVGSPDYLIEGAIRGIDMFDCVLPTRIGRNGTVLTSKGRIIVRDAIYARDYTPIDPECDCYACRNFTRAYIRHLLKSGEVLGIRLTTWHNLRFLINLMKKVRQAIMEDRLLDFRDEFFSKFGYKKI

SEQ ID NO: 56095 - protein, 380 aa, unidentified
  source 1..380: note = Hungatella effluvii
  REGION 1..380: note = tr|A0A2V3XXU2|A0A2V3XXU2_9CLOT Queuine tRNA-ribosyltransferase OS=Hungatella effluvii OX=1096246; GN = tgt PE=3 SV=1
MNYKIIAKDGRAKRAEVSTVHGTIQTPVFMNVGTVGAIKGAVSTDDLKEIRTQVELSNTYHLHVRTGDKLIREFGGLHKFMNWDRPILTDSGGFQVFSLTGLRKIKEEGVYFQSHIDGHRIFMGPEESMQIQSNLGSTIAMALDECPPHPATREYMQNSVDRTTRWLERCKVEMARLNSLPETINREQLLFGINQGGTYEDIRIEHAKTISAMDLDGYALGGLAVGESHEEMYRILDETVPYLPEHKPTYLMGVGTPANILEAVDRGVDFFDCVYPSRNGRHGHVYTNQGKRNLFNSKYELDHLPIEEGCGCPACRSYSRAYIRHLLKAKEMLGMRLCVLHNLYFYNTMMEEIRDAIEQHRYAEYKAEKLAGMTAVQAEK

SEQ ID NO: 56096 - protein, 380 aa, unidentified; identical to SEQ ID NO: 53990
  source 1..380: note = Hungatella hathewayi
  REGION 1..380: note = tr|A0A174W1K8|A0A174W1K8_9CLOT Queuine tRNA-ribosyltransferase OS=Hungatella hathewayi OX=154046; GN = tgt PE=3 SV=1

SEQ ID NO: 56097 - protein, 380 aa, unidentified
  source 1..380: note = Hungatella hathewayi
  REGION 1..380: note = tr|A0A174DA59|A0A174DA59_9CLOT Queuine tRNA-ribosyltransferase OS=Hungatella hathewayi OX=154046; GN = tgt PE=3 SV=1
MNYKIIAKDGRAKRAEVSTVHGTIQTPVFMNVGTVGAIKGAVSTDDLKEIRTQVELSNTYHLHVRTGDKLIREFGGLHKFMNWDRPILTDSGGFQVFSLTGLRKIKEEGVYFQSHIDGHRIFMGPEESMQIQSNLGSTIAMALDECPPHPATREYMQNSVDRTTRWLERCKVEMARLNSLPETINQEQLLFGINQGGTYEDIRIEHAKTISAMDLDGYALGGLAVGESHEEMYRILDETVPYLPEHKPTYLMGVGTPANILEAVDRGVDFFDCVYPSRNGRHGHVYTNQGKRNLFNSKYELDHLPIEEGCGCPACRSYSRAYIRHLLKAKEMLGMRLCVLHNLYFYNTMMEEIRDAIEQHRYAEYKAEKLAGMTAVQAEK

SEQ ID NO: 56098 - protein, 375 aa, unidentified
  source 1..375: note = Hwanghaeella grinnelliae
  REGION 1..375: note = tr|A0A437QL89|A0A437QL89_9PROT Queuine tRNA-ribosyltransferase OS=Hwanghaeella grinnelliae; OX = 2500179 GN=tgt PE=3 SV=1
MSEFGFDLIATDGAARRGRVTTAHGQIDTPAFMPVGTAGTVKAMLPQSVAGTGAQIVLGNTYHLMLRPGAERVQKLGGLHKFMDWPGPILTDSGGFQVMSLAEIRKITEDGVRFRSHIDGSYHTLTPERSIEIQNLLDADITMAFDECTPYPATEKQARDSMELSMRWAKRSKEAFEDRPGYGLFGIVQGSTFENQRLESAQALQDIGFHGYAVGGLAVGEGQQLMFDTLDYTCPALPADKPHYLMGVGKPGDIVGAVARGIDMFDCVLPTRSGRNGQAWTRRGPVNVKNARHAEDPRPLDAECPCPACTQFSRAYLNHLVKAGEILAMMLVTWHNLTYYQQLMADLRSAIEGGTFEAYVAQFNALQAEGDIEPL

SEQ ID NO: 56099 - protein, 375 aa, Hwanghaeicola aestuarii
  REGION 1..375: note = tr|A0A2W7NM12|A0A2W7NM12_9RHOB Queuine tRNA-ribosyltransferase OS=Hwanghaeicola aestuarii; OX = 568105 GN=tgt PE=3 SV=1
MQRFAFNLHSRDGAARCGTITTSRGEIRTPAFMPVGTAGTVKAMLPGSVRETGADILLGNTYHLMLRPGAERIAGLGGLHRFMNWDRPILTDSGGFQVMSLADLRKLTETGVTFRSHIDGSKHELTPERSMEIQRLLGSDIVMAFDECPALPAEGSRVAESMRLSMRWAERSKAAFGDRPGHALFGIQQGGVTRELREESAEALRAIGFDGYAVGGLAVGEGQEAMFGVLDYACDMLPDDRPRYLMGVGKPDDIVGAVKRGIDMMDCVLPSRSGRTGQAFTRRGVVNLKNARHADDPRPLDAECTCPACRSYSRAYLHHVFRAGEMISGMLLTWHNLHYFQEIMAGMRKAIAEGAFAEWEADFHATRAAGDIEPA

SEQ ID NO: 56100 - protein, 359 aa, Hyalangium minutum
  REGION 1..359: note = tr|A0A085WF86|A0A085WF86_9DELT Queuine tRNA-ribosyltransferase OS=Hyalangium minutum OX=394096; GN = tgt PE=3 SV=1
MFMPVATHACFRHLGMEEVKETGARVLLANTYHLMLRPGAEVFRKFGGIHPFMQWDGAVLTDSGGFQIFSLPEDRLITEKGAHFRSFYDNSRQLLSPESSIAMQQAINSDIMMVLDVCIDSRTDEAGTREAMERTHRWALRSLAAKNSKDTGQALFAIVQGGVHPNLRDESAAFLTPHPFDGFAIGGLAVGESKEERETMTARVTASLPTDKPRYLMGVGTPMDLVEAVMRGVDMFDCIIPTKMAQQGYAYTFQGLVRITRMVYQLDDSPLDPACDCYVCKRYTRGYLQHLMRGKHHLGSRMLSIHNVRHFQLLMAKLRAAILQGSYAQVYRELRATISPPKDLRGDVSPDTVTLKDVG

SEQ ID NO: 56101 - protein, 392 aa, Hyalangium minutum
  REGION 1..392: note = tr|A0A085WFY2|A0A085WFY2_9DELT Queuine tRNA-ribosyltransferase OS=Hyalangium minutum OX=394096; GN = tgt PE=3 SV=1
MGEAQGKGDTRVAPGLVRFELLHEDPGSKARRGRVHTPHGPIETPIFMPVGTVGSVKGVGPDDLLTLDAQIILGNTYHLMLRPGEALVGEMGGLHRFISWNRPMLTDSGGFQVFSLSEKRKITEEGAAFQSHLDGSRHMLTPERSIEIQETLGADIIMAFDECPPAQSERSYMEQSMARTTRWLHRCAKAWSRERSSLFGIVQGGLHEDLRKAHAEQVCSVDLPGYALGGYSVGETPEAMHAGVAYSAPLLPRDKPRYLMGVGTPVDLVTCVEAGVDMFDCVLPTRCARNGLLFTSEGKVVIRNAVYAKDPRPVDPECSCYTCRTFSRAYLRHLFVAQEILAMRLNTLHNLHYFLGLMAQVRRAISEGRYAAFAQAFRERAAAQEAERTRAR

SEQ ID NO: 56102 - protein, 380 aa, unidentified
  source 1..380: note = Hydrobacter penzbergensis
  REGION 1..380: note = tr|A0A1H2RTY6|A0A1H2RTY6_9BACT Queuine tRNA-ribosyltransferase OS=Hydrobacter penzbergensis; OX = 1235997 GN=tgt PE=3 SV=1
MAALTFELQASGIAGSEARAGKIRTDHGEIITPIFMPVGTVGSVKAVTKQQLKDDVQAQIILGNTYHLYLRPGTGVLEAAGGLHRFNGWDRPILTDSGGYQVFSLAGNRKIKEEGVWFQSHIDGSRHLFSPESVMDIQRSIGADIMMAFDECPPYPSEYHYAKKSMELTHRWLDRCIQRLAETPDKYGYTQNLFPIVQGSTYKDLRDASCDYIASKNAVGNAIGGLSVGEPEDMMYEFTESCASRLPFNKPRYLMGVGTPWNILECIHRGIDLFDCVMPTRNGRNGMLFTTQGVVNIRNKKWATDFSPIDPGLPNEMSQYYNKAYLRHLFVSEELLGLQLASLQNLSFYLWLVGEARKHILGGDFVSWKNEMVQIVKQRL

SEQ ID NO: 56103 - protein, 379 aa, unidentified
  source 1..379: note = Hydrocarboniclastica marina
  REGION 1..379: note = tr|A0A4P7XGM6|A0A4P7XGM6_9ALTE Queuine tRNA-ribosyltransferase OS=Hydrocarboniclastica marina; OX = 2259620 GN=tgt PE=3 SV=1
MTRACFMQFERLASDGKARRGALHFPRGTVQTPAFMPVGTYGTVKGMLPRDIEATGAEIILGNTFHLMLRPGTEVISAHGDLHDFTQWQGPILTDSGGFQVFSLGDLRKITEEGVVFKSPIDGSLVELGPEKAMVVQRALGSDIVMIFDECTPYPATEKQAKASMEMSLRWAARCKAEHGDSPAALFGIIQGGMHENLRRQSLEGLTDIGFDGYAIGGLSVGEPKAEMIAVLDYLPEVMPEDKPRYLMGVGKPEDLVEGVRRGVDMFDCVLPTRNARNGYLFTSKGIVKIRNAVNRHSLDPVDEHCDCYTCSHFSRSYLHHLDRCGEMLGAQLNTIHNLHYYQNLMAGLRRAIEEGTLCDFVNAFYARRELPTPALRGA

SEQ ID NO: 56104 - protein, 414 aa, Hydrocarboniphaga daqingensis
  REGION 1..414: note = tr|A0A1M5JTN1|A0A1M5JTN1_9GAMM Queuine tRNA-ribosyltransferase OS=Hydrocarboniphaga daqingensis; OX = 490188 GN=tgt PE=3 SV=1
MLQSDWLALARPTRYKPRPRYGALTRRLSNVEFQLLGTSAGARRGRMSFAGRGVVETPAFMPVGTYGSVKAISPEEVRDSGAQILLGNTFHLMLRPGDELMKRLGGLHRFMNWSGPILTDSGGFQVWSLSGLRKITEEGVKFASPVNGDRLFLSPERSIEVQHALGSDIIMQFDECTPHPATERQVRKSMELSARWAQRCKDAHADHPGALFGIVQGGMLPALRLESLQRLTQIDFPGYAIGGLSVGESEDERLQVLDAVGPHLPADRPHYLMGVGTPRDIVQAVGRGVDMFDCVMPTRNARNGHLFTSQGVIKIRNARFRDDDGPLDPNCDCYTCRNFSRAYLHHLDRCNEMLGPRLNTIHNLRYYQSVMTRLRSAIEADRYEAFAADFIASPEGAPSKVARVAVPASSPPEA

SEQ ID NO: 56105 - protein, 371 aa, Hydrocarboniphaga effusa
  REGION 1..371: note = tr|I8T4Q8|I8T4Q8_9GAMM Queuine tRNA-ribosyltransferase OS=Hydrocarboniphaga effusa AP103; OX = 1172194 GN=tgt PE=3 SV=1
METPIFMPVGTYGTVKSVSPEELRAVGSQIILGNTFHLMLRPGEQLIRDTFGSLHGFMNWTGPILTDSGGFQVWSLAELRKISEEGVKFASPLNGDRIFLTPERSIEVQHALGSDIIMQFDECTPYPATEKQARSSMELSARWAARCKTAHGDNKNALFGIVQGGMHAHLRLESLQHLAGIGFDGYAVGGLSVGEPEVERLQVLDAVGPQLPADCPHYLMGVGTPRDIVQAVGRGIDMFDCVMPTRNARNGHLFTSQGVIKIRNAAHRTDPAALDPNCDCYTCRNYSRAYLHHLDRCDEMLGPRLNTIHNLHYYLSLMQRIRKAIEDDRFETFAADFLASPEGRPAKSKLSVAVADAANGSTANTGDTGDN

SEQ ID NO: 56106 - protein, 368 aa, Hydrococcus rivularis
  REGION 1..368: note = tr|A0A1U7HKI9|A0A1U7HKI9_9CYAN Queuine tRNA-ribosyltransferase OS=Hydrococcus rivularis NIES-593; OX = 1921803 GN=tgt PE=3 SV=1
MGFSFECHASCRQTGARAGVWHTPHGCVETPRFMPVGTLATVKGLTPAQIQTTGAQMILANTYHLHLQPGEAIVEKAGGLHEFMGWQGPILTDSGGFQVFSLSELRQIDESGVTFCSPRDGRIIQLTPERSIQIQNALGADVIMAFDECPPAGAAYEEVVAATERTYRWLERCLNAHQCPQEQALFGIVQGGIYPDLRCAAAESLVKLDLPGYAIGGVSVGEEPELIHKIVRITAPLLPPEKPRYLMGVGTYKEMVVAIASGIDLFDCVIPTRFGRHGAALVRGERLNLKNAQFREDFTPLDPTCPCYTCQNFSRAYLNHLVKSREMLGYILLSLHNISELVRFTQQIREAILRDRFVEEFGGWLDDR

SEQ ID NO: 56107 - protein, 366 aa, Hydrocoleum sp.
  REGION 1..366: note = tr|A0A261KP46|A0A261KP46_9CYAN Queuine tRNA-ribosyltransferase OS=Hydrocoleum sp. CS-953; OX = 1671698 GN=tgt PE=3 SV=1
MSQNFSFHSQAVCSYTKARAGVFSTPHGNIDTPRFMPVGTLANVKTLTPAQLEAAGAQMILANTYHLHLQPGESIVAGAGGLHKFMAWNGPILTDSGGFQVFSLGDIRTISEAGVKFRSPRDGSMIDLTPERSIQIQNELGADVIMAFDECPPYPASREEVELATNRTYRWLQRCMEAHQRQDQALFGIVQGGVYGDLRSRAAKQLVDLDLPGYAIGGVSVGEPGELIDNIVKVTTPLLPEDKPRYLMGVGTHREMVRAIAAGIDLFDCVIPTRLGRHGAALVKGERWNLKNAKFREDFRPLDESCPCYCCQNFSRAYLAHLVRAKEALGFTLLSLHNVTELIRFTQRIRDAILGDRFTTEFASWL

SEQ ID NO: 56108 - protein, 378 aa, unidentified
  source 1..378: note = Hydrogenibacillus schlegelii
  REGION 1..378: note = tr|A0A132N9M9|A0A132N9M9_HYDSH Queuine tRNA-ribosyltransferase OS=Hydrogenibacillus schlegelii; OX = 1484 GN=tgt PE=3 SV=1
MAIHFELIYEDPKTGARLGRLSTPHGTIETPAFMPVGTLGTVKAMTPEELEALGAQIVLANTYHLWLRPGEDVVREAGGLHRFMHWSRPILTDSGGFQVFSLKERRRIEEEGVYFASHLDGRPLFLSPEKSIAIQNALGADIIMAFDECPPYPADRAYVEASLERTLRWAERSLRAHRRPKEQSLFGIIQGGTFPDLRRRAAKAVVSLDFPGYAVGGLSVGEPKPVMYAMLEETVPLLPRTKPRYLMGVGSPDALIEGVMRGIDLFDSVLPTRIARNGALMTSGGRLVIRNEAYARDFSPLDPACDCYACRHYTRAYVRHLLKSDEILGLRLTTIHNLAFLLRFMADVRRHIRAGTLLEFRDAFYEAYYGRMPAHRGF

SEQ ID NO: 56109 - protein, 378 aa, unidentified
  source 1..378: note = Hydrogenibacillus schlegelii
  REGION 1..378: note = tr|A0A2T5GBE2|A0A2T5GBE2_HYDSH Queuine tRNA-ribosyltransferase OS=Hydrogenibacillus schlegelii; OX = 1484 GN=tgt PE=3 SV=1
MAIHFELIYEDPKTGARLGRLSTPHGTIETPAFMPVGTLGTVKAMTPEELEALGAQIVLANTYHLWLRPGEDVVREAGGLHRFMHWSRPILTDSGGFQVFSLKERRRIEEEGVYFASHLDGRPLFLSPEKSIAIQNALGADIIMAFDECPPYPADRAYVEASLERTLRWAERSLRAHRRPKEQSLFGIIQGGTFLDLRRRAAKAVVSLDFPGYAVGGLSVGEPKPVMYAMLEETVPLLPRTKPRYLMGVGSPDALIEGVMRGIDLFDSVLPTRIARNGALMTSGGRLVIRNEAYARDFSPLDPACDCYACRHYTRAYVRHLLKSDEILGLRLTTIHNLAFLLRFMADVRRHIRAGTLLEFRDAFYEAYYGRMPAHRGF

SEQ ID NO: 56110 - protein, 376 aa, Hydrogenimonas sp.
  REGION 1..376: note = tr|A0A3G9GV91|A0A3G9GV91_9PROT Queuine tRNA-ribosyltransferase OS=Hydrogenimonas sp. OX=2231112; GN = tgt PE=3 SV=1
MIFNIDATDGSARACTLETAHSTIRTPVFMPVGTSAAVKALDTLDMREHLDTQIILANTYHLYLRPGDAVVDAMGKLHGFTGYDRSFLTDSGGFQAFSLSDISRADDSGILFRSHIDGSKHYFTPSKVLDIQYNLGSDIMMILDDLVALPATKERLAVSVDRTTRWAEESINYHRFKQKEGVGTGQNIFAIIQGGTDREFRKISAEALCAMDFDGFAIGGLSVGEANSLMYDTVEYTTPFMPAGKPRYLMGVGTPEDLVENIERGIDMFDCVMPTRNARNGTLFTTFGKVNIKSARYKKDSDPIDPACNCYTCRRYTRAYLCHLYRAKELTYFRLASLHNLHYYLTLVREAREAILRGRFARFKSDFYLKRGAVDS

SEQ ID NO: 56111 - protein, 374 aa, Hydrogenimonas sp.
  REGION 1..374: note = tr|A0A432QZ80|A0A432QZ80_9PROT Queuine tRNA-ribosyltransferase OS=Hydrogenimonas sp. OX=2231112; GN = tgt PE=3 SV=1
MKFKLDAVDGNARACTIQTAHSTIQTPIFMPVGTSAAVKALDTHDMREILDTQIILANTYHLYLRPGDETIAKLGKLHGFTKYDRSFLTDSGGFQAFSLSDISKADEKGIMFRSHIDGSKHYFTPSKVLDIQYNLGSDIMMILDDLVALPATKKRLALSIDRTSRWAEESITYHRLKQSQGIGIDQNIFAIIQGGIDKEFRKISAESLCAMDFDGFAIGGLSVGEENQAMYDTVEYTTRFMPKDKPRYLMGVGTPEDLVENIERGVDMFDCVMPTRNARNGTLFTSFGKLNIKSARFKLDDTPIDPACDCYTCQRYSRAYLNHLYRAKELTYFRLASLHNLHYYLSLVKEAREAILKGQFQAFKREFYAKRESR

SEQ ID NO: 56112 - protein, 372 aa, Hydrogenimonas thermophila
  REGION 1..372: note = tr|A0A1I5NA92|A0A1I5NA92_9PROT Queuine tRNA-ribosyltransferase OS=Hydrogenimonas thermophila; OX = 223786 GN=tgt PE=3 SV=1
MKFNLDAIDGNARACTIQTAHSTIQTPIFMPVGTSAVVKALDTNDMREILDTQIILANTYHLYLRPGDETVNKLGKLHGFTKYDRSFLTDSGGFQAFSLSDISKADEKGIMFRSHIDGSKHYFTPSKVLDIQYNLGSDIMMILDDLVALPATKERLTLSIDRTTRWAKESITYHREKQSDGIGVNQNIFAIIQGGIDKEFRKISAESLCAMDFDGFAIGGLSVGEENQAMYDTVEFTTPFMPKDKPRYLMGVGTPEDLVENIERGIDMFDCVMPTRNARNGTLFTTFGKINIKSARFKLDDTPIDPACDCYTCKRYSRAYLNHLYRAKELTYFRLASLHNLHYYLNLVKEAREAILKGEFQAFKREFYNRRN

SEQ ID NO: 56113 - protein, 369 aa, unidentified
  source 1..369: note = Hydrogenispora ethanolica
  REGION 1..369: note = tr|A0A4R1RH86|A0A4R1RH86_9FIRM Queuine tRNA-ribosyltransferase OS=Hydrogenispora ethanolica; OX = 1082276 GN=tgt PE=3 SV=1
MGFSFTVKHASQENRGRIGLLETFHSRIETPVFMPVGTQGTVKAMTVDDLRAIGFQLILGNTYHLYLRPGLDIVSEAGGLRRFANWPESLLTDSGGFQVFSLAKLNKVTEQGVNFRSHIDGSSHLFTPERVMEIEMGLGADIAMAFDICLPYPSNFQVAKEAMERTHRWAERCLKAHHRPDQVVFGIVQGVTYRELREESARTLASLGFPGYGIGGLSVGEPKPLMYEMLDYTVPLLPEEKPRYLMGVGSPDALWEGVARGIDMFDCVFPTRIARNGTALTSLGRVIVRDARYARDFSPLDPNCQCKTCTEYTRAYLRHLFKAGEILGAHLVTYHNLYFLKQVMEEIKLGLRTGTFEERKAEFFARCAN

SEQ ID NO: 56114 - protein, 376 aa, Hydrogenivirga caldilitoris
  REGION 1..376: note = tr|A0A497XV02|A0A497XV02_9AQUI Queuine tRNA-ribosyltransferase OS=Hydrogenivirga caldilitoris; OX = 246264 GN=tgt PE=3 SV=1
MFDFKVITRDGKARRGKLKTSHGEIDTPVFMPVGTQGTVKAMTHRLLEEIGAQIILGNTYHLYLRPGLDVITGAGGLHRFISWDKPILTDSGGYQVFSLAQGRFGDRKSKVRVSDEGVEFRDHLAGDLHFFTPERVVQIQEAFGSDIIMPLDECVEYPVDKEYARKALERTLSWLDRSIKAKSREEQSLFGIVQGAFFEDLRVEAAKRTVERELPGYAIGGLSVGEPKEIMYSMTELVCEYLPADKPRYLMGVGKPEDIINAVAAGVDMFDCVVPTRNARTGTLFTSLGIVNIRHEKFKKDFSPLDPNCDCYTCRNFTKAYLRHLFVAEEISSYVLNTIHNLRFYLRLMEDIRTAIEVGKFESYRRDILERVTRKL

SEQ ID NO: 56115 - protein, 376 aa, Hydrogenivirga sp.
  REGION 1..376: note = tr|A8UVF4|A8UVF4_9AQUI Queuine tRNA-ribosyltransferase OS=Hydrogenivirga sp. 128-5-R1-1; OX = 392423 GN=tgt PE=3 SV=1
MFKFQLLKKDGKARRGRLTTPRGVIDTPVFMPVGTQGTVKAMTHRLLEEIGAQIMLGNTYHLYLRPGTEVISEAGSLHSFISWEKPILTDSGGYQVFSLAQGRFGDRKSKVKVTDEGVEFRDHLAGDLHFFTPERVIQIQEVFGSDIIMPLDECVEYPIDEDYARKALSRTLSWLDRSIRAKRREDQALFGIVQGAFSEKLRLEAVRMTVERELLGYAIGGLSVGEPKEIMYSMAELVCEHLPEDKPRYLMGVGKPEDIINAVAVGVDMFDCVVPTRNARTGTLYTSLGVVNIRHEKYKKDFSPLDPNCDCYTCRNFTKAYLRHLFVAEEISSYVLNTIHNLRFYLKMMEDMREAIEGGRFEDYKRETLENVTKKL

SEQ ID NO: 56116 - protein, 377 aa, Hydrogenoanaerobacterium saccharovorans
  REGION 1..377: note = tr|A0A1H7ZM74|A0A1H7ZM74_9FIRM Queuine tRNA-ribosyltransferase OS=Hydrogenoanaerobacterium saccharovorans OX=474960 GN=tgt PE=3 SV=1
MAYKLLKNEGTARRGEFETVHGTVQTPAFMNVGTAAAIKGGISSYDLVDLKCQVELCNTYHLHLRPGDDLIYDMGGLHKFMGWKGPILTDSGGFQVFSLAKLRTIKEEGVYFSSHIDGKKIFMGPEQSMQIQSNLASTIAMAFDECIENPATREYTVSSIARTTRWLVRCKREMQRLNSLESTINRNQLLFGINQGSTFHDLRIQHMIDIAELDLDGYAIGGLAVGDTAEEMYGVIEAIEPYMPKNKIRYLMGVGTPVNIIEAVHRGVDLFDCVMPSRNARHGHLFTWSGIRNLINEKYARDDAPLDEQCDCPCCRNHSRAYLRHLFKANEMLAMRLAVQHNLYFYNTLMEKIRAALDDGTFEQFRAQMVPILGKRI

SEQ ID NO: 56117 - protein, 377 aa, Hydrogenobacter hydrogenophilus
  REGION 1..377: note = tr|A0A285P1U7|A0A285P1U7_9AQUI Queuine tRNA-ribosyltransferase OS=Hydrogenobacter hydrogenophilus; OX = 35835 GN=tgt PE=3 SV=1
MFRFELICSDGKARRGRLITPHGIIDTPVFMPVGTQGTVKAMIHKLLEDINVQIILGNTYHLYLRPGPEVIKLAGGLHSFTGWHKPILTDSGGFQVFSLSKGRTKDNRSGVRVFEEGVEFKDHLSGSLHFFTPEKVIELQEILGSDFIMPLDECVEYPTTYAYAESALLRTLRWLDRSIKHKRREDQALFGIVQGSTFEDLRILSATATVERDLFGYAIGGLSVGEPKDIMYDITQVVCEYLPWNKPRYLMGVGMPEDIIECVARGIDMFDCVAPTRMARTGTLFTHSGKLNITNEAFKKDFSPIDEECSCYTCSNFTRAYLRHLYKSEEISAYILGTIHNLSFYQKLMQDIRIAIEEGRFESFRRSWMERYSSKLC

SEQ ID NO: 56118 - protein, 373 aa, Hydrogenobacter thermophilus
  REGION 1..373: note = tr|D3DIV0|D3DIV0_HYDTT Queuine tRNA-ribosyltransferase OS=Hydrogenobacter thermophilus (strain DSM 6534 / IAM 12695 / TK-6) OX=608538 GN=tgt PE=3; SV = 1
MSKAFSFEILASEGNARVGRLITPHGVIETPVFMPVGTQGTVKAMIHRLLEEIGVQVILSNTYHLYLRPGVEVIELAGGLHSFIGWQKPILTDSGGFQVFSLSRRRTKDNRSGVRVLEEGVEFRDHLSGSLHFFTPEKVIDMQEVFGSDFIMPLDECVEYPTTYTYAQASVERTLRWLDRSIKHKKREDQALFGIVQGAFFEDLRRYSAMATVERDLFGYAIGGLSVGEPKEIMYAMVEVVCEYLPWQKPRYLMGVGMPEDLVECVARGIDMFDCVAPTRMARTGTLFTSQGKINITNEIYKKDFSPVDEECNCYTCRNFTKAYLRHLYKADEISAYILGTVHNLSFYHKLMKDIRTAIKEGRFESLRRSWTV

SEQ ID NO: 56119 - protein, 376 aa, Hydrogenobaculum sp.
  REGION 1..376: note = tr|M1RRE4|M1RRE4_9AQUI Queuine tRNA-ribosyltransferase OS=Hydrogenobaculum sp. HO; OX = 547144 GN=tgt PE=3 SV=1
MFKIEKTDGLARAGVLSTSHGDILTPVFMPVGTKGTVKAMTHRLLEELGTQIILGNTYHLYLRPGPELIEKFGGLHKFINWNKPILTDSGGFQVFSLSKKNSSNVKITDDGVYFKDHLQGDKHLFSPERVIEIQEIFGSDIMMPIDECISLPASYEYTKEALYRTIRWLERSKKAKKRKDQMLFGIVQGGEYKDLRKLSARLTVEFDMDGYSIGGLSVGESKDIMYSMTYYVVEELPFDKPHYLMGVGKPEDILEAISLGVDMFDCVIPTRNARTGLLYTSKGELVLRHERYKEDPRPVDEECECYTCKNFSRAYLRHLFMMEEISSYILNTIHNLHFFLNLTKKAREAIIQGRFLDFKNEMLEKFNMKNHSINAN

SEQ ID NO: 56120 - protein, 376 aa, Hydrogenobaculum sp.
  REGION 1..376: note = tr|A0A2N7PYG9|A0A2N7PYG9_9AQUI Queuine tRNA-ribosyltransferase OS=Hydrogenobaculum sp. OX=2053560; GN = tgt PE=3 SV=1
MFKIEKTDGLARAGILSTAHGDILTPVFMPVGTKGTVKAMTHQILEELGTQIILGNTYHLYLRPGPELIEKFGGLHKFINWNKPILTDSGGFQVFSLSKKNSSNVKITDEGVYFKDHLQGDKHLFSPERVIEIQEIFGSDIIMPIDECISLPASYEYTKEALYRTIRWLERSKKAKKRKDQMLFGIVQGGEYKDLRKLSARLTVEFDMDGYSIGGLSVGESKDIMYSMTAYVVEELPFEKPHYLMGVGKPEDILEAISLGVDMFDCVIPTRNARTGLLYTSKGELVLRHERYKEDPRPIDEECECYTCKNFSRAYLRHLFMMEEISSYILNTIHNLHFFLNLTKKARESILQGRFLDFKSEMLEKFNIKNHSINVS

SEQ ID NO: 56121 - protein, 388 aa, unidentified
  source 1..388: note = Hydrogenophaga crassostreae
  REGION 1..388: note = tr|A0A167GMT0|A0A167GMT0_9BURK Queuine tRNA-ribosyltransferase OS=Hydrogenophaga crassostreae; OX = 1763535 GN=tgt PE=3 SV=1
MLQFELLKTEGHARRGRLTLNHGVVETPIFMPVGTYGTVKGVMPQSLHDMGAQIILGNTFHLWMRPGQDVMKSFGGLHGFEQWHKPILTDSGGFQVWSLGAMRKITEQGVTFNSPVNGDKLFMSPEVSMQIQTGLNSDIVMQLDECTPYETSGHLTTETEARKSMEMSRRWAVRSKDEFARLENPNALFGIVQGGMFENLRQESLEALVEMDFPGYAVGGVSVGEPKEQMLQIMAHTPHRLPAHKPRYLMGVGTPEDLVQGVADGVDMFDCVMPTRNARNGTLFTRFGDLKLRNARHKTDHQPLDTTCTCYACAGKSGVSWDDGGRDGFSRAYLHHLDRCGEMLGPMLATVHNLHYYLNLMREVREALDAGGFEAFRGQFKSERARGV

SEQ ID NO: 56122 - protein, 390 aa, Hydrogenophaga intermedia
  REGION 1..390: note = tr|A0A1L1PTP4|A0A1L1PTP4_HYDIT Queuine tRNA-ribosyltransferase OS=Hydrogenophaga intermedia; OX = 65786 GN=tgt PE=3 SV=1
MLKFEVLTTDPTSHARRATLTLNHGVVQTPIFMPVGTYGTVKGVTPASLEAMGAQIILGNTFHLWMRPGQDVMKSFGGLHAFERWNKPILTDSGGFQVWSLGEMRKITEQGVHFASPVNGDKLFMSPEVSMQIQTGLNSDIVMQLDECTPYETKGHITTEAEARQSMEMSLRWAQRSRAEFERLENPNALFGIVQGGMFEHLRQESLDALVAMDFPGYAVGGVSVGEPKDEMRRIMAHTPHRLPAHKPRYLMGVGTPEDLVEGVACGVDMFDCVMPTRNARNGTLFTRFGDLKIRNAKHKTDHRPLDETCTCYACAGSSGVSWADGGREGFSRAYLHHLDRCGEMLSPMLTSIHNLHYYLNLMKEVRAALDAGTFGEFRQRFHAERARGV

SEQ ID NO: 56123 - protein, 388 aa, Hydrogenophaga pseudoflava
  REGION 1..388: note = tr|A0A4P6WT76|A0A4P6WT76_HYDPS Queuine tRNA-ribosyltransferase OS=Hydrogenophaga pseudoflava; OX = 47421 GN=tgt PE=3 SV=1
MLQFDVLKTEGHARRGRLTLNHGVVETPIFMPVGTYGTVKGVTPASLEGMGAQIILGNTFHLWMRPGQEVMKSFGGLHAFEKWHKPILTDSGGFQVWSLGAMRKITEEGVHFASPVNGDKLFMSPEVSMQIQTGLNSDIVMQLDECTPYETNGHLTTEAEARKSMEMSRRWAVRSKDEFARLENPNALFGIVQGGMFEHLRQESLEALVEMDFPGYAIGGVSVGEPKEQMLQIMAHTPHRLPANKPRYLMGVGTPEDLVEGVACGVDMFDCVMPTRNARNGTLFTRYGDLKIRNARHKADHQPLDATCTCYACAGKSGVSWADGGRDGFSRAYLHHLDRCGEMLGPMLSTIHNLHYYLNLMQEVRASLDAGRFEAFRQQFKSDRARGV

SEQ ID NO: 56124 - protein, 390 aa, Hydrogenophaga sp.
  REGION 1..390: note = tr|A0A1B3M323|A0A1B3M323_9BURK Queuine tRNA-ribosyltransferase OS=Hydrogenophaga sp. RAC07; OX = 1842537 GN=tgt PE=3 SV=1
MLQFEVLKTDPTSHARRAQLTLNHGVVQTPIFMPVGTYGTVKGVMPQSLHDMGAQIILGNTFHLWMRPGREVMNSFGGLHGFEQWHKPILTDSGGFQVWSLGAMRKITEEGVTFASPVNGDKLFMSPEVSMDIQTGLNSDIVMQLDECTPYETNGHLTTEAEARKSMEMSLRWARRSQDEFARLENPNALFGIVQGGMFEHLRQESLDALVDMDFPGYAIGGVSVGEPKEQMLQIMAHTPHRLPAHKPRYLMGVGTPEDLVQGVADGVDMFDCVMPTRNARNGTLFTRFGDLKIRNARHKTDHQPLDTTCTCHACAGKSGVSWDQGGRDGFSRAYLHHLDRCGEMLGPMLATIHNLHYYLNLMREVREALDAGTFGAFRAQFKADRARGV

SEQ ID NO: 56125 - protein, 390 aa, Hydrogenophaga sp.
  REGION 1..390: note = tr|A0A1Q3QEL6|A0A1Q3QEL6_9BURK Queuine tRNA-ribosyltransferase OS=Hydrogenophaga sp. 70-12; OX = 1895769 GN=tgt PE=3 SV=1
MLTFEVLKTDPNSHARRATLTLNHGVVQTPIFMPVGTYGTVKGVTPASLEAMGAQIILGNTFHLWMRPGQEVMKSFGGLHAFERWNKPILTDSGGFQVWSLGEMRKITEQGVHFASPVNGDKLFMSPEVSVQIQTGLNSDIVMQLDECTPYETKGHITTEAEARQSMEMSRRWAQRSKAEFQRLENPNALFGIVQGGMFEHLRQESLDALVEMDFPGYAIGGVSVGEPKEEMRRIMAHTPHRLPAHKPRYLMGVGTPEDLVEGVACGVDMFDCVMPTRNARNGTLFTRFGDLKIRNARHKADHRPLDETCTCYACAGSGGVSWAEGGREGFSRAYQHHLDRCGEMLGPMLASIHNLHYYLNLMKEVRAALEAGTFGEFRQRFHAERARGV

SEQ ID NO: 56126 - protein, 367 aa, unidentified
  source 1..367: note = Hydrogenophilaceae bacterium
  REGION 1..367: note = tr|A0A1J4Z7E4|A0A1J4Z7E4_9PROT Queuine tRNA-ribosyltransferase OS=Hydrogenophilaceae bacterium CG1_02_62_390 OX=1805218 GN=tgt PE=3 SV=1
MKFDLLTTDGGARRGRLELAHGRVETPVFMPVGTVGAVKSVTPDEVKALGAQIVLGNTFHLWLRPGLEVIAAFGGLHGFMHWGGPILTDSGGFQVYSLTHLRKITEEGVRFASPLDGARLMLTPEQSMAIQRTLNSDIVMIFDECTPYPADWETAKASMELSLRWAARSKTAHAGNPNALFGIVQGGMFEDLRDNSVQELTRIGFDGYAIGGLSVGEPKADMARILTHTAAQLPTDRPRYLMGVGTPEDIVFAVGQGIDMFDCVMPTRNARHGVLFTRYGNLHIKNARHRTDPGPLDPSCDCYTCRNFSRAYLHHLFRVGESLAGRLNTIHNLHYYQTLMRELRLAIESGGFTDYVATFNNDRQAAC

SEQ ID NO: 56127 - protein, 367 aa, unidentified
  source 1..367: note = Hydrogenophilales bacterium
  REGION 1..367: note = tr|A0A2H0G3C8|A0A2H0G3C8_9PROT Queuine tRNA-ribosyltransferase OS=Hydrogenophilales bacterium CG18_big_fil_WC_8_21_14_2_50_58_12 OX=1974036 GN=tgt PE=3; SV = 1
MKFDLLATDGPARRGALTLAHGAVETPAFMPVGTYGAVKAMSPAELKEIGAHIVLGNTFHLWLRPGLEVIEAHGGLHRFMGWDGPILTDSGGFQVFSLGELRKITEEGVKFQSPVNGDRCFLTPEESMRIQKVLNSDIVMIFDECTPHPTDLQQAGDSMRLSLRWAERSRRAHEGNSNALFGIVQGGMHESLRDESLAGLVNIGFDGYAIGGLSVGEPKEDMLRILDHVAPQMPKNKPRYLMGVGTPEDIVDAVSRGVDMFDCVMPTRNARNGWLFTRFGTVKIKNAQYRLDTRPLDEECGCYTCRNFTRAYLHHLHRIGEILGARLNTIHNLHYYQELMQGIRRAIEEGRFADFVQQFRQARAVGS

SEQ ID NO: 56128 - protein, 366 aa, unidentified
  source 1..366: note = Hydrogenophilales bacterium
  REGION 1..366: note = tr|A0A5C7EV61|A0A5C7EV61_9PROT Queuine tRNA-ribosyltransferase OS=Hydrogenophilales bacterium SM250 OX=2602750 GN=tgt PE=3 SV=1
MRFELIARDGAARRGRLTLAHGTVDTPAFMPVGTYGAVKAMSPAELKGLGTQIVLGNTFHLWLRPGLEVIKAHGGLHRFIGWDGPILTDSGGFQVFSLGKLRSISEEGVAFRSPVNGDRCFLTPEEAMRIQRVLNADVAMVFDECTPYPADEAQTRASMELSLRWAERSKRAFEGSENALFGIVQGGMFEHLREASLKGLMDIGFDGYAIGGLSVGEPKEEMLRILDHTAAQLPPERPRYLMGVGTPADIVDAIARGIDLFDCVLPTRNARNGWAFTRQGVVKLRNSRYRTDTAPLDETCDCYTCHTFTRAYLHHLQRVNEILGARLNTLHNLHYYQCVMREAREAITQGRFAEYAATVKRRGAQS

SEQ ID NO: 56129 - protein, 404 aa, Hydrogenophilus thermoluteolus
  REGION 1..404: note = tr|A0A2Z6DVW2|A0A2Z6DVW2_HYDTE Queuine tRNA-ribosyltransferase OS=Hydrogenophilus thermoluteolus; OX = 297 GN=tgt PE=3 SV=1
MPLQRVPTLPNAAQPQDLPDAPDATDAPTPPPRAAFTLLARSGAARRGRLRLRRGTVETPAFMPVGTYGTVKAMTPAMLEAIGAQIILGNTFHLWLRPGLEVIQRFQGLHRFIGWNRPILTDSGGFQVFSLGALRKISEEGVRFASPIDGSKRFLTPEGAIEIQTVLDSDIAMVFDECTPYPATFDEAAASMQRSLRWAQRCRTAFDQQGNPNALFGIVQGGMYEPLRDASLAGLLEIGFHGYAIGGLSVGEPKAEMVRILAHTAPQLPENQARYLMGVGTPEDLIVGVQHGIDLFDCVMPTRNARNGHLFTRYGDIKIKQARYRHDTEPLDPTCDCYTCRHFSRAYLHHLFRAGEILGSILNTIHNLRYYQNLMAELRTAIEHDTFAETAARLLRDRQEGNRA

SEQ ID NO: 56130 - protein, 377 aa, Hydrogenothermus sp.
  REGION 1..377: note = tr|A0A432RFC3|A0A432RFC3_9AQUI Queuine tRNA-ribosyltransferase OS=Hydrogenothermus sp. OX=2231113; GN = tgt PE=3 SV=1
MFKFKLIKEDGNARLGKIYTPHGEIHTPVFMPVGTVGTVKAITKHHLLETKPQIILGNTYHLYLRPGVEVLKHFGGLHNFMNWDKPILTDSGGFQVFSLAKGKEKAGKHKAEVVLTDDGVKFRSHIDGSWHYFTPELVIEIQEIIGSDIMMPLDVCPPYPVSKTTALDAVKKTIDWLKRSKNAKKQNHQALFGIIQGSTYKDLRKESALMTVELDMDGYSIGGLSVGEPAEYMYEMTEVVVEYIPRRKPRYLMGVGTPENIIESVDRGVDMFDCVMPTRNARNGTLFTHRGRLNINAGKYKFSDESIDEECDCYTCKNFSRGYIRHLYNAGEITAMILGTIHNLRFYNKMMEDIRKAISEGRFSSFKKEFLEKLKSD

SEQ ID NO: 56131 - protein, 370 aa, unidentified
  source 1..370: note = Hydrogenovibrio crunogenus
  REGION 1..370: note = sp|Q31FZ5|TGT_HYDCU Queuine tRNA-ribosyltransferase; OS = Hydrogenovibrio crunogenus (strain XCL-2) OX=317025; GN = tgt PE=3 SV=1
MKFELDKQDGRARRGRLIFKRGVVETPAFMPVGTYGSVKGMMPEEVADTGAQIILGNTFHLSIRPGTDIIEQHGDLHDFMNWKGPILTDSGGFQVFSLGKMRKITEEGVHFRNPVNGSKIFMGPEESMDVQRKLGSDIVMIFDECTPYPATHDVAADSMRLSLRWAERSKQAHGDNPSALFGIVQGGMYEDLRQESIKGLTDIGFDGYAIGGLSVGEPKEEMMGTLDFTEPHMPKDKPRYMMGVGKPEDIVEAVRRGIDMFDCVIPTRNARNGFLFTHSGVVKIRNAVNKTSLEPLDAKCDCYTCQNYTRAYLHHLDKCGEIQGARLNTIHNLHYYQLLMKGLREAIASETLDTFVSEFYQARGEDVPAL

SEQ ID NO: 56132 - protein, 374 aa, unidentified
  source 1..374: note = Hydrogenovibrio crunogenus
  REGION 1..374: note = tr|A0A4P7P0P8|A0A4P7P0P8_9GAMM Queuine tRNA-ribosyltransferase OS=Hydrogenovibrio crunogenus; OX = 39765 GN=tgt PE=3 SV=1
MEKSMKFELDKQDGRARRGRLIFERGVVETPAFMPVGTYGSVKGMMPEEVADTGAQIILGNTFHLAIRPGTDIIEQHGDLHDFMNWKGPILTDSGGFQVFSLGKMRKITEEGVHFRNPVNGSKIFMGPEESMDVQRKLGSDIVMIFDECTPYPATHEVAADSMRLSLRWAERSKQAHGDNPSALFGIVQGGMYEDLRQESIKGLTDIGFDGYAIGGLSVGEPKEEMMGTLDFTEPHMPKDKPRYMMGVGKPEDIVEAVRRGIDMFDCVIPTRNARNGFLFTHNGVVKIRNAVNKTSLEPLDAKCDCYTCQNYTRSYLHHLDKCGEIQGARLNTIHNLHYYQLLMKGLREAIASETLDTFVSEFYQARGEEVPAL

SEQ ID NO: 56133 - protein, 370 aa, Hydrogenovibrio marinus
  REGION 1..370: note = tr|A0A066ZNG0|A0A066ZNG0_HYDMR Queuine tRNA-ribosyltransferase OS=Hydrogenovibrio marinus; OX = 28885 GN=tgt PE=3 SV=1
MEFELDNQDGRARRGRLKFERGVVETPAFMPVGTYGSVKGMTPEEIEDTGAQIILGNTFHLAIRPGTDIIEQHGDLHDFINWKGPILTDSGGFQVFSLGKMRKISEQGVHFRNPVNGSKLFMGPEESMEVQRKLGSDIVMIFDECTPYPASYEVAADSMRLSLRWAQRSKDAHGDNPSALFGIVQGGMYEALRIESIEALKAIGFDGYAIGGLSVGEPKDEMMATLDFTEPHMPKDKPRYMMGVGKPEDIVEAVRRGIDMFDCVIPTRNARNGFLFTHDGVVKIRNAVHKTSLEPLDAQCDCYTCKNYTRAYLHHLDKCGEILGARLNTIHNLHYYQLLMKGLREAIANNQLESYVKHFYYQRGEVVPPM

SEQ ID NO: 56134 - protein, 370 aa, Hydrogenovibrio sp.
  REGION 1..370: note = tr|A0A2I2A2G8|A0A2I2A2G8_9GAMM Queuine tRNA-ribosyltransferase OS=Hydrogenovibrio sp. SC-1; OX = 2065820 GN=tgt PE=3 SV=1
MEFELDNQDGRARRGRLIFERGVVETPAFMPVGTYGSVKAMMPEEVAATGAQIILGNTFHLSLRPGTDIIEQHGDLHDFMNWQGPILTDSGGFQVFSLGKMRKITEEGVHFNSPVNGAKIFMGPEESMEVQRKLGADIVMIFDECTPYPASHEVAADSMRLSLRWAERSKQAHGDNPAALFGIVQGGMYEDLRQESADALTQIGFDGYAIGGLSVGEPKEEMMSTLDFTEPHLPQNKPRYMMGVGKPEDIVEAVRRGIDMFDCVIPTRNARNGFLFTHSGVVKIRNAVHKTSLVPLDKQCDCYTCQNYSRAYLHHMDKCGEIQGARLNTIHNLHYYQTLMKGLRDAIAENQLDTFVADFYQARGESVPAL

SEQ ID NO: 56135 - protein, 370 aa, unidentified
  source 1..370: note = Hydrogenovibrio thermophilus
  REGION 1..370: note = tr|A0A410H3K0|A0A410H3K0_9GAMM Queuine tRNA-ribosyltransferase OS=Hydrogenovibrio thermophilus; OX = 265883 GN=tgt PE=3 SV=1
MKFELDKQDGRARRGRLIFDRGVVETPAFMPVGTYGSVKGMMPEEVADTGAQIILGNTFHLAIRPGTDIIEQHGDLHDFINWPGPILTDSGGFQVFSLGKMRKIVEEGVHFRNPVNGSRLFMGPEESMEIQRKLGSDIVMIFDECTPYPASHEVAAESMRLSLRWAERSKKAHEGNPSALFGIVQGGMYEDLREESIQALMEIGFDGYAIGGLSVGEPKEEMMATLDFTEPHMPTDKPRYMMGVGKPEDIVEAVRRGIDMFDCVIPTRNARNGFLFTHTGVVKIRNAVHKTSLEPLDVKCDCYTCRNYTRAYLHHLDKCGEIQGARLNTIHNLHYYQLLMKGLRNAIASNSLDAFVADFYAERDEAVPPL

SEQ ID NO: 56136 - protein, 372 aa, unidentified
  source 1..372: note = Hydromonas duriensis
  REGION 1..372: note = tr|A0A4R6Y305|A0A4R6Y305_9BURK Queuine tRNA-ribosyltransferase OS=Hydromonas duriensis OX=1527608; GN = tgt PE=3 SV=1
MSLNFKLHKTSGKARRGTMTLNHGVVETPIFMPVGTYGAVKGMNPDMLGDINAQIILGNTFHLWLRPGLDVMKTHGGLHQFMNWNKPILTDSGGFQVFSLGEMRKISEEGVMFSSPVNGDKLFLTPEVSMQIQTVLNSDIVMQFDECTPYPASEKEARDSMEMSLRWAKRSLNEFNAQNNPNALFGIVQGGMYTHLRDESLAGLNELDFHGTAIGGLSVGEPKEDFYRVLEYVGHRLPAHKPRYLMGVGTPEDLVYGVQQGVDMFDCVMPTRNARNGWLFTRFGDLKIKNARYKHDTAPIDDTCTCYACRHFSRSYLHHLHKMNEMLGAQLNTIHNLHYYLQLMQELRDGLDNDRFDEVVAQFHANRARGIA

SEQ ID NO: 56137 - protein, 372 aa, unidentified
  source 1..372: note = Hydromonas sp.
  REGION 1..372: note = tr|A0A345DE31|A0A345DE31_9BURK Queuine tRNA-ribosyltransferase OS=Hydromonas sp. F02 OX=2268024; GN = tgt PE=3 SV=1
MSLTFKLHKTSGKARRGTMTLNHGEVQTPIFMPVGTYGAVKGMNPDMLGDINAQIILGNTFHLWLRPGLDVIKTHGGLHQFMNWHKPILTDSGGFQVFSLGDMRKISEEGVMFSSPVNGDKLFLTPEVSMQIQTVLNSDIVMQFDECTPYPADEKTARLSMEMSLRWAKRSMDEFNAQENPNALFGIVQGGMHEHLREVSLAGLNELDFHGTAIGGLSVGEPKEEFHRILEHIGHQLPADKPRYLMGVGTPEDLVYGVQQGIDMFDCVMPTRNARNGWLFTRFGDVKIKNARYKQDLAPIDDTCTCYACQNFSRSYLHHLHKMNEMLGAQLNTIHNLHYYLQLMQELRDGLDNDDFDEVVRLFHANRARGIA

SEQ ID NO: 56138 - protein, 379 aa, unidentified
  source 1..379: note = Hydrotalea sandarakina
  REGION 1..379: note = tr|A0A2W7RX62|A0A2W7RX62_9BACT Queuine tRNA-ribosyltransferase OS=Hydrotalea sandarakina; OX = 1004304 GN=tgt PE=3 SV=1
MPALQFSIQQVDSASAARAGTIVTDHGTIQTPIFMPVGTVGSVKAVTQQQLNADVKAQIILGNTYHLYLRPGIEILNKAGGLHQFMGWHKPILTDSGGYQVFSLGSQRKIKEEGVTFQSHIDGSRHLFTPENVMDIERNIGADIIMAFDECPPYPSEYQYAKNSMELTHRWLDRCIARLKETPDLYGYTQNLFPIVQGGTYKDLRTASAQYIADKNAAGNAIGGLSVGEPEAMMYDFTALCCEFLPVEKPRYLMGVGTPWNILESIALGVDMFDCVMPTRNGRNGMLFTSKGVINIKNKKWATDFSVIDDGFISNISNYYTKAYLRHLFAADEILALQIASLHNLSFYLWLVGEARNQILNGNFYAWKQEMVPILKQRL

SEQ ID NO: 56139 - protein, 379 aa, Hydrotalea sp.
  REGION 1..379: note = tr|A0A4Q0AXM7|A0A4Q0AXM7_9BACT Queuine tRNA-ribosyltransferase OS=Hydrotalea sp. AMD OX=2501297; GN = tgt PE=3 SV=1
MPQLQFSIQETDVACAARAGTIITDHGSIQTPIFMPVGTGGSVKAITQQQLQDDIHAQIILGNTYHLYLRPGTDILQQAGGLHKFMGWNRPILTDSGGYQVFSLATQRKIKEEGVTFQSHIDGSRHLFTPEYVMDIQRSIGADIIMAFDECPPYPSDYAYAKNSMELTHRWLDRGIARLAETPDLYGYTQNLFPIVQGGTFKDLRTASCAYIASKQAAGNAIGGLSVGEPEEMMYDFTALCCSILPSEKPRYLMGVGTPWNILEGIALGVDMFDCVMPTRNGRNGMLFTSKGIINIKNKKWATDFSVIDDGIPASISNYYSKAYLRHLFAANEISALQIASLHNLSFYLWLVAEARTQILLRNFNPWKQEMVPILKQRL

SEQ ID NO: 56140 - protein, 368 aa, unidentified
  source 1..368: note = Hyella patelloides
  REGION 1..368: note = tr|A0A563VKI1|A0A563VKI1_9CYAN Queuine tRNA-ribosyltransferase OS=Hyella patelloides LEGE 07179; OX = 945734 GN=tgt PE=3 SV=1
MAFSYYIQANCSHTKARAGIFTTPHGTVETPRFMPVGTLATVKGITPRQLKDAAAQMILANTYHLHLQPGEDIVESAGGLHKFMAWEQPILTDSGGFQVFSLSELRKISEEGVTFRSPRDGRIINMTPEHSIKIQNALGADVIMAFDECPPADASKAEVAAATERTYRWLKRCISAHQKPEKQALFGIVQGGIYLDLRSQSVADLVALDLPGYAIGGVSVGEKPELINATVQHTAPLLPADKPRYLMGVGTYREMVQAIASGVDLFDCVIPTRFGRHGTALVNGERINIKNAQYKRDYKPLDETCPCYACQNFSRSYLNHLVKSREMLGYILLSLHNITELIRFTQKIRTAILKDNFMVEFGNWLSKS

SEQ ID NO: 56141 - protein, 402 aa, Hylemonella gracilis
  REGION 1..402: note = tr|A0A4P6UJW1|A0A4P6UJW1_9BURK Queuine tRNA-ribosyltransferase OS=Hylemonella gracilis OX=80880; GN = tgt PE=3 SV=1
MLRFELLRTEGLARRGRLTLNHGVVETPIFMPVGTYGTVKGVLPRSLHDMGAQIILGNTFHLWMRPGLDVMQSFGGLHGFEQWNKPILTDSGGFQVWSLGAMRKITEQGVHFASPVNGDKLFMSPEVSMQIQTTLNSDIVMQLDECTPYWQGEKGQGDKDSGHITTEAEARVSMELSQRWARRSQAEFARLENPNALFGIVQGGMFEHLRQESLEALVEMDFPGYAVGGVSVGEPKDEMNRIMAHTPHRLPAHKPRYLMGVGTPEDLVNGVANGVDMFDCVMPTRNARNGTIFTRYGDLKLRNARHKADHQPLDPSCTCYACAGGAGISWEQGGGPNHGWQGFSRAYLHHLDRCGEMLGPMLATIHNLHYYLNLMREVREALDAGTFAAFTARFQAERARGV

SEQ ID NO: 56142 - protein, 396 aa, Hylemonella gracilis
  REGION 1..396: note = tr|A0A016XLH3|A0A016XLH3_9BURK Queuine tRNA-ribosyltransferase OS=Hylemonella gracilis str. Niagara R OX=1458275 GN=tgt PE=3 SV=1
MLRFELLRTEGQARRGRLTLNHGVVETPIFMPVGTYGTVKGVLPCSLHDMGAQIILGNTFHLWMRPGLDVMQSFGGLHGFEQWNKPILTDSGGFQVWSLGAMRKITEQGVHFASPVNGDKLFMSPEVSMQIQTTLNSDIVMQLDECTPYWQGDKGSGHITTEAEARVSMELSQRWAKRSQAEFARLENPNALFGIVQGGMFEHLRQESLEALVDMDFPGYAVGGVSVGEPKDEMNRIMAHTPHRLPAHKPRYLMGVGTPEDLVNGVACGVDMFDCVMPTRNARNGTIFTRYGDLKLRNARHKADHQPLDPSCTCYACAGSAGISWEQGGPNQGWQGFSRAYLHHLDRCGEMLGPMLATIHNLHYYLNLMREVREALDAGAFAAFTARFHAERSRGV

SEQ ID NO: 56143 - protein, 376 aa, Hymenobacter actinosclerus
  REGION 1..376: note = tr|A0A1I0ACF0|A0A1I0ACF0_9BACT Queuine tRNA-ribosyltransferase OS=Hymenobacter actinosclerus; OX = 82805 GN=tgt PE=3 SV=1
MTFDLLTTDPHTKARAGVVHTDHGAIETPIFMPVGTAGTVKAVQQRDLENDIQAQIILGNTYHLYLRPGLDILRQAGGLHQFNGWDRPILTDSGGYQVYSLSNTRKIKEEGVKFRSHVDGSQHLFTPEGVMDIQRTIGADIMMAFDECTPWPCEYAYAARSLDMTHRWLKRCIQRFDSTEGHYGYSQALFPIVQGSTFKDLRIKSAEFVAEQGREGNAIGGLSVGEPAELMYEMTELVCDILPPDKPRYLMGVGTPANILENIALGVDMFDCVMPTRNARNGLVYTTQGIMNLAARKWAEDFEPIDAALGGYVSTFYSRAYVRHLFHSKEMLGPQIASIHNLTFYLWLVKQAREQILAGTFREWKDVMVKKLMTRL

SEQ ID NO: 56144 - protein, 376 aa, unidentified
  source 1..376: note = Hymenobacter amundsenii
  REGION 1..376: note = tr|A0A246FLU7|A0A246FLU7_9BACT Queuine tRNA-ribosyltransferase OS=Hymenobacter amundsenii; OX = 2006685 GN=tgt PE=3 SV=1
MTFDLLATDPHSKARAGVVHTDHGSIETPIFMPVGTAGTVKAVQQRDLKDDIKAQIILGNTYHLYLRPGLEVISKAGGLHKFNGWDGPILTDSGGYQVYSLSGTRKIKEEGVKFRSHIDGSQHLFSPEGVMDIQRTIGADIIMAFDECTPWPCEYDYAARSLDMTHRWLKRCIARFDSTEGHYGYSQTLFPIVQGSTFKDLRVKSAEFVAEQGREGNAIGGLSVGEPAELMYEMTELVCDILPPDKPRYLMGVGTPANILENIALGVDMFDCVMPTRNARNGMLFTTQGIMNIAARKWADDFEPIDAELGGYVSTFYSRSYVRHLFHSKEMLGPQVASIHNLTFYLWLVKQAREQILAGTFREWKEVMVKKLMTRL

SEQ ID NO: 56145 - protein, 376 aa, unidentified
  source 1..376: note = Hymenobacter aquaticus
  REGION 1..376: note = tr|A0A4Z0Q7K8|A0A4Z0Q7K8_9BACT Queuine tRNA-ribosyltransferase OS=Hymenobacter aquaticus; OX = 1867101 GN=tgt PE=3 SV=1
MTFDLVAHDPQSKARAGVVHTAHGAIQTPIFMPVGTAGTVKAVQQRDLNDDIKAQIILGNTYHLYLRPGLDVLRAAGGLHKFNGWDRPILTDSGGYQVYSLSGTRKIKEEGVKFRSHIDGSQHLFSPEGVMDIQRTIGADIMMAFDECTPWPCEYDYAARSLDMTHRWLKRCIERFDSTEGHYGYEQTLFPIVQGSTFKDLRVKSAEFIAEQGREGNAIGGLSVGEPAEQMYEMTELVCDILPQDKPRYLMGVGTPANILENIALGVDMFDCVMPTRNARNGMLFTTQGIMNITNKKWQLDFEPIDRELGGYVSTFYSRSYVRHLFQSQEMLGPQIASIHNLSFYLWLVQQAREQIVAGTFREWKDKMVKQVMTRL

SEQ ID NO: 56146 - protein, 376 aa, Hymenobacter chitinivorans
  REGION 1..376: note = tr|A0A2M9BLT6|A0A2M9BLT6_9BACT Queuine tRNA-ribosyltransferase OS=Hymenobacter chitinivorans DSM 11115 OX=1121954 GN=tgt PE=3 SV=1
MTFDLVAHDPQSKARAGVVHTAHGAIQTPIFMPVGTAGTVKAVQQRDLKDDIKAQIILGNTYHLYLRPGLDVLRAAGGLHKFNGWDRPILTDSGGYQVYSLSGTRKIKEEGVKFRSHIDGSQHLFSPEGVMDIQRTIGADIMMAFDECTPWPCEYNYAARSLDMTHRWLKRCIERFDSTEGHYGYEQTLFPIVQGSTFKDLRVKSAEFIAEQGREGNAIGGLSVGEPAEMMYEMTELVCDILPQDKPRYLMGVGTPANILENIALGVDMFDCVMPTRNARNGMLFTTQGIMNITNKKWQMDFEPIDRELGGYVSTFYSRSYVRHLFQSQEMLGPQIASIHNLSFYLWLVQQAREQIIAGTFRDWKDKMVKQVMTRL

SEQ ID NO: 56147 - protein, 376 aa, unidentified
  source 1..376: note = Hymenobacter coccineus
  REGION 1..376: note = tr|A0A1G1TE68|A0A1G1TE68_9BACT Queuine tRNA-ribosyltransferase OS=Hymenobacter coccineus; OX = 1908235 GN=tgt PE=3 SV=1
MTFDLIARDPATKARAGLLHTAHGAIETPIFMPVGTAGTVKAVSQQVLRTDVQAQIILGNTYHLYLRPGLEVLQAAGGLHRFNGWDGPILTDSGGYQVFSLSNTRKIKEDGVTFRSHVDGSKHLFTPEGVMDIQRVIGADIIMAFDECTPWPCDYDYARRSLDMTHRWLQRCIQRFDATEGLYGFEQNLFPIVQGSTFKDLRVQSAEFVAAQGRAGNAIGGLSVGEPAEMMYEMTELVCDILPADRPRYLMGVGTPANILENIALGVDMFDCVMPTRNARNGMLFTTQGIVNITNKKWATDFTPIDPSLPGVASTFYSRAYLRHLFQCKELLGPQIASAHNLAFYLWLVREARTQIQAGTFGPWKDRMVQQVMTRL

SEQ ID NO: 56148 - protein, 376 aa, Hymenobacter daecheongensis
  REGION 1..376: note = tr|A0A1M6GMP7|A0A1M6GMP7_9BACT Queuine tRNA-ribosyltransferase OS=Hymenobacter daecheongensis DSM 21074 OX=1121955 GN=tgt PE=3 SV=1
MTFDLVAHDPQTKARAGVVHTAHGAIETPIFMPVGTAGTVKAVQQRDLTHDVQAQIILGNTYHLYLRPGLDVLRAAGGLHKFNGWDRPILTDSGGYQVYSLSGTRKIKEEGVKFRSHIDGSSHLFSPEGVMDIQRTIGADIIMAFDECTPWPCEYDYASRSLDMTHRWLKRCIQRFDSTEGHYGYAQTLFPIVQGSTFKDLRVKSAEFVAEQGREGNAIGGLSVGEPAEQMYEMTELVCDILPKDKPRYLMGVGTPANILENIALGVDMFDCVMPTRNARNGMLFTTQGIINITNKKWQLDFEPIDATLGGYVSTFYSRSYVRHLFQSQEMLGPQIASIHNLSFYLWLVKQAREQIVAGTFREWKEKMVKQVMTRL

SEQ ID NO: 56149 - protein, 376 aa, Hymenobacter elongatus
  REGION 1..376: note = tr|A0A4Z0PMQ5|A0A4Z0PMQ5_9BACT Queuine tRNA-ribosyltransferase OS=Hymenobacter elongatus; OX = 877208 GN=tgt PE=3 SV=1
MTFDLVAHDPHTKARAGVVHTAHGTIQTPIFMPVGTAGTVKAVQQRDLKDDVKAQIILGNTYHLYLRPGLDVLRNAGGLHKFNGWDRPILTDSGGYQVYSLSGTRKIKEEGVKFRSHIDGSQHLFSPEGVMDIQRTIGADIIMAFDECTPWPCEYDYASRSLDMTHRWLMRCIQRFDSTEGHYGYDQTLFPIVQGSTFKDLRVKSAEFVAEQQRAGNAIGGLSVGEPAELMYEMTELVCDILPKDKPRYLMGVGTPANILENIALGVDMFDCVMPTRNARNGMLFTTQGIINITNKKWQLDLEPLDQELGGYVSTFYSRSYVRHLFQSQEMLGPQIASVHNLTFYLWLVQQAREQIVAGTFRDWKEKMVKQVMTRL

SEQ ID NO: 56150 - protein, 376 aa, Hymenobacter gelipurpurascens
  REGION 1..376: note = tr|A0A212TPP9|A0A212TPP9_9BACT Queuine tRNA-ribosyltransferase OS=Hymenobacter gelipurpurascens; OX = 89968 GN=tgt PE=3 SV=1
MTFDLVTQDPHTKARAGVVHTDHGTIETPIFMPVGTAGTVKAVQQRDLKDDIQAQIILGNTYHLYLRPGLEVLSKAGGLHKFNGWDKPILTDSGGYQVYSLSGTRKIKEEGVKFRSHIDGSQHLFSPEGVMDIQRTIGADIIMAFDECTPWPCEYDYASRSLDMTHRWLKRCIQRFDSTEGHYGYSQTLFPIVQGSTFKDLRVKSAEFIAEQGREGNAIGGLSVGEPAEMMYEMTEIVCDILPQDKPRYLMGVGTPANILENIALGVDMFDCVMPTRNARNGMLFTTQGIMNISNKKWADDFEPIDAELGGYVSTFYSRAYVRHLFHSKEMLGPQIASIHNLSFYLWLVKQAREQILAGTFREWKEKMVKQVMTRL

SEQ ID NO: 56151 - protein, 376 aa, unidentified
  source 1..376: note = Hymenobacter glacialis
  REGION 1..376: note = tr|A0A1G1SZ46|A0A1G1SZ46_9BACT Queuine tRNA-ribosyltransferase OS=Hymenobacter glacialis; OX = 1908236 GN=tgt PE=3 SV=1
MTFDLLAQDPATKARAGRLETAHGTIETPIFMPVGTAGTVKAVSQHTLKADIDAQIILGNTYHLYLRPGLDVLRAAGGLHKFNGWDRPILTDSGGYQVYSLSNTRKIKEEGVKFRSHIDGSQHLFSPEGVMDIQRVIGADIIMAFDECTPWPCEYDYAARSLDMTHRWLQRCIQRFDSTEGLYGYQQALFPIVQGSTFKDLRIKSAEFIAAQGREGNAIGGLSVGEPAELMYEMTELVCDILPKDKPRYLMGVGTPANILENIALGVDMFDCVMPTRNARNGMLFTTQGIMNVTNKKWATDFAPIDAELGGHASTFYTRAYLRHLFQCKEMLGPQIASAHNLAFYLWLVKEARLQIMAGTFGPWKERMVKQVMTRL

SEQ ID NO: 56152 - protein, 376 aa, unidentified
  source 1..376: note = Hymenobacter gummosus
  REGION 1..376: note = tr|A0A3S0JI42|A0A3S0JI42_9BACT Queuine tRNA-ribosyltransferase OS=Hymenobacter gummosus; OX = 1776032 GN=tgt PE=3 SV=1
MKFDLLAHDPQSKARAGVLTTAHGTIETPIFMPVGTAGSVKAVHQREVKDDVQAQIILGNTYHLYLRPGLDTLRKAGGLHKFNGWDRPILTDSGGYQVYSLSNTRKIKEEGVKFRSHIDGSQHLFTPEGVMDIQRVIGADIIMAFDECTPWPCEYEYARKSLDMTHRWLKRCIQRIDETEPLYGYEQQLFPIVQGSTFKDLRVKSAEFIAEQGRAGNAIGGLSVGEPAELMYEMTEICCDILPADKPRYLMGVGTPANILENIALGVDMFDCVLPTRNARNGMLFTTQGIINIKNKKWEQDFSPIDEELGGYVSTFYSKSYLRHLFHAGEYLAGMAASVHNLTFYLWLVRNAREQILAGTFREWKERMVKQLMVRL

SEQ ID NO: 56153 - protein, 376 aa, unidentified
  source 1..376: note = Hymenobacter lapidarius
  REGION 1..376: note = tr|A0A1G1T1P6|A0A1G1T1P6_9BACT Queuine tRNA-ribosyltransferase OS=Hymenobacter lapidarius; OX = 1908237 GN=tgt PE=3 SV=1
MTFDLLAQDPATKARAGRLETAHGTIETPIFMPVGTAGTVKAVSQHTLKADINAQIILGNTYHLYLRPGLDVLRAAGGLHQFNGWDRPILTDSGGYQVYSLSNTRKIKEEGVKFRSHIDGSQHLFSPEGVMDIQRVIGADIIMAFDECTPWPCEYDYAARSLDMTHRWLQRCIQRFDSTEGLYGYQQALFPIVQGSTFKDLRIKSAEFIAAQGREGNAIGGLSVGEPAELMYEITELVCDILPKDKPRYLMGVGTPANILENIALGVDMFDCVMPTRNARNGMLFTTQGILNVTNKKWATDFTPIDSELGGHASTFYSRAYLRHLFQCKEMLGPQIASAHNLAFYLWLVKEARQQIVAGTFGPWKERMVKQVMTRL

SEQ ID NO: 56154 - protein, 376 aa, unidentified
  source 1..376: note = Hymenobacter mucosus
  REGION 1..376: note = tr|A0A238YF99|A0A238YF99_9BACT Queuine tRNA-ribosyltransferase OS=Hymenobacter mucosus OX=1411120; GN = tgt PE=3 SV=1
MTFDLVTQDPHTKARAGVVHTDHGAIETPIFMPVGTAGTVKAVQQRDLKDDIQAQIILGNTYHLYLRPGLDVLQKAGGLHKFNGWDRPILTDSGGYQVYSLSGTRKIKEEGVKFRSHIDGSQHLFSPEGVMDIQRTIGADIIMAFDECTPWPCEYDYAARSLDMTHRWLKRCIQRFDSTEGHYGYSQTLFPIVQGSTFKDLRVKSAEFIAEQGREGNAIGGLSVGEPAEMMYEMTEIVCDILPQDKPRYLMGVGTPANILENIALGVDMFDCVMPTRNARNGMLFTTQGIINIANKKWADDFTPIDEELGGYVSTFYSRSYVRHLFHSKEMLGPQIASIHNLTFYLWLVKQARQQILAGTFREWKERMVKQVMTRL

SEQ ID NO: 56155 - protein, 376 aa, unidentified
  source 1..376: note = Hymenobacter nivis
  REGION 1..376: note = tr|A0A2Z3GNK8|A0A2Z3GNK8_9BACT Queuine tRNA-ribosyltransferase OS=Hymenobacter nivis OX=1850093; GN = tgt PE=3 SV=1
MTFDLLARDPATKARAGLLHTAHGAIETPIFMPVGTAGTVKAVSQQVLRTDVQAQIILGNTYHLYLRPGLEVLQAAGGLHRFNGWDGPILTDSGGYQVFSLSNTRKIKEEGVTFRSHVDGSKHLFTPEGVMDIQRVIGADIIMAFDECTPWPCEYDYARRSLDLTHRWLQRCIQRFDATEGLYGFEQNLFPIVQGSTFKDLRVQSAEFVAAQGRAGNAIGGLSVGEPAELMYEMTELVCDILPADKPRYLMGVGTPANILENIALGVDMFDCVMPTRNARNGMLFTTQGIVNITNKKWATDFTPIDPSLPGVASTFYSRAYLRHLFQCKELLGPQIASAHNLAFYLWLVREARTQIVAGTFGPWKDRMVQQVMTRL

SEQ ID NO: 56156 - protein, 376 aa, unidentified
  source 1..376: note = Hymenobacter nivis
  REGION 1..376: note = tr|A0A502HGN4|A0A502HGN4_9BACT Queuine tRNA-ribosyltransferase OS=Hymenobacter nivis OX=1850093; GN = tgt PE=3 SV=1
MTFDLIARDPATKARAGLLHTAHGAIETPIFMPVGTAGTVKAVSQQVLRTDVQAQIILGNTYHLYLRPGLEVLQAAGGLHKFNGWDGPILTDSGGYQVFSLSNTRKIKEDGVTFRSHVDGSKHLFTPEGVMDIQRVIGADIIMAFDECTPWPCDYDYARRSLDMTHRWLQRCIARFDTTEGLYGFEQNLFPIVQGSTFKDLRVQSAEFVAAQGRAGNAIGGLSVGEPAEMMYEMTELVCDILPADKPRYLMGVGTPANILENIALGVDMFDCVMPTRNARNGMLFTTQGIVNITNKKWATDFTPIDPSLPGVASTFYSRAYLRHLFQSKELLGPQIASAHNLAFYLWLVREARTQIQAGTFGPWKDRMVQQVMTRL

SEQ ID NO: 56157 - protein, 376 aa, Hymenobacter perfusus
  REGION 1..376: note = tr|A0A3R9NSL6|A0A3R9NSL6_9BACT Queuine tRNA-ribosyltransferase OS=Hymenobacter perfusus; OX = 1236770 GN=tgt PE=3 SV=1
MTFDLVANDPHSKARAGVVHTDHGAIETPIFMPVGTAGTVKAVQQRDLKDDINAQIILGNTYHLYLRPGLEVISKAGGLHKFNGWDRPILTDSGGYQVYSLSGTRKIKEEGVKFRSHIDGSQHLFSPEGVMDIQRTIGADIIMAFDECTPWPCEYSYAARSLDMTHRWLKRCITRFDGTEGHYGYSQTLFPIVQGSTFKDLRVKSAEFIAEQGREGNAIGGLSVGEPADMMYEMTEIVCDILPKDKPRYLMGVGTPANILENIALGVDMFDCVMPTRNARNGMLFTTQGIMNIANKKWADDFTPIDEELGGYVSTFYSRSYVRHLFHSKEMLGPQIASIHNLTFYLWLVKQARQQILAGTFREWKDRMVKQLMTRL

SEQ ID NO: 56158 - protein, 376 aa, Hymenobacter psychrophilus
  REGION 1..376: note = tr|A0A1H3FCE0|A0A1H3FCE0_9BACT Queuine tRNA-ribosyltransferase OS=Hymenobacter psychrophilus; OX = 651662 GN=tgt PE=3 SV=1
MTFDLLTTDPHSKARAGVVHTDHGSIETPIFMPVGTAGTVKAVQQRDLKDDINAQIILGNTYHLYLRPGLDIIRQAGGLHKFNGWDRPILTDSGGYQVYSLSNTRKIKEEGVKFRSHVDGSQHLFTPEGVMDIQRTIGADIMMAFDECTPWPCEYDYAARSLDMTHRWLKRCIQRFDSTEGHYGYSQTLFPIVQGSTFKDLRIKSAEFVAEQGREGNAIGGLSVGEPADMMYEMTELVCDILPKDKPRYLMGVGTPANILENIALGVDMFDCVMPTRNARNGLVYTTQGIMNLAARKWAEDFEPIDAELGGYVSTFYSRSYVRHLFHSKEMLGPQIASIHNLTFYLWLVKQARAQILAGTFREWKDVMVKKLMTRL

SEQ ID NO: 56159 - protein, 376 aa, Hymenobacter psychrotolerans
  REGION 1..376: note = tr|A0A1M7CTV3|A0A1M7CTV3_9BACT Queuine tRNA-ribosyltransferase OS=Hymenobacter psychrotolerans DSM 18569 OX=1121959 GN=tgt PE=3 SV=1
MTFDLVANDPHTKARAGVVHTAHGAIETPIFMPVGTAGTVKAVQQRDLKDDVQAQIILGNTYHLYLRPGLDVLQKAGGLHRFNGWDRPILTDSGGYQVYSLSGTRKIKEEGVKFRSHIDGSQHLFSPEGVMDIQRTIGADIIMAFDECTPWPCEYDYAARSLDMTHRWLKRCIQRFDSTEGHYGYQQTLFPIVQGSTFRDLRIKSAEFIAEQGREGNAIGGLSVGEPADMMYEMTELVCDILPQDKPRYLMGVGTPANILENIALGVDMFDCVMPTRNARNGMLFTTQGIMNVTNKKWETDFEPIDAELGGYVSTFYSRSYVRHLFQSKEMLGPQIASIHNLTFYLWLVKQARQQILAGTFREWKEKMVKQVMTRL

SEQ ID NO: 56160 - protein, 376 aa, Hymenobacter rigui
  REGION 1..376: note = tr|A0A428KPV9|A0A428KPV9_9BACT Queuine tRNA-ribosyltransferase OS=Hymenobacter rigui OX=334424; GN = tgt PE=3 SV=1
MTFDLVANDPHSNARAGVVHTDHGAIETPIFMPVGTAGTVKAVQQRDLKDDINAQIILGNTYHLYLRPGLEVLQKAGGLHKFNGWDRPILTDSGGYQVYSLSGTRKIKEEGVKFRSHIDGSQHLFSPEGVMDIQRTIGADIMMAFDECTPWPCEYSYAARSLDMTHRWLKRCIQRFDSTEGHYGYSQTLFPIVQGSTFKDLRVKSAEFIAEQGREGNAIGGLSVGEPAEMMYEMTDLVCGILPKDKPRYLMGVGTPANILENIALGVDMFDCVMPTRNARNGMLFTTQGIMNIANKKWADDFAPIDEELGGYVSTFYSRSYVRHLFHSKEMLGPQIASIHNLTFYLWLVKQARQQILAGTFREWKDKMVKQVMTRL

SEQ ID NO: 56161 - protein, 376 aa, Hymenobacter roseosalivarius
  REGION 1..376: note = tr|A0A1W1V757|A0A1W1V757_9BACT Queuine tRNA-ribosyltransferase OS=Hymenobacter roseosalivarius DSM 11622 OX=645990 GN=tgt PE=3 SV=1
MTFDLVAHDPQTKARAGVVHTAHGSIETPIFMPVGTAGTVKAVQQRDLTHDVQAQIILGNTYHLYLRPGLDILRQAGGLHKFNGWDRPILTDSGGYQVYSLSNTRKIKEEGVKFRSHIDGSQHLFSPEGVMDIQRTIGADIIMAFDECTPWPCEYDYARRSLDMTHRWLTRCIQRFDSTEGHYGYEQTLFPIVQGSTFKDLRIKSAEFIAEQQREGNAIGGLSVGEPAELMYEMTELVCDILPPDKPRYLMGVGTPANILENIALGVDMFDCVMPTRNARNGMLFTTQGIMNITNKKWATDFEPIDAELGGYVSTFYSRSYVRHLFQSQEMLGPQIASIHNLTFYLWLVRQARTHIIAGTFWEWKEKMVKQVMTRL

SEQ ID NO: 56162 - protein, 376 aa, unidentified
  source 1..376: note = Hymenobacter rubripertinctus
  REGION 1..376: note = tr|A0A418QRL4|A0A418QRL4_9BACT Queuine tRNA-ribosyltransferase OS=Hymenobacter rubripertinctus; OX = 2029981 GN=tgt PE=3 SV=1
MTFDLLTTDPHSKARAGVVHTAHGAIETPIFMPVGTAGTVKAVQQRDLKNDIKAQIILGNTYHLYLRPGLEVISKAGGLHKFNGWDGPILTDSGGYQVYSLSGTRKIKEEGVKFRSHIDGSQHLFSPEGVMDIQRTIGADIIMAFDECTPWPCAYDYAARSLDMTHRWLKRCIARFDSTEGHYGYSQTLFPIVQGSTFKDLRIKSAEFVAEQGREGNAIGGLSVGEPAELMYEMTELVCDILPQDKPRYLMGVGTPANILENIALGVDMFDCVMPTRNARNGMLFTTQGIMNIAARKWADDFEPIDAELGGYVSTFYSRSYVRHLFHSKEMLGPQVASIHNLTFYLWLVKQAREQILAGTFREWKEVMVKKLMTRL

SEQ ID NO: 56163 - protein, 376 aa, unidentified
  source 1..376: note = Hymenobacter sedentarius
  REGION 1..376: note = tr|A0A0U3SBY4|A0A0U3SBY4_9BACT Queuine tRNA-ribosyltransferase OS=Hymenobacter sedentarius; OX = 1411621 GN=tgt PE=3 SV=1
MTFDLLAQDPATKARAGCLETAHGAIETPIFMPVGTAGTVKAVSQQTLKEDIQAQIILGNTYHLYLRPGLDVLRAAGGLHQFNGWDRPILTDSGGYQVYSLSNTRKIKEEGVKFRSHIDGSQHLFSPEGVMDIQRVIGADIIMAFDECTPWPCEYDYAARSLDMTHRWLQRCIQRFDSTEGLYGYQQALFPIVQGSTFKDLRIKSAEFIAAQGREGNAIGGLSVGEPAELMYEMTELVCDILPKDKPRYLMGVGTPANILENIALGVDMFDCVMPTRNARNGMLFTTQGIMNVTNKKWANDFTPIDAELGGPASTFYTRAYVRHLFQCQEMLGPQIASAHNLTFYLWLVKEARKQIVAGTFAPWKERMVKQVMTRL

SEQ ID NO: 56164 - protein, 376 aa, Hymenobacter sp.
  REGION 1..376: note = tr|A0A5B7ZW47|A0A5B7ZW47_9BACT Queuine tRNA-ribosyltransferase OS=Hymenobacter sp. 17J68-5; OX = 2502781 GN=tgt PE=3 SV=1
MTFDLVAQDSQTKARVGVVTTAHGAIQTPIFMPVGTVGTVKAVQQRDLVNDVQAQIILGNTYHLYLRPGLDILRQAGGLHKFNGWDRPILTDSGGYQVYSLSGTRKIKEEGVKFRSHIDGSQHLFSPEGVMDIQRTIGADIIMAFDECTPWPCEYDYAKRSLDMTHRWLKRCIARFDSTEGHYGYEQTLFPIVQGSTFKDLRIQSAEFVAEQQREGNAIGGLSVGEPAELMYEMTELVCDILPKDKPRYLMGVGTPANILENIALGVDMFDCVMPTRNARNGMLFTTQGVMNITNKKWATDFEPIDAELGGYVSTFYSRAYVRHLFQSQEMLGPQIASVHNLTFYLWLVKQAREHILAGTFREWKDRMVKQLMTRL

SEQ ID NO: 56165 - protein, 376 aa, Hymenobacter sp.
  REGION 1..376: note = tr|A0A495UZJ8|A0A495UZJ8_9BACT Queuine tRNA-ribosyltransferase OS=Hymenobacter sp. YR204; OX = 2135668 GN=tgt PE=3 SV=1
MTFDLVAQDPHTKARAGVVHTAHGSIETPIFMPVGTVGSVKAVHQRELKEDIKAQIILGNTYHLYLRPGLDVLRQAGGLHKFNGWDRPILTDSGGYQVYSLSKTRKIKEEGVKFRSHIDGSQHLFSPEGVMDIQRVIGADIIMAFDECTPWPCEYDYASRSLDMTHRWLKRCIQRFDSTEGLYGYQQTLFPIVQGSTFKDLRVKSAEFVAEQGREGNAIGGLSVGEPAELMYEMTEIVCDILPKDKPRYLMGVGTPANILENIALGVDMFDCVMPTRNARNGMLFTTQGIINIKNKKWETDFSPIDAELGGYASTFYTKSYLRHLFQSTEYLAGMVASVHNLSFYLWLVGEARQRIQNGTFLEWKERMVKQLMVRL

SEQ ID NO: 56166 - protein, 376 aa, unidentified
  source 1..376: note = Hymenobacter swuensis
  REGION 1..376: note = tr|W8F3E9|W8F3E9_9BACT Queuine tRNA-ribosyltransferase OS=Hymenobacter swuensis DY53; OX = 1227739 GN=tgt PE=3 SV=1
MTFDLVAKDPHSKARAGVVHTDHGAIETPIFMPVGTAGTVKAVQQRDLKDDINAQIILGNTYHLYLRPGLEVIGKAGGLHKFNGWDRPILTDSGGYQVYSLSGTRKIKEEGVKFRSHIDGSQHLFSPEGVMDIQRTIGADIIMAFDECTPWPCEYSYAARSLDMTHRWLKRCITRFDGTEGHYGYSQTLFPIVQGSTFKDLRVKSAEFIAEQGREGNAIGGLSVGEPADMMYEMTEIVCDILPKDKPRYLMGVGTPANILENIALGVDMFDCVMPTRNARNGMLFTTQGIMNIANKKWADDFTPIDEELGGYVSTFYSRSYVRHLFHSKEMLGPQIASIHNLTFYLWLVKQARQQILAGTFREWKDRMVKQVMTRL

SEQ ID NO: 56167 - protein, 376 aa, unidentified
  source 1..376: note = Hymenobacter wooponensis
  REGION 1..376: note = tr|A0A4Z0MTC2|A0A4Z0MTC2_9BACT Queuine tRNA-ribosyltransferase OS=Hymenobacter wooponensis; OX = 1525360 GN=tgt PE=3 SV=1
MTFDLVTQDPHTKARAGVVHTDHGAIETPIFMPVGTAGTVKAVQQRDLKDDIQAQIILGNTYHLYLRPGLDVLSKAGGLHKFNGWDRPILTDSGGYQVYSLSGTRKIKEEGVKFRSHIDGSQHLFSPEGVMDIQRTIGADIIMAFDECTPWPCEYDYAARSLDMTHRWLKRCIQRFDSTEGHYGYSQTLFPIVQGSTFKDLRVKSAEFIAEQGREGNAIGGLSVGEPAEMMYEMTEIVCDILPQDKPRYLMGVGTPANILENIALGVDMFDCVMPTRNARNGMLFTTQGIMNISNKKWAEDFEPIDAELGGYVSTFYSRAYVRHLFQSKEMLGPQIASIHNLSFYLWLVKQARQQILAGTFREWKEKMVKQVMTRL

SEQ ID NO: 56168 - protein, 383 aa, unidentified; identical to SEQ ID NO: 55259
  source 1..383: note = Hyphomicrobiaceae bacterium
  REGION 1..383: note = tr|A0A3R7ST39|A0A3R7ST39_9RHIZ Queuine tRNA-ribosyltransferase OS=Hyphomicrobiaceae bacterium TMED74 OX=1986774 GN=tgt PE=3 SV=1
  VARIANT 7: note = Xaa can be any naturally occurring amino acid
  VARIANT 12: note = Xaa can be any naturally occurring amino acid
  VARIANT 33: note = Xaa can be any naturally occurring amino acid
  VARIANT 48: note = Xaa can be any naturally occurring amino acid
  VARIANT 177..178: note = Xaa can be any naturally occurring amino acid

SEQ ID NO: 56169 - protein, 382 aa, Hyphomicrobium denitrificans
  REGION 1..382: note = tr|D8JQL3|D8JQL3_HYPDA Queuine tRNA-ribosyltransferase OS=Hyphomicrobium denitrificans (strain ATCC 51888 / DSM 1869 / NCIB 11706 / TK 0415); OX = 582899 GN=tgt PE=3 SV =1
MTEHFAFHLKTTDGLARLGEITTSRGVIRTPAFMPVGTVATVKALYPDQVRDAGADILLGNTYHLMLRPGAERIARLGGLHKFMRWDGPILTDSGGFQVMSLGKIRKITEEGVAFQSHLDGSRHMLSPERSIEIQCLLGADIQMQFDECIELPAERREVERAMELSLRWAERSKRAFEAQRAAGGAHAGQALFGIVQGGTDAELRHRSAAALVDMDFPGYAVGGLAVGEGHEAMIATLGQTLPALPTDKPRYLMGVGTPLDLIESVRLGVDMFDCVMPTRNGRHGYAFTWNGALNMRNAKFAEDMSPLDELSSCPGARDYSKAYVHHLIKSGEFLGAMILSWVNTVFYQDLMAAMRDAIAHGRFAEWADETKARITKRPAAP

SEQ ID NO: 56170 - protein, 392 aa, Hyphomicrobium denitrificans
  REGION 1..392: note = tr|N0BE79|N0BE79_9RHIZ Queuine tRNA-ribosyltransferase OS=Hyphomicrobium denitrificans 1NES1 OX=670307 GN=tgt PE=3 SV=1
MKADVESRLSLGEHFAFHLKTTDGLARLGEIVTPRGVISTPAFMPVGTVATVKALYPEQVGDAGADIILGNTYHLMLRPGAERIARLGGLHKFMRWDGPILTDSGGFQVMSLGKIRKITEDGVAFQSHLDGSRHMLSPERSIEIQCLLGSDIQMQFDECIELPAERREVERAMELSLRWAERSKRAFEAQLVAGGAHRGQALFGIVQGGTDPELRRRSAEALVAMDFPGYAVGGLAVGEGHEAMVATLGETLPALPGDKPRYLMGVGTPLDLIESVRLGVDMFDCVMPTRNGRHGYAFTWNGALNMRNAKYAEDSSPIDELSSCPAARDYSRAYVHHLIKSGEFLGAMILSWVNTVFYQELMAAMREAIANGRFAEWAEATKTQIIRQPAAP

SEQ ID NO: 56171 - protein, 396 aa, Hyphomicrobium facile
  REGION 1..396: note = tr|A0A1I7N300|A0A1I7N300_9RHIZ Queuine tRNA-ribosyltransferase OS=Hyphomicrobium facile OX=51670; GN = tgt PE=3 SV=1
MNVATTEHVTEKPSPAFGFRLLTQDGNARRSEIVTPRGVIRTPAFMPVGTVATVKALYPEQVRDAGADILLGNTYHLMLRPGAERVAKLGGLHKFMRWEKPILTDSGGFQVMSLGKIRKITEEGVAFQSHIDGSRHMLSPERSIEIQCLLGSDIQMQFDECIELPAERKEVERAMELSLRWAERSKRAFEMQLASGGAGPGQALFAIVQGGTDVELRRRSAEALVGMDFPGYAVGGLAVGEGHEAMIATLGETLPHLPAGKPRYLMGVGTPLDLIESVRLGVDMFDCVMPTRNGRHGYAFTWNGPVNMRNAKHAEDPSPLDALSSCPAAREYSRAYIHHLIKSGEYLGAMILSWVNTVFYQDLMAAMRSAIDDGRFDAWAAETKARITAAPTAQEP

SEQ ID NO: 56172 - protein, 378 aa, unidentified
  source 1..378: note = Hyphomicrobium nitrativorans
  REGION 1..378: note = tr|V5SF23|V5SF23_9RHIZ Queuine tRNA-ribosyltransferase OS=Hyphomicrobium nitrativorans NL23 OX=1029756 GN=tgt PE=3 SV=1
MTERFSFQLLARDGLARRGEIFTPRGTIRTPAFMPVGTVATVKALYPEQVRDAGADILLGNTYHLMLRPGAERMARLGGLHKFMRWEKPILTDSGGFQVMSLSKIRKINEEGALFQSHLDGSRHMLTPERAIEIQCLLGSDIQMQLDECIELPSERREVERAMELSLRWAERSRRAFEAQQASGAAGQGQAMFGIVQGGTDAELRRRSAEALVAMDLEGYAVGGLAVGEGHDLMLATLDATLPSLPETKPRYLMGVGTPLDLIEAVRRGIDMFDCVLPTRNGRHGLAFTWNGPVNLRNAVHAEDTSPLDEASTCPAARDYSRAYLHHLIRSGEYLGAMLLSWVNTAFYQELMASMRAAIEEGRFDAWAEETKARIARK

SEQ ID NO: 56173 - protein, 382 aa, Hyphomicrobium sp.
  REGION 1..382: note = tr|A0A258L3S0|A0A258L3S0_9RHIZ Queuine tRNA-ribosyltransferase OS=Hyphomicrobium sp. 32-62-53; OX = 1970390 GN=tgt PE=3 SV=1
MDQTVQTFGYTRLGQDGAARLGEIRTPRGVIRTPAFMPVGTVGTVKALYPEQVKGAGADILLGNTYHLMLRPGAERIARLGGLHKFMRWDGPILTDSGGFQVMSLATIRKITEEGAQFQSHIDGSRHMLTPERSIEIQCLLGSDIQMQFDECIELPAERSEVERAMALSLRWAERSKRAFEAQVAAGGATRGQALFAIVQGGVDSELRQRSARALVEMDFPGYAVGGLAVGEGHEAMVATLEETLPHLPADKPRYLMGVGTPLDLIESVRRGIDMFDCVMPTRNGRHGTAFTWDGRVNLHNAKHAEDLAPLDPESTCPAARDYSRAYLHHLVKSGEYLGAMILSWVNTVFYQDLMAAMRAAIAEGRFDAWAEATKARLERKG

SEQ ID NO: 56174 - protein, 400 aa, Hyphomicrobium sp.
  REGION 1..400: note = tr|F8J5W6|F8J5W6_HYPSM Queuine tRNA-ribosyltransferase OS=Hyphomicrobium sp. (strain MC1); OX = 717785 GN=tgt PE=3 SV=1
MQTTKVDTPSSEVPEGTSAFEFRKLAQDGKARLGEIHTPRGVIRTPAFMPVGTVATVKALYPEQVRDAGADILLGNTYHLMLRPGAERVAKLGGLHKFMRWEKPILTDSGGFQVMSLGKIRKITEEGVAFQSHIDGSRHMLSPERSIEIQCLLGSDIQMQFDECIELPAERKEVERAMKLSLRWAERSKRAFEMQLASGGAGPGQALFAIVQGGTDIPLRHRSADALVAMDFPGYAVGGLAVGEGHEAMIATLGETLPHLPSEKPRYLMGVGTPLDLIESVRLGVDMFDCVMPTRNGRHGYAFTWGGPLNLRNAKFAEDMAPLDEFSSCPAAKDFSRAYVHHLIKSGEFLGAMILSWVNTVFYQDLMAAMRAAIAEGRFDDWAAETKARIIASPQSAPAP

SEQ ID NO: 56175 - protein, 388 aa, Hyphomicrobium sulfonivorans
  REGION 1..388: note = tr|A0A109BIF8|A0A109BIF8_HYPSL Queuine tRNA-ribosyltransferase OS=Hyphomicrobium sulfonivorans; OX = 121290 GN=tgt PE=3 SV=1
MTPSETKEHSPMQQQAQTFGYRLLKQDGAARLGEVVTPRGIVRTPAFMPVGTVATVKALTFDQVKQAGADIVLANTYHLMLRPGAERVARLGGLHNFMRWDGPILTDSGGFQVMSLSKIRKINEEGVRFASHIDGSRHLLTPERAVEIQCLLGSDIQMQLDECISLPAERKETERAMELSLRWAARAQRAFSDLAKPGQALFGIVQGGVDAELRQRSAEALVAMDLPGYAVGGLAVGEGQELMLRTLDGVLPHLPSHKPRYLMGVGTPSDLIKSVARGVDMFDCVMPTRNGRHGLAFTWNGKVNLRNARHADDPAPLDEQSSCPGARDYSRAYLHHLVRSGEYLGAMLLSWVNTTFYQELMAAMRLAIAEGRFNTWAEETLDRIERTN

SEQ ID NO: 56176 - protein, 383 aa, unidentified
  source 1..383: note = Hyphomonadaceae bacterium
  REGION 1..383: note = tr|A0A0F2QEZ3|A0A0F2QEZ3_9RHOB Queuine tRNA-ribosyltransferase OS=Hyphomonadaceae bacterium BRH_c29 OX=1629720 GN=tgt PE=3 SV=1
MTTFPFEIKAREGKARTGVLKTTRGEIRTPAFMPVGTAGTVKALYMDQVKEAGADIILGNTYHLMLRPGAERVQRLGGLHKFAHWDGPMLTDSGGFQVWSLAQLRKMDADGVTFQSHIDGSTHRLTPARSIEIQADLLGADISMQLDECTNFPCTHEEAEQSLELSLRWGQRSLEAFGAREAQTLFGIIQGSNFADLRERSAKGVVSQGFGGIALGGLAVGEGHAQMCATIDMTVPHLPDALPRYVMGVGKPIDLVESVARGIDMFDCVLPTRSGRHGQAWTWAGPINVKNAKFAEDLSPLDAAVDCPASRDYPLAYYHHLFRAGEYLGPMLLSWHNTAFFQALMQEIRTSIAEGRFEALRAKLQTAWASTKSAPRTDEASAD

SEQ ID NO: 56177 - protein, 369 aa, unidentified
  source 1..369: note = Hyphomonadaceae bacterium
  REGION 1..369: note = tr|A0A354CH35|A0A354CH35_9RHOB Queuine tRNA-ribosyltransferase OS=Hyphomonadaceae bacterium; OX = 2026748 GN=tgt PE=3 SV=1
MTDFPFEIHATQDRARTGKLVTPRGEIRTPAFMPVGTAATVKALYTDQVADAGADILLGNTYHLMLRPGSERVHRLGGLHKFMRWDKPILTDSGGFQVWSLAGLRKMKEEGVSFKSHIDGSSHFLSPERSIEIQADHLGADISMQLDECTEYPATHEQAKSSMEMSIRWGARSKAAFGERDSQTLFGIVQGSDFEDLRQQSAESLQEIGFGGYAIGGLAVGEGHNRMVEVIDFTEPHLPRERPRYLMGVGKPIDILEAVAHGVDMFDCVLPTRSGRHGQAWTWDGPINLKNARFAEDDTPIDPSSSCPASRDYSKAYLNHLFKAGEYLAPMLLSWHNTAFFQEFMQAMRTAIANGTFNELRADLKSRWT

SEQ ID NO: 56178 - protein, 383 aa, Hyphomonas adhaerens
  REGION 1..383: note = tr|A0A069E246|A0A069E246_9RHOB Queuine tRNA-ribosyltransferase OS=Hyphomonas adhaerens MHS-3; OX = 1280949 GN=tgt PE=3 SV=1
MTTFPFEINAREGKARTGVLKTPRGDIRTPAFMPVGTAGTVKALYMDQVKGAGADIILGNTYHLMLRPGAERVNRLGGLHKFAHWDGPMLTDSGGFQVWSLAQLRKMDADGVTFQSHIDGSTHRLDPARSIEIQADLLGADISMQLDECTNFPCTHEEAEESLELSLRWGERSLDAFGERDTQTLFGIIQGSNFADLRERSAKGVVSQGFGGIALGGLAVGEGHEQMCATIDMTVPHLPDAVPRYVMGVGKPIDLVESVARGIDMFDCVLPTRSGRHGQAWTWAGPVNVKNARFAEDLSPLDEAVDCPASRDYPRAYYHHLFRAGEYLGPMLLSWHNTAFFQALMQEIRASIAEGRFEALRAHLSEAWASTKSKPRTGEDTAS

SEQ ID NO: 56179 - protein, 380 aa, unidentified
  source 1..380: note = Hyphomonas atlantica
  REGION 1..380: note = tr|A0A059E0M2|A0A059E0M2_9RHOB Queuine tRNA-ribosyltransferase OS=Hyphomonas atlantica OX=1280948; GN = tgt PE=3 SV=1
MAVFPFEISATEGKARTGVLKTPRGDIRTPAFMPVGTAGTVKALYMDQVKDAGADIILGNTYHLMLRPGAERVQRLGGLHAFAHWNGPMLTDSGGFQVWSLAQLRKMDPDGVTFQSHIDGSTHRLTPARSIEIQADLLGADISMQLDECTDYPCTHEEAERSLDLSLDWGQRSLDAFGDRDAQTLFGIIQGSNYADLREKSAKGVVSQGFGGLALGGLAVGEGHDQMCATIDMTVPHLPDHLPRYVMGVGKPIDLVESVARGIDMFDCVLPTRSGRHGQAWTWDGPVNVKNARFAEDVSPLDEAVNCPASQDYSRAYYHHLFKAGEYLGPMLLSWHNTAFFQALMQEIRASIAEGRFEALRTRLQTAWASTKSSPKDERA

SEQ ID NO: 56180 - protein, 380 aa, unidentified
  source 1..380: note = Hyphomonas beringensis
  REGION 1..380: note = tr|A0A062UG46|A0A062UG46_9RHOB Queuine tRNA-ribosyltransferase OS=Hyphomonas beringensis; OX = 1280946 GN=tgt PE=3 SV=1
MATFPFEIKATEGKARAGVLKTPRGDIRTPAFMPVGTAGTVKALYMDQVKDAGADIILGNTYHLMLRPGAERVQRLGGLHAFAHWDGPMLTDSGGFQVWSLAQLRKMDPDGVTFQSHIDGSTHRLTPARSIEIQADLLGADISMQLDECTDYPCSHEEAERSLDLSLDWGQRSLEAFGDRDSQTLFGIIQGSNYADLREKSAKGVVSQGFGGIALGGLAVGEGHEQMCATIDLTVPHLPDHLPRYVMGVGKPIDLVESVARGIDMFDCVLPTRSGRHGQAWTWDGPVNVKNAKFAEDLSPLDEAVNCPASQDYSRAYYHHLFKAGEYLGPMLLSWHNTAFFQALMQEIRDSIAEGRFEALRSRLQTAWASTKSSPKDERA

SEQ ID NO: 56181 - protein, 381 aa, unidentified
  source 1..381: note = Hyphomonas chukchiensis
  REGION 1..381: note = tr|A0A062UEV1|A0A062UEV1_9RHOB Queuine tRNA-ribosyltransferase OS=Hyphomonas chukchiensis; OX = 1280947 GN=tgt PE=3 SV=1
MATFPFQIKATEGAARTGTLTTPRGEIRTPAFMPVGTAGTVKALYMDQVKSAGADIILGNTYHLMLRPGAERVKRLGGLHSFAHWDGPMLTDSGGFQVWSLAQLRKMDANGVTFQSHIDGSTHRLTPARSIEIQADLLGADISMQLDECTNFPCTHKEAERSLTLSLDWGQRSLDAFGDRDSQTLFGIIQGSNFADLREQSAKGVVAQGFGGIALGGLAVGEGHEQMCATIDMTVPHLPNHLPRYVMGVGKPIDLVESVARGIDMFDCVLPTRSGRHGQAWTWAGPVNVKNAQFAEDLSPLDEGVDCPASSDYSRAYYHHLFKAGEYLGPMLLSWHNTAFFQSLMAEIRLSILEGRFEALRSELAVRWAATKSSPKAEPEA

SEQ ID NO: 56182 - protein, 379 aa, Hyphomonas hirschiana
  REGION 1..379: note = tr|A0A059FYW2|A0A059FYW2_9RHOB Queuine tRNA-ribosyltransferase OS=Hyphomonas hirschiana VP5; OX = 1280951 GN=tgt PE=3 SV=1
MATFPFEISAREGKARTGRLKTPRGDIRTPAFMPVGTAGTVKALYMDQVQGAGADIILGNTYHLMLRPGAERVQRLGGLHKFSGWSGPMLTDSGGFQVWSLAQLRKMDADGVTFQSHIDGSTHRLTPARSIEIQADLLGADISMQLDECTNFPCTHEEAERSLALSLKWGERSLDAFGARDAQTLFGIIQGSNFPDLRERSAKGVTAQGFGGIALGGLAVGEGHDQMCATIDMTMPHLPDHMPRYVMGVGKPIDLVESVARGIDMFDCVLPTRSGRHGQAWTWDGPLNLNNAKFAEDTSPLDPVINCPASQVYSRAYLHHLFKAGEYLGPMLLSWHNTAFFQALMAEMRAAIAEGRFEALRATLSAGWENTKSKPKAES

SEQ ID NO: 56183 - protein, 383 aa, Hyphomonas jannaschiana
  REGION 1..383: note = tr|A0A059FAQ9|A0A059FAQ9_9RHOB Queuine tRNA-ribosyltransferase OS=Hyphomonas jannaschiana VP2; OX = 1280952 GN=tgt PE=3 SV=1
MTTFPFEIKAREGKARTGVLKTPRGDIRTPAFMPVGTAGTVKALYMDQVKGAGADIILGNTYHLMLRPGAERVSRLGGLHKFAHWDGPMLTDSGGFQVWSLAQLRKMDADGVTFQSHIDGSTHRLDPARSIEIQADLLGADISMQLDECTDYPCTHEQAEESLELSLRWGERSLDAFGERDAQTLFGIIQGSNFADLRERSAKGVVSQGFGGIALGGLAVGEGHAQMCETIDMTVPHLPDGMPRYVMGVGKPIDLVESVARGIDMFDCVLPTRSGRHGQAWTWAGPVNVKNAKFAEDLSPLDDAVDCPASRDYPRAYYHHLFRAGEYLGPMLLSWHNTAFFQALMQEIRTSIAEGRFETLRARLSDAWASTKSKPRASEGEPG

SEQ ID NO: 56184 - protein, 379 aa, Hyphomonas johnsonii
  REGION 1..379: note = tr|A0A059FTK9|A0A059FTK9_9RHOB Queuine tRNA-ribosyltransferase OS=Hyphomonas johnsonii MHS-2; OX = 1280950 GN=tgt PE=3 SV=1
MAIFPFDIQAREGKTRTGVLHTPRGEIRTPAFMPVGTTGTVKALYMDQVKAAGADIILGNTYHLMLRPGAERVKRLGGLHKFSGWSGPMLTDSGGFQVWSLAQLRKMDADGVTFQSHIDGSTHRLTPARSIEIQADLLGADISMQLDECTNFPCTHEEAERSLTLSLDWGQRSLDAFGDRESQTLFGIVQGSNFADLRERSAKGVVGQGFGGIALGGLAVGEGHEQMCATIDMTIPHLPDDLPRYVMGVGKPIDLVESVARGIDMFDCVLPTRSGRHGQAWTWAGPVNVKNAQFAEDLSPIDAAVDCPASRDYSRAYYHHLFKAGEYLGPMLLSWHNTAFFQALMAEIRLSIREGRFEALRARLTADWASTKSSPKAEA

SEQ ID NO: 56185 - protein, 379 aa, Hyphomonas neptunium; identical to SEQ ID NO: 56182
  REGION 1..379: note = tr|Q0C343|Q0C343_HYPNA Queuine tRNA-ribosyltransferase OS=Hyphomonas neptunium (strain ATCC 15444) OX=228405 GN=tgt PE=3 SV=1

SEQ ID NO: 56186 - protein, 381 aa, Hyphomonas oceanitis
  REGION 1..381: note = tr|A0A059G2X6|A0A059G2X6_9RHOB Queuine tRNA-ribosyltransferase OS=Hyphomonas oceanitis SCH89; OX = 1280953 GN=tgt PE=3 SV=1
MATFPFQIKATEGAARTGTLTTPRGEIRTPAFMPVGTAGTVKALYMDQVKSAGADIILGNTYHLMLRPGAERVKRLGGLHAFSGWKGPMLTDSGGFQVWSLAQLRKMDADGVTFQSHIDGSTHRLTPARSIEIQADLLGADISMQLDECTNFPCTHKEAERSLTLSLDWGQRSLDAFGDRDSQTLFGIIQGSNFADLREQSAKGVVAQGFGGIALGGLAVGEGHEQMCATIDMTVPHLPGHLPRYVMGVGKPIDLVESVARGIDMFDCVLPTRSGRHGQAWTWAGPVNVKNAQFAEDLSPLDEGVDCPASRDYSRAYYHHLFKAGEYLGPMLLSWHNTAFFQSLMAEIRLSILEGRFEALRSELAVRWAGTKSSPKAEPEA

SEQ ID NO: 56187 - protein, 379 aa, Hyphomonas polymorpha
  REGION 1..379: note = tr|A0A062VJP4|A0A062VJP4_9RHOB Queuine tRNA-ribosyltransferase OS=Hyphomonas polymorpha PS728; OX = 1280954 GN=tgt PE=3 SV=1
MTTFPFEISVREGKARTGRLKTPRGDIRTPAFMPVGTAGTVKALYMDQVKGAGADIILGNTYHLMLRPGAERVKSLGGLHKFSGWRGPMLTDSGGFQVWSLAQLRKMDGDGVTFQSHIDGSTHRLTPARSIEIQADLLGADISMQLDECTNFPCTHEEAARSLELSLRWGERSLDAFGARDSQTLFGIIQGSNFPDLRERSAKGVAAQGFGGIALGGLAVGEGHAQMCATIDMTVPHLPDHMPRYVMGVGKPIDLVESVARGIDMFDCVLPTRSGRHGQAWTWDGPLNLNNAKFAEDMGPLDEAVDCPASRDYTRAYLHHLFKAGEYLGPMLLSWHNTAFFQALMAEMRAAIAEGRFEALRAELSARWESTKSKPKAEG

SEQ ID NO: 56188 - protein, 381 aa, Hyphomonas sp.
  REGION 1..381: note = tr|A0A1Z9XZ77|A0A1Z9XZ77_9RHOB Queuine tRNA-ribosyltransferase OS=Hyphomonas sp. TMED17; OX = 1986605 GN=tgt PE=3 SV=1
MVKFPFKIRASSGMARRAVLETPRGDIQTPAFMPVGTAATVKALYMDQVKSAGADIILGNTYHLMLRPGAERIHRLGGLHKFAGWDGPILTDSGGFQVWSLSQLRKMDADGVTFRSHLDGSQYRLTPARSIEIQAELLGADISMQLDECTNWPCTYAEAEASMALSLDWGQRSIDAFGDRPDQTLFGILQGSTYEDLRKRSAAGVIRQGFGGIAIGGLAVGEGHDAMCATLDVTIPELPADLPRYVMGVGKPIDLVEAVARGVDMFDCVLPTRTGRHGQAWTWDGPINLKNAKFAEDLSPLEPELDCPASQNYSRAYIHHLIRSSELLGSMLLSWHNTAFFQALMAQLRLSISDGSFPQLRETLSTRWAATKSPPKNSDSI

SEQ ID NO: 56189 - protein, 383 aa, Hyphomonas sp.
  REGION 1..383: note = tr|A0A059DND1|A0A059DND1_9RHOB Queuine tRNA-ribosyltransferase OS=Hyphomonas sp. CY54-11-8; OX = 1280944 GN=tgt PE=3 SV=1
MTTFPFEIKAREGKARTGLLKTPRGDIRTPAFMPVGTAGTVKALYMNQVKEAGADIILGNTYHLMLRPGAERVHRLGGLHKFAHWDGPMLTDSGGFQVWSLAQLRKMDADGVTFQSHIDGSTHRLTPARSIEIQADLLGADISMQLDECTDYPCTHEAAEESLELSLRWGERSLEAFGERDTQTLFGIIQGSNFADLRERSAKGVVSQGFGGIALGGLAVGEGHAQMCETIDMTVPHLPDAVPRYVMGVGKPIDLIESVARGIDMFDCVLPTRSGRHGQAWTWAGPINVKNAKFAEDLSPLDETVDCPASRDYPKAYYHHLFRAGEYLGPMLLSWHNTAFFQALMQEIRAAIAEGRFEALRTRLQTAWASTKSRPRAEEGAEG

SEQ ID NO: 56190 - protein, 385 aa, unidentified
  source 1..385: note = Hypnocyclicus thermotrophus
  REGION 1..385: note = tr|A0A4R7L295|A0A4R7L295_9FUSO Queuine tRNA-ribosyltransferase OS=Hypnocyclicus thermotrophus; OX = 1627895 GN=tgt PE=3 SV=1
MLPVKYKLEKKDGKARAGEINTPHGNIKTPVFMPVGTQATVKTMTPEELEKINAEIILGNTYHLYLRPTDEIVAKFGGLHKFMNWNKPILTDSGGFQVFSLGALRKITEEGVNFRSHIDGSKHFISPEKSISIQNNLGSDIMMAFDECPPGLADREYMKDSLERTTRWAKRCIKANKNPDRQGLFAIVQGGIYEDLRDQSLNELTEMDDHFSGYAIGGLAVGEPREDMYRILDYITPKLPEEKPRYLMGVGEPLDMLEAVANGVDMMDCVQPSRIGRHGTVFTKYGRLVIKNASYSEDTRPLDEDCDCYVCKNYTRGYIRHLFKTGEILGQRLATYHNLYFLIKMMNNAREAILNNNFYEFKKEFENNYTQGKKSEWIKPKKFKD

SEQ ID NO: 56191 - protein, 376 aa, Hyunsoonleella jejuensis
  REGION 1..376: note = tr|A0A1H9DWQ5|A0A1H9DWQ5_9FLAO Queuine tRNA-ribosyltransferase OS=Hyunsoonleella jejuensis; OX = 419940 GN=tgt PE=3 SV=1
MKFDLKKKDVQTKARAGQITTDHGVIETPIFMPVGTVGSVKGVHQRELKNDINPDIILGNTYHLYLRPQTYILEKAGGLHKFMNWDRNILTDSGGYQVYSLSANRKIKEEGVKFKSHIDGSYHTFTPENVMEIQRTIGADIIMAFDECTPYPCDYNYAKRSMHMTHRWLDRCITHLEKTPLKYDYNQAFFPIVQGSTYKDLRVQSAEYIANAGAVGNAIGGLSVGEPAEEMYAMTEVVCNVLPEDKPRYLMGVGTPINILENIALGIDMFDCVMPTRNARNGMLFTAHGTINIKNKKWEDDFSPIDEMAITFVDTEYSKAYLKHLFSVNELLGKQIATIHNLGFYLWLVREARKHILAGDFSEWKNIMVKQMDKRL

SEQ ID NO: 56192 - protein, 376 aa, unidentified
  source 1..376: note = Hyunsoonleella pacifica
  REGION 1..376: note = tr|A0A4Q9FJ69|A0A4Q9FJ69_9FLAO Queuine tRNA-ribosyltransferase OS=Hyunsoonleella pacifica; OX = 1080224 GN=tgt PE=3 SV=1
MKFDLKHKDVNSKARGGKITTDHGIIETPIFMPVGTVATVKGVHQRELKNDINPDVILGNTYHLYLRPQTNIIEKAGGLHKFMNWDRNILTDSGGYQVYSLSANRKIKEEGVKFKSHIDGSYHTFTPENVMEIQRTIGADIIMAFDECTPYPCDYNYAKRSMHMTHRWLDRCIKHLEKTPLKYDYNQAFFPIVQGSTYKDLRIQSAEYIANAGAVGNAIGGLSVGEPAEEMYAMTEVVCNVLPEDKPRYLMGVGTPINILENIALGIDMFDCVMPTRNARNGMLFTAHGTINIKNKKWEDDFSPIDGMGITFVDTEYSKAYLRHLFTVNELLGKQIATIHNLGFYLWLVREARKHILAGDFSEWKNIMVKQMDKRL

SEQ ID NO: 56193 - protein, 376 aa, Hyunsoonleella sp.
  REGION 1..376: note = tr|A0A4Q9FF63|A0A4Q9FF63_9FLAO Queuine tRNA-ribosyltransferase OS=Hyunsoonleella sp. T58; OX = 2527939 GN=tgt PE=3 SV=1
MKFDLKQTDSQSKARAGTITTDHGVIETPIFMPVGTVATVKGVHQRELKNDINPDIILGNTYHLYLRPQTDIIEKAGGLHKFMNWDRNILTDSGGYQVYSLSANRKIKEEGVKFKSHIDGSHHVFTPENVMEIQRTIGADIIMAFDECAPYPCDYNYAKRSMHMTHRWLDRCINHLEKTPLKYDYSQAFFPIVQGSTYKDLRIQSAEYIANAGALGNAIGGLSVGEPAEEMYAMTEVVCNVLPEDKPRYLMGVGTPINILENIALGIDMFDCVMPTRNARNGMLFTAHGTINIKNKKWEDDFSNIDDMAITFVDTEYSKAYLRHLFTVNELLGKQIATIHNLGFYLWLVREARKHILAGDFGEWKNKMVKQMDKRL

SEQ ID NO: 56194 - protein, 384 aa, unidentified
  source 1..384: note = Ichthyenterobacterium magnum
  REGION 1..384: note = tr|A0A420DGE0|A0A420DGE0_9FLAO Queuine tRNA-ribosyltransferase OS=Ichthyenterobacterium magnum; OX = 1230530 GN=tgt PE=3 SV=1
MPTDDFLNMTFELKNKDTQSSARAGVITTDHGKIETPIFMPVGTVASVKGVHQRELKNDINPDIILGNTYHLYLRPQTPILEQAGGLHKFMNWDRNILTDSGGYQVYSLSANRKIKEEGVKFKSHIDGSYHTFTPENVMEIQRSIGADIIMAFDECTPYPCDYNYAKRSMHMTHRWLERCLTHLDKTPFKYDYEQTFFPIVQGSTYKDLRKQSAEYIANAGAQGNAIGGLSVGEPAEEMYAMTEVVTDILPEDKPRYLMGVGTPINILENIALGVDMFDCVMPTRNARNGMLFTAHGTINMKNAKWKDDFSPIDDMGITFVDTEYSKAYLKHLFSVNELLGKQIATIHNLGFYMWLVREARKHILAGDFRTWKDMMVKQMDKRL

SEQ ID NO: 56195 - protein, 386 aa, unidentified
  source 1..386: note = Ideonella sakaiensis
  REGION 1..386: note = tr|A0A0K8P2R3|A0A0K8P2R3_IDESA Queuine tRNA-ribosyltransferase OS=Ideonella sakaiensis (strain NBRC 110686 / TISTR 2288 / 201-F6) OX=1547922 GN=tgt PE=3; SV = 1
MLQFEVLATEGQARRGRLALRRGVVETPIFMPVGTYGTVKGVMPRSLEEMGAQIILGNTFHLWMRPGLDVLRQFGGLHRFEGWTRPILTDSGGFQVWSLGEMRKISEEGVRFASPVNGDRLFLTPELSMQIQQVLDSDIVMQFDECTPYENGGHVTTEAEARASMELSLRWARRCLDEFQRGGNPNALFGIVQGGMFTALRDASLEGLAALDLPGYAIGGLSVGEPKAEMLRVLEHTAPRLPAHKPRYLMGVGTPEDLVAGVAAGIDMFDCVMPTRNARNGHLFTRFGDLKLRNARHKADERPLDPTCGCYTCRGHTDALGRTHGGFSRAYLHHLDRCGEMLGPMLGTIHNLHYYLNLMREIREALEGGRFALFAAQFHADRARGV

SEQ ID NO: 56196 - protein, 375 aa, Ideonella sp.
  REGION 1..375: note = tr|A0A437RS06|A0A437RS06_9BURK Queuine tRNA-ribosyltransferase OS=Ideonella sp. KYPY4 OX=1862385; GN = tgt PE=3 SV=1
MLKFELHKTHGHARRGTLTLNHGTVETPVFMPVGTYGTVKGVLPRSLEEMGAQIILGNTFHLWMRPGLDVIGKFGGLHRFEGWSKPMLTDSGGFQVWSLGEMRKISEEGVKFASPVNGDKLFLTPEVSMQIQTVLNSDIVMQFDECTPYEVKGHLTTEAEARKSMELSLRWAKRSQAEFARLENPNALFGIVQGGMFENLRQESLDALVAMDLPGYAVGGVSVGEPKDEMLRIMAHTPHRLPAHKPRYLMGVGTPEDLVEGVSQGVDMFDCVMPTRNARNGHLFTRFGDLKVRNARHRDSEAPVDETCTCYTCKNFSRAYLHHLDRCGEMLGPMLASIHNLHYYVNLMREVRQALDEDRFDSWRVQFHADRARGV

SEQ ID NO: 56197 - protein, 340 aa, Ideonella sp.
  REGION 1..340: note = tr|A0A523Q6G1|A0A523Q6G1_9BURK Queuine tRNA-ribosyltransferase OS=Ideonella sp. MAG2 OX=2083017; GN = tgt PE=3 SV=1
MLPQSLYDMGAQIILGNTFHLWMRPGLDIMQSFGGLHGFERWDKPILTDSGGFQVWSLGEMRKISEEGVKFASPVNGDKLFLTPEVSMQIQTVLNSDIVMQFDECTPYETKGHLTTEKEARSSMELSRRWAKRCITEFERLQNPNALFGIVQGGMFENLREESLQALVEMDLPGYAIGGVSVGEPKDEMLRIMAHTPHRLPAHKPRYLMGVGTPEDLVEGVRCGVDMFDCVMPTRNARNGHLFTRFGDLKIRNARHKSDHRPIDESCGCYTCKGSGQHGGFSRAYLHHLDRCGEMLGPMLATIHNLHYYLNLMREVRESLDAGRFAEFRAQFAADRARGV

SEQ ID NO: 56198 - protein, 373 aa, Idiomarina abyssalis
  REGION 1..373: note = tr|A0A370QAD2|A0A370QAD2_9GAMM Queuine tRNA-ribosyltransferase OS=Idiomarina abyssalis OX=86102; GN = tgt PE=3 SV=1
MTMKFELDKTSGRARRGRMVFERGTVETPAFMPVGTLGTVKGMTPEEVKDTGAQICLGNTFHLMLRPGTQIIQQHGDLHDFMNWDKPILTDSGGFQVFSLGELRKITEEGVTFRSPINGEKILLTPEKSMQVQRELGSDIVMIFDECTPFPATQAEARSSMELSLRWAERSKQEHGESKAALFGIIQGGMYEELRDISLKGLTDIGFDGYAIGGLSVGEPKEDMMRILEHTAPQMPEQKPRYLMGVGKPEDLVEAVRRGIDMFDCVMPTRNARNGHLFISTGVVKIRNAVHRTDTSPLDENCDCYTCKNYSRAYLHHLDRTNEMLGSRLNTIHNLRFYQKVMSDMRDALDAGTFDDYVKEFYRLRDQSVPALD

SEQ ID NO: 56199 - protein, 371 aa, unidentified
  source 1..371: note = Idiomarina aquatica
  REGION 1..371: note = tr|A0A4R6P495|A0A4R6P495_9GAMM Queuine tRNA-ribosyltransferase OS=Idiomarina aquatica OX=1327752; GN = tgt PE=3 SV=1
MKFELDKTHGRARRGRMKFERGTVETPAFMPVGTLGTVKGMTPEEVEQTGAQICLGNTFHLMLRPGTSIIQQHGDLHDFMHWNKPILTDSGGFQVFSLGELRKITEEGVTFRSPINGEKILLTPEKSMQVQRELGSDIVMIFDECTPFPATQSEARKSMELSLRWAERSKQAHQGNQAALFGIIQGGMYEELRDISLKGLTDIGFDGYAIGGLSVGEPKEDMMRILEHTAPQMPEQKPRYLMGVGKPEDLVEAVRRGVDMFDCVMPTRNARNGHLFISTGVVKIRNAVHRTDTGPLDSDCDCYTCKNYSRAYLHHLDRTNEILGARLNTIHNLRYYQRVMSDMREALDNDSFDEFVSGFYAARDQQVPPLD

SEQ ID NO: 56200 - protein, 371 aa, unidentified
  source 1..371: note = Idiomarina aquimaris
  REGION 1..371: note = tr|A0A432XEZ2|A0A432XEZ2_9GAMM Queuine tRNA-ribosyltransferase OS=Idiomarina aquimaris OX=641841; GN = tgt PE=3 SV=1
MKFELLNTCGKARRGRMIFERGVVETPAFMPVGTAGTVKGMTPEEVKATGAHICLGNTFHLMLRPGTQIIKQHGDLHDFMNWDKPILTDSGGFQVFSLGELRKITEEGVTFRSPINGEKILLTPEKSMEVQRDLGSDIVMIFDECTPYPATQAEARSSMELSLRWAERSKQAHGDNPSALFGIIQGGMYEELRTISLDGLTKIGFDGYAIGGLSVGEPKEDMMRVLDHIAPQMPEDKPRYLMGVGKPEDLVEAVRRGVDMFDCVMPTRNARNGHLFVSSGVVKIRNAVHRTDTGPLDPECDCYTCQNYSRAYLHHLDRSNEMLGGRLNTIHNLHFYQKVMQDLRDAIAADRLEAHVAEFYAKRGLEVPALA

SEQ ID NO: 56201 - protein, 371 aa, unidentified
  source 1..371: note = Idiomarina atlantica
  REGION 1..371: note = tr|A0A094L1H6|A0A094L1H6_9GAMM Queuine tRNA-ribosyltransferase OS=Idiomarina atlantica OX=1517416; GN = tgt PE=3 SV=1
MKFELLNTCGKARRGRMIFDRGVVETPAFMPVGTAGTVKGLTPEEVKATGAHICLGNTFHLMLRPGTQIIKQHGDLHDFMNWDKPILTDSGGFQVFSLGELRKITEEGVTFRSPINGEKILLTPEKSMEVQRDLGSDIVMIFDECTPYPATQAEARSSMELSLRWAERSKQAHGDNPSALFGIIQGGMYEELRTISLEGLEQIGFDGYAIGGLSVGEPKDDMMRILDHIAPQMPVDKPRYLMGVGKPEDLVEAVRRGVDMFDCVMPTRNARNGHLFISTGVVKIRNAVHRTDTGPLDPECDCYTCQNYSRAYLHHLDRSNEMLGGRLNTIHNLHFYQKVMQDLRAAIEADRLEEHVAEFYAKRGLEVPALK

SEQ ID NO: 56202 - protein, 190 aa, Idiomarina baltica
  REGION 1..190: note = tr|A0A348WQN0|A0A348WQN0_9GAMM tRNA guanosine(34) transglycosylase Tgt (Fragment) OS=Idiomarina baltica; OX = 190892 GN=tgt PE=4 SV=1
LLTPEKSMQVQRELGSDIVMIFDECTPYPATQAEARKSMELSLRWAQRSKAAHEGNDAALFGIIQGGMYEELRDISLEGLTDIGFDGYAVGGLSVGEPKEDMMRILEHTAPKMPEHKPRYLMGVGKPEDLVESVRRGIDMFDCVMPTRNARNGHLFVSTGVIKIRNAVHRNDTSPLDEQCDCYTCKNYSR

SEQ ID NO: 56203 - protein, 88 aa, Idiomarina baltica
  REGION 1..88: note = tr|A0A348WQM9|A0A348WQM9_9GAMM tRNA guanosine(34) transglycosylase Tgt (Fragment) OS=Idiomarina baltica; OX = 190892 GN=tgt PE=4 SV=1
MKFELDKTQGRARRGRMVFERGTVETPAFMPVGTLGTIKGMTPEEVEATGAQICLGNTFHLMLRPGTSVIQQHGDLHDFMNWDKPILT

SEQ ID NO: 56204 - protein, 371 aa, Idiomarina donghaiensis
  REGION 1..371: note = tr|A0A432XFK5|A0A432XFK5_9GAMM Queuine tRNA-ribosyltransferase OS=Idiomarina donghaiensis; OX = 519452 GN=tgt PE=3 SV=1
MKFELLKTSGKARRGRMVFDRGVVETPAFMPVGTAGTVKGMTPEEVKATGAQICLGNTFHLMLRPGTSIIKQHGDLHDFMNWDKPILTDSGGFQVFSLGELRKITEEGVTFRSPINGEKILLTPEKSMEVQRDLGSDIVMIFDECTPYPATQAEARSSMELSLRWAERSKAAHGDNPSALFGIIQGGMYEELRTISLEGLTNIGFDGYAIGGLSVGEPKEDMMRVLDYITPQMPTDKPRYLMGVGKPEDLVEAVRRGVDMFDCVMPTRNARNGHLFVSNGVVKIRNAVHRTDTGPLDPECDCYTCQNYSRAYLHHLDRSNEMLGGRLNTIHNLHFYQKVMQDLRDAIENDRLEDHVAEFYAKRGLEVPALK

SEQ ID NO: 56205 - protein, 371 aa, Idiomarina fontislapidosi
  REGION 1..371: note = tr|A0A432Y8T3|A0A432Y8T3_9GAMM Queuine tRNA-ribosyltransferase OS=Idiomarina fontislapidosi; OX = 263723 GN=tgt PE=3 SV=1
MKFELDKTYGRARRGRMVFERGTVETPAFMPVGTLGTIKGMTPEEVEATGAQICLGNTFHLMLRPGTSVIQQHGDLHDFMNWDKPILTDSGGFQVFSLGELRKIDEEGVTFRSPINGEKILLTPEKSMQVQRELGSDIVMIFDECTPYPATQAEARKSMELSLRWAQRSKDAHEGNDAALFGIIQGGMYEELRDISLKGLTDIGFDGYAVGGLSVGEPKEDMMRILEHTAPQMPEQKPRYLMGVGKPEDLVEAVRRGIDMFDCVMPTRNARNGHLFVSNGVIKIRNAVHRNDTSPLDEQCDCYTCKNYSRAYLHHLDRTNEMLGARLNTIHNLHFYQRVMQDMRDALDAGTFDDYVASFYAARGQSVPELD

SEQ ID NO: 56206 - protein, 371 aa, unidentified
  source 1..371: note = Idiomarina halophila
  REGION 1..371: note = tr|A0A432XS38|A0A432XS38_9GAMM Queuine tRNA-ribosyltransferase OS=Idiomarina halophila OX=1449799; GN = tgt PE=3 SV=1
MKFELLSTCGKARRGRMTFDRGVVETPAFMPVGTAGTVKGMTPEEVKATGAHICLGNTFHLMLRPGTQIIKQHGDLHDFMNWDKPILTDSGGFQVFSLGELRKITEEGATFRSPINGEKILLTPEKSMEVQRDLGSDIVMIFDECTPYPATQAEARSSMELSLRWAERSKTAHGDNPAALFGIIQGGMYEELRTISLEGLTDIGFDGYAIGGLSVGEPKEDMMRVLDHIAPQMPIDKPRYLMGVGKPEDLVEAVRRGVDMFDCVMPTRNARNGHLFVSSGVVKIRNAVHRTDTGPLDPECDCYTCQNYSRAYLHHLDRSNEMLGGRLNTIHNLHFYQKVMQDLRDAIEADRLDEHVAEFYAKRGLDVPALD

SEQ ID NO: 56207 - protein, 371 aa, Idiomarina homiensis
  REGION 1..371: note = tr|A0A432XUK9|A0A432XUK9_9GAMM Queuine tRNA-ribosyltransferase OS=Idiomarina homiensis OX=364198; GN = tgt PE=3 SV=1
MKFELLKTCGKARRGRMTFDRGVVETPAFMPVGTAGTVKGMTPEEVKATGAHICLGNTFHLMLRPGTQIIKQHGDLHDFMNWDKPILTDSGGFQVFSLGELRKITEEGVTFRSPINGEKILLTPEKSMEVQRDLGSDIVMIFDECTPYPATQAEARSSMELSLRWAERSKTAHGDNPAALFGIIQGGMYEELRTISLDGLTDIGFDGYAIGGLSVGEPKEDMMRILDHIAPQMPADKPRYLMGVGKPEDLVEAVRRGVDMFDCVMPTRNARNGHLFVSTGVVKIRNAVHRTDTGPLDPECDCYTCKNYSRAYLHHLDRSNEMLGGRLNTIHNLHFYQKVMQDLRDAIAEDRLEAHVAEFYAKRGLEVPSLA

SEQ ID NO: 56208 - protein, 371 aa, unidentified
  source 1..371: note = Idiomarina indica
  REGION 1..371: note = tr|A0A1G6DJA2|A0A1G6DJA2_9GAMM Queuine tRNA-ribosyltransferase OS=Idiomarina indica OX=1159017; GN = tgt PE=3 SV=1
MKFELLKTSGKARRGRITFARGTVDTPAFMPVGTAGTVKGMSPEEVAATGAQICLGNTFHLMLRPGTAVIKQHGDLHDFMNWDKPILTDSGGFQVFSLGELRKITEEGVTFRSPINGEKILLTPEKSMEVQRDLGSDIVMIFDECTPYPATPEEARSSMELSLRWAERSKKAHGDNPSALFGIIQGGMYEELRTISLEGLTNIGFDGYAIGGLSVGEPKHDMMRILDHIAPQMPSDKPRYLMGVGKPEDLVEAVRRGVDMFDCVMPTRNARNGHLFISTGVVKIRNAVHRTDTGPLDPECDCYTCQNYSRAYLHHLDRSNEMLGGRLNTIHNLHFYQKVMRDMRDALEADRFDDFVQEFYAKRGLEVPALK

SEQ ID NO: 56209 - protein, 371 aa, Idiomarina insulisalsae
  REGION 1..371: note = tr|A0A432YCK4|A0A432YCK4_9GAMM Queuine tRNA-ribosyltransferase OS=Idiomarina insulisalsae; OX = 575789 GN=tgt PE=3 SV=1
MKFELLKTCGKARRGRMIFDRGVVETPAFMPVGTAGTVKGLTPEEVKDTGAHICLGNTFHLMLRPGTSIIKQHGDLHDFMNWDKPILTDSGGFQVFSLGELRKITEEGVTFRSPINGEKILLTPEKSMEVQRDLGSDIVMIFDECTPYPATQAEARSSMELSLRWAERSKTAHGDNPSALFGIIQGGMYEELRTISLDGLTDIGFDGYAIGGLSVGEPKEDMMRVLDHIAPKMPADKPRYLMGVGKPEDLVEAVRRGIDMFDCVMPTRNARNGHLFISTGVVKIRNAVHRTDTGPLDPECDCYTCKNYSRAYLHHLDRSNEMLGGRLNTIHNLHFYQKVMQDLRDAIADDRLEEHVAEFYRKRDMEVPELA

SEQ ID NO: 56210 - protein, 371 aa, Idiomarina loihiensis
  REGION 1..371: note = tr|A0A349C5W0|A0A349C5W0_9GAMM Queuine tRNA-ribosyltransferase OS=Idiomarina loihiensis OX=135577; GN = tgt PE=3 SV=1
MKFELDKTSGRARRGRMVFERGTVETPAFMPVGTLGTVKGMTPEEVKDTGAQICLGNTFHLMLRPGTQIIQQHGDLHDFMNWDKPILTDSGGFQVFSLGELRKITEEGVTFRSPINGEKILLTPEKSMQVQRELGSDIVMIFDECTPFPATQAEARSSMELSLRWAERSKQEHGESKAALFGIIQGGMYEELRDISLKGLTDIGFDGYAIGGLSVGEPKEDMMRILEHTAPQMPEQKPRYLMGVGKPEDLVEAVRRGIDMFDCVMPTRNARNGHLFISTGVVKIRNAVHRTDTSPLDENCDCYTCKNYSRAYLHHLDRTNEMLGSRLNTIHNLRFYQKVMSDMRDALDAGTFDDYVKEFYRLRDQSVPALD

SEQ ID NO: 56211 - protein, 373 aa, Idiomarina loihiensis; identical to SEQ ID NO: 56198
  REGION 1..373: note = sp|Q5QVL2|TGT_IDILO Queuine tRNA-ribosyltransferase; OS = Idiomarina loihiensis (strain ATCC BAA-735 / DSM 15497 / L2-TR) OX=283942 GN=tgt PE=3 SV=1

SEQ ID NO: 56212 - protein, 371 aa, Idiomarina marina
  REGION 1..371: note = tr|A0A432YD78|A0A432YD78_9GAMM Queuine tRNA-ribosyltransferase OS=Idiomarina marina OX=502366; GN = tgt PE=3 SV=1
MKFELLKTSGKARRGRMVFDRGVVETPAFMPVGTAGTVKGMTPEEVKATGAQICLGNTFHLMLRPGTSIIKQHGDLHDFMNWDKPILTDSGGFQVFSLGELRKITEEGVTFRSPINGEKILLTPEKSMEVQRDLGSDIVMIFDECTPYPATHAEARSSMELSLRWAERSKTAHGDNPSALFGIIQGGMYEELRTISLEGLTDIGFDGYAIGGLSVGEPKEDMMRILDHIAPEMPIDKPRYLMGVGKPEDLVEAVRRGVDMFDCVMPTRNARNGHLFVSNGVVKIRNAVHRTDTGPLDPECDCYTCKNYSRAYLHHLDRSNEMLGGRLNTIHNLHFYQKVMQDLRDAIDEDRLEQHVAEFYAKRGMEVPALK

SEQ ID NO: 56213 - protein, 371 aa, Idiomarina maritima
  REGION 1..371: note = tr|A0A1I6HX11|A0A1I6HX11_9GAMM Queuine tRNA-ribosyltransferase OS=Idiomarina maritima OX=519453; GN = tgt PE=3 SV=1
MKFELLKTSGKARRGRMVFERGVVETPAFMPVGTAGTVKGMTPEEVAATGAQICLGNTFHLMLRPGTSIIKQHGDLHDFMNWDKPILTDSGGFQVFSLGELRKITEEGATFRSPINGEKILLTPEKSMEVQRDLGSDIVMIFDECTPYPATQAEARSSMELSLRWAERSKAAHGDNPSALFGIIQGGMYEELRTISLEGLTNIGFDGYAIGGLSVGEPKEDMMRILDHIAPEMPVDKPRYLMGVGKPEDLVEAVRRGVDMFDCVMPTRNARNGHLFVSNGVVKIRNAVHRTDTGPLDPECDCYTCKNYSRAYLHHLDRSNEMLGGRLNTIHNLHFYQKVMQDLRDAIEADRLDDHVAEFYAKRGMEVPALK

SEQ ID NO: 56214 - protein, 371 aa, Idiomarina maritima
  REGION 1..371: note = tr|A0A317QB13|A0A317QB13_9GAMM Queuine tRNA-ribosyltransferase OS=Idiomarina maritima OX=519453; GN = tgt PE=3 SV=1
MKFELLTTSGKARRGRMVFERGVVETPAFMPVGTAGTVKGMTPEEVKATGAQICLGNTFHLMLRPGTSIIKQHGDLHDFMNWDKPILTDSGGFQVFSLGELRKITEEGVTFRSPINGEKILLTPEKSMEVQRDLGSDIVMIFDECTPYPATQAEARSSMELSLRWAERSKAAHGDNPSALFGIIQGGMYEELRTISLEGLTDIGFDGYAIGGLSVGEPKEDMMRVLDYITPAMPIDKPRYLMGVGKPEDLVEAVRRGVDMFDCVMPTRNARNGHLFISTGVVKIRNAVHRTDTGPLDPECDCYTCKNYSRAYLHHLDRSNEMLGGRLNTIHNLHFYQKVMQDLRDAIEADRLEEHVAEFYAKRGLPVPELK

SEQ ID NO: 56215 - protein, 371 aa, unidentified
  source 1..371: note = Idiomarina piscisalsi
  REGION 1..371: note = tr|A0A432YS13|A0A432YS13_9GAMM Queuine tRNA-ribosyltransferase OS=Idiomarina piscisalsi; OX = 1096243 GN=tgt PE=3 SV=1
MKFELDKTSGRARRGRMKFERGTVETPAFMPVGTLGTVKGMTPEEVKDTGAQICLGNTFHLMLRPGTQIIQQHGDLHDFMNWDKPILTDSGGFQVFSLGELRKITEEGVTFRSPINGEKILLTPEKSMQVQRELGSDIVMIFDECTPFPATQAEARSSMELSLRWAERSKNAHGDNKAALFGIIQGGMYEELRDISLKGLTDIEFDGYAIGGLSVGEPKEDMMRILEHTAPKMPEQKPRYLMGVGKPEDLVEAVRRGIDMFDCVMPTRNARNGHLFISSGVVKIRNAVHRTDTGPLDENCDCYTCKNYSRAYLHHLDKTNEMLGGRLNTIHNLRFYQKVMSDMRDALDNDTFDEFVETFYQQRGQSVPPLD

SEQ ID NO: 56216 - protein, 372 aa, unidentified
  source 1..372: note = Idiomarina planktonica
  REGION 1..372: note = tr|A0A1Y6FWY2|A0A1Y6FWY2_9GAMM Queuine tRNA-ribosyltransferase OS=Idiomarina planktonica; OX = 1323738 GN=tgt PE=3 SV=1
MKFELLATDGRARRGRMTFARGTVETPAFMPVGTAGTVKGMSPEEVKATGAEICLGNTFHLMLRPGTSIIKQHGDLHDFMNWDKPILTDSGGFQVFSLGELRKITEEGATFRSPINGEKILLTPEKSMEVQRDLGADIVMIFDECTPHPATQAEARSSMELSLRWAQRSKDAHEGNPSALFGIVQGGMYEELRDISLQGLTDIGFDGYAIGGLSVGEPKEDMMRILSHTAPQMPIDKPRYLMGVGKPEDLVEAVRRGIDMFDCVMPTRNARNGHLFISTGVVKIRNAVHRTDTGPLDPDCDCYTCKNYSRAYLHHLDRSNEMLGGRLNTIHNLHYYQKVMQDLRDAIEAGRLQDHVAEFYAKRDLPVPALED

SEQ ID NO: 56217 - protein, 371 aa, Idiomarina ramblicola
  REGION 1..371: note = tr|A0A432YYM1|A0A432YYM1_9GAMM Queuine tRNA-ribosyltransferase OS=Idiomarina ramblicola OX=263724; GN = tgt PE=3 SV=1
MKFELDKTSGRARRGRMAFERGTVETPAFMPVGTLGTVKGMTPEEVKDTGAQICLGNTFHLMLRPGTQIIQQHGDLHDFMNWDKPILTDSGGFQVFSLGELRKITEEGVTFRSPINGEKILLTPEKSMQVQRELGSDIVMIFDECTPFPATQAEARSSMELSLRWAERSKQEHGDNKAALFGIIQGGMYEELRDISLKGLTDIEFDGYAIGGLSVGEPKEDMMRILEHTAPQMPEQKPRYLMGVGKPEDLVEAVRRGIDMFDCVMPTRNARNGHLFISSGVVKIRNAVHRTDTSPLDENCDCYTCKNYSRAYLHHLDRTNEMLGSRLNTIHNLRFYQKVMSDMRDALDAGTFDEFVQEFYRLRDQSVPPLD

SEQ ID NO: 56218 - protein, 372 aa, Idiomarina salinarum
  REGION 1..372: note = tr|A0A094IX62|A0A094IX62_9GAMM Queuine tRNA-ribosyltransferase OS=Idiomarina salinarum OX=435908; GN = tgt PE=3 SV=1
MKFELLKTSGKARRGRMTFDRGVVETPAFMPVGTAGTVKGMTPEEVAATGAQICLGNTFHLMLRPGTSIIKQHGDLHDFMNWDKPILTDSGGFQVFSLGELRKITEEGATFRSPINGEKILLTPEKSMEVQRDLGSDIVMIFDECTPHPATTTEARTSMELSLRWAERSKAAHGDNPAALFGIIQGGMYEELRTISLDGLTKIGFDGYAIGGLSVGEPKEDMMRILDHTAPQMPADKPRYLMGVGKPEDLVEAVRRGIDMFDCVMPTRNARNGHLFISTGVVKIRNAAHRTDTGPLDPECDCYTCKNYSRAYLHHLDRSNEMLGGRLNTIHNLHFYQKVMQDLRDAIEADRLEEHVAGFYAKRDLPVPSLPA

SEQ ID NO: 56219 - protein, 372 aa, Idiomarina sediminum
  REGION 1..372: note = tr|A0A432Z0T1|A0A432Z0T1_9GAMM Queuine tRNA-ribosyltransferase OS=Idiomarina sediminum OX=431675; GN = tgt PE=3 SV=1
MKFELLKTCGKARRGRMTFARGEVETPAFMPVGTAGTVKGMSPEEVKATGAQICLGNTFHLMLRPGTQIIKQHGDLHDFMNWDKPILTDSGGFQVFSLGELRKITEEGVTFRSPINGEKILLTPEKSMEVQRDLGSDIVMIFDECTPYPATQAEARSSMELSLRWAQRSKEAHGDNPSALFGIIQGGMYEELRTISLDGLTDIGFDGYAIGGLSVGEPKEDMMRILDHTAPLMPIDKPRYLMGVGKPEDLVEAVRRGVDMFDCVMPTRNARNGHLFVSTGVVKIRNAVHRTDTGPLDPECDCYTCQNYSRAYLHHLDRSNEMLGGRLNTIHNLHFYQKVMQDLRDAIDADRLEEHVAEFYAKRGLEVPPLAD

SEQ ID NO: 56220 - protein, 372 aa, Idiomarina seosinensis
  REGION 1..372: note = tr|A0A432ZC15|A0A432ZC15_9GAMM Queuine tRNA-ribosyltransferase OS=Idiomarina seosinensis; OX = 281739 GN=tgt PE=3 SV=1
MKFELDKTHGRARRGRMKFARGTVETPAFMPVGTVGTVKGMTPEEVKETGAEICLGNTFHLMLRPGTSIIQQHGDLHDFMNWDKPILTDSGGFQVFSLGELRKITEEGVTFRSPINGEKILLTPEKSMQVQRELGADIVMIFDECTPYPATQAEARQSMELSLRWADRSKKAHEGNKSALFGIIQGGMYEELRDISLKGLTDIEFDGYAIGGLSVGEPKEDMMRILEHTAPQMPEQKPRYLMGVGKPEDLVEAVRRGIDMFDCVMPTRNARNGHLFISSGVVKIRNAVHRTDTGPLDTDCDCYTCKNYSRAYLHHLDRTNEMLGARLNTIHNLRFYQRVMGDMRDALDNGTFDQYVERFYQLRDQQVPPLDC

SEQ ID NO: 56221 - protein, 371 aa, Idiomarina sp.
  REGION 1..371: note = tr|A0A1S2SWZ6|A0A1S2SWZ6_9GAMM Queuine tRNA-ribosyltransferase OS=Idiomarina sp. MD25a OX=1889913; GN = tgt PE=3 SV=1
MKFELDTTHGRARRGRMVFERGTVETPAFMPVGTLGTIKGMTPEEVEATGAQICLGNTFHLMLRPGTSVIQQHGDLHDFMNWDKPILTDSGGFQVFSLGELRKIDEEGVTFRSPINGEKILLTPEKSMQVQRELGSDIVMIFDECTPYPATQAEARKSMELSLRWAQRSKDAHEGNDAALFGIIQGGMYEELRDISLEGLTDIGFDGYAVGGLSVGEPKEDMMRILEHTAPQMPEHKPRYLMGVGKPEDLVESVRRGIDMFDCVMPTRNARNGHLFVSNGVIKIRNAVHRNDTSPLDEQCDCYTCKNYSRAYLHHLDRTNEMLGARLNTIHNLHFYQRVMQDMRDALDAGTFDEYVAAFYAARGQSVPVLD

SEQ ID NO: 56222 - protein, 372 aa, Idiomarina sp.
  REGION 1..372: note = tr|A0A139C4K7|A0A139C4K7_9GAMM Queuine tRNA-ribosyltransferase OS=Idiomarina sp. T82-3 OX=1794809; GN = tgt PE=3 SV=1
MMKFELDKTQGRARRGRMVFERGTVETPAFMPVGTLGTIKGMTPEEVEATGAQICLGNTFHLMLRPGTSVIQQHGDLHDFMNWDKPILTDSGGFQVFSLGELRKIDEEGVTFRSPINGEKILLTPEKSMQVQRELGSDIVMIFDECTPYPATQAEARKSMELSLRWAQRSKAAHEGNDAALFGIIQGGMYEELRDISLEGLTDIGFDGYAVGGLSVGEPKEDMMRILEHTAPKMPEHKPRYLMGVGKPEDLVESVRRGIDMFDCVMPTRNARNGHLFVSTGVIKIRNAVHRNDTSPLDEQCDCYTCKNYSRAYLHHLDRTNEMLGARLNTIHNLHFYQRVMQGMRDALDAGTFDDYVNAFYAARGQSVPSLD

SEQ ID NO: 56223 - protein, 371 aa, Idiomarina tainanensis; identical to SEQ ID NO: 56214
  REGION 1..371: note = tr|A0A368UVB7|A0A368UVB7_9GAMM Queuine tRNA-ribosyltransferase OS=Idiomarina tainanensis; OX = 502365 GN=tgt PE=3 SV=1

SEQ ID NO: 56224 - protein, 371 aa, Idiomarina taiwanensis
  REGION 1..371: note = tr|A0A432ZCK1|A0A432ZCK1_9GAMM Queuine tRNA-ribosyltransferase OS=Idiomarina taiwanensis; OX = 337250 GN=tgt PE=3 SV=1
MKFELLKTSGKARRGRMIFARGVVDTPAFMPVGTAGTVKGMSPEEVAATGAQICLGNTFHLMLRPGTGVIKAHGDLHDFMNWDKPILTDSGGFQVFSLGELRKITEEGATFRSPINGEKILLTPEKSMEVQRDLGSDIVMIFDECTPYPATVEQAEKSMELSLRWAERSKQAHGDNPSALFGIIQGGMYEDLRSVSLKGLEAIGFDGYAIGGLSVGEPKEDMIRILDHIAPEMPSDKPRYLMGVGKPEDLVEAVRRGVDMFDCVMPTRNARNGHLFVSTGVVKIRNAVHRHDTGPLDPECDCYTCQNYSRAYLHHLDRSNEMLGGRLNTIHNLHYYQRVMQDLRDAIAEDRLEQHVAEFYAKRGLEVPALK

SEQ ID NO: 56225 - protein, 372 aa, unidentified
  source 1..372: note = Idiomarina tyrosinivorans
  REGION 1..372: note = tr|A0A432ZSA7|A0A432ZSA7_9GAMM Queuine tRNA-ribosyltransferase OS=Idiomarina tyrosinivorans; OX = 1445662 GN=tgt PE=3 SV=1
MKFELDKTQGKARRGRLIFERGVVETPAFMPVGTVGTVKGMTPEEVADTGAHICLGNTFHLMLRPGTGVIQQHGDLHDFMNWHKPILTDSGGFQVFSLGELRKITEEGVTFRSPINGEKILLTPEKSMQVQRELGSDIVMIFDECTPYPATEQQAKDSMELSLRWAQRSKDGHGDNPAALFGIIQGGMYEHLREQSLAGLEQIGFDGYAIGGLSVGEPKPEMMRILDHTPEKMPADKPRYLMGVGKPEDLVEAVRRGVDMFDCVMPTRNARNGHLFISTGVVKIRNAVHRNDTGPLDPECDCYTCKNYSRAYLHHLDKTNEMLGGRLNTIHNLRFYQKVMQDMREALEQERFDEFVAEFYAKRDLPVPELAQ

SEQ ID NO: 56226 - protein, 371 aa, unidentified
  source 1..371: note = Idiomarina woesei
  REGION 1..371: note = tr|A0A0K6HAM5|A0A0K6HAM5_9GAMM Queuine tRNA-ribosyltransferase OS=Idiomarina woesei OX=1381080; GN = tgt PE=3 SV=1
MKFELLKTSGKARRGRMVFDRGVVETPAFMPVGTAGTVKGMTPEEVKATGAQICLGNTFHLMLRPGTSIIKQHGDLHDFMNWDKPILTDSGGFQVFSLGELRKITEEGVTFRSPINGEKILLTPEKSMEVQRDLGSDIVMIFDECTPYPATQAEARTSMELSLRWAERSKAAHGDNPSALFGIIQGGMYEELRTISLEGLTNIGFDGYAIGGLSVGEPKEDMMRVLDYITPQMPIDKPRYLMGVGKPEDLVEAVRRGVDMFDCVMPTRNARNGHLFVSNGVVKIRNAVHRTDTGPLDPECDCYTCQNYSRAYLHHLDRSNEMLGGRLNTIHNLHFYQKVMQDLRDAIENDRLEDHVAEFYAKRGMEVPALK

SEQ ID NO: 56227 - protein, 371 aa, Idiomarina xiamenensis
  REGION 1..371: note = tr|K2KLQ7|K2KLQ7_9GAMM Queuine tRNA-ribosyltransferase OS=Idiomarina xiamenensis 10-D-4; OX = 740709 GN=tgt PE=3 SV=1
MKFELLNNDGNARRGRMVFERGVVETPAFMPVGTVGTVKGMTPEEVEATGAHICLGNTFHLMLRPGTQIIREHGDLHDFMNWQKPILTDSGGFQVFSLGELRKISEQGATFRSPINGEKILLTPEKSMQVQRELGADIVMIFDECTPHPATQKQARDSMELSLRWAQRSKDAHADNPAALFGIIQGGMYEELRDISLKGLTDIGFDGYAIGGLSVGEPKQDMMRILSHTAPQMPTDKPRYLMGVGKPEDLVEAVRRGVDMFDCVMPTRNARNGHLFISSGVVKIRNAVHRSDTGPLDPECDCYTCKNYSRAYLHHLDKTNEILGARLNTIHNLRFYQKVMQDMRDAIEAGRFDQHVAEFYAKRDLPVPPLT

SEQ ID NO: 56228 - protein, 373 aa, Idiomarina zobellii
  REGION 1..373: note = tr|A0A1G7Q7T6|A0A1G7Q7T6_9GAMM Queuine tRNA-ribosyltransferase OS=Idiomarina zobellii OX=86103; GN = tgt PE=3 SV=1
MTMKFELDKTSGRARRGRMQFERGTVETPAFMPVGTLGTVKGMTPEEVKDTGAQICLGNTFHLMLRPGTQIIQQHGDLHDFMNWDKPILTDSGGFQVFSLGELRKITEEGVTFRSPINGEKILLTPEKSMQVQRELGSDIVMIFDECTPYPATQAEARSSMELSLRWAERSKKAHEGNKSALFGIIQGGMYEELRDISLKGLTDIEFDGYAIGGLSVGEPKEDMMRILEHTAPKMPEQKPRYLMGVGKPEDLVEAVRRGIDMFDCVMPTRNARNGHLFISSGVVKIRNAVHRTDTGPLDENCDCYTCKNYSRAYLHHLDKTNEMLGGRLNTIHNLRFYQKVMSDMRDALDNDTFDKFVEAFYQQRGQSVPPLD

SEQ ID NO: 56229 - protein, 371 aa, unidentified
  source 1..371: note = Idiomarinaceae bacterium
  REGION 1..371: note = tr|A0A2E4SD08|A0A2E4SD08_9GAMM Queuine tRNA-ribosyltransferase OS=Idiomarinaceae bacterium; OX = 1898113 GN=tgt PE=3 SV=1
MKFELDKTSGRARRGRMQFERGTVETPAFMPVGTLGTVKGMTPEEVKDTGAQICLGNTFHLMLRPGTQIIQQHGDLHDFMNWDKPILTDSGGFQVFSLGELRKITEEGVTFRSPINGEKILLTPEKSMQVQRELGSDIVMIFDECTPFPATQAEARSSMELSLRWAERSKKAHEGNKSALFGIIQGGMYEELRDISLKGLTDIEFDGYAIGGLSVGEPKEDMMRILEHTAPKMPEQKPRYLMGVGKPEDLVEAVRRGIDMFDCVMPTRNARNGHLFISSGVVKIRNAVHRTDTGPLDENCDCYTCKNYSRAYLHHLDKTNEMLGGRLNTIHNLRFYQKVMSDMRDALDNDTFDKFVEAFYQQRGQSVPPLD

SEQ ID NO: 56230 - protein, 374 aa, unidentified
  source 1..374: note = Idiomarinaceae bacterium
  REGION 1..374: note = tr|A0A0P7ZK07|A0A0P7ZK07_9GAMM Queuine tRNA-ribosyltransferase OS=Idiomarinaceae bacterium HL-53; OX = 1298881 GN=tgt PE=3 SV=1
MSRMSFELLSTSGKARRGRLSFPRGTVETPAFMPVGTLGTVKGMTPEELADTGAEICLGNTFHLMLRPGTSVIQQHGDLHDFMHWEKPILTDSGGFQVFSLGELRKITEEGATFRSPINGEKILLTPEKSMEVQRELGADIVMIFDECTPHPATYEQAQVSMELSLRWAERSKAAHEGNDAALFGIIQGGMYEELRTISLNGLEQIGFDGYAIGGLSVGEPKEDMMRILDHIAPLMPEQKPRYLMGVGKPEDLVEAVRRGVDMFDCVMPTRNARNGHLFTSQGVIKIRNARHRNDMSPLDDECECYTCKHYSRAYLHHLDRCNEILGARLNTIHNLFYYQTVMKGMRDALEADTFEAYVAAFYAKREMEVPVLP

SEQ ID NO: 56231 - protein, 373 aa, unidentified
  source 1..373: note = Ignatzschineria cameli
  REGION 1..373: note = tr|A0A2U2AS42|A0A2U2AS42_9GAMM Queuine tRNA-ribosyltransferase OS=Ignatzschineria cameli; OX = 2182793 GN=tgt PE=3 SV=1
MKFELLKTDGAARRGRITFERGTIETPIFMPVGTIATVKGVTPQNLKEMNAQIILGNTFHLWLRPGLDVIRAHGDLHDFMQWDKPILTDSGGFQVFSLAELRKIEEKGVTFRSPFNGEKLFLDPEKSMEIQRVLGSDIVMAFDECTPYPATYDEAKRSMELSMRWAKRSKDAFVAGENPNALFGIVQGSMYEDLREQSLDALQEIEFNGYAIGGLAVGEPKEERDRILEFLDPKMPKDKPRYLMGVGKPEDLIEGVKRGVDMFDCVIPTRNARNGHLFTRFGDIRIKNARYDLDTRPLDETCSCYTCQNFSRSYLRHLIRTKELLGAHLASIHNLHYFLWHMQQIRDHIDAGTFEQYYEQFYRERKQVDEEAL

SEQ ID NO: 56232 - protein, 373 aa, Ignatzschineria indica
  REGION 1..373: note = tr|A0A2U2ANY3|A0A2U2ANY3_9GAMM Queuine tRNA-ribosyltransferase OS=Ignatzschineria indica; OX = 472583 GN=tgt PE=3 SV=1
MKFELLKTDGAARRGRITFKRGTIETPIFMPVGTIATVKGVTPQNLKEMNAQIILGNTFHLWLRPGLDVIRAHGDLHDFMQWDKPILTDSGGFQVFSLAELRKIEEKGVTFRSPFNGEKLFLDPEKSMEIQRVLGSDIVMAFDECTPYPATYDEAKKSMELSMRWAKRSKDAFVAGENPNALFGIVQGSMFEDLREQSLDALQEIEFNGYAIGGLAVGEPKEERDRILEFLDPKMPKDKPRYLMGVGKPEDLIEGVKRGVDMFDCVIPTRNARNGHLFTRFGDIRIKNARYDLDTRPLDETCSCYTCQNFSRSYLRHLIRTKELLGAHLASIHNLHYFLWHMQQIRDHIDAGTFDQYYEQFYRERKQVDEEAR

SEQ ID NO: 56233 - protein, 373 aa, Ignatzschineria sp.
  REGION 1..373: note = tr|A0A256CTG5|A0A256CTG5_9GAMM Queuine tRNA-ribosyltransferase OS=Ignatzschineria sp. F8392; OX = 1980117 GN=tgt PE=3 SV=1
MKFELLKTDGAARRGRITFERGTIETPIFMPVGTIATVKGVTPQNLKEMNAQIILGNTFHLWLRPGLDVIRAHGDLHDFMQWDKPILTDSGGFQVFSLAELRKIEEKGVTFRSPFNGEKLFLDPEKSMEIQRVLGSDIVMAFDECTPYPATYDEAKKSMELSMRWAKRSKDAFVAGENPNALFGIVQGSMFEDLREQSLDALQEVEFNGYAIGGLAVGEPKEERDRILEFLDPKMPKDKPRYLMGVGKPEDLIEGVKRGVDMFDCVIPTRNARNGHLFTRFGDIRIKNARYDLDTRPLDETCSCYTCQNFSRSYLRHLIRTKELLGAHLASIHNLHYFLWHMQQIRDHIDAGTFDQYYEQFYRERKQVDEEAR

SEQ ID NO: 56234 - protein, 373 aa, Ignatzschineria ureiclastica
  REGION 1..373: note = tr|A0A2U2AHQ3|A0A2U2AHQ3_9GAMM Queuine tRNA-ribosyltransferase OS=Ignatzschineria ureiclastica; OX = 472582 GN=tgt PE=3 SV=1
MKFELLKTDGTARRGRITFERGTIETPIFMPVGTIATVKGVTPHNLKEMNAQIILGNTFHLWLRPGLDVIRAHGDLHDFMQWDKPILTDSGGFQVFSLAELRKIEEKGVTFRSPFNGEKLFLDPETSMEIQRVLGSDIVMAFDECTPYPATYDEARTSMELSMRWAKRSKEAFVNGGNPNALFGIVQGSMFEDQRQESLEALTEIGFNGYAIGGLAVGEPKEERDRILEFLNPRMPQDKPRYLMGVGKPEDLIEGVKRGVDMFDCVIPTRNARNGHLFTRFGDIRIKNARYDKDTRPLDETCECYTCQHFSRSYLRHLIRTKELLGAHLASIHNLHYFLWHMQQIRDHIDADTFEQYYQQFYQERAMIDEENQ

SEQ ID NO: 56235 - protein, 232 aa, unidentified
  source 1..232: note = Ignavibacteria bacterium
  REGION 1..232: note = tr|A0A3M0WPB6|A0A3M0WPB6_9BACT Queuine tRNA-ribosyltransferase (Fragment) OS=Ignavibacteria bacterium OX=2053306 GN=tgt PE=3 SV=1
YPCDFEYAKKSQELTTRWAVLNKEAFEESEPLYGHKQALFGIIQGSVYKELRQKSAEDLISIDFDGYSIGGLAVGEPAEKMYEIVDFTTDLIPENKPRYLMGVGRPENILEAIERGVDMFDCVMPTRNARNAYLFTSQGTVSIRNAAYKNDFSPLDRECDCYTCKNFTKAYLRHLFTAKEILGLELASIHNLTFYLKLVRDARKHIFAGDFSEWKAKTIKSITKNVNRNKEE

SEQ ID NO: 56236 - protein, 321 aa, unidentified
  source 1..321: note = Ignavibacteria bacterium
  REGION 1..321: note = tr|A0A1Q7S7C2|A0A1Q7S7C2_9BACT Queuine tRNA-ribosyltransferase (Fragment) OS=Ignavibacteria bacterium 13_1_40CM_2_61_4 OX=1805219 GN=AUI33_07440 PE=3; SV = 1
MEYQVEGRDHNARAGVLGTDHGPIHTPAFMPVGTQASVKALSPRELVEIQTSVILCNTYHLYLRPGAEVIRRSGGLHRFMGWDKPILTDSGGYQVFSLSGLRKIEEEGVQFRSHVDGSVHCFTPESVVDMQRQLGSDIVMVLDECTPYPCTEEYARNSNDLTVRWASRGLSRFADSAPLYEHNQSLFAIVQGSVYPELRERSVRALIEMNFDGYAIGGLAVGEPADAMMEIVSLCAGLLPEEKPRYLMGVGTPANLLDGIERGIDLFDCVLPTRNGRNAMIFTRTGAINLMNARFKFDLSPIDEACGCYSCGHFSRAYLRH

SEQ ID NO: 56237 - protein, 378 aa, unidentified
  source 1..378: note = Ignavibacteriae bacterium
  REGION 1..378: note = tr|A0A367ZJ18|A0A367ZJ18_9BACT Queuine tRNA-ribosyltransferase OS=Ignavibacteriae bacterium; OX = 2026749 GN=tgt PE=3 SV=1
MKFILINIDNNARAGVIETDHSKIETPVFMPVGTQGAVKAIEHRELLEIDTKIILGNTYHIYLRPGVELIHRFGGLHKFIGWNQSILTDSGGYQIFSLADLNKISKDGVYFQSHIDGSKHFFTPETVIDIQRYLGSDIMLVLDECVPYPASYEYASKSQELTTDWAIRCKNQFKKTSTLYSHTQAIFGIVQGSVYPDLRRKSVNELIEVDFDGYAIGGLSVGEPKDLMYEMTKICTEKLPFEKPRYLMGVGTPEDILEGIESGVDMFDCVMPTRNGRNAMFFTRKGTLSIRNSIFKEDETSIDSNCECYTCKNFSRAYIRHLFMVKEILALQLATIHNLAFYHWLTREARKAILNKNFQEWKRSLLNQINTRITNKGE

SEQ ID NO: 56238 - protein, 376 aa, unidentified
  source 1..376: note = Ignavibacteriae bacterium
  REGION 1..376: note = tr|A0A2N1VVV8|A0A2N1VVV8_9BACT Queuine tRNA-ribosyltransferase OS=Ignavibacteriae bacterium HGW-Ignavibacteriae-2 OX=2013809 GN=tgt PE=3 SV=1
MRFELHHTDPASKARAGKLFTDHGEIETPIFMPVGTQGTVKSINQHQLKDDINAPIILGNTYHLFLRPGTEILEEAGGLHKFMSWDRPILTDSGGFQVFSLSDLRKLKKDGVEFRSHLDGSKHFFTPQKVINIQRSIGSDIMMVLDECTPYPCDYDYAKKSKALTSAWALLNKEAFENTNPLYAHKQFLFGIIQGSVYKDLRQQSAEDLIKLDFDGYAIGGLAVGEPAKKMYEITDFTTDVMPPNKPRYLMGVGRPENILEAIERGIDMFDCVMPTRNARNAYLFTTEGILTIKNSSYKNDFTTVDKNCDCFTCRNYSKSYLRHLYNSKELLYFQLATIHNLKFYLNLVRQAREEILKNNFINWKQEIISKVTQKI

SEQ ID NO: 56239 - protein, 397 aa, unidentified
  source 1..397: note = Ignavibacteriales bacterium
  REGION 1..397: note = tr|A0A2M6YZY7|A0A2M6YZY7_9BACT Queuine tRNA-ribosyltransferase OS=Ignavibacteriales bacterium CG07_land_8_20_14_0_80_59_12 OX=1974045 GN=tgt PE=3 SV=1
MGFSVQHTDGCARCGYLHTGHGVVETPAFMPIGTQGSVKAVEQRELEGIDARIILANTYHLYLRPGLEVLEKAGGLHRFMGWRNAILADSGGYQVFSLSDLRSITEDGVTFHSHIDGSKHQFTPESVVNAGRIMGPDIMMVLDECLDYPADRERALFSVDMTSRWAERSREEFAKTAARYGHEQYLFGIVQGSVYGDLRERSAERLVELDFDGYAIGGLSVGEPLEEMYRMTDVVNAILPEGKPRYLMGVGTPENLLESVERGVDLFDCVLPTRNGRNGQAFSRNGRLTLRNAVYKTDFTPIDPECSCYACRNFTRAYIRHLIQAKEVLALQLVSLHNLTFYLWLMEETRKAIREGTFAAWKSETFARLGRRGNRDVNDSATAPTSTTGRRTTCTVQ

SEQ ID NO: 56240 - protein, 379 aa, unidentified
  source 1..379: note = Ignavibacteriales bacterium
  REGION 1..379: note = tr|A0A2M7ZES2|A0A2M7ZES2_9BACT Queuine tRNA-ribosyltransferase OS=Ignavibacteriales bacterium CG_4_9_14_3_um_filter_34_10 OX=1974044 GN=tgt PE=3 SV=1
MKLLLQHKDKHSKARATILNTSHGIIETPIFMPVGTQGTVKAVNQTMLAENIKAQIILGNTYHLYLRPGIDILEQAGGLHKFMNWQKPILTDSGGFQIFSLNELRKFEKNGVTFKSHLDGSKHFFSPEKVISIQRIIGSDIMMVLDECTPYPCDYEYAVKSNQLTSEWAIKNKEAFEKTMPLYGGEQFLFGIVQGSIFKNLREQSAKHLINLDFDGHAIGGLAVGEPAKDMYEIIDFTTDILPENKPRYLMGVGRPENILEAIERGIDMFDCVMPTRNARNAYLFTMNGIVTIRNAAYKNDFTPIDKTCNCYTCKNYSRAYLRHLFNAKELLAYQLATIHNLTFYLNLASEARKNIFSDTFTDWKNQIINKLSKNVQEV

SEQ ID NO: 56241 - protein, 377 aa, Ignavibacterium album
  REGION 1..377: note = tr|I0ALF5|I0ALF5_IGNAJ Queuine tRNA-ribosyltransferase OS=Ignavibacterium album (strain DSM 19864 / JCM 16511 / NBRC 101810 / Mat9-16) OX=945713; GN = tgt PE=3 SV=1
MLKLNLIAKDKNSKARAAWFETDHGVVETPIFMPVGTQGTVKAVNQFYLEHEIKAHIVLSNTYHLYLRPGTEILEAAGGLHKFMNWQKPILTDSGGYQVFSLTELRKLKENGVEFRSHLDGSKHFFTPEKVIQIQRSIGSDIMMVLDECAPYPCEYEYAKKSVQLTSNWAVLNKNAFYNSEPRYGHRQFLFGIIQGSVYKDLRKKSAEDLLELDFDSYAIGGLAVGEPTEMMYELVDYTTDFMPSDRPRYLMGVGRPENILESIARGVDMFDCVMPTRNARNANVFTWNGTLSMRNAKYKDDFKPLDENCNCYTCRNFTRAYLRHLFVAEEILALELASIHNLYFYLELVRIAREKIIDGSFIIWKNQVVEKISLKN

SEQ ID NO: 56242 - protein, 383 aa, Ignavigranum ruoffiae
  REGION 1..383: note = tr|A0A1H8ZVJ9|A0A1H8ZVJ9_9LACT Queuine tRNA-ribosyltransferase OS=Ignavigranum ruoffiae OX=89093; GN = tgt PE=3 SV=1
MNEAKAPVWYEPLKTEKHTGARLGILHTPHGSFETPMYMPVGTLATVKSLSPEELKEMGAGVILSNTYHLWLRPGEDIVEEAGGLHQFMNWDQGILTDSGGFQVFSLSDIRQIKEEGVYFRNHISGERLFLSPEKAIHIENALGADIIMSFDECPDFHQSYDYIKNSIARTTRWAERGLQAHKHPDRQALFGICQGAGYKDLRLSHVRDMVSLDFPGYSIGGLSVGETKEEMNAVLDYLVPELPDNKPRYLMGVGSPDALIDGVIRGIDMFDCVLATRIARNGTCMTHDGRLVVKNAKYARDFKPIDSDCDCYTCQHYSRAYIRHLFKADEIFGLRLASIHNTYFLLQLMRDVRQAIRDDNLLEFRQAFFERYGYFKANAPAF

SEQ ID NO: 56243 - protein, 421 aa, unidentified
  source 1..421: note = Ileibacterium valens
  REGION 1..421: note = tr|A0A1U7NIZ5|A0A1U7NIZ5_9FIRM Queuine tRNA-ribosyltransferase OS=Ileibacterium valens OX=1862668; GN = BO222_00990 PE=3 SV=1
MSQTEYQNNNKFSFEIEKRMDGHLGRAGIIHTPHGDIQTPAFMCVGTHGEVRFMSMENLHEIGAQAMLANGYHLRLQSPEIAAGGGLAAWSGWNSPTLTDSGGFQVMSLGSGIGKVVSMEREKEVLNADPKERLAKVTETGIEFTDPFTGKEEFIGPKESMEIQCRIGADIHMAFDELTSLADDYDYNVEALRRTEDWAQVSLNVHNQHRYDLGYEQALYGVLQGGRWEDLRRSTARKLGSMDFDGYGLGGAFLKKDLGSILKWCNEELPENKPRHLLGLSRPDDIFVGIENGADTFDCVAPSREARHGRIESRNGHFHLNKFKDSDLLLEEGCDCPTCKAGYTRSKLREMYKSDDREVRAKFFELASMHNLRFTLRLCEEARAALLEDRFEEFREDFSRSYYKKSWQEHLLELQARDTKK

SEQ ID NO: 56244 - protein, 365 aa, Ilumatobacter fluminis
  REGION 1..365: note = tr|A0A4V3EJA4|A0A4V3EJA4_9ACTN Queuine tRNA-ribosyltransferase OS=Ilumatobacter fluminis; OX = 467091 GN=tgt PE=3 SV=1
MHVVEFETTASDGTARAGTATTANGSYTTPLFMPVGTRGAIKYLSADDYDALGAQIVLGNTYHLMMRPGADTVAHFGGLAKFAGWSGLTLTDSGGFQVFSLEPDVDDEGVTFASTYDGTKHRFTPEKAVETQQLLGADIQMVLDVCPPLPSPPEVIRLALERTNAWAKRARDHHTRPDQALFGIVQGGVSEVMRAESAERTAALEFDGYGIGGLSVGETRDEMIPALAAAIEHLPTNRPRYLMGVGDPASIVEAVNLGVDQFDCVMQTRLGRHGTALTSEGRVNLKRQEFALSDEPIDVSCTCSVCARHSRGYIRHLFKVGEPTASRLVSLHNVAWTLRLLEQMRAAIIDGTFQDLRRDVLAVWG

SEQ ID NO: 56245 - protein, 365 aa, Ilumatobacter sp.
  REGION 1..365: note = tr|A0A2E3TVE6|A0A2E3TVE6_9ACTN Queuine tRNA-ribosyltransferase OS=Ilumatobacter sp. OX=1967498; GN = tgt PE=3 SV=1
MHRVNLDVSATHGAARTGSASTARGTYKTPLFMPVGTRGAIKYFSAADYDRLGAEIVLGNTYHLMLRPGADLIERFGGLGPFTGWDGMTLTDSGGFQVFSLDPKVDDDGVTFKSTYDGSSHRFTPEVAVTLQQQLGADIQMVLDVCPPLPSPPEVIRLAVERTHAWAQRAKAAHTRPDQALFGIVQGGVSPAMRAESAQRTVDVGFDGYGIGGLSVGESRQEMLPALASAIEHLPADQPRYLMGVGDPASLIEAVALGVDQFDCVMQTRLGRHGTALTSTGRFQAKAARNAELDEPLDEQCPCEVCARHSRGYIRHLLQVGEPTASRLLSIHNVAWTFNLMHQMRAAIADGSFDTLRRDVLDVWE

SEQ ID NO: 56246 - protein, 389 aa, Ilyobacter polytropus
  REGION 1..389: note = tr|E3H6V6|E3H6V6_ILYPC Queuine tRNA-ribosyltransferase OS=Ilyobacter polytropus (strain DSM 2926 / CuHBu1) OX=572544 GN=tgt PE=3 SV=1
MSNKLPVTYKLYSKDGKARTGKITTPHGEVETPVFMPVGTQATVKTMTPEELEAIGSEIILGNTYHLFLRPGDDLVAKFGGLHKFMNWKKPILTDSGGFQVFSLGAIRKIKEEGVEFRSHIDGSKQFISPEKSIHIQNNLGSDIVMLFDECPPGMSTEEYLIPSIERTTRWAKRCVEAHKRPDEQGLFAIVQGGIYEELREKSRKGLMEMDEYFSGYAIGGLAVGEPRDDMYRVLDYIVEKLPENKPRYLMGVGEPVDMLEAVEAGVDMMDCVQPTRIGRHGTVFTKYGRLVIKNACYSEDPRPLDEGCDCYVCRNYTRGYIRHLFKSQEILGSRLATYHNLYFLIKMMKDAREAIKDKRFKEYKDEFLNNYSKRGESDWIKAQKLGEV

SEQ ID NO: 56247 - protein, 369 aa, unidentified
  source 1..369: note = Imhoffiella purpurea
  REGION 1..369: note = tr|W9UVW4|W9UVW4_9GAMM Queuine tRNA-ribosyltransferase OS=Imhoffiella purpurea OX=1249627; GN = tgt PE=3 SV=1
MEFDLVGQDGLARRGRLRFARGTVETPAFMPVGTYGTVKAMTPEELLEVGAEIVLGNTFHLMLRPGTEIIRKLGDLHDFMHWEKPILTDSGGFQVFSLGDLRKITEEGVHFQSPVDGGKVFLSPEVSMRVQRELGSDIVMIFDECTPYPADEDQARASMELSLRWAARSREAHGDNPSALFGIVQGGMHEGPRAESLEGLTRIGFDGYAIGGLSVGEPEADRLRVLDFLADKMPTDRPRYLMGVGTPEDIVAAVQRGIDMFDCVMPTRNARNGYLFTHQGIVKIRNAANRYDEGPLDPRCDCYTCRHYSRAYLHHLDKCKEILGARLATIHNLHYYQTLMRGLREAIAAGRLDAFVADFREHYRSRRPG

SEQ ID NO: 56248 - protein, 371 aa, unidentified
  source 1..371: note = Immundisolibacter cernigliae
  REGION 1..371: note = tr|A0A1B1YXR3|A0A1B1YXR3_9GAMM Queuine tRNA-ribosyltransferase OS=Immundisolibacter cernigliae; OX = 1810504 GN=tgt PE=3 SV=1
MSFELLATDGPARRGRLNFARGVVDTPAFMPVGTQGTVKSLTAQEVAGTGAQILLGNTFHLMLRPGVDIVRRHGSLHGFMAWPGPILTDSGGFQVYSLKTLRKISEQGVWFRSPVDGSRVFLGPEEAIAVQHGLGSDVVMIFDECTPYPADHDTAQRSMELSLRWAARSRVAHGDHPAALFGIVQGGVHEDLRAASLAGLLEIGFDGYAIGGLSVGEPREDMLRVLDFIGPRLPTDQPRYLMGVGTPQDIVEAVRRGVDMFDCVMPTRHARHAYLFTDTGVLRLRNARYRDDTRPLQEGCACYTCQHHSRAYLRHLDQAGELLGMRLNTLHNLHYYQTLMAGLREAIASGTLAAYVAEFYARQGLPVPPVA

SEQ ID NO: 56249 - protein, 376 aa, unidentified
  source 1..376: note = Imperialibacter sp.
  REGION 1..376: note = tr|A0A5E8ATE8|A0A5E8ATE8_9BACT Queuine tRNA-ribosyltransferase OS=Imperialibacter sp. EC-SDR9; OX = 2038371 GN=tgt PE=3 SV=1
MQFKLQATDKGSKARAGQLSTGHGEIQTPIFMPVGTAGSVKGVHQRELKEDIKAQIILGNTYHLYLRPGLDILKPAGGLHGFNGWTGPILTDSGGYQVYSLADQRKITEEGVKFKSHIDGSNHLFTPENVMDIQRTIGADIIMAFDECPPFPCELDYAKKSMEMTHRWLDRCISHLQTTEPLYGHEQALFPIVQGSVDKELRTISAEYIASRGMDGNAIGGLSVGEPAEFMYEMTDLVCNILPADKPRYLMGVGTPANILECIALGVDMFDCVMPTRNARNGMLFTSEGIINIKNEKWKDDFSPIDETVGGYASTFYSRAYLRHLIMSKEMLGAQIATVHNLTFYLWLVNTAREKIIDGTFANWKEMMVKKVSHRL

SEQ ID NO: 56250 - protein, 376 aa, unidentified
  source 1..376: note = Imtechella halotolerans
  REGION 1..376: note = tr|I0WDC7|I0WDC7_9FLAO Queuine tRNA-ribosyltransferase OS=Imtechella halotolerans K1; OX = 946077 GN=tgt PE=3 SV=1
MKFELKAKDPLSQARAGIVTTDHGAIETPIFMPVGTVASVKGVHQRELKEDINPDIILGNTYHLYLRPQTEILEKAGGLHKFMNWDRNILTDSGGYQVYSLSSNRKIKEEGVKFKSHIDGSYHFFTPENVMDIQRTIGADIIMAFDECTPYPCDYRYAKRSMHMTHRWLDRCVSHFNNTSPKYGYDQTLFPIVQGSTYKDLRQQSAEYIANVGAEGNAIGGLSVGEPAEEMYAMTEVVTAILPQDKPRYLMGVGTPINILENIALGIDMFDCVMPTRNARNGMLFTAHGTINIKNKKWEADFSPIDEMGHTYVDTYYTKAYLRHLFAANEFLGKQIATIHNLGFYLWLVREARKHILAGDFREWKEKMVRQMDNRL

SEQ ID NO: 56251 - protein, 376 aa, Indibacter alkaliphilus
  REGION 1..376: note = tr|S2DQN6|S2DQN6_9BACT Queuine tRNA-ribosyltransferase OS=Indibacter alkaliphilus LW1; OX = 1189612 GN=tgt PE=3 SV=1
MKFNLIATDPNSKARAGLIKTDHGDIASPIFMPVGTAGSVKAVHQRELTFDVKAQIILGNTYHLYLRPGLDILEKAGGLHKFNGWSKPILTDSGGYQVFSLADNRKITEEGAVFKSHIDGSKHLFSPERVMDIQRVIGADIIMAFDECPPYPCTYEYARKSMEMTHRWLKRCIDRFDSTEGKYGYSQALFPIVQGSVFKDLRRQSAEFVAACGREGNAIGGLSVGEPVEDMYEMTDMVTDILPSDKPRYLMGVGTPANILEGIALGVDMFDCVMPTRNARNGMLFTSEGIINIRNEKWKADFSPIDPHINSYVSSFYSKAYLRHLVIAKEILAAQIASIHNLSFYLWLVTRAREHIIAGDFAVWKNEMVEKVSRRL

SEQ ID NO: 56252 - protein, 375 aa, Inhella sp.
  REGION 1..375: note = tr|A0A437LHH5|A0A437LHH5_9BURK Queuine tRNA-ribosyltransferase OS=Inhella sp. CCP-18 OX=2499851; GN = tgt PE=3 SV=1
MLQFELLRQEGAARRGRMTLNHGVVETPIFMPVGTYGTVKGVMPRDLNEMGAQIILGNTFHLWLRPGLKVMETFGGLHQFENWQKPILTDSGGFQVWSLGAMRKISEEGVKFASPINGDKLFLTPEVSMQIQTTLNSDIVMQFDECTPYETKGRLTTEREARASMAMSLRWAKRCQDEFARLENPNALFGIVQGGMFENLRDESAAGLVDLDFPGYAIGGLSVGEPKADMQRVLAHTAPLLPTNKPRYLMGVGTPEDLVEGVANGIDMFDCVMPTRNARNGHLFTRFGDLRLRNARYREDARPIDETCACQACAHFSRAYLHHLDRCGEMLGPMLTTIHNLAYYLNLMQEMRDALDQGRFAAWKAQFHADRARGV

SEQ ID NO: 56253 - protein, 369 aa, unidentified
  source 1..369: note = Inmirania thermothiophila
  REGION 1..369: note = tr|A0A3N1Y1W8|A0A3N1Y1W8_9GAMM Queuine tRNA-ribosyltransferase OS=Inmirania thermothiophila; OX = 1750597 GN=tgt PE=3 SV=1
MRFELLATDGMARRGRIHLPRGTVETPAFMPVGTYGTVKAMTPEELRAVGAEIILGNTFHLMLRPGTEVIRRHGTLHDFMHWDGPILTDSGGFQVWSLGRLRRIREAGVTFRSPVDGAEVFLGPEESVAVQRALGSDIVMVFDECTPYPATEPEARASMALSLRWARRSREAHGDNPAALFGIVQGGVYPHLRAESLAGLMEIGFDGYAIGGLSVGEPPQARWEVVASLTPQMPAGAPRYLMGVGTPEDIVEAVLRGVDLFDCVLPTRNARNGHLFTRLGDLRIRNARYRDDTRPPDPECGCYTCRHYSRAYLRHLDRCNEILGARLNTIHNLHYYQTLMRGLREAIEAGRLAAFVAEFRALRARGPDG

SEQ ID NO: 56254 - protein, 375 aa, Inquilinus limosus
  REGION 1..375: note = tr|A0A211ZRN2|A0A211ZRN2_9PROT Queuine tRNA-ribosyltransferase OS=Inquilinus limosus OX=171674; GN = tgt PE=3 SV=1
MTEFRFEPLARDGAARTGRLHTAHGVVQTPTFMPVGTAATVKAMRPEEVAATGAQIVLGNTYHLMLRPGAERVARLGGLHRFMNWPGPILTDSGGFQVMSLSQLRRMDKDGVTFRSHLDGSEHRLSPARSTEIQHLLDATITMAFDECTPFPAEPEVAASSMRLSMGWAQRSRDAFVARPGYGQFGIVQGSVYPELRLESAAALTAIGFEGYAIGGLAVGEGQERMFAALDVTVPALPDDRPRYLMGVGKPSDLVGSVRRGVDMFDCVLPTRSGRTGQAFTRRGTVNLRNARHQDDQRPLDEECRCPACRSYSRAYLHHLVRSEEVLGLMLLTQHNLTYYQDLMAGLRGAITAGTLDAFAADFEAEQALGDISAL

SEQ ID NO: 56255 - protein, 375 aa, Inquilinus limosus
  REGION 1..375: note = tr|A0A0A0D320|A0A0A0D320_9PROT Queuine tRNA-ribosyltransferase OS=Inquilinus limosus MP06; OX = 1398085 GN=tgt PE=3 SV=1
MTEFRFEPLARDGAARTGRLHTAHGVVQTPTFMPVGTAATVKAMRPEEVAATGAQIVLGNTYHLMLRPGAERVARLGGLHRFMNWPGPILTDSGGFQVMSLSQLRRMDKDGVTFRSHLDGSEHRLSPARSTEIQHLLDATITMAFDECTPFPAEPEVAASSMRLSMEWAQRSRDAFVARPGYGQFGIVQGSIYPDLRLESAAALTAIGFEGYAIGGLAVGEGQERMFAALDVTVPALPDDRPRYLMGVGKPSDLVGSVRRGVDMFDCVLPTRSGRTGQAFTRRGTVNLRNARHQDDQRPLDEACRCPACRQYSRAYLHHLVRSEEVLGLMLLTQHNLTYYQDLMAGLRGAITAGTLDAFAAAFEVEQAQGDIPAL

SEQ ID NO: 56256 - protein, 376 aa, Inquilinus sp.
  REGION 1..376: note = tr|A0A554SID9|A0A554SID9_9PROT Queuine tRNA-ribosyltransferase OS=Inquilinus sp. KBS0705; OX = 2578108 GN=tgt PE=3 SV=1
MKFNLTAQDPLSKARAGEVTTDHGVIQTPIFMPVGTAGTVKAVHQRELKDDIEAQIILGNTYHLYLRPGLDTLESAGGLHKFNGWEGPILTDSGGYQVYSLTEVRKIKEEGVTFRSHIDGSRHLFTPENVMDIQRIIGADIIMAFDECTPYPCDYNYAKRSIEMTHRWLKRCCDRFDSTQPKYGYTQTLFPIVQGSVYKDLRVRSAEVIASFEREGNAIGGLSVGEPAEEMYAMTEVVCNILPEQKPRYLMGVGTPVNILENIALGIDMFDCVMPTRNARNGMLFTKSGIINIKNEKWKNDFSPIEADSELFADKCYTKAYLRHLIHSGEMLGAQIATLHNLHFYIWLVKEARKKIIEGEFYNWKNTMVNRLGQRL

SEQ ID NO: 56257 - protein, 383 aa, Insolitispirillum peregrinum
  REGION 1..383: note = tr|A0A1N7JYN7|A0A1N7JYN7_9PROT Queuine tRNA-ribosyltransferase OS=Insolitispirillum peregrinum; OX = 80876 GN=tgt PE=3 SV=1
MSASFSFTLEKTDGGARLGRITTAHGEIQTPVFMPVGTAATVKGMHPESVAATGAKIVLGNTYHLMLRPGADRIERLGGLHRFMNWPGPILTDSGGFQVMSLAKLRKLTEDGVTFQSHIDGSRHTLTPESSTEIQRKLDATITMAFDECTPFPVDRKGAAESMRLSMRWAVRSREAFVARPGYGQFGIVQGSVFPDLRAESIEALTKLDFEGYAVGGLAVGEGQELMFKTLDTTTPLMPVHKPRYLMGVGKPSDIVGAVLRGIDMFDCVMPTRSGRTAQAFTRRGTVNLRNARHMDDPRPLDEHCTCPACRNYSRAYLHHLVRAEEMLGPMLLTWHNIQYYQDLTAGLRDAIANGTTQQFVADFEAGQALGDLEEVPVYGLGK

SEQ ID NO: 56258 - protein, 373 aa, unidentified; identical to SEQ ID NO: 53938
  source 1..373: note = Intestinibacter bartlettii
  REGION 1..373: note = tr|B0A9R4|B0A9R4_9FIRM Queuine tRNA-ribosyltransferase OS=Intestinibacter bartlettii DSM 16795 OX=445973 GN=tgt PE=3 SV=1

SEQ ID NO: 56259 - protein, 373 aa, unidentified; identical to SEQ ID NO: 53938
  source 1..373: note = Intestinibacter bartlettii
  REGION 1..373: note = tr|W1UIK8|W1UIK8_9FIRM Queuine tRNA-ribosyltransferase OS=Intestinibacter bartlettii DORA_8_9 OX=1403940 GN=tgt PE=3 SV=1

SEQ ID NO: 56260 - protein, 377 aa, unidentified
  source 1..377: note = Intestinimonas butyriciproducens
  REGION 1..377: note = tr|A0A2U1CDW3|A0A2U1CDW3_9FIRM Queuine tRNA-ribosyltransferase OS=Intestinimonas butyriciproducens OX=1297617 GN=tgt PE=3 SV=1
MFKVIKTEGCARRGEFSCAHGGVVQTPVFMNVGTQGAIKGAVSAHDLKEIGCQIELSNTYHLHLRPGDDVVRQMGGLHKFMDWDGPILTDSGGFQVFSLAGLRKITEEGVTFASHIDGRRIFMGPEESMRIQSNLGSDIAMAFDECVENPATYEYVKPSCERTLRWLERCKAEHDRLNALPGTVNPHQMLFGINQGGTYADLRIWHMKEIAKLGCDGYAVGGLAVGEPTQTMYDMIEAVEPFMPADKPRYLMGVGTPSNIIEGVARGVDFFDCVMPARNARHAKLFTWEGALNIKNEKYKLDERPIDPNCQCPACRSFSRSYIRHLFAAGEMLGMRLAVLHNLWFYNELAARIRAALDEGCFSAFREAYSRKLETRI

SEQ ID NO: 56261 - protein, 377 aa, unidentified
  source 1..377: note = Intestinimonas butyriciproducens
  REGION 1..377: note = tr|A0A0S2W412|A0A0S2W412_9FIRM Queuine tRNA-ribosyltransferase OS=Intestinimonas butyriciproducens OX=1297617 GN=tgt PE=3 SV=1
MFKVIKTEGCARRGEFSCAHGGVVQTPVFMNVGTQGAIKGAVSAHDLKEIGCQIELSNTYHLHLRPGDDVVRQMGGLHKFMDWDGPILTDSGGFQVFSLAGLRKITEEGVTFASHIDGRRIFMGPEESMRIQSNLGSDIAMAFDECVENPATYEYVKPSCERTLRWLERCKAEHDRLNALPGTVNPHQMLFGINQGGTYADLRIWHMKEIAKLGCDGYAVGGLAVGEPTQTMYDMIDAVEPFMPADKPRYLMGVGTPSNIIEGVARGVDFFDCVMPARNARHAKLFTWEGALNIKNEKYKLDERPIDPNCQCPACRSFSRSYIRHLFAAGEMLGMRLAVLHNLWFYNELAARIRAALDEGCFSAFREAYSRKLETRI

SEQ ID NO: 56262 - protein, 371 aa, Iodobacter fluviatilis
  REGION 1..371: note = tr|A0A377Q6C4|A0A377Q6C4_9NEIS Queuine tRNA-ribosyltransferase OS=Iodobacter fluviatilis OX=537; GN = tgt PE=3 SV=1
MLKFELKATSGGARRGTMTLNHGVVETPVFMPVGTYGTVKAMTPRDLKEIGAQICLGNTFHLWLRPGLEVVEQFGGLHEFMGWDKPILTDSGGFQVFSLGAMRKITEEGVTFQSPVNGDKLFLTPEESMKIQTVLNSDIVMIFDECTPYPADRKQAGDSMRMSYRWAKRSRAEFDAQQNPNALFGIVQGGMYEDLRDESIAGLLEIGFDGMAIGGLSVGEPKEYMERILAHTAPKLPVNKPRYLMGVGTPEDLVYGVSQGIDMFDCVMPTRNARNGMLFTRFGDVKIKNAKHKLDKRPLDETCTCYTCKNFSRAYLHHLFRTGEILAAQLNTIHNLHYYQVVMAEMRAAIETDQFSSHVAQFHADRARGVD

SEQ ID NO: 56263 - protein, 371 aa, Iodobacter sp.
  REGION 1..371: note = tr|A0A3S8ZNX3|A0A3S8ZNX3_9NEIS Queuine tRNA-ribosyltransferase OS=Iodobacter sp. H11R3 OX=2496266; GN = tgt PE=3 SV=1
MLKFELKATSGGARRGTMTLNHGVVETPVFMPVGTYGTVKAMTPRDLKEIGAQICLGNTFHLWLRPGLEVVEQFGGLHEFMGWDRPILTDSGGFQVFSLGAMRKITEEGVTFQSPVNGDKLFLTPEESMKIQTVLNSDIVMIFDECTPYPADRKQAGDSMRMSYRWAKRSRAEFDAQQNPNALFGIVQGGMYEDLRDESIAGLLEIGFDGMAIGGLSVGEPKEDMERILAHTAPKLPVNKPRYLMGVGTPEDLVYGVSQGIDMFDCVMPTRNARNGMLFTRFGDVKIKNAKHKLDKRPLDETCSCYTCKNFSRAYLHHLFRTGEILAAQLNTIHNLHYYQVVMAEMRAAIEADQFTSHVAQFHADRARGVD

SEQ ID NO: 56264 - protein, 371 aa, Iodobacter sp.
  REGION 1..371: note = tr|A0A2G3JAP8|A0A2G3JAP8_9NEIS Queuine tRNA-ribosyltransferase OS=Iodobacter sp. BJB302; OX = 1506510 GN=tgt PE=3 SV=1
MLKFELKATSGGARRGTMTLNHGVVETPVFMPVGTYGTVKAMTPRDLKEIGAQICLGNTFHLWLRPGLEVVEQFGGLHEFMGWDKPILTDSGGFQVFSLGAMRKITEEGVTFQSPVNGDKLFLTPEESMKIQTVLNSDIVMIFDECTPYPADRKQAGDSMRMSYRWAKRSRAEFDAQQNPNALFGIVQGGMYEDLRDESIAGLLEIGFDGMAIGGLSVGEPKEDMERILAHTAPKLSVNKPRYLMGVGTPEDLVYGVSQGIDMFDCVMPTRNARNGMLFTRFGDVKIKNAKHKLDKRPLDETCTCYTCKNFSRAYLHHLFRTGEILAAQLNTIHNLHYYQVVMAEMRAAIEADQFTSHVAQFHADRARGVD

SEQ ID NO: 56265 - protein, 382 aa, Isobaculum melis
  REGION 1..382: note = tr|A0A1H9RLT0|A0A1H9RLT0_9LACT Queuine tRNA-ribosyltransferase OS=Isobaculum melis OX=142588; GN = tgt PE=3 SV=1
MATEPAIKYRLIKTEKHTGARLGEIITPHGTFPTPMFMPVGTLASVKSIAPEELKEMGAGIILSNTYHLWLRPGEDLVEEAGGLHKFMNWDQGILTDSGGFQVFSLSDMRNITEEGVHFKNHLNGSPMFLSPEKAIQIQNKLGPDIMMSFDECPPFDESFDYVKKSIERTSRWAERGLKTHANPDRQGLFGIIQGAGYKELRKQSAKDLVSMDFPGYSIGGLSVGEPKHLMNEVLEYTTPLIPSHKPRYLMGVGSPDSLIDGVIRGVDMFDCVLPTRIARNGTCMTSKGRVVIKNAQYARDFGPIDDKCDCYTCRNYSRAYVRHLIKADETFGLRLTSYHNLYFLLNLMKNVRQAIMDDNLLEFREAFFEEYGFNKPNARNF

SEQ ID NO: 56266 - protein, 392 aa, Isosphaera pallida
  REGION 1..392: note = tr|E8R0B4|E8R0B4_ISOPI Queuine tRNA-ribosyltransferase OS=Isosphaera pallida (strain ATCC 43644 / DSM 9630 / IS1B) OX=575540 GN=tgt PE=3 SV=1
MIDRDGLNATDSLGRPTRFEHGAIRFEVRAADRGCSARVGRLTTPHGVVETPAFMPVGTQATVKGLMPDQLRSVGSTMLLANTYHLALRPGEAIIEELGGLHRFMAWDRPILTDSGGFQVFSLAEKAKLSESGVVFRSHLDGRRLELTPESAVRIQERLGADVAMCLDHCPALPASKETIAEATARTIRWARRCREAHTRSDQALFGITQGGPHADLRAECAQALVEIGFPGYAVGGVSVGEGPEEIRRALEGAVHPLPWNQPRYLMGVGRPEDLLDAVAAGIDLFDCVWPTRNGRNATCMTARGQVRLRNARHARDPRPIEEGCDCPACRAFSRAYLRHLFIAGEMLGPILASLHNLAFLHRLTRDMRRAISEGRYVQFQRDRLAALGSES

SEQ ID NO: 56267 - protein, 371 aa, unidentified
  source 1..371: note = Isosphaeraceae bacterium
  REGION 1..371: note = tr|A0A432MND5|A0A432MND5_9BACT Queuine tRNA-ribosyltransferase OS=Isosphaeraceae bacterium GM2012; OX = 2080755 GN=tgt PE=3 SV=1
MPAPVRFELLGVDTRSNARRGLLRTPHGTVETPVFMPVGTQATVKGVVPELLRACGSQMLLANTYHLALRPGEEVVRSLGGLHRFMAWDGPILTDSGGFQAFSLSDRATLTESGVAFRSHLDGSLLDLTPERAIAIQEALGADVAMVLDHCPALPAGKEAVAEATERTIRWARRCQRARTRDDQAVFGILQGGSHADLRSECAERLVEIGFDGYAIGGVSVGESPEEIRKALEVSTPHLPAHQARYLMGVGRPQDVLDAIAAGVDMFDCVLPTRNGRNATCLTRRGPVRMRNAAHKADPRPIEDGCDCPACSRFSRGYIRHLFLADEMLGPILASVHNLAFLHRLVRDAREAIGEGRYDRFRAEALEALGP

SEQ ID NO: 56268 - protein, 376 aa, unidentified
  source 1..376: note = Izhakiella australiensis
  REGION 1..376: note = tr|A0A1S8YG29|A0A1S8YG29_9ENTR Queuine tRNA-ribosyltransferase OS=Izhakiella australiensis; OX = 1926881 GN=tgt PE=3 SV=1
MKFELDTTDGRARRGRLIFDRGVVETPAFMPVGTYGTVKGMTPEEVQETGAQIILGNTFHLWLRPGQEIMKLHGDLHDFMNWPGPILTDSGGFQVFSLGDIRKITEAGVHFRNPINGDAIFLDPEKSMEIQYDLGSDIVMIFDECTPYPAEWDYAKRSMEMSLRWAKRSRERFDALDNKNALFGIIQGSVYEDLRDVSVKGLVDIGFDGYAVGGLAVGEPKADMHRILEHVCPQIPQDKPRYLMGVGKPEDLVEGVRRGIDMFDCVMPTRNARNGHLFVTDGVVKIRNAKHKDDTSPLDAECDCYTCRNYSRAYLHHLDRCNEILGARLNTIHNLRYYQRLMAGLRKAIEEGTLERFVLGFYQRMGKTAAPLSSDN

SEQ ID NO: 56269 - protein, 376 aa, unidentified
  source 1..376: note = Izhakiella capsodis
  REGION 1..376: note = tr|A0A1I4YIF8|A0A1I4YIF8_9ENTR Queuine tRNA-ribosyltransferase OS=Izhakiella capsodis OX=1367852; GN = tgt PE=3 SV=1
MKFELDTTDGRARRGRLIFDRGVVETPAFMPVGTYGTVKGMTPEEVQDTGAQIILGNTFHLWLRPGQEIMKLHGDLHDFMKWPGPILTDSGGFQVFSLGDIRKITEAGVHFRNPINGDAIFLDPEKSMEIQYDLGSDIVMIFDECTPYPAEWDYAKRSMEMSLRWAQRSRERFDALGNKNALFGIIQGSVYEDLRDVSVRGLVEIGFDGYAVGGLAVGEPKADMHRILEHVCPQIPQDKPRYLMGVGKPEDLVEGVRRGIDMFDCVMPTRNARNGHLFVTDGVVKIRNAKHKDDTSALDAECDCYTCRNYSRAYLHHLDRCNEILGARLNTIHNLRYYQRLMMGLRKAIEEGTLERFVFGFYQRMGKTAPPLSSDN

SEQ ID NO: 56270 - protein, 375 aa, unidentified
  source 1..375: note = Izhakiella sp.
  REGION 1..375: note = tr|A0A4V1G7L9|A0A4V1G7L9_9ENTR Queuine tRNA-ribosyltransferase OS=Izhakiella sp. KSNA2 OX=2579935; GN = tgt PE=3 SV=1
MKFELQTTEGRARRGRLVFERGTVETPAFMPVGTYGTVKGMTPEEVEATGAQIILGNTFHLWLRPGQEIMKLHGSLHDFMQWKGPILTDSGGFQVFSLGDIRKITEEGVHFRNPINGDSIFLSPEKSMEIQYDLGSDIVMIFDECTPYPADWDYAKRSMEMSLRWAKRSRDRFDQLNNPNALFGIIQGSVYEDLRDISVKGLVEIGFDGYAVGGLAVGEPKADMHRILEHVCPQIPADKPRYLMGVGKPEDLVEGVRRGIDMFDCVMPTRNARNGHLFVTDGVVKIRNAKHKSDTSPLDPECDCYTCRHYSRAYLHHLDRCNEILGARLNTIHNLRYYQRLMAGLRQAIEEGKLEHFVADFYTRQGKPVPALSVD

SEQ ID NO: 56271 - protein, 375 aa, unidentified
  source 1..375: note = Jannaschia aquimarina
  REGION 1..375: note = tr|A0A0D1EF65|A0A0D1EF65_9RHOB Queuine tRNA-ribosyltransferase OS=Jannaschia aquimarina OX=935700; GN = tgt PE=3 SV=1
MTRFSFDLTATDGAARTGVIHTPRGEVRTPAFMPVGTAATVKAMLPGSVRETGADILLGNTYHLMLRPTAERIDRLGGLHRFMNWDRPILTDSGGFQVMSLAELRKLTEEGVTFRSHIDGSRHTLTPERSMEIQRLLGSDIVMAFDECPALPAERDRIAASMRLSMRWAQRSRDAFGDRPGHALFGIQQGGLEPDLRAESAEALRGIGFDGYAVGGLAVGEGQEAMFGVLDYAPGQLPEDKPRYLMGVGKPDDIVGAVRRGIDMMDCVLPSRSGRTGQAFTRRGVVNIRNARHADDPRPLDEACACPACRGYSRAYLHHVSRAKEIIASMLMTWHNLHYYQELMAGMRDAIAAGSFDAWEAEFHATRALGDIDPI

SEQ ID NO: 56272 - protein, 376 aa, Jannaschia donghaensis
  REGION 1..376: note = tr|A0A0M6YND8|A0A0M6YND8_9RHOB Queuine tRNA-ribosyltransferase OS=Jannaschia donghaensis; OX = 420998 GN=tgt PE=3 SV=1
MTDRISFHLDATDGKARTGKIQTTRGAIRTPAFMPVGTAATVKGMMPESVRATGADILLGNTYHLMLRPTAERIARLGGLHGFMNWDGPILTDSGGFQVMSLGALRKLDEDGVTFKSHIDGSKHRLTPERSMEIQALLGSDIVMCFDECPALPADRDRIATSMELSMRWAKRSKTAFGDRPGHALFGIQQGGLEQDLRAQSADALRDIGFDGYAIGGLAVGEGQAAMFDCLDYAPDQLPVDRPRYLMGVGKPDDIVGAVARGVDMMDCVLPSRSGRTGQAFTRRGVVNIRNARHADDPRPLDAECACPACSSYSRAYLHHVSRSKEMIAGMLLTWHNLHYYQDLMAGMRGAIAAGTFDAWQAVFHARRAEGDVEPI

SEQ ID NO: 56273 - protein, 376 aa, unidentified
  source 1..376: note = Jannaschia faecimaris
  REGION 1..376: note = tr|A0A1H3RT19|A0A1H3RT19_9RHOB Queuine tRNA-ribosyltransferase OS=Jannaschia faecimaris; OX = 1244108 GN=tgt PE=3 SV=1
MAQDISFQLDATDGKARAGVIRTTRGDIRTPAFMPVGTAATVKGMMPESVRATGADVLLGNTYHLMLRPTAERIDRLGGLHKFMNWNGPILTDSGGFQVMSLGALRKLDEDGVTFKSHIDGSKHRLTPERSMEIQRLLGSDIVMCFDECPSLPADRDRIASSMELSMRWAARSKAAFGDRPGHALFGIQQGGLEQDLRGRSAEALREIGFDGYAVGGLAVGEGQAAMFDCLDYAPDQLPEDRPRYLMGVGKPDDIVGAVARGIDMMDCVLPSRSGRTGQGWTRRGQVNLRNARHADDPRPLDETCDCPACQNYSRAYLHHVIRAKEMIGGMLLTWHNLHYYQDLMAGMRAAIAAGTFASWQTEFHARRAEGDIEPL

SEQ ID NO: 56274 - protein, 376 aa, Jannaschia helgolandensis
  REGION 1..376: note = tr|A0A1H7MTA2|A0A1H7MTA2_9RHOB Queuine tRNA-ribosyltransferase OS=Jannaschia helgolandensis; OX = 188906 GN=tgt PE=3 SV=1
MTQPFSFRCDATDGRARTGAISTPRGEIRTPAFMPVGTAATVKAMLPESVRATGADILLGNTYHLMLRPTAERIDRLGGLHRFMNWDGPILTDSGGFQVMSLGALRKLDEDGVTFKSHIDGSKHRLTPEHSMEIQRLLGSDIVMCFDECPSLPADRDRIATSMELSMRWAARSRAAFGDRPGHALFGIQQGGLDRDLRAQSADALRDIGFDGYAVGGLAVGEGQDAMFDVLDYAPDQLPKDKPRYLMGVGKPDDIVGAVARGIDMMDCVLPSRSGRTGQGWTRRGQVNLRNARHADDPRPLDEACTCPTCQGYSRAYLHHVIRSQEIIGSMLLTWHNLHYFQELMAGMRDAIAGATFTAWQAGFHAMRADGDIERI

SEQ ID NO: 56275 - protein, 376 aa, Jannaschia pohangensis
  REGION 1..376: note = tr|A0A1I3I264|A0A1I3I264_9RHOB Queuine tRNA-ribosyltransferase OS=Jannaschia pohangensis; OX = 390807 GN=tgt PE=3 SV=1
MGKRFSFALGATDGQARTGVISTPRGDIRTPAFMPVGTAATVKAMLPESVAATGADILLGNTYHLMLRPTAERIDRLGGLHHFMNWDKPILTDSGGFQVMSLGALRKLDKDGVTFKSHIDGSRHRLTPERSMEIQRLLGSDIVMCFDECPALPADRDRIAASMRLSMDWAARSRAAFGDRPGHALFGIQQGGLDPELRAESAAALRAIGFEGYAIGGLAVGEGQEAMFDVLDFAPGQLPEDKPRYLMGVGKPDDIVGAVKRGVDMMDCVLPSRSGRTGQGWTRRGQVNLRNARHADDPRPLDEACGCPACTGYSRAYLHHVIRSQEMIGGMLLTWHNLHYFQQIMAEMRAAIAEGTFATWESGFHALRAAGDIEPV

SEQ ID NO: 56276 - protein, 376 aa, Jannaschia rubra
  REGION 1..376: note = tr|A0A0M6XS67|A0A0M6XS67_9RHOB Queuine tRNA-ribosyltransferase OS=Jannaschia rubra OX=282197; GN = tgt PE=3 SV=1
MTQHFSFDLGVTDGGARTGLIRTPRGDIRTPAFMPVGTAATVKAMLPGSVRATGANVLLGNTYHLMLRPTAERIDRLGGLHRFMNWDRPILTDSGGFQVMSLGELRKVDSDGVTFKSHIDGSKHRLTPERSIEIQRLLGSDIVMCFDECPALPADRDRIATSMRLSMDWAERSRAAFGDRPGHALFGIQQGGLDLDLRAESAERLRAIGFDGYAIGGLAVGEGQAAMFDCLDVAPGQLPQDRPRYLMGVGKPDDIVGAVARGVDMMDCVLPSRSGRTGQAWTRRGQVNLRNARHADDPRPLDETCTCPACTGFSRAYLHHVVRAQEIIGSMLLTWHNLQYYQDLMAGMREAIGAGRFATWQKSFHATRAEGDIEPI

SEQ ID NO: 56277 - protein, 376 aa, Jannaschia seohaensis
  REGION 1..376: note = tr|A0A2Y9B5D5|A0A2Y9B5D5_9RHOB Queuine tRNA-ribosyltransferase OS=Jannaschia seohaensis OX=475081; GN = tgt PE=3 SV=1
MSDRFAFSLDATDGPARTGRIETPRGTIRTPAFMPVGTAGTVKGMLPGSVAETGADVLLGNTYHLMLRPGAERIARLGGLHKFMNWPGPILTDSGGFQVMSLGALRKLDPDGVTFRSHIDGSRHRLTPERSMEIQRLLGSDIVMAFDECPALPADRARIASSMRLSMEWAARSREAFGDRPGHALFGIQQGGLEEDLRAESAEALRAIGFDGYAVGGLAVGEGQAAMFGCLDYAPEQLPADKPRYLMGVGKPDDIVGAVARGIDMMDCVLPTRSGRTGQAWTRRGQVNIRNARHADDPRPLDEHCTCPCCRGYSRAYLHHVSRAKEMIAGMLLTWHNLHYYQEIMAGMRAAIPAGRFAAWEAEFHRLRAEGDIAPL

SEQ ID NO: 56278 - protein, 377 aa, Jannaschia seosinensis
  REGION 1..377: note = tr|A0A0M7BCE4|A0A0M7BCE4_9RHOB Queuine tRNA-ribosyltransferase OS=Jannaschia seosinensis; OX = 313367 GN=tgt PE=3 SV=1
MPAQPFAFRLDATDGRARTGAISTPRGQIRTPAFMPVGTAATVKAMLPESVRATGADILLGNTYHLMLRPTAERIDRLGGLHRFMNWDRPILTDSGGFQVMSLGALRKLDADGVTFKSHIDGSKHRLTPERSMEIQRLLGSDIVMCFDECPALPADRDRIAASMRLSMDWAARSRDAFGDRPGHALFGIQQGGLEEDLRAESAERLRSIGFEGYAVGGLAVGEGQEAMFDVLDYAPEQLPADKPRYLMGVGKPDDIVGAVKRGIDMMDCVLPSRSGRTGQAFTRRGVINIRNARHVDDPRPLDEECGCPACRGYSRAYLHHVSRSKEIIGSMLMTWHNLQYYQDLMADMRAAIAEERFEVWERDFHALRAAGDVEPV

SEQ ID NO: 56279 - protein, 376 aa, Jannaschia sp.
  REGION 1..376: note = sp|Q28PC5|TGT_JANSC Queuine tRNA-ribosyltransferase; OS = Jannaschia sp. (strain CCS1) OX=290400 GN=tgt PE=3 SV=1
MTRASSFRLDATSGKARTGVIQTPRGDIRTPAFMPVGTAATVKAMMPESVAATGADILLGNTYHLMLRPTAERIANLGGLHSFMNWDKPILTDSGGFQVMSLADLRKLTEEGVTFRSHIDGSKHLLSPERSMEIQKLLGSDIVMCFDECPALPADRKALDDSMRLSMRWAARSKEAFGDRPGYALFGIQQGGLEEDLREESAKALREIGFDGYAVGGLAVGEGQAAMFGCLDFAPDQLPTDKPRYLMGVGKPDDIVGAVKRGIDMMDCVLPSRSGRTGQAWTRRGQVNIKNARHADDPRPLDEDCTCPACRNYSRAYLHHVFRAQEMISGMLLTWHNLHYYQELMQTMRDAIAANDFAGFEARFHADRAEGDIVPL

SEQ ID NO: 56280 - protein, 377 aa, Jannaschia sp.
  REGION 1..377: note = tr|A0A1B6Z359|A0A1B6Z359_9RHOB Queuine tRNA-ribosyltransferase OS=Jannaschia sp. EhC01 OX=1849359; GN = tgt PE=3 SV=1
MTQRFSFALNATSGRARTGVIQTPRGDIRTPAFMPVGTAATVKAMMPESVAATGADILLGNTYHLMLRPTAERIARLGGLHAFMNWNKPILTDSGGFQVMSLADLRKLTEEGVTFRSHIDGSKHLLSPERSMEIQKLLGSDIVMCFDECPALPADRKALEDSMRLSLRWAARSKEAFGDRPGYALFGIQQGGLEQDLREESARALREIEFDGYAVGGLAVGEGQEAMFGCLDFVPDQLPTGKPRYLMGVGKPDDIVGAVKRGIDMMDCVLPSRSGRTGQAWTRRGQVNIKNARHADDPRPLDEHCTCPACTNYSRAYLHHVFRAQEMISGMLLTWHNLHYYQELMQGMRDAIAADDFAGFEARFHADRSQGDIEPKG

SEQ ID NO: 56281 - protein, 379 aa, Janthinobacterium agaricidamnosum
  REGION 1..379: note = tr|W0UZC9|W0UZC9_9BURK Queuine tRNA-ribosyltransferase OS=Janthinobacterium agaricidamnosum NBRC 102515 = DSM 9628 OX=1349767 GN=tgt; PE = 3 SV=1
MLDFKLLKTDTSGLTKARRGTLTLNHGVVQTPIFMPVGTYGSVKAMSPLELNEINAQIILGNTFHLWLRPGNTVMEKFGGLHDFMGWNKPILTDSGGFQVFSLGAMRKITEEGVHFNSPINGDKLFLSPEVSMQIQRVLNSDIVMQFDECTPYEIDGRPATIEEAAKSMRMSLRWAQRSKNEFHDGGNPNALFGIVQGGMFEDLRDESLARLEEIDFPGIAIGGLSVGEPKEDMMRMLAHVGPRLPANKPHYLMGVGTPEDLVAGVSNGIDMFDCVMPTRNARNGWLFTRFGDIKIKNAKYKDDKAPLDETCGCYACRNFSRAYLHHLHRSKEILGARLNTIHNLHYYLDLMRQMRVALDEDRFHAFTLQFHAERARGA

SEQ ID NO: 56282 - protein, 379 aa, Janthinobacterium agaricidamnosum
  REGION 1..379: note = tr|A0A3G2EFR1|A0A3G2EFR1_9BURK Queuine tRNA-ribosyltransferase OS=Janthinobacterium agaricidamnosum OX=55508 GN=tgt PE=3 SV=1
MLEFTLLKTDTSGLTKARRGTLKLNHGVVQTPIFMPVGTYGSVKAMSPLELNEIDAQIILGNTFHLWLRPGNTVMEKFGGLHGFMGWNKPILTDSGGFQVFSLGAMRKITEEGVHFNSPINGDKLFLSPEVSMQVQRVLNSDIVMQFDECTPYEIQGRPATIEEAAKSMRMSLRWAQRSKDEFHRGENPNALFGIVQGGMFEMLRDESLAKLEEIDFPGIAIGGLSVGEPKEDMMRMLAHVGPRLPANKPHYLMGVGTPEDLVAGVSNGIDMFDCVMPTRNARNGWLFTRFGDIKIKNAKYKEDQAPLDETCSCYACRNFSRAYLHHLHRSKEILGARLNTIHNLHYYLDLMRQMREALDEDRFHAFTLQFHAERARGT

SEQ ID NO: 56283 - protein, 379 aa, Janthinobacterium lividum
  REGION 1..379: note = tr|A0A1S1UC13|A0A1S1UC13_9BURK Queuine tRNA-ribosyltransferase OS=Janthinobacterium lividum; OX = 29581 GN=tgt PE=3 SV=1
MLEFTLLKTDTSGLTKARRGTLKLNHGVVQTPIFMPVGTYGTVKAMSPLELNEIDAQIILGNTFHLWLRPGNTVMEKFGGLHGFMGWNKPILTDSGGFQVFSLGAMRKITEEGVHFNSPINGDKLFLSPEVSMQVQRVLNSDIVMQFDECTPYEIEGRPATIEEAAKSMRMSLRWAQRSKDEFHRGENPNALFGIVQGGMFEMLRDESLAKLEEIDFPGIAIGGLSVGEPKEDMMRMLAHVGPRLPANKPHYLMGVGTPEDLVAGVSNGIDMFDCVMPTRNARNGWLFTRFGDIKIKNAKYKEDQAPLDETCSCYACRNFSRAYLHHLHRSKEILGARLNTIHNLHYYLDLMRQMREALDEDRFHAFTLQFHAERARGT

SEQ ID NO: 56284 - protein, 379 aa, Janthinobacterium lividum; identical to SEQ ID NO: 56282
  REGION 1..379: note = tr|A0A031GW14|A0A031GW14_9BURK Queuine tRNA-ribosyltransferase OS=Janthinobacterium lividum; OX = 29581 GN=tgt PE=3 SV=1

SEQ ID NO: 56285 - protein, 375 aa, Janthinobacterium sp.
  REGION 1..375: note = sp|A6SUU4|TGT_JANMA Queuine tRNA-ribosyltransferase; OS = Janthinobacterium sp. (strain Marseille) OX=375286; GN = tgt PE=3 SV=1
MLNFKLLKTDGNARRGQLTLNHGVIETPIFMPVGTYGSVKAMSPLELNEIDAQIILGNTFHLWLRPGNDIIAKFGGLHEFMGWNKPILTDSGGFQVFSLGEMRKITEEGVHFSSPINGDKLFLSPEVSMQIQRVLNSDIVMQFDECTPYEIDGRPATTEEAAKSMRMSLRWAKRSMDEFNREENPNALFGIVQGGMFENLRDESLAGLEELNFHGVAIGGLSVGEPKEDMMRVLEHVGPRLPANKPHYLMGVGTPEDLVAGVASGIDMFDCVMPTRNARNGWLFTRFGDIKIKNARYKDDKKPLDESCSCYACRNFSRAYLHHLHRTGEILGARLNTIHNLHYYLDLMREMREAISEGRFQLFVSQFHADRARGS

SEQ ID NO: 56286 - protein, 379 aa, Janthinobacterium sp.; identical to SEQ ID NO: 56282
  REGION 1..379: note = tr|A0A1E7VYR9|A0A1E7VYR9_9BURK Queuine tRNA-ribosyltransferase OS=Janthinobacterium sp. HH106; OX = 1537278 GN=tgt PE=3 SV=1

SEQ ID NO: 56287 - protein, 379 aa, unidentified
  source 1..379: note = Janthinobacterium svalbardensis
  REGION 1..379: note = tr|A0A290X3N1|A0A290X3N1_9BURK Queuine tRNA-ribosyltransferase OS=Janthinobacterium svalbardensis; OX = 368607 GN=tgt PE=3 SV=1
MLEFTLLKTDTSGLTRARRGTLKLNHGVVQTPIFMPVGTYGTVKAMSPLELNEIDAQIILGNTFHLWLRPGNTVMEKFGGLHGFMGWNKPILTDSGGFQVFSLGAMRKITEEGVHFSSPINGDKLFLSPEVSMQVQRVLNSDIVMQFDECTPYEIEGRPATLEEAAKSMRMSLRWAQRSKDEFHRGENPNALFGIVQGGMFEMLRDESLAKLEEIDFPGIAIGGLSVGEPKEDMMRMLAHVGPRLPANKPHYLMGVGTPEDLVAGVSNGIDMFDCVMPTRNARNGWLFTRFGDIKIKNAKYKEDQAPLDETCSCYACRNFSRAYLHHLHRSKEILGARLNTIHNLHYYLDLMRQMREALDEDRFHAFTLQFHAERARGT

SEQ ID NO: 56288 - protein, 74 aa, Jejuia pallidilutea
  REGION 1..74: note = tr|A0A090VZ98|A0A090VZ98_9FLAO tRNA-guanine transglycosylase OS=Jejuia pallidilutea OX=504487; GN = JCM19301_1 PE=4 SV=1
MCMKFELKKKDAQSKARAAKITTDHGVIETPIFMPVGTVASVKGVHQRELKNDINPDIILGNTYHLYLRPQTKF

SEQ ID NO: 56289 - protein, 294 aa, Jejuia pallidilutea
  REGION 1..294: note = tr|A0A090W0Q1|A0A090W0Q1_9FLAO Queuine tRNA-ribosyltransferase OS=Jejuia pallidilutea OX=504487; GN = JCM19301_1661 PE=3 SV=1
MNWDRNILTDSGGYQVYSLSANRKIKEEGVKFKSHIDGSYHTFTPENVMEIQRSIGADIIMAFDECTPYPCDYNYAKRSMHMTHRWLDRCINHLEKTPLKYNYNQAFFPIVQGSTYKDLRIQSAEYIANAGAVGNAIGGLSVGEPAEEMYAMTEVVCNVLPEDKPRYLMGVGTPINILENIALGIDMFDCVMPTRNARNGMLFTAYGTINIKNKKWENDFSPIDEMAITFVDTEYSKAYLKHLFSVNELLGKQIATIHNLGFYLWLVREARKHILAGDFAEWKNKMVKQMDNRL

SEQ ID NO: 56290 - protein, 376 aa, Jeongeupia sp.
  REGION 1..376: note = tr|A0A1D9BHX5|A0A1D9BHX5_9NEIS Queuine tRNA-ribosyltransferase OS=Jeongeupia sp. USM3 OX=1906741; GN = tgt PE=3 SV=1
MTQQQGLQFTLHKTSGGARRGTMVLNHGVVETPVFMPVGTYGTVKAMTPRDLNEIEAQICLGNTFHLWLRPGLEVINKFGGLHRFMGWDKPILTDSGGFQVFSLGDLRKITEEGVKFQSPVNGDKLFLTPEESMRIQRALNSDIVMIFDECTPYPADRKQAADSMRMSYRWAKRSRSEFDTLENPNALFGIVQGGMYEDLRDESLAGLDDIGFHGMAIGGLSVGEPKEDMERILAHTAPRLPADKPRYLMGVGTPEDLVYGVSQGIDMFDCVMPTRNARNGMLFTRFGDIKIKNAKHRLDERPLDETCDCYACQNFSRAYLHHLFRSGEILGSQLNTIHNLRYYQVLMAEMRAAIDADAFPAFVARFHADRARGID

SEQ ID NO: 56291 - protein, 381 aa, unidentified
  source 1..381: note = Jeotgalibaca dankookensis
  REGION 1..381: note = tr|A0A1S6IN45|A0A1S6IN45_9LACT Queuine tRNA-ribosyltransferase OS=Jeotgalibaca dankookensis; OX = 708126 GN=tgt PE=3 SV=1
MTEPAITYRLIKEEKHTGARLGEITTPHGTFQTPMFMPVGTLATVKTMTPEELKEMGSQIILSNTYHLWLRPGAELIEEAGGLHKFMNWDQGILTDSGGFQVFSLAKNRKITEEGVHFRNHLNGSKMFLSPEKAIDIENKLGADIIMSFDECPPFDESYDYIKASVERTSRWAERGLKAHKKADTQGLFGIIQGGGNKDLRLQSAHDLLAMDFPGYSIGGLSVGETKEEMNAVLDYITPVIPAHKPRYLMGVGAPDSLIDGVIRGVDMFDCVLPTRIARNGTCMTSQGRLVVKNSKYERDFRPLDEKCDCYTCKNYTRAYIRHLFKANELLGMRLTTYHNLHFLHNLMSNVRQAIMDDNLLEFREAFMEEYGYNKENAKLF

SEQ ID NO: 56292 - protein, 381 aa, unidentified
  source 1..381: note = Jeotgalibaca sp.
  REGION 1..381: note = tr|A0A1U7EB00|A0A1U7EB00_9LACT Queuine tRNA-ribosyltransferase OS=Jeotgalibaca sp. PTS2502; OX = 1903686 GN=tgt PE=3 SV=1
MTEPAIRYRLIKKEKHTGARLGEIITPHGTFQTPMFMPVGTLATVKSMAPEELKDMGSQIILSNTYHLWLRPGADLVEEAGGLHKFMNWDKGILTDSGGFQVFSLAENRKITEEGVHFRNHLNGSKMFLSPEKAIDIQNKLGADIIMSFDECPPFDESYDYIKRSVERTSRWAERGMKAHKKSDQQGLFGIIQGAGYKDLRMQSAKDLVGMDFPGYSIGGLSVGETKEEMNEVLDYITPVIPDHKPRYLMGVGAPDSLIDGVIRGVDMFDCVLPTRIARNGTCMTSKGRLVVKNAIYERDFRPLDENCSCYTCQNYTRAYIRHLFKADETFGLRLTSYHNLHFLINLMTQVRQAIMDDNLLEFREAFMEEYGYNQKNAKKF

SEQ ID NO: 56293 - protein, 381 aa, unidentified
  source 1..381: note = Jeotgalibaca sp.
  REGION 1..381: note = tr|A0A3S9HDJ9|A0A3S9HDJ9_9LACT Queuine tRNA-ribosyltransferase OS=Jeotgalibaca sp. H21T32; OX = 2496265 GN=tgt PE=3 SV=1
MVEPAIRYRLIKKEKHTGARLGEIITPHGTFQTPMFMPVGTLATVKSMSPEELKEMGSQIILSNTYHLWLRPGANLVEEAGGLHKFMNWDKGILTDSGGFQVFSLAENRKITEEGVHFRNHLNGAKMFLSPEKAIDIENKLGADIIMSFDECPPFNESYDYIKKSIERTSRWAERGLQAHKKPAEQGLFGIIQGGGYKDLRLQSAKDLMSMDFPGYSIGGLSVGETKEEMNAVLDYLTPVIPDEKPRYLMGVGAPDSLIDGVIRGIDMFDCVLPTRIARNGTCMTSKGRLVVKNAKFERDFRPLDENCSCYTCQNYTRAYIRHLFKADETFGLRLTSYHNLHFLINLMNQVRQAILDDNLLEFREAFIEEYGYNQKNAKNF

SEQ ID NO: 56294 - protein, 379 aa, Jeotgalibacillus alimentarius
  REGION 1..379: note = tr|A0A0C2VWV9|A0A0C2VWV9_9BACL Queuine tRNA-ribosyltransferase OS=Jeotgalibacillus alimentarius; OX = 135826 GN=tgt PE=3 SV=1
MSAIRYEHIKTCKQTGARLGIVHTPHGSFETPTFMPVGTMATVKTMSPEDLKELNAGIILSNTYHLWLRPGHDIIKEAGGLHKFMNWDRPILTDSGGFQVFSLSKFRNIQEEGVHFRNHINGDKLFLSPEKAMEIQNALGSDIMMAFDECPPYPAEEKYMKDSVERTTRWAERCLQAHNRPEDQGLFGIVQGGEYEHLRRQSAKDLVSMDFPGYAVGGLSVGEPKDVMNRVLEFTTPWLPEDKPRYLMGVGSPDSLIDGAMRGIDMFDCVLPTRIARNGTLMTSEGRLVVKNAKYARDFSPIDPNCDCHVCKNYSRAYIRHLIKCEETFGIRLTTYHNLHFLINLMGNVRQAIKEDRLGDFREEFFEQYGFNQPNAKNF

SEQ ID NO: 56295 - protein, 379 aa, Jeotgalibacillus campisalis
  REGION 1..379: note = tr|A0A0C2R799|A0A0C2R799_9BACL Queuine tRNA-ribosyltransferase OS=Jeotgalibacillus campisalis; OX = 220754 GN=tgt PE=3 SV=1
MTAIRYEHIKTCKQTGARLGIVHTPHGSFETPAFMPVGTMATVKTMSPEDLTELGAGIILSNTYHLWLRPGHDIIKEAGGLHKFMNWNKPILTDSGGFQVFSLSKFRDIKEEGVHFRNHINGDKLFLSPEKAMEIQNALGSDIMMAFDECPPYPAEEKYMKDSVERTTRWAERCLEAHSRPQDQGLFGIIQGGEYEALRKQSAKDLVSMDFPGYAVGGLSVGEPKDVMNRVLEFTTPWMPENKPRYLMGVGSPDSLIDGAMRGIDMFDCVLPTRIARNGTLMTSEGRLVVKNAKYARDFGPIDPNCDCHVCKNYSRAYIRHLIKCEETFGIRLTTYHNLHFLINLMGQVRKAIKEDRLGDFREEFFEQYGFNKPNAKNF

SEQ ID NO: 56296 - protein, 379 aa, unidentified
  source 1..379: note = Jeotgalibacillus malaysiensis
  REGION 1..379: note = tr|A0A0B5AUC9|A0A0B5AUC9_9BACL Queuine tRNA-ribosyltransferase OS=Jeotgalibacillus malaysiensis; OX = 1508404 GN=tgt PE=3 SV=1
MSAIRYEHIKTCKQTGARHGIVHTPHGSFETPTFMPVGTMATVKTMSPEDLKELNAGIILSNTYHLWLRPGHDIIKEAGGLHKFMNWDRPILTDSGGFQVFSLSKFRNIQEEGVHFRNHINGDKLFLSPEKAMEIQNALGSDIMMAFDECPPYPAEEKYMKDSVERTTRWAERCLEAHTRPEDQGLFGIIQGGEYEHLRRQSARDLVSMDFPGYAVGGLSVGEPKDVMNRVLEFTTPWMPEDKPRYLMGVGSPDSLIDGAMRGIDMFDCVLPTRIARNGTLMTSEGRLVVKNAKYARDFSPIDPNCDCHVCKNYSRAYIRHLIKCEETFGIRLTTYHNLHFLINLMGNVRQAIKEDRLGDFREEFFEQYGFNQPNAKNF

SEQ ID NO: 56297 - protein, 381 aa, Jeotgalibacillus marinus; identical to SEQ ID NO: 52072
  REGION 1..381: note = tr|A0A0M0KWI2|A0A0M0KWI2_9BACL Queuine tRNA-ribosyltransferase OS=Jeotgalibacillus marinus; OX = 86667 GN=tgt PE=3 SV=1

SEQ ID NO: 56298 - protein, 379 aa, unidentified
  source 1..379: note = Jeotgalibacillus proteolyticus
  REGION 1..379: note = tr|A0A2S5GF35|A0A2S5GF35_9BACL Queuine tRNA-ribosyltransferase OS=Jeotgalibacillus proteolyticus; OX = 2082395 GN=tgt PE=3 SV=1
MSAIRYEHIKTCKQTGARLGIVHTPHGSFETPAFMPVGTMATVKTMSPEDLMELNAGIILSNTYHLWLRPGHDIIKEAGGLHKFMNWDKPILTDSGGFQVFSLSKFRDIKEEGVHFKNHINGDKLFLSPEKAMEIQNALGSDIMMAFDECPPYPAEEKYMRDSVERTSRWAERCIAAHERPSDQGLFGIVQGGEYEALRKQSAKDLVSLDFPGYAVGGLSVGEPKDVMNRVLEFTTPWLPADKPRYLMGVGSPDSLIDGAIRGIDMFDCVLPTRIARNGTLMTSEGRLVVKNAKYARDFGPLDPNCECHVCKNYSRAYIRHLIKCEETFGIRLTTYHNLHFLINLMGQVRQAIKEDRLGDFREEFFEQYGFNQPNAKNF

SEQ ID NO: 56299 - protein, 379 aa, Jeotgalibacillus salarius
  REGION 1..379: note = tr|A0A4Y8LFP4|A0A4Y8LFP4_9BACL Queuine tRNA-ribosyltransferase OS=Jeotgalibacillus salarius; OX = 546023 GN=tgt PE=3 SV=1
MSAITYEHIKTCKQTGARLGIVHTPHGSFETPTFMPVGTMATVKTMSPEDLKELNAGIILSNTYHLWLRPGHDIIKEAGGLHKFMNWDRPILTDSGGFQVFSLSKFRNIQEEGVHFRNHINGDKLFLSPEKAMEIQNALGSDIMMAFDECPPYPAEEKYMKDSVERTTRWAERCLEAHGRPEDQGLFGIVQGGEYEHLRRQSANDLVSMDFPGYAIGGLSVGEPKDVMNRVLEFTTPWLPEDKPRYLMGVGSPDSLIDGAMRGIDMFDCVLPTRIARNGTLMTSEGRLVVKNAKYARDFSPIDPNCDCHVCKNYSRAYIRHLIKCEETFGIRLTTYHNLHFLINLMGNVRQAIKEDRLGDFREEFFEQYGFNQPNAKNF

SEQ ID NO: 56300 - protein, 379 aa, Jeotgalibacillus soli
  REGION 1..379: note = tr|A0A0C2V6E5|A0A0C2V6E5_9BACL Queuine tRNA-ribosyltransferase OS=Jeotgalibacillus soli OX=889306; GN = tgt PE=3 SV=1
MSAIRYEHIKSCKQTGARLGIVHTPHGSFETPTFMPVGTMATVKTMSPEDLKELEAGIILSNTYHLWLRPGHDIIKEAGGLHKFMNWDRPILTDSGGFQVFSLSKFRRIEEEGVYFRNHINGDKLFLSPEKAMEIQNALGSDIMMAFDECPPYPAEEKYMRDSVERTTRWAERCIAAHARPHDQGLFGIVQGGEYEALRKQSAQDLVAMDFPGYAVGGLSVGEPKDVMNRVLEFTTPWLPADKPRYLMGVGSPDSLIDGAIRGIDMFDCVLPTRIARNGTLMTSEGRLVVKNAAYARDFGPLDPNCDCYVCKNYSRAYIRHLIKCEETFGIRLTTYHNLHFLINLMGQVRQAIKEDRLGDFREEFFEQYGFNQPNAKNF

SEQ ID NO: 56301 - protein, 379 aa, Jeotgalibacillus sp.
  REGION 1..379: note = tr|A0A4R5XTY8|A0A4R5XTY8_9BACL Queuine tRNA-ribosyltransferase OS=Jeotgalibacillus sp. S-D1; OX = 2552189 GN=tgt PE=3 SV=1
MSAVRYEHIKTCKQTGARLGIVHTPHGSFETPAFMPVGTMATVKTMSPEDLKELGAGIILSNTYHLWLRPGHEIIKEAGGLHKFMNWDKPILTDSGGFQVFSLSKFRDIKEEGVHFRNHINGDKLFLSPEKAMEIQNALGSDIMMAFDECPPYPAEEKYMKDSVERTSRWAERCLSAHARPMDQGLFGIVQGGEYEALRKQSAKDLVSMDFPGYAVGGLSVGEPKDVMNRVLEFTTPWLPTDKPRYLMGVGSPDSLIDGAIRGIDMFDCVLPTRIARNGTLMTSEGRLVVKNAKYARDFGPIDPNCDCHVCKNYSRAYIRHLIKCEETFGIRLTTYHNLHFLINLMGQVRQAIKEDRLGDFREEFFEQYGFNKPNAKNF

SEQ ID NO: 56302 - protein, 379 aa, Jeotgalibacillus sp.
  REGION 1..379: note = tr|A0A4Y8KWK1|A0A4Y8KWK1_9BACL Queuine tRNA-ribosyltransferase OS=Jeotgalibacillus sp. R-1-5s-1; OX = 2555897 GN=tgt PE=3 SV=1
MSAIRYEHIKTCKQTGARLGIVHTPHGSFETPTFMPVGTMATVKTMSPEDLKELNAGIILSNTYHLWLRPGHDIIREAGGLHKFMNWDRPILTDSGGFQVFSLSKFRDIKEEGVHFRNHINGDKLFLSPEKAMEIQNALGSDIMMAFDECPPYPAEEKYMKDSVERTTRWAERCLEAHARPHDQGLFGIIQGGEYEHLRRQSARDLVSMDFPGYAVGGLSVGEPKDVMNRVLEFTTPWMPEDKPRYLMGVGSPDSLIDGAIRGIDMFDCVLPTRIARNGTLMTSEGRLVVKNAKYARDFGPLDPNCDCHVCKNYSRAYIRHLIKCEETFGIRLTTYHNLHFLINLMGQVRQAIREDRLGDFREEFFEQYGFNQPNAKNF

SEQ ID NO: 56303 - protein, 381 aa, Jeotgalicoccus halophilus
  REGION 1..381: note = tr|A0A1G9E2V3|A0A1G9E2V3_9STAP Queuine tRNA-ribosyltransferase OS=Jeotgalicoccus halophilus; OX = 586411 GN=tgt PE=3 SV=1
MAIRYEHIKTCKQTGARLGKLHTPHGVIDTPIFMPVGTLATVKSMSPEELADIGSQIILSNTYHLWLRPGNDIIKEAGGLHKFMNWDKPILTDSGGFQVFSLSHRRKITEDGVHFRSHLDGSKLFLGPEGAMDIQHDLGSDIMMSFDECAAIPSTHEYVKNSVERTTRWAERGLNHHIKKGHDKHQALFGIVQGGEYKDLREQSAKDLVSMDFPGYSIGGLSVGEPKPVMYRVLEETVPLLPEDKPRYLMGIGSPDALIEGVIRGVDMFDCVLPTRIARNGTTMTSQGRVVVKNKIYERDFTPLDPNCDCYTCKNYTRAYLRHLFKANEILGLRLTTYHNLYFLLNLMEDVRTAILNDNLLDFKEAFFESYGLNTENPKNF

SEQ ID NO: 56304 - protein, 381 aa, Jeotgalicoccus halotolerans
  REGION 1..381: note = tr|A0A3E0B3M6|A0A3E0B3M6_9STAP Queuine tRNA-ribosyltransferase OS=Jeotgalicoccus halotolerans; OX = 157227 GN=tgt PE=3 SV=1
MAIRYEHIKTCKQTGARLGKLHTPHGVIDTPIFMPVGTLATVKTMSPEELADIGSQIILSNTYHLWLRPGNDIVKEAGGLHKFMNWDKPILTDSGGFQVFSLSHRRKITEEGVHFRSHLDGSKLFLGPEGAMDIQHDLGSDIMMSFDECAAIPSTHDYVKQSVERTTRWADRGLNHHIKKGHDKHQALFGIVQGGEYKDLREQSAKDLVAMDFPGYSIGGLSVGEPKPVMYRVLEETVNLLPEDKPRYLMGIGSPDALIEGVIRGVDMFDCVLPTRIARNGTTMTSEGRVVVKNKKFERDFTPLDPNCDCYTCKNYTRAYLRHLFKANEILGLRLTTYHNLYFLLNLMEDVRTAILNDNLLDFKEAFFESYGLNTENPKNF

SEQ ID NO: 56305 - protein, 381 aa, Jeotgalicoccus nanhaiensis
  REGION 1..381: note = tr|A0A4Y9HME4|A0A4Y9HME4_9STAP Queuine tRNA-ribosyltransferase OS=Jeotgalicoccus nanhaiensis; OX = 568603 GN=tgt PE=3 SV=1
MAIRYEHIKTCKQTGARLGKLHTPHGVIDTPIFMPVGTLATVKTMSPEELADIGSQIILSNTYHLWLRPGNDIVKEAGGLHKFMNWDKPILTDSGGFQVFSLSHRRKITEEGVHFRSHLDGSKLFLGPEGAMDIQHDLGSDIMMSFDECAAIPSTHDYVKQSVERTTRWADRGLNHHIKKGHDKHQALFGIVQGGEYKDLREQSAKDLVAMDFPGYSIGGLSVGEPKPVMYRVLEETVHLLPEDKPRYLMGIGSPDALIEGVIRGVDMFDCVLPTRIARNGTTMTSEGRVVVKNKKFERDFTPLDPNCDCYTCKNYTRAYLRHLFKANEILGLRLTTYHNLYFLLNLMEDVRTAILNDNLLDFKEAFFESYGLNTENPKNF

SEQ ID NO: 56306 - protein, 381 aa, unidentified
  source 1..381: note = Jeotgalicoccus saudimassiliensis
  REGION 1..381: note = tr|A0A078M0P3|A0A078M0P3_9STAP Queuine tRNA-ribosyltransferase OS=Jeotgalicoccus saudimassiliensis OX=1461582 GN=tgt PE=3 SV=1
MAIRYEHIKTCKQTGARLGKLHTPHGVIDTPIFMPVGTLATVKTMSPEELADIGSQIILSNTYHLWLRPGNDIVKEAGGLHKFMNWDKPILTDSGGFQVFSLSHRRKITEEGVHFRSHLDGSKLFLGPEGAMDIQHDLGSDIMMSFDECAAIPSTHDYVKKSVERTTRWADRGLNHHIKKGHDKHQALFGIVQGGEYKDLREQSAKDLVAMDFPGYSIGGLSVGEPKPVMYRVLEETVHLLPEDKPRYLMGIGSPDALIEGVIRGVDMFDCVLPTRIARNGTTMTSQGRVVVKNKIYERDFTPLDPNCDCYTCKNYTRAYLRHLFKANETLGLRLTTYHNLYFLLNLMEDVRTAILNDNLLDFKEAFFESYGLNKENPKNF

SEQ ID NO: 56307 - protein, 381 aa, Jeotgalicoccus sp.
  REGION 1..381: note = tr|A0A358JSF9|A0A358JSF9_9STAP Queuine tRNA-ribosyltransferase OS=Jeotgalicoccus sp. OX=1871619; GN = tgt PE=3 SV=1
MVIRYEHIKTCKQTGARLGKLHTPHGVIDTPIFMPVGTLATVKSMSPEELADIGSQIILSNTYHLWLRPGNDIIKEAGGLHKFMNWDKPILTDSGGFQVFSLSHRRQITEEGVHFRSHLDGSKLFLGPEGAMDIQHDLGSDIMMSFDECAAIPSTHDYVKQSVERTTRWAERGLNHHVKKGHDKHQALFGIVQGGEYKDLREQSAKDLVSMDFPGYSIGGLSVGEPKPVMYRVLEETVHLLPEDKPRYLMGIGSPDALIEGVIRGVDMFDCVLPTRIARNGTTMTSQGRVVVKNKKFERDFTPLDPNCDCYTCKNYTRAYLRHLFKANEILGLRLTTYHNLYFLLNLMEDVRTAILNDNLLDFKEAFFESYGLNKENPKNF

SEQ ID NO: 56308 - protein, 376 aa, Jhaorihella thermophila
  REGION 1..376: note = tr|A0A1H5W5C0|A0A1H5W5C0_9RHOB Queuine tRNA-ribosyltransferase OS=Jhaorihella thermophila; OX = 488547 GN=tgt PE=3 SV=1
MTQGFSFDLHATDGKARTGVIRTPRGEIRTPAFMPVGTAGTVKAMLPESVRETGADIILGNTYHLMLRPTAELIDRMGGLHRFMNWHGPILTDSGGFQVMSLAELRKLTERGVTFRSHIDGSRHELTPERSMEIQRLLGSDIVMAFDECPALPADRTRIAESMRLSMRWAQRSRDAFGDRPGHALFGIQQGGLERDLREESAEALKAIGFDGYAVGGLAVGEGQEAMFATLDFAPDMLPVDKPRYLMGVGKPDDIVGAVKRGIDMMDCVLPSRSGRTGQVFTRHGVLNIKNARHREDPRPLDESCTCPACRGYSRAYLHHVFRANEIISAMLLTWHNLHYFQELMAGMRAAIAEGRFAAWEAEFHARRALGDIEPL

SEQ ID NO: 56309 - protein, 378 aa, unidentified
  source 1..378: note = Jiella sp.
  REGION 1..378: note = tr|A0A4Y8RW79|A0A4Y8RW79_9RHIZ Queuine tRNA-ribosyltransferase OS=Jiella sp. CBS5Q-3 OX=2558362; GN = tgt PE=3 SV=1
MTERFSFSLLATDGRARRGEIAMPRGIVRTPAFMPVGTAGTVKAMYLDQVRDLGADIILGNVYHLMLRPGAERVARLGGLHDFARWPHPILTDSGGFQVMSLAELRKLDETGVTFRSHVDGSVHSLTPERSIEIQGLLDSDIQMQLDECIRLPAERAEIERAMELSLRWAERCRVAFGDQPGKAMFGIVQGGDLADLRQRSAERLAAMDLKGYAVGGLAVGEPQEVMLAILDETLPVLPQEKPRYLMGVGTPDDIIKSVARGIDMFDCVMPTRAGRHGLAYTRFGKINLKNARHADDPRPLDETSDCPAARDYSRAYLHHLVKTNESLGGMLLTWNNLAYYQQLMAGIRAAIEAKRYDAFCAEVTEAWAKGDMPALAG

SEQ ID NO: 56310 - protein, 376 aa, unidentified
  source 1..376: note = Jiulongibacter sediminis
  REGION 1..376: note = tr|A0A0P7C421|A0A0P7C421_9BACT Queuine tRNA-ribosyltransferase OS=Jiulongibacter sediminis; OX = 1605367 GN=tgt PE=3 SV=1
MKFELTTKDAGSKARAGKIITDHGEILTPIFMPVGTAGTVKGVHQRELKDDIKAQIILGNTYHLYLRPGLEIIQQTGGLHKFNGWDGPILTDSGGYQVFSLKEIRKITEEGVKFNSHIDGSKHLFTPENVMDIQRTIGADIIMAFDECPPYPCEYDYAENSMHLTHRWLKRCINRFNETEGKYGYSQALFPIVQGSVYKDLRKASAEFIAEQNQAGNAIGGLSVGEPAEDMYEMLEVVNNILPEEKPRYLMGVGTPANILEAIALGTDMFDCVMPTRNARNGMLFTTEGIINIRNKKWKDDFSPIDPGLDNYASNFYSKAYLKHLIKCQEMLGAQIASIHNLAFYLWLVKQAREHILAGDFTSWKNEMTKKLMQRL

SEQ ID NO: 56311 - protein, 380 aa, Johnsonella ignava
  REGION 1..380: note = tr|G5GH89|G5GH89_9FIRM Queuine tRNA-ribosyltransferase OS=Johnsonella ignava ATCC 51276; OX = 679200 GN=tgt PE=3 SV=1
MIYKVIAKQGNAKSAHMKTVHGEVETPVFMNVGTVAAIKGAVSTEDLRDIKTQVQLSNTYHLHVRPGDEIVKKLGGLHRFMNWDRPILTDSGGFQVFSLAGLRKIKEEGVYFNSHIDGRKIFMGPEESMQIQSNLASTIAMAFDECPGALSEREYIEQSVQRTSRWLVRCKDKIDCLNKLENTINKNQLLFGINQGGIFEDIRIRHAKEISQMNLDGYAIGGLAVGESHEEMYNILDAVVPYLPYDKPTYLMGVGTPANILEAVERGIDFFDCVYPSRNGRHGHVYTDSGKLNLFNKKYELDEAPIEDGCGCMACRAHSRAYIRHLLKAGEMLGMRLCVLHNLYFYNKMMSEIRDAIRYGDFKEYKRVKLKSMYDRQDKI

SEQ ID NO: 56312 - protein, 371 aa, Jonquetella anthropi
  REGION 1..371: note = tr|C9M8C3|C9M8C3_9BACT Queuine tRNA-ribosyltransferase OS=Jonquetella anthropi E3_33 E1; OX = 645512 GN=tgt PE=3 SV=1
MFEFKVLAECPETGARAGEFVTPHGVIPTPVFMPVGTLATVKAMSPDELKELGASIILSNTYHLWLRPGPELVEKAGGLHGFMNWDRPILTDSGGFQVFSLSSLNQITEEGVHFRSHLNGAPLFLSPELSMDIQEKLGADIAMCFDQCLKLPATREEAERATELTLKWAGRCKTAHSRSDQALFGIVQGGLFDDLRSRCADELTRLDFNGYGIGGLSVGETAQEMYACLDKLTPLLPRTKPRYLMGVGRPDNLLEGVARGVDMFDCVMPTRDGRTGTVHSSRGKYSIKASRFAEDFGPLDPDCSCYACTHFSRAYIRHLFRCGEILASRLISWHNLHFLVGLMRGARAAILDGTFPEFKARALSLMGGSYL

SEQ ID NO: 56313 - protein, 371 aa, Jonquetella anthropi; identical to SEQ ID NO: 56312
  REGION 1..371: note = tr|H0ULT2|H0ULT2_9BACT Queuine tRNA-ribosyltransferase OS=Jonquetella anthropi DSM 22815; OX = 885272 GN=tgt PE=3 SV=1

SEQ ID NO: 56314 - protein, 376 aa, Joostella marina
  REGION 1..376: note = tr|I3C6F6|I3C6F6_9FLAO Queuine tRNA-ribosyltransferase OS=Joostella marina DSM 19592; OX = 926559 GN=tgt PE=3 SV=1
MEFKLSGKDAGSKARAGVVTTDHGAIETPIFMPVGTVATVKGVHQRELKEDINPDIILGNTYHLYLRPKTSIIEQAGGLHKFMNWDRNILTDSGGFQVYSLSDNRKIKEEGVKFKSHIDGSYHFFTPENVMDIQRTIGADIIMAFDECTPYPCDYNYAKRSMHMTHRWLDRCIKRFNETPDKYGYEQTLFPIVQGSTYKDLRRQSAEYIANSGAQGNAIGGLSVGEPAEEMYEMTEVVCEILPEDKPRYLMGVGTPINILENIALGIDMFDCVMPTRNARNGMLFTAHGTINIKNKKWEADFSPIDEMGITDVDTYYTKAYLRHLFAANEYLGKQIATIHNLGFYLWLVREARKHILAGDFTDWKNKMVKQMDKRL

SEQ ID NO: 56315 - protein, 376 aa, unidentified
  source 1..376: note = Kaistia algarum
  REGION 1..376: note = tr|A0A2S5TXT0|A0A2S5TXT0_9RHIZ Queuine tRNA-ribosyltransferase OS=Kaistia algarum OX=2083279; GN = tgt PE=3 SV=1
MTDRFTFTLLGTDGMARRGEVSMPRGKIRTPAFMPVGTAGTVKAMYPGQVRELGSDIILGNTYHLMLRPGAERVAKLGGLHVFANWPHPILTDSGGFQVMSLSQLRKMNEHGVTFQSHIDGRRYELTPERSVEIQGLLDSDIQMQLDECVALPASEAEIERAMQLSLRWAERSKAAFGDQPGKAIFGIVQGGDNPRLRLESADALAAMDFKGYSIGGLAVGEPQHVMLEILSITTPRLPANKPRYLMGVGTPDDILESVARGVDMFDCVMPTRAGRHGLAFTRFGKVNLKNARHAEDHRPLDEASDCPASRDYSRAYLHHLFKANETLAAMLLTWNNLAYYQALMAGIRAAIDERRFETFRLATKEGWARGDISAL

SEQ ID NO: 56316 - protein, 293 aa, unidentified
  source 1..293: note = Kaistia algarum
  REGION 1..293: note = tr|A0A2S5TNI0|A0A2S5TNI0_9RHIZ Queuine tRNA-ribosyltransferase (Fragment) OS=Kaistia algarum; OX = 2083279 GN=C3941_28605 PE=3 SV=1
MKFEKLGQSGRARRGRLTLEHGVVETPVFMPVGTYGTVKGMLPRDIEDIKAQIILGNTFHLYLRPGLEVIKEHGGLHKFMKWDKPILTDSGGFQVFSLGAMRKIKEDGVTFRSPIDGSKVFLSPEISMDIQHTLNSDVVMIFDECTPYPATHEEAQKSLQLSLRWAKRCKTQHHDVLENKNALFGIIQGGMYEDLRDESLKGLLEVGFDGYAIGGLSVGEPKEEMIKVLDYLPEKMPADKPRYLMGVGKPEDIVEGIRRGVDMFDCVMPTRNARNGHYFVTDGLVRIRNSKYR

SEQ ID NO: 56317 - protein, 376 aa, Kaistia soli
  REGION 1..376: note = tr|A0A1M5GJ30|A0A1M5GJ30_9RHIZ Queuine tRNA-ribosyltransferase OS=Kaistia soli DSM 19436; OX = 1122133 GN=tgt PE=3 SV=1
MSERFTFTLLKSDGMARRGEITMPRGTIRTPAFMPVGTAGTVKAMYPGQVRELGADIILGNTYHLMLRPGAERVAKLGGLHTFANWPHPILTDSGGFQVMSLSQLRKMDERGVTFQSHIDGRRYELTPERSVEIQGLLDSDIQMQLDECVALPASESEIERAMQLSLRWAERSKAAFGDQPGKAIFGIVQGGDNERLRAQSATALREMDFKGYSIGGLAVGEPQDVMLRILAMTTPILPTEKPRYLMGVGTPDDILESVARGVDMFDCVMPTRAGRHGLAFTRFGKVNIKNARHAEDHRPLDEASDCPASRDYSRAYLHHLFKANETLGAMLLTWNNLAYYQSLMAGIRAAIDEARFEAFRISTKEGWARGDIAAL

SEQ ID NO: 56318 - protein, 375 aa, Kaistia sp.
  REGION 1..375: note = tr|A0A1E4CT25|A0A1E4CT25_9RHIZ Queuine tRNA-ribosyltransferase OS=Kaistia sp. SCN 65-12; OX = 1660103 GN=tgt PE=3 SV=1
MSAFSFTVLATDGKARRGEISMPRGKIRTPAFMPVGTGGTVKAMYMDQVRGTGADIILGNTYHLMLRPGAERVARLGGLHEFARWPHPILTDSGGFQVMSLSKLRKLTEKGVTFRSHIDGAPYEMTPERSIEIQGLLDSDIQMQLDECTALPAERKEIERAMELSLRWAERCKAAFGEQPGKAMFGIVQGGDAADLRVRSAQALAAMDLKGYAVGGLAVGEPQAVMLDMLDVTCPELPAEKPRYLMGVGTPDDILKSVARGIDMFDCVMPTRAGRHGLAYTRRGKVNLRNARHADDPRPLDEESDCPAARDYSRAYLHHLVRSQEALGAMLLSWNNLSYYQHLMQAIRAAIEARDFASRAAELAQGWAQGDIPAR

SEQ ID NO: 56319 - protein, 374 aa, unidentified
  source 1..374: note = Kalamiella piersonii
  REGION 1..374: note = tr|A0A3A9J717|A0A3A9J717_9GAMM Queuine tRNA-ribosyltransferase OS=Kalamiella piersonii OX=2364647; GN = tgt PE=3 SV=1
MKFELDTTDGRARRGRLIFDRGVVETPAFMPVGTYGTVKGMTPEEVQETGAQIILGNTFHLWLRPGQEIMKLHGDLHDFMQWKGPILTDSGGFQVFSLGDIRKITEAGVHFRNPINGDPIFLDPEKSMEIQFDLGSDIVMIFDECTPYPADWDYAKRSMEMSLRWAKRSRDRFDSLGNKNALFGIIQGSVYEDLRDVSVKGLVEIGFDGYAVGGLAVGEPKEDMHRILEHVCPQIPQDKPRYLMGVGKPEDLVEGVRRGIDMFDCVMPTRNARNGHLFVTDGVVKIRNAKHKDDTSPLDAECDCYTCRNYSRAYLHHLDRCNEILGARLNTIHNLRYYQRLMAGLRQAIEEGKLERFVSEFYQRTGKAVPPLNV

SEQ ID NO: 56320 - protein, 377 aa, Kandleria vitulina
  REGION 1..377: note = tr|A0A0R2HKJ8|A0A0R2HKJ8_9FIRM Queuine tRNA-ribosyltransferase OS=Kandleria vitulina DSM 20405; OX = 1410657 GN=tgt PE=3 SV=1
MKDFWYELKHVCKQTGARYGILHTPHGDVETPMFMPVGTLATVKGISPEQLKEMGSQVILSNTYHLWLRPGNDVVKKAGGLHKFMNYDGPMLTDSGGFQVFSLGKTRKIEEEGVTFKSIIDGSQLFLSPEKAIQIQEDLGADMIMSFDECAPYPASREYMEKSVARTIRWAKRGKDAHTREDQALFGIVQGGEYPDIREKCAKALVEMDFPGYSIGGTSVGEPKDVMYKMIDDTIPFLPEDKPRYLMGVGNPIDLIEAAIRGIDMYDCVLPTRVARHGALMTHYGRMNINNQKFKYDFTPIDDMCHCYTCRNYTRAYLRHLHKSDEIFGKSLLSIHNVAFLLDLAKDIREAIKEDRLGDFKEEFLDRYGRDVYERAF

SEQ ID NO: 56321 - protein, 377 aa, Kandleria vitulina; identical to SEQ ID NO: 56320
  REGION 1..377: note = tr|A0A1H2QIY6|A0A1H2QIY6_9FIRM Queuine tRNA-ribosyltransferase OS=Kandleria vitulina OX=1630; GN = tgt PE=3 SV=1

SEQ ID NO: 56322 - protein, 375 aa, Kangiella geojedonensis
  REGION 1..375: note = tr|A0A0F6TRE2|A0A0F6TRE2_9GAMM Queuine tRNA-ribosyltransferase OS=Kangiella geojedonensis; OX = 914150 GN=tgt PE=3 SV=1
MKFDLNKTDGQARRGQLTFERGTIQTPAFMPVGTYGTVKGLTPEEIKSLGAEIILGNTFHLMLRPGTDIIEQHGDLHDFMNWDKPILTDSGGFQVFSLGKLRKITEKGVEFRSPVNGSKVFLGPEEAMEVQRKLGSDIVMIFDECTPYPATEAEARESMELSLRWAKRSKDAHEAGFTDKEPTALFGIVQGGMYPHLRKESLEGLTDIGYDGYAIGGLSVGEPKDEMLKVLNHLTPEMPDDKPRYLMGVGKPADIVEAVRRGVDMFDCVMPTRNARNGHLFTRKGVVKLRNSHNKTFTGPLDEVCECYTCKNYSRAYLHHLDKCNEMLGAKLNTIHNLHYYQDLMDGLRKAIETGTLSDFVKEFYAAQDKDVPEL

SEQ ID NO: 56323 - protein, 373 aa, Kangiella koreensis
  REGION 1..373: note = tr|C7RB45|C7RB45_KANKD Queuine tRNA-ribosyltransferase OS=Kangiella koreensis (strain DSM 16069 / KCTC 12182 / SW-125) OX=523791 GN=tgt PE=3 SV=1
MQFKLNTTDGMARRGEITFERGTIQTPAFMPVGTYGTVKSMTPEEIKEIGAEIILGNTFHLMLRPGTDIIEMHGDLHDFMHWDKPILTDSGGFQVFSLGKLRKITEQGVEFRSPVNGSKVFLSPEEAMEVQRKLGSDIVMIFDECTPYPATESEARESMELSMRWAKRSKVAHEAKNKAALFGIVQGGMYPHLRKESLAGLTEIGFDGYAIGGLSVGEPKDEMLNVLDNLTGEMPQDKPRYLMGVGKPEDIVEAVRRGVDMFDCVMPTRNARNGHLFTSTGVVKLRNSHNKTDTGPLDEACDCYTCTNYSRAYLHHLDKCNEILGAKLNTIHNLRYYQNLMSGLRKAIETGTLCDFVEDFYTKQGKPVPSLNK

SEQ ID NO: 56324 - protein, 373 aa, unidentified
  source 1..373: note = Kangiella profundi
  REGION 1..373: note = tr|A0A2K9AB53|A0A2K9AB53_9GAMM Queuine tRNA-ribosyltransferase OS=Kangiella profundi OX=1561924; GN = tgt PE=3 SV=1
MQFKLNTTDGMARRGEITFERGTIQTPAFMPVGTYGTVKSMTPEELKEIGAEIILGNTFHLMLRPGTDIIEMHGDLHDFMHWDKPILTDSGGFQVFSLGKLRKITEEGVEFRSPVNGSKVFLGPEEAMEVQRKLGSDIVMIFDECTPYPATESEARDSMELSLRWAKRSKVAHEAKNAAALFGIVQGGMYPHLRKESLAGLTDIGFDGYAIGGLSVGEPKDEMLKVLDNLTGDMPQDKPRYLMGVGKPEDIVEAVRRGVDMFDCVMPTRNARNGHLFTSTGVVKLRNSHNKTDTGPLDEACDCYTCKNYSRAYLHHLDKCNEILGAKLNTIHNLRYYQNLMSGLRKAIETGTLCDFVKDFYTKQGKPVPSMSE

SEQ ID NO: 56325 - protein, 370 aa, unidentified
  source 1..370: note = Kangiella sediminilitoris
  REGION 1..370: note = tr|A0A1B3BB26|A0A1B3BB26_9GAMM Queuine tRNA-ribosyltransferase OS=Kangiella sediminilitoris; OX = 1144748 GN=tgt PE=3 SV=1
MKFDLNKTDGQARRGQLTFERGTIQTPAFMPVGTYGTVKGLTPEELKTLGAEIILGNTFHLMLRPGTDIIEQHGDLHDFMNWDKPILTDSGGFQVFSLGKMRKITEKGVEFRSPVNGSKVFLGPEEAMDVQRKLGSDIVMIFDECTPYPATESEARDSMELSLRWAKRSKDAHGDNPSALFGIVQGGMYPHLRKESLAGLTEIGYDGYAIGGLSVGEPKDEMLNVLDNLTPDMPEDKPRYLMGVGKPEDIVEAVRRGVDMFDCVMPTRNARNGHLFTSKGVVKLRNSHNKTFTGPLDEACDCYTCKNYSRAYLHHLDKCNEMLGAKLNTIHNLHYYQNLMDGLRKAIETGKLSDFVEEFYEGQGKPVPKL

SEQ ID NO: 56326 - protein, 375 aa, Kangiella sp.
  REGION 1..375: note = tr|A0A3D8URG9|A0A3D8URG9_9GAMM Queuine tRNA-ribosyltransferase OS=Kangiella sp. HD9-110m-PIT-SAG07 OX=2283595 GN=tgt PE=3 SV=1
MKFDLKNTDGQARRGQLTFERGTIQTPAFMPVGTYGTVKSLTPEELKGLGAEIILGNTFHLMLRPGTDIIQQHGDLHDFMHWDKPILTDSGGFQVFSLGKMRKITEKGVEFRSPVNGSKVFLGPEEAMEVQRKLGSDIVMIFDECTPYPATEAEARESMELSLRWAKRSKDSHEAGFKDKEPSALFGIVQGGMYPHLRKESLEGLTEIGYDGYAIGGLSVGEPKDEMLKVLNHLTPEMADDKPRYLMGVGKPEDIVEAVRRGVDMFDCVMPTRNARNGHLFTRKGVVKLRNSHNKTFTGPLDEACGCYTCENYSRAYLHHLDKCNEMLGAKLNTIHNLHYYQDLMDGLRKAIETGTLSDFVNEFYTAQGKDIPEL

SEQ ID NO: 56327 - protein, 373 aa, Kangiella sp.
  REGION 1..373: note = tr|A0A2G2KQA1|A0A2G2KQA1_9GAMM Queuine tRNA-ribosyltransferase OS=Kangiella sp. OX=1920245 GN=tgt; PE = 3 SV=1
MKFKLLKTDGKARRGQLEFDRGTIETPAFMPVGTYGTVKGMSPERVKETGAEILLGNTFHLMLRPGTEIIKMHGDLHDFMNWHGPILTDSGGFQVFSLGELRKITEEGVTFRSPINGDKVFLGPEESMQVQKDLGSDIVMIFDECTPYPATFEEAETSMQLSLRWAERSKKAHGDSSAALFGIIQGGMYPELRDVSLEGLNKIDFDGYAIGGLSVGESKLEMTMILDHLAYKMPEDKPRYLMGVGKPEDLVESVRRGIDMFDCVMPTRNARNGHLFTSTGIVRLRNSPNKKNSGPVDENCECYTCKNYSRAYLHHLDKCGEMFGAELATIHNLHYYQDLMKGLRKSLETGTFDDFVQEFYEARGMDVPALDSN

SEQ ID NO: 56328 - protein, 375 aa, Kangiella spongicola
  REGION 1..375: note = tr|A0A318D3M5|A0A318D3M5_9GAMM Queuine tRNA-ribosyltransferase OS=Kangiella spongicola OX=796379; GN = tgt PE=3 SV=1
MKFDLNTTDGQARRGQLTFERGTIQTPAFMPVGTYGTVKGLSPEELKDLGAEIILGNTFHLMLRPGTDIIEQHGDLHDFMHWDKPILTDSGGFQVFSLGKMRKISEKGVEFRSPVNGSKVFLGPEEAMEVQRKLGSDIVMIFDECTPYPATEAEARESMELSLRWAKRSKEAHVSGFKDKEPTALFGIVQGGMYPHLRKESLAGLTEIGYDGYAIGGLSVGEPKDEMLKVLDNLTHEMPADKPRYLMGVGKPEDIVEAVRRGVDMFDCVMPTRNARNGHLFTSKGVVKLRNSHNKTFTGPLDDACDCYTCENYSRAYLHHLDKCNEMLGGRLNTIHNLRYYQNLMDGLRQAIEKGTLSDFVKEFYEGLGKEVPAL

SEQ ID NO: 56329 - protein, 372 aa, unidentified
  source 1..372: note = Keratinibaculum paraultunense
  REGION 1..372: note = tr|A0A4V2UU78|A0A4V2UU78_9CLOT Queuine tRNA-ribosyltransferase OS=Keratinibaculum paraultunense; OX = 1278232 GN=tgt PE=3 SV=1
MGIKFKVLKESTETNARLGLLETPHGIVETPIFMPVGTKATVKTMTPEEVKALGAQIILSNTYHLYLRPGHKLIEEAGGLHEFMNWHGPILTDSGGFQVFSLGDLRKITEEGVEFRSHIDGSKHFISPEKSIEIQNSLGSDIMMAFDECTHYPATYEYAKESMKRTTRWAKRCKNFHKDWERQGLFGIIQGGMYKDLRRQSVQDIVSMDFSGYAIGGLSVGEPKELMYEMLEFTTPLLPKDKPRYLMGVGTPDYLFEAVINGIDMADCVLPTRIARNGTVITSRGKLTIRNAKYSRDFSKLDPECDCYTCKNYTRAYIRHLFNVNEILGPRLTTIHNLYFLIKLMENIRKAIKEDRLLEYREEFYKKYGYTD

SEQ ID NO: 56330 - protein, 378 aa, Kerstersia gyiorum
  REGION 1..378: note = tr|A0A4Q7MX37|A0A4Q7MX37_9BURK Queuine tRNA-ribosyltransferase OS=Kerstersia gyiorum OX=206506; GN = tgt PE=3 SV=1
MTGLNFELLATDGLARRGRMTLNHGVVETPIFMPVGTYGSVKAMLPHELEEIGAQIVLGNTFHLWLRPGVEIMQKHGGLHGFMQWQRPILTDSGGFQVFSLQGMRKITEEGVRFASPIDGARLFLTPEESMRIQRGLNSDIAMVFDECTPYEIKGRPATVDEAATSMRMSLRWARRSRDAFDQLENPNALFGIVQGGMYESLRDESLAGLTDIGFHGYAIGGLSVGEPKAEMIRILQHVAPRMPQDKPRYLMGVGTPEDLVEGVANGVDMFDCVMPTRNARNGWLFTRHGDVKIRNARYRDDTRPLDMHCACHTCRQFSRAYLHHLQRANEITGARLNTLHNLHFYLQIMQEMRDAIAAGTFQSWREQFAADRARGVD

SEQ ID NO: 56331 - protein, 378 aa, Kerstersia gyiorum
  REGION 1..378: note = tr|A0A171KW49|A0A171KW49_9BURK Queuine tRNA-ribosyltransferase OS=Kerstersia gyiorum OX=206506; GN = tgt PE=3 SV=1
MTGLNFELLATDGLARRGRMTLNHGVVETPIFMPVGTYGSVKAMLPHELEEIGAQIVLGNTFHLWLRPGVEIMQKHGDLHGFMQWQRPILTDSGGFQVFSLQGMRKITEEGVRFASPIDGARLFLTPEESMRIQRGLNSDIAMVFDECTPYEIKGRPATVDEAATSMRMSLRWARRSRDAFDQLENPNALFGIVQGGMYESLRDESLAGLTDIGFHGYAIGGLSVGEPKAEMIRILQHVAPRMPQDKPRYLMGVGTPEDLVEGVANGVDMFDCVMPTRNARNGWLFTRHGDVKIRNARYRDDTRPLDMHCACHTCRQFSRAYLHHLQRANEITGARLNTLHNLHFYLQIMQEMRDAIAAGTFQSWREQFAADRARGVD

SEQ ID NO: 56332 - protein, 373 aa, unidentified
  source 1..373: note = Ketobacter alkanivorans
  REGION 1..373: note = tr|A0A2K9LHS0|A0A2K9LHS0_9GAMM Queuine tRNA-ribosyltransferase OS=Ketobacter alkanivorans; OX = 1917421 GN=tgt PE=3 SV=1
MKFELTGTDAGARRGRLIFDRGVVETPAFMPVGTYGSVKAMLPRDIEAIGAHIILGNTFHLMLRPGTEIIKQHGDLHDFMQWQGPILTDSGGFQVFSLGKMRKISEEGVKFQSPVDGSPVFLTPEISMQVQRDLGSDIVMIFDECTPYPATEQQARDSMELSLRWAKRSKAAHEGNPSALFGIVQGGMYEHLRLESLSGLAEIGFDGYAIGGLSVGEPKEEMLNVLNYLRPHMPNDRPRYLMGVGKPEDIVEAVRRGVDMFDCVMPTRNARNGHLFTAKGVIKIRNSAHKTDTGPLEEGCDCYTCQNFSRAYLHHLDRCKEILSSQLNTIHNLRYYQRLMLGLRSAIETGTFERFVTEFYEQRGETAPPLESN

SEQ ID NO: 56333 - protein, 373 aa, unidentified; identical to SEQ ID NO: 51386
  source 1..373: note = Ketobacter sp.
  REGION 1..373: note = tr|A0A3L8BGG9|A0A3L8BGG9_9GAMM Queuine tRNA-ribosyltransferase OS=Ketobacter sp. OX=2083498; GN = tgt PE=3 SV=1

SEQ ID NO: 56334 - protein, 373 aa, unidentified
  source 1..373: note = Ketobacter sp.
  REGION 1..373: note = tr|A0A3L8BFS0|A0A3L8BFS0_9GAMM Queuine tRNA-ribosyltransferase OS=Ketobacter sp. OX=2083498; GN = tgt PE=3 SV=1
MKFELIGTDAGARRGRLIFERGTVETPAFMPVGTYGSVKAMLPRDIEAIGAHIVLGNTFHLMLRPGTEIIRQHGDLHDFMQWQGPILTDSGGFQVFSLGKMRKISEEGVKFQSPVDGSPVVLTPEISMQVQRDLGSDIVMIFDECTPYPATEQQARDSMELSLRWARRSKEAHQGNPSALFGIVQGGMYESLRRESLAGLEEIGFDGYAIGGLSVGEPKEEMMSVLNYLQPHMPKDRPRYLMGVGKPEDIVEAVRRGVDMFDCVMPTRNARNGHLFTSSGVVKIRNAAHKTDTGPLEAGCDCYTCCNFSRAYLHHLDRCKEILGAQLNTIHNLRYYQRLMLGLRTAIETGTFERFVTEFYQQRGETVPPLASN

SEQ ID NO: 56335 - protein, 376 aa, Ketogulonicigenium robustum
  REGION 1..376: note = tr|A0A1W6NZ32|A0A1W6NZ32_9RHOB Queuine tRNA-ribosyltransferase OS=Ketogulonicigenium robustum; OX = 92947 GN=tgt PE=3 SV=1
MASGISFTLNATDGKARTGVISTPRGDIRTPAFMPVGTAATVKAMMPESVAATGADILLGNTYHLMLRPTAERIDRLGGLHRFMNWEKPILTDSGGFQVMSLSSLRKLTEEGVTFSSHVDGSRHFVSPERSMEIQKLLGSDIVMAFDECPALPATEDTVAQSMRMSMRWAQRSRDAFGDRPGHALFGIQQGGVTEALRGESAEALRAIEFDGYAIGGLAVGEGQEAMFGVLDYAPDMLPTDKPRYLMGVGKPDDIVGAVKRGVDMMDCVLPSRSGRTGQAWTHRGQVNIKNARHADDPRPLDENCSCPACSKYSRAYLHHVFRAQEMISGMLLTWHNLHYYQELMAGMRAAIAEGRFAAFEADFHAKRAQGDIDPI

SEQ ID NO: 56336 - protein, 376 aa, Ketogulonicigenium vulgare
  REGION 1..376: note = tr|E3F1K6|E3F1K6_KETVY Queuine tRNA-ribosyltransferase OS=Ketogulonicigenium vulgare (strain Y25) OX=880591 GN=tgt PE=3 SV=1
MASGISFTLNGTDGKARVGVISTPRGEIRTPAFMPVGTAATVKAMMPESVAATGADILLGNTYHLMLRPTAERIDRLGGLHRFMNWEKPILTDSGGFQVMSLAGLRKLTEEGVTFSSHVDGSRHFVSPERSMEIQKLLGSDIVMAFDECPALPATEETVAQSMRMSMRWAQRSRDAFGDRPGHALFGIQQGGVTESLRGESADALRAIEFDGYAIGGLAVGEGQEAMFGVLDYAPDMLPTDKPRYLMGVGKPDDIVGAVKRGVDMMDCVLPSRSGRTGQAWTHRGQVNIKNARHADDPRPLDENCTCPACSKYSRAYLHHVFRSQEMISGMLLTWHNLHYYQELMAGMRAAIAAGRFAAFEADFHAKRAQGDIDPL

SEQ ID NO: 56337 - protein, 376 aa, Ketogulonicigenium vulgare; identical to SEQ ID NO: 56336
  REGION 1..376: note = tr|F9Y5I3|F9Y5I3_KETVW Queuine tRNA-ribosyltransferase OS=Ketogulonicigenium vulgare (strain WSH-001) OX=759362 GN=tgt PE=3 SV=1

SEQ ID NO: 56338 - protein, 379 aa, unidentified
  source 1..379: note = Kiloniella litopenaei
  REGION 1..379: note = tr|A0A0M2RD91|A0A0M2RD91_9PROT Queuine tRNA-ribosyltransferase OS=Kiloniella litopenaei; OX = 1549748 GN=tgt PE=3 SV=1
MSNTPKFGYTLQAKDGLARRGEVTTAHGTFQTPAFMTVGTAGTVKGLTPDQLRTTGAEVVLGNTYHLMLRPTAELVDRHGGLHKFMNWPHPILTDSGGYQVMSLSGLRKITEEGVKFQSHIDGSKHNLTPERSMEIQHLLDSNITMVLDECTPYPATHEEAAHSMRRSMRWAERCRKAFKDRDGYGLFGIVQGSTYEDLRKESAEALIDIGFEGYAVGGLAVGEGQKVMFEVLDHTMPHLPEDKPRYLMGVGKPSDLVGAVARGIDMFDCVLPTRSGRNAQAFTRRGALNMRNKRHQDDHRPVDDQCKCACCTQFSRAYLRHLFVAKEMLGPILLTIHNLAYYQELMAGMRDAIATGTFEAFQEEFYRLQDGGDIPALD

SEQ ID NO: 56339 - protein, 383 aa, unidentified
  source 1..383: note = Kiloniella spongiae
  REGION 1..383: note = tr|A0A0H2MDE0|A0A0H2MDE0_9PROT Queuine tRNA-ribosyltransferase OS=Kiloniella spongiae OX=1489064; GN = tgt PE=3 SV=1
MSNTPKSDTKFGYELQAKDGLARRGEVTTAHGTFQTPAFMTVGTAGTVKGLTPDQLRTTGAEVVLGNTYHLMLRPTAELVDRHGGLHKFMNWPHPILTDSGGYQVMSLSGLRKITEEGVKFQSHIDGSKHNLTPERSMEIQHLLDSNITMVLDECTPYPATHEEAALSMRRSMRWAERCRKAFIDRDGYGLFGIVQGSTYEDLRKESTEALIDIGFEGYAVGGLAVGEGQKVMFEVLDHTMPHLPEDKPRYLMGVGKPADLVGAVARGIDMFDCVLPTRSGRNAQAFTRRGALNMRNKRHQDDHRPVDDQCKCACCTQFSRAYLRHLFVAKEMLGPILLTIHNLAYYQELMAGMRDAIAAGTFEAFQEEFHKQQDGGDIPALD

SEQ ID NO: 56340 - protein, 374 aa, unidentified
  source 1..374: note = Kineothrix alysoides
  REGION 1..374: note = tr|A0A4R1R393|A0A4R1R393_9FIRM Queuine tRNA-ribosyltransferase OS=Kineothrix alysoides OX=1469948; GN = tgt PE=3 SV=1
MYKLIKQEGRAKRGELHTVHGVIQTPVFMNVGTAAAIKGAVASEDLEGIKTQVELSNTYHLHVRPGDEVIKKMGGLHKFMAWDKPILTDSGGFQVFSLASLRKIKEEGVYFQSHIDGRKIFMGPEESMRIQSNLASTIAMAFDECPSSKAEREYVQASVERTTRWLERCRAEMNRLNEAEDTINKKQMLFGINQGAIFSDIRIEHAKILSQMELDGYAVGGLAVGESHEEMYYILEETVPYLPADKPTYLMGVGTPANILEGVERGVDFFDCVYPSRNGRHGHLYTNQGKINLFNAKYELDERPIEEGCGCPACRRYSRGYIRHLLKAKEMLGMRLCVLHNLYFYNTMMEEIRDALGEGNFAAYKKKKLEGMAT

SEQ ID NO: 56341 - protein, 371 aa, Kingella denitrificans
  REGION 1..371: note = tr|F0EY76|F0EY76_9NEIS Queuine tRNA-ribosyltransferase OS=Kingella denitrificans ATCC 33394 OX=888741 GN=tgt PE=3 SV=1
MLNFTLHKKDGYARRGTLELNHGSIETPVFMPVGTYGSVKAMTPQNLHDINAQIILGNTYHLWLRPGLEVIEQFGGLHDFIGWNKPILTDSGGFQVFSLSNMRKLTEDGCTFKSPINGDKLFLSPEISMKIQTVLNSDIVMQLDECTPGEATHEQAKKSLQMSLRWAERSKKAFEDLHNPNALFGIIQGAMYEDLREESLRGLEDIGFKGIAIGGLSVGEPKPEMYRMLRALAPMLPERKPHYLMGVGTPEDLVYGVAHGVDMFDCVMPTRNARNGWLFTRFGDLKIRNAKHRHDKRPLDESCTCYACQHFSRSYLHHLDKVGEILGAQLCTIHNLHFYQVIMAEMREAIEQGKFADWQARFHENRARGTD

SEQ ID NO: 56342 - protein, 371 aa, Kingella kingae
  REGION 1..371: note = tr|F5S5S5|F5S5S5_9NEIS Queuine tRNA-ribosyltransferase OS=Kingella kingae ATCC 23330; OX = 887327 GN=tgt PE=3 SV=1
MLNFTLHKTDGYARRGTLELNHGKIETPVFMPVGTVGSVKSMTPQGLHDIKAQIILGNTYHLWLRPGLEVIEEFGGLHDFIGWNKPILTDSGGFQVFSLSELRKLTEDGCTFKSPINGDKLFLSPEISMKIQTVLNSDIVMQLDECTPGEATHAQANKSLEMSLRWAERSKKAFEDLKNPNALFGIIQGAMYEDLREKSLRGLEEIGFKGIAIGGLSVGEPKPEMYRMLRALAPMLPANKPHYLMGVGTPEDLVYGVAHGVDMFDCVMPTRNARNGWLFTRFGDLKIRNAKHRFDKRPLDESCTCYTCQNFSRSYLHHLDRAKEMLGAQLNTIHNLHFYQVIMAEMREAIEQGKFADWQAQFRANRARGTD

SEQ ID NO: 56343 - protein, 371 aa, unidentified
  source 1..371: note = Kingella negevensis
  REGION 1..371: note = tr|A0A238HFE5|A0A238HFE5_9NEIS Queuine tRNA-ribosyltransferase OS=Kingella negevensis OX=1522312; GN = tgt PE=3 SV=1
MLNFTLHKKDGYARRGTVELNHGKVETPVFMPVGTVGSVKSMTPQGLHDIKAQIILGNTYHLWLRPGLEVIEQFGGLHDFIGWDKPILTDSGGFQVFSLTDLRKLTEDGCTFKSPINGDKLFLSPEVSMKIQTVLNSDIVMQLDECTPGEASHAQAKKSLEMSLRWAERSKKAFEDLKNPNALFGIIQGAMYEDLREQSLRVLEDIGFKGIAIGGLSVGEPKPEMYRMLRALAPMLPENKPHYLMGVGTPEDLVYGVAHGVDMFDCVMPTRNARNGWLFTRFGDLKIRNAKHRFDKRPLDESCTCYTCQNFSRSYLHHLDRAKEMLGAQLNTIHNLHFYQVIMAEMREAIEQGKFADWQAQFHENRARGTD

SEQ ID NO: 56344 - protein, 371 aa, Kingella oralis
  REGION 1..371: note = tr|C4GFM2|C4GFM2_9NEIS Queuine tRNA-ribosyltransferase OS=Kingella oralis ATCC 51147; OX = 629741 GN=tgt PE=3 SV=1
MLNFTLHKKDGYARRATVELNHGKIETPVFMPVGTYGSVKAMTPQNLHDINAQIILGNTYHLWLRPGLEVIEQFGGLHDFIGWNKPILTDSGGFQVFSLSDMRKLTEEGCTFKSPINGDKLFLSPEISMQIQTVLNSDIVMQLDECTEGNASHAEAQKSLQMSLRWAERSKRAFEDLRNPNALFGIIQGAMYEDLREESLRGLEDIGFKGIAIGGLSVGEPKPEMYRMLRALAPMLPENKPHYLMGVGTPEDLVYGVAHGVDMFDCVMPTRNARNGWLFTRFGDIKIKNAKHRHDKRPLDESCTCYACTHFSRAYLYHLHKVGEILGAQLNTIHNLHFYQVIMQEMRDAIDAGRFADWQAQFHENRARGTD

SEQ ID NO: 56345 - protein, 373 aa, Kingella potus
  REGION 1..373: note = tr|A0A377R1A2|A0A377R1A2_9NEIS Queuine tRNA-ribosyltransferase OS=Kingella potus OX=265175 GN=tgt; PE = 3 SV=1
MLKFTLHTTDGRARRGTLTLNHGTIETPVFMPVGTYGSVKAMSPANLHDIKAQIILGNTYHLWLRPGLEVIGQFGGLHQFIGWDKPILTDSGGFQVFSLSDMRKLTEEGCTFKSPINGDKLFLSPEISMEIQTVLNSDIAMQLDECTPGEATHQQARQSLQMSLRWAERSKKAFEDLRNPNALFGIVQGAMYEDLREESLRGLEQFDFPGLAVGGLSVGEPKPEMYRMLRAVGPMLPAHKPHYLMGVGTPEDLVCGVANGIDMFDCVMPTRNARNGWLFTRFGDIKIKNAAHKHSTAPLDESCTCYTCRNFSRAYLHHLHRAGEILGAQLNTIHNLHFYQVIMEEMRTAIEQGGFADWRARFHELRGTRHAAA

SEQ ID NO: 56346 - protein, 386 aa, Kinneretia asaccharophila
  REGION 1..386: note = tr|A0A4R6NCV8|A0A4R6NCV8_9BURK Queuine tRNA-ribosyltransferase OS=Kinneretia asaccharophila; OX = 582607 GN=tgt PE=3 SV=1
MLKFDLLKTEGRARRGVLTLNHGVVQTPIFMPVGTYGTVKGVMPRSLEEMGAQIILGNTFHLWMRPGLDIMKQFGGLHQFERWNKPILTDSGGFQVWSLGEMRKISEEGVKFASPVNGDKLFLTPEISMQIQTVLNSDIVMQFDECTPYETKGHITTEIEARKSMEMSLRWAKRCQDEFARLQNPNALFGIVQGGMFENLRDHSLAGLAALDLPGYAIGGLSVGEPKADMQRVLAHIGHQLPAHKPRYLMGVGTPEDLVEGVAQGVDMFDCVMPTRNARNGHLFTRYGDLRLRNSRYKADERPVDETCTCYTCKGVTNADGTVSGGFSRAYLHHLDRCGEMLGPMLTSIHNLHYYLNLMKEVREALDAGDFAGFQKKFAEDRARGV

SEQ ID NO: 56347 - protein, 386 aa, unidentified
  source 1..386: note = Kiritimatiella glycovorans
  REGION 1..386: note = tr|A0A0G3EF56|A0A0G3EF56_9BACT Queuine tRNA-ribosyltransferase OS=Kiritimatiella glycovorans; OX = 1307763 GN=tgt PE=3 SV=1
MTAEAEQREGRAQAGRFEVRARDAETDARCGVLQTAHGPVHTPVFMPVGTQATVKGMTPRELEELRIEIILGNTYHLSERPGAEVIERLGGLHAFMGWNGAILTDSGGYQVFSLASLREVTEDGVRFRSHVDGAERFLGPDEAMEIQRRLGSDIAMAFDECPPDPSDRDYTCKAVQRTLDWAVRCARAPRAEGQIVFGIVQGGIFSDLREECAGRLADLGFDGYAIGGVSVGEGEELITRGVEDTARHLPPHRPRYLMGVGDPAQIVDAVARGVDMFDCVMPTRLARNGTVMTRRGRYPVKAGRFRTDPAPLEEECGCEVCARFSRAYIRHLFNTNEMLGPRLVTEHNLQVYGRLQEEMRTHIEAGTYASFARSFAAEYRGVRDDL

SEQ ID NO: 56348 - protein, 373 aa, unidentified
  source 1..373: note = Kiritimatiellaceae bacterium
  REGION 1..373: note = tr|A0A2E3TN44|A0A2E3TN44_9BACT Queuine tRNA-ribosyltransferase OS=Kiritimatiellaceae bacterium; OX = 2026752 GN=tgt PE=3 SV=1
  VARIANT 9: note = Xaa can be any naturally occurring amino acid
  VARIANT 52: note = Xaa can be any naturally occurring amino acid
  VARIANT 54: note = Xaa can be any naturally occurring amino acid
  VARIANT 73: note = Xaa can be any naturally occurring amino acid
  VARIANT 76: note = Xaa can be any naturally occurring amino acid
  VARIANT 103: note = Xaa can be any naturally occurring amino acid
  VARIANT 108: note = Xaa can be any naturally occurring amino acid
  VARIANT 138: note = Xaa can be any naturally occurring amino acid
  VARIANT 157: note = Xaa can be any naturally occurring amino acid
  VARIANT 168: note = Xaa can be any naturally occurring amino acid
  VARIANT 174: note = Xaa can be any naturally occurring amino acid
  VARIANT 192: note = Xaa can be any naturally occurring amino acid
  VARIANT 204: note = Xaa can be any naturally occurring amino acid
  VARIANT 228: note = Xaa can be any naturally occurring amino acid
  VARIANT 231: note = Xaa can be any naturally occurring amino acid
  VARIANT 240: note = Xaa can be any naturally occurring amino acid
  VARIANT 256: note = Xaa can be any naturally occurring amino acid
  VARIANT 260: note = Xaa can be any naturally occurring amino acid
  VARIANT 263: note = Xaa can be any naturally occurring amino acid
  VARIANT 276: note = Xaa can be any naturally occurring amino acid
  VARIANT 280: note = Xaa can be any naturally occurring amino acid
  VARIANT 295: note = Xaa can be any naturally occurring amino acid
  VARIANT 307: note = Xaa can be any naturally occurring amino acid
  VARIANT 317: note = Xaa can be any naturally occurring amino acid
  VARIANT 343: note = Xaa can be any naturally occurring amino acid
  VARIANT 361: note = Xaa can be any naturally occurring amino acid
MIGQFEITXRCEKSSARTGKLHTIHGVIKTPAFMPVGTKATVKTMSSQDLEXLXYDVILGNTYHLNDRPGAEXIAXHGGLHNFMSWKKPILTDSGGYQVFSLXQINKXTDLGVSFRSHSDGKELFIGPHESMKIQSLXGSDIAMVFDECPPYPSDKXYVYKAVCRTIXWAKECXKYDNLKNQLVFGIIQGGXYQDLREECAKKXIELDFNGYAIGGVSVGESDNLKLXSVXDTIKFMPNXKPRYLMGVGEFHQMIXSISXGIXMFDCVMPTRQARXGTVXTMKGRYPIKSAKFKXDKRPLEEGCDCXVCKTYTRSYXRHLFNVGEILGLRLITYHNLYCYNKXIKNIRTSIEENKFELYKXNFVKNYSVVLKD

SEQ ID NO: 56349 - protein, 381 aa, unidentified
  source 1..381: note = Kiritimatiellaceae bacterium
  REGION 1..381: note = tr|A0A2D7D6Q8|A0A2D7D6Q8_9BACT Queuine tRNA-ribosyltransferase OS=Kiritimatiellaceae bacterium; OX = 2026752 GN=tgt PE=3 SV=1
  VARIANT 89: note = Xaa can be any naturally occurring amino acid
  VARIANT 322: note = Xaa can be any naturally occurring amino acid
MAIGMFELVGQDAASGARRGRLHTAHGTVETPVFMPVGTQATVKGMSPLEMEELGCEILLGNTYHLNDRPGPELIDRRGGLHSFMGWDXAILTDSGGYQVFSLGARNTISDEGVSFQSHSDGRRHFIGPRESMEIQRLLGSDIAMVFDECPPYPCEKDYACQAVKRTLDWAAICRETPRAAGQLVFGIVQGGVFADLRESCAEALVKMDFEGYAIGGVSVGEPEELILRGVDDTVNHLPTMKPRYLMGVGEMAQMVESVARGVDMFDCVMPTRQARNGTVSTRRGRYPVKAAVYREDERPLEEGCSCYVCQHFTRSYVRHLXNVGEILGLRLVTMHNLHCYLEFMREMRVAIETGCFEQFRTDFHAGYQTVMKEHVQGTEE

SEQ ID NO: 56350 - protein, 375 aa, unidentified
  source 1..375: note = Klebsiella aerogenes
  REGION 1..375: note = tr|A0A0F1L3H1|A0A0F1L3H1_KLEAE Queuine tRNA-ribosyltransferase OS=Klebsiella aerogenes OX=548; GN = tgt PE=3 SV=1
MKFELDTTDGRARRGRLVFDRGVVETPAFMPVGTYGTVKGMTPEEVEATGAQIILGNTFHLWLRPGQEIMKLHGDLHDFMQWKGPILTDSGGFQVFSLGDIRKITEQGVHFRNPINGDPIFLDPEKSMEIQYDLGSDIVMIFDECTPYPADWDYAKRSMEMSLRWAKRSRDRFDGLGNKNALFGIIQGSVYEDLRDISVKGLVEIGFDGYAVGGLAVGEPKEDMHRILEHVCPQIPADKPRYLMGVGKPEDLVEGVRRGIDMFDCVMPTRNARNGHLFVTDGVVKIRNAKHKSDTSPLDAECDCYTCRNYSRAYLHHLDRCNEILGARLNTIHNLRYYQRLMAGLRKAIEEGKLESFVTDFYQRQGRSVPPLNVD

SEQ ID NO: 56351 - protein, 375 aa, unidentified
  source 1..375: note = Klebsiella aerogenes
  REGION 1..375: note = tr|A0A377S3J4|A0A377S3J4_KLEAE Queuine tRNA-ribosyltransferase OS=Klebsiella aerogenes OX=548; GN = tgt PE=3 SV=1
MKFELDTTDGRARRGRLVFERGVVETPAFMPVGTYGTVKGMTPEEVEATGAQIILGNTFHLWLRPGQEIMKLHGDLHDFMQWKGPILTDSGGFQVFSLGDIRKITEQGVHFRNPINGDPIFLDPEKSMEIQYDLGSDIVMIFDECTPYPADWDYAKRSMEMSLRWAKRSRDRFDSLGNKNALFGIIQGSVYEDLRDISVKGLVEIGFDGYAVGGLAVGEPKEDMHRILEHVCPQIPADKPRYLMGVGKPEDLVEGVRRGIDMFDCVMPTRNARNGHLFVTDGVVKIRNAKHKSDTAPLDAECDCYTCRNYSRAYLHHLDRCNEILGARLNTIHNLRYYQRLMAGLRKAIEEGKLESFVTDFYQRQGRTVPPLNVD

SEQ ID NO: 56352 - protein, 375 aa, unidentified
  source 1..375: note = Klebsiella grimontii
  REGION 1..375: note = tr|A0A564GMT8|A0A564GMT8_9ENTR Queuine tRNA-ribosyltransferase OS=Klebsiella grimontii OX=2058152; GN = tgt PE=3 SV=1
MKFELDTTDGRARRGRLLFERGVVETPAFMPVGTYGTVKGMTPEEVEATGAQIILGNTFHLWLRPGQEIMKLHGDLHDFMQWKGPILTDSGGFQVFSLGDIRKITEQGVHFRNPINGDPIFLDPEKSMEIQYDLGSDIVMIFDECTPYPADWDYAKRSMEMSLRWAKRSRDRFDGLGNKNALFGIIQGSVYEDLRDISVKGLVEIGFDGYAVGGLAVGEPKEDMHRILEHVCPQIPADKPRYLMGVGKPEDLVEGVRRGIDMFDCVMPTRNARNGHLFVTDGVVKIRNAKHKSDTSPLDAECDCYTCRNYSRAYLHHLDRCNEILGARLNTIHNLRYYQRLMAGLRKAIEEGKLESFVTDFYQRQGRTVPPLNVD

SEQ ID NO: 56353 - protein, 375 aa, unidentified
  source 1..375: note = Klebsiella grimontii
  REGION 1..375: note = tr|A0A285AZM1|A0A285AZM1_9ENTR Queuine tRNA-ribosyltransferase OS=Klebsiella grimontii OX=2058152; GN = tgt PE=3 SV=1
MKFELDTTDGRARRGRLVFERGVVETPAFMPVGTYGTVKGMTPEEVEATGAQIILGNTFHLWLRPGQEIMKLHGDLHDFMQWKGPILTDSGGFQVFSLGDIRKITEQGVHFRNPINGDPIFLDPEKSMEIQYDLGSDIVMIFDECTPYPADWDYAKRSMEMSLRWAKRSRDRFDGLGNKNALFGIIQGSVYEDLRDISVKGLVEIGFDGYAVGGLAVGEPKEDMHRILEHVCPQIPADKPRYLMGVGKPEDLVEGVRRGIDMFDCVMPTRNARNGHLFVTDGVVKIRNAKHKSDTSPLDAECDCYTCRNYSRAYLHHLDRCNEILGARLNTIHNLRYYQRLMAGLRKAIEEGKLESFVTDFYQRQGRTVPPLNVD

SEQ ID NO: 56354 - protein, 375 aa, unidentified; identical to SEQ ID NO: 56353
  source 1..375: note = Klebsiella michiganensis
  REGION 1..375: note = tr|H3N7U4|H3N7U4_9ENTR Queuine tRNA-ribosyltransferase OS=Klebsiella michiganensis; OX = 1134687 GN=tgt PE=3 SV=1

SEQ ID NO: 56355 - protein, 375 aa, unidentified; identical to SEQ ID NO: 56352
  source 1..375: note = Klebsiella michiganensis
  REGION 1..375: note = tr|A0A2J4VBP6|A0A2J4VBP6_9ENTR Queuine tRNA-ribosyltransferase OS=Klebsiella michiganensis; OX = 1134687 GN=tgt PE=3 SV=1

SEQ ID NO: 56356 - protein, 375 aa, Klebsiella oxytoca
  REGION 1..375: note = tr|A0A169EH14|A0A169EH14_KLEOX Queuine tRNA-ribosyltransferase OS=Klebsiella oxytoca OX=571; GN = tgt PE=3 SV=1
MKFELDTTDGRARRGRLVFDRGVVETPAFMPVGTYGTVKGMTPEEVEATGAQIILGNTFHLWLRPGQEIMKLHGDLHDFMQWKGPILTDSGGFQVFSLGDIRKITEQGVHFRNPINGDPIFLDPEKSMEIQYDLGSDIVMIFDECTPYPADWDYAKRSMEMSLRWAQRSRDRFDSLGNKNALFGIIQGSVYEDLRDISVKGLVDIGFDGYAVGGLAVGEPKEDMHRILEHVCPQIPADKPRYLMGVGKPEDLVEGVRRGIDMFDCVMPTRNARNGHLFVTDGVVKIRNAKHKSDTAPLDAECDCYTCRNYSRAYLHHLDRCNEILGARLNTIHNLRYYQRLMAGLRKAIEEGKLESFVTDFYQRQGRPVPPLNVD

SEQ ID NO: 56357 - protein, 375 aa, Klebsiella oxytoca
  REGION 1..375: note = tr|A0A168KQX1|A0A168KQX1_KLEOX Queuine tRNA-ribosyltransferase OS=Klebsiella oxytoca OX=571; GN = tgt PE=3 SV=1
MKFELDTTDGRARRGRLVFERGVVETPAFMPVGTYGTVKGMTPEEVEATGAQIILGNTFHLWLRPGQEIMKLHGDLHDFMQWKGPILTDSGGFQVFSLGDIRKITEQGVHFRNPINGDPIFLDPEKSMEIQYDLGSDIVMIFDECTPYPADWDYAKRSMEMSLRWAKRSRDRFDGLGNKNALFGIIQGSVYEDLRDISVKGLVEIGFDGYAVGGLAVGEPKADMHRILEHVCPQIPADKPRYLMGVGKPEDLVEGVRRGIDMFDCVMPTRNARNGHLFVTDGVVKIRNAKHKSDTSPLDAECDCYTCRNYSRAYLHHLDRCNEILGARLNTIHNLRYYQRLMAGLRKAIEEGKLESFVTDFYQRQGRTVPPLNVD

SEQ ID NO: 56358 - protein, 375 aa, Klebsiella pneumoniae
  REGION 1..375: note = tr|A0A378E4D4|A0A378E4D4_KLEPR Queuine tRNA-ribosyltransferase OS=Klebsiella pneumoniae subsp. rhinoscleromatis OX=39831 GN=tgt PE=3 SV=1
MKFELDTTDGRARRGRLVFERGVVETPAFMPVGTYGTVKGMTPEEVEATGAQIILGNTFHLWLRPGQEIMKLHGDLHDFMQWKGPILTDSGGFQVFSLGDIRKITEQGVHFRNPINGDPIFLDPEKSMEIQYDLGSDIVMIFDECTPYPADWDYAKRSMEMSLRWAKRSRDRFDSLGNKNALFGIIQGSVYEDLRDISVKGLVEIGFDGYAVGGLAVGEPKEDMHRILEHVCPQIPADKPRYLMGVGKPEDLVEGVRRGIDMFDCVMPTRNARNGHLFVTDGVVKIRNAKHKSDTAPLDAECYCYTCRNYSRAYLHHLDRCNEILGARLNTIHNLRYYQRLMAGLRKAIEEGKLESFVTDFYQRQGRTVPPLNVD

SEQ ID NO: 56359 - protein, 375 aa, Klebsiella pneumoniae; identical to SEQ ID NO: 56351
  REGION 1..375: note = sp|A6T5D8|TGT_KLEP7 Queuine tRNA-ribosyltransferase; OS = Klebsiella pneumoniae subsp. pneumoniae (strain ATCC 700721 / MGH 78578) OX=272620 GN=tgt PE=3 SV=1

SEQ ID NO: 56360 - protein, 375 aa, unidentified
  source 1..375: note = Klebsiella quasipneumoniae
  REGION 1..375: note = tr|A0A2A5MK59|A0A2A5MK59_9ENTR Queuine tRNA-ribosyltransferase OS=Klebsiella quasipneumoniae; OX = 1463165 GN=tgt PE=3 SV=1
MKFELDTTDGRARRGRLVFERGVVETPAFMPVGTYGTVKGMTPEEVEATGAQIILGNTFHLWLRPGQEIMKLHGDLHDFMQWKGPILTDSGGFQVFSLGDIRKITEQGVHFRNPINGDPIFLDPEKSMEIQYDLGSDIVMIFDECTPYPADWDYAKRSMEMSLRWAKRSRDRFDSLGNKNALFGIIQGSVYEDLRDISVKGLVEIGFDGYAVGGLAVGEPKEDMHRILEHVCPQIPADKPRYLMGVGKPEDLVEGVRRGIDMFDCVMPTRNARNGHLFVTDGVVKIRNSKHKSDTAPLDAECDCYTCRNYSRAYLHHLDRCNEILGARLNTIHNLRYYQRLMAGLRKAIEEGKLESFVTDFYQRQGRTVPPLNVD

SEQ ID NO: 56361 - protein, 375 aa, unidentified; identical to SEQ ID NO: 56351
  source 1..375: note = Klebsiella quasipneumoniae
  REGION 1..375: note = tr|A0A5C6IL39|A0A5C6IL39_9ENTR Queuine tRNA-ribosyltransferase OS=Klebsiella quasipneumoniae subsp. similipneumoniae OX=1463164 GN=tgt PE=3 SV=1

SEQ ID NO: 56362 - protein, 375 aa, unidentified; identical to SEQ ID NO: 56351
  source 1..375: note = Klebsiella quasivariicola
  REGION 1..375: note = tr|A0A223UFD7|A0A223UFD7_9ENTR Queuine tRNA-ribosyltransferase OS=Klebsiella quasivariicola; OX = 2026240 GN=tgt PE=3 SV=1

SEQ ID NO: 56363 - protein, 375 aa, Klebsiella sp.; identical to SEQ ID NO: 56351
  REGION 1..375: note = tr|A0A3G5D758|A0A3G5D758_9ENTR Queuine tRNA-ribosyltransferase OS=Klebsiella sp. P1CD1 OX=2267618; GN = tgt PE=3 SV=1

SEQ ID NO: 56364 - protein, 375 aa, Klebsiella sp.
  REGION 1..375: note = tr|J6HZK5|J6HZK5_9ENTR Queuine tRNA-ribosyltransferase OS=Klebsiella sp. OBRC7 OX=936565; GN = tgt PE=3 SV=1
MKFELDTTDGRARRGRLVFERGVVETPAFMPVGTYGTVKGMTPEEVEATGAQIILGNTFHLWLRPGQEIMKLHGDLHDFMQWKGPILTDSGGFQVFSLGDIRKITEQGVHFRNPINGDPIFLDPEKSMEIQYDLGSDIVMIFDECTPYPADWDYAKRSMEMSLRWAKRSRDRFDGLGNKNALFGIIQGSVYEDLRDISVKGLVEIGFDGYAVGGLAVGEPKEDMHRILEHVCPQIPTDKPRYLMGVGKPEDLVEGVRRGIDMFDCVMPTRNARNGHLFVTDGVVKIRNAKHKSDTSPLDAECDCYTCRNYSRAYLHHLDRCNEILGARLNTIHNLRYYQRLMAGLRKAIEEGKLESFVTDFYQRQGRTVPPLNVD

SEQ ID NO: 56365 - protein, 155 aa, Klebsiella variicola
  REGION 1..155: note = tr|A0A2N5AI33|A0A2N5AI33_KLEVA tRNA guanosine(34) transglycosylase Tgt (Fragment) OS=Klebsiella variicola; OX = 244366 GN=tgt PE=4 SV=1
MKFELDTTDGRARRGRLVFERGVVETPAFMPVGTYGTVKGMTPEEVEATGAQIILGNTFHLWLRPGQEIMKLHGDLHDFMQWKGPILTDSGGFQVFSLGDIRKITEQGVHFRNPINGDPIFLDPEKSMEIQYDLGSDIVMIFDECTPYPADWDYA

SEQ ID NO: 56366 - protein, 375 aa, Klebsiella variicola; identical to SEQ ID NO: 56351
  REGION 1..375: note = tr|A0A264C188|A0A264C188_KLEVA Queuine tRNA-ribosyltransferase OS=Klebsiella variicola OX=244366; GN = tgt PE=3 SV=1

SEQ ID NO: 56367 - protein, 375 aa, Kluyvera ascorbata
  REGION 1..375: note = tr|A0A378GPJ4|A0A378GPJ4_9ENTR Queuine tRNA-ribosyltransferase OS=Kluyvera ascorbata OX=51288; GN = tgt PE=3 SV=1
MKFELDTTDGRARRGRLVFDRGVVETPAFMPVGTYGTVKGMTPEEVEATGAQIILGNTFHLWLRPGQEIMKLHGDLHDFMQWKGPILTDSGGFQVFSLGDIRKITEQGVHFRNPINGDPIFLDPEKSMEIQYDLGSDIVMIFDECTPYPADWDYAKRSMEMSLRWAKRSRDRFDGIGNKNALFGIIQGSVYEDLRDISVKGLVEIGFDGYAVGGLAVGEPKEDMHRILEHVCPQIPADKPRYLMGVGKPEDLVEGVRRGIDMFDCVMPTRNARNGHLFVTDGVVKIRNAKHKSDTSTLDAECDCYTCRNYSRAYLHHLDRCNEILGARLNTIHNLRYYQRLMAGLRKAIEEGKLESFVTDFYQRQGRTVPPLNVD

SEQ ID NO: 56368 - protein, 375 aa, Kluyvera ascorbata
  REGION 1..375: note = tr|A0A3N2SF77|A0A3N2SF77_9ENTR Queuine tRNA-ribosyltransferase OS=Kluyvera ascorbata OX=51288; GN = tgt PE=3 SV=1
MKFELDTTDGRARRGRLVFDRGVVETPAFMPVGTYGTVKGMTPEEVEATGAQIILGNTFHLWLRPGQEIMKLHGDLHDFMQWKGPILTDSGGFQVFSLGDIRKITEQGVHFRNPINGDPIFLDPEKSMEIQYDLGSDIVMIFDECTPYPADWDYAKRSMEMSLRWAKRSRDRFDGLGNKNALFGIIQGSVYEDLRDISVKGLVEIGFDGYAVGGLAVGEPKEDMHRILEHVCPQIPADKPRYLMGVGKPEDLVEGVRRGIDMFDCVMPTRNARNGHLFVTDGVVKIRNAKHKSDTSTLDAECDCYTCRNYSRAYLHHLDRCNEILGARLNTIHNLRYYQRLMAGLRKAIEEGKLESFVTDFYQRQGRTVPPLNVD

SEQ ID NO: 56369 - protein, 375 aa, Kluyvera cryocrescens
  REGION 1..375: note = tr|A0A2X3EDV4|A0A2X3EDV4_KLUCR Queuine tRNA-ribosyltransferase OS=Kluyvera cryocrescens OX=580; GN = tgt PE=3 SV=1
MKFELDTTDGRARRGRLVFDRGVVETPAFMPVGTYGTVKGMTPEEVEATGAQIILGNTFHLWLRPGQEIMKLHGDLHDFMQWKGPILTDSGGFQVFSLGDIRKITEQGVHFRNPINGDPIFLDPEKSMEIQYDLGSDIVMIFDECTPYPADWDYAKRSMEMSLRWAKRSRDRFDGLGNKNALFGIIQGSVYEDLRDISVKGLVDIGFDGYAVGGLAVGEPKEDMHRILEHVCPQIPADKPRYLMGVGKPEDLVEGVRRGIDMFDCVMPTRNARNGHLFVTDGVVKIRNAKHKSDTSTLDAECDCYTCRNYSRAYLHHLDRCNEILGARLNTIHNLRYYQRLMAGLRKAIEEGKLESFVTDFYQRQGRTVPPLNVD

SEQ ID NO: 56370 - protein, 375 aa, Kluyvera georgiana; identical to SEQ ID NO: 53884
  REGION 1..375: note = tr|A0A248KJF3|A0A248KJF3_9ENTR Queuine tRNA-ribosyltransferase OS=Kluyvera georgiana OX=73098; GN = tgt PE=3 SV=1

SEQ ID NO: 56371 - protein, 375 aa, Kluyvera georgiana; identical to SEQ ID NO: 53884
  REGION 1..375: note = tr|A0A1B7JIR9|A0A1B7JIR9_9ENTR Queuine tRNA-ribosyltransferase OS=Kluyvera georgiana ATCC 51603; OX = 1354264 GN=tgt PE=3 SV=1

SEQ ID NO: 56372 - protein, 375 aa, Kluyvera intermedia
  REGION 1..375: note = tr|A0A1X0X5M6|A0A1X0X5M6_KLUIN Queuine tRNA-ribosyltransferase OS=Kluyvera intermedia OX=61648; GN = tgt PE=3 SV=1
MKFELDTTDGRARRGRLVFDRGVVETPAFMPVGTYGTVKGMTPEEVEATGAQIILGNTFHLWLRPGQEIMKLHGDLHDFMQWKGPILTDSGGFQVFSLGDIRKITEKGVHFRNPINGDPIFLDPEKSMEIQYDLGSDIVMIFDECTPYPADWDYAKRSMEMSLRWAKRSRDRFDSLENPNALFGIIQGSVYEDLRDISVKGLVEIGFDGYAVGGLAVGEPKEDMHRILEHVCPQIPADKPRYLMGVGKPEDLVEGVRRGIDMFDCVMPTRNARNGHLFVTNGVVKIRNAKYKSDTGSLDPECDCYTCRNYSLAYLHHLDRCNEILGARLNTIHNLRYYQRLMAGLRKAIEEGKLESFVTDFYQRQGRDVPPLNVA

SEQ ID NO: 56373 - protein, 375 aa, Kluyvera intermedia
  REGION 1..375: note = tr|A0A447MKJ2|A0A447MKJ2_KLUIN Queuine tRNA-ribosyltransferase OS=Kluyvera intermedia OX=61648; GN = tgt PE=3 SV=1
MKFELDTTDGRARRGRLVFDRGVVETPAFMPVGTYGTVKGMTPEEVKDTGAQIILGNTFHLWLRPGQEIMKLHGDLHDFMQWKGPILTDSGGFQVFSLGHIRKITEQGVHFRNPINGDQIFLDPEKSMEIQYDLGSDVVMIFDECTPYPADWDYAKRSMEMSLRWAKRSRDRFDDLGNKNALFGIIQGGVYEDLRDISVKGLVDIGFDGYAVGGLAVGEPKADMHRILEHVCPQIPADKPRYLMGVGKPEDLVEGVRRGIDMFDCVMPTRNARNGHLFVTDGVVKIRNAKHKSDTSTLDAECDCYTCRNYSRAYLHHLDRCNEILGARLNTIHNLRYYQRLMAGLRKAIEEGKLESFVTDFYQRQGRTVPPLNVD

SEQ ID NO: 56374 - protein, 375 aa, Kluyvera sp.
  REGION 1..375: note = tr|A0A2T3XBM9|A0A2T3XBM9_9ENTR Queuine tRNA-ribosyltransferase OS=Kluyvera sp. Nf5 OX=2116543; GN = tgt PE=3 SV=1
MKFELDTTDGRARRGRLVFDRGVVETPAFMPVGTYGTVKGMTPEEVEATGAQIILGNTFHLWLRPGQEIMKLHGDLHDFMQWKGPILTDSGGFQVFSLGDIRKITEKGVHFRNPINGDPIFLDPEKSMEIQYDLGSDIVMIFDECTPYPADWDYAKRSMEMSLRWAKRSRDRFDSLENPNALFGIIQGSVYEDLRDISVKGLVEIGFDGYAVGGLAVGEPKADMHRILEHVCPQIPADKPRYLMGVGKPEDLVEGVRRGIDMFDCVMPTRNARNGHLFVTNGVVKIRNAKYKSDTGSLDPECDCYTCRNYSLAYLHHLDRCNEILGARLNTIHNLRYYQRLMAGLRKAIEEGKLESFVTDFYQRQGRDVPPLNVA

SEQ ID NO: 56375 - protein, 432 aa, Kocuria flava
  REGION 1..432: note = tr|A0A2N4T188|A0A2N4T188_9MICC Queuine tRNA-ribosyltransferase OS=Kocuria flava OX=446860 GN=tgt; PE = 3 SV=1
MCSSPQTAPALPSARSAFGFEVGHRLEDTAAVPGERAAANGGRFGGRTGTITTPHGTIATPAFVPVGTQATVKAVLPEAMKELGAQALLANAYHLYLQPGAEVLDAAGGLGAFMNWDGPTFTDSGGFQVMSLGAGFKKVIDMSGAGAAGDDDVAAGKERLAHVDDDGVTFKSHLNGDLHRFTPEISMQVQHRLGADVMFAFDELTTLHNSRGYQEASLERTRRWALRCAAEHARLTRERAGKPYQALFGVVQGAQYEDLRRRACRDLAAMDFDGYGIGGALEKENLGTIVRWCTEELPEDRPRHLLGISEPDDIFTALENGVDTFDCVSPTRVGRTGAVYTPDGRFNVNTARFRTDFSPVFEGCDCYTCTHYTRAYLHHLFKAKERLSATLTSIHNERFIVRMVDGARAAMADGTYFDYRDEVLGRYYAGRA

SEQ ID NO: 56376 - protein, 432 aa, Kocuria flava
  REGION 1..432: note = tr|A0A0U3G5S4|A0A0U3G5S4_9MICC Queuine tRNA-ribosyltransferase OS=Kocuria flava OX=446860 GN=tgt; PE = 3 SV=1
MSSSPQTAPALPSARSAFGFEVGHRLEDTAAVPGERAAANGGRFGGRTGTITTPHGTIATPAFVPVGTQATVKAVLPEAMKELGAQALLANAYHLYLQPGAEVLDAAGGLGAFMNWDGPTFTDSGGFQVMSLGAGFKKVIDMSGAGAAGDDDVAAGKERLAHVDDDGVTFKSHLNGDLHRFTPEISMQVQHRLGADVMFAFDELTTLHNSRGYQEASLERTRRWALRCVAEHARLTGERAGKPYQALFGVVQGAQYEDLRRRACRDLAAMDFDGYGIGGALEKENLGTIVRWCTEELPEDRPRHLLGISEPDDIFTALENGVDTFDCVSPTRVGRTGAVYTPDGRFNVNTARFRTDFSPVFEGCDCYTCTHYTRAYLHHLFKAKERLSATLTSIHNERFIVRMVDGARAAMADGTYFDYRDEVLGRYYAGRA

SEQ ID NO: 56377 - protein, 437 aa, unidentified
  source 1..437: note = Kocuria indica
  REGION 1..437: note = tr|A0A1X7EEJ0|A0A1X7EEJ0_9MICC Queuine tRNA-ribosyltransferase OS=Kocuria indica OX=1049583; GN = tgt PE=3 SV=1
MVSSTESPSPFTFRLHTRLRDSPVPQQRIRDNGGQFQARTGTITTPHGPIRTPAFIPVATQAAVKAVLPESMAAEGAQAMLANAYHLFLEPGDDILDAAGGLGTFMNWPGPTFTDSGGFQVMSLGSGLGKVIDMSALTPSPGGAQPAPGHKRMARVDDDGVWFRSYLNGDLHRFTPEVSMRVQHNIGADIMFAFDELTTLHDSREYQEDALERTRKWALRCVAEHCRLTEARADKPYQALFGVIQGAQYEDLRRMACRDLAEMGFDGFGIGGALEKRQLGTIVRWCTEELPEETPKHLLGISEPDDIFTAIDNGVDTFDCVSPTRVARSSAVYSPDGRFNLTNIRFKRDFTPISDTCPCYTCAHYTRAYLRHLFKAKERNAATLASIHNERFILDLVSGARDAIDAGTYFDYRDDFLARYYGAPSTSTVPSETGGPR

SEQ ID NO: 56378 - protein, 436 aa, unidentified
  source 1..436: note = Kocuria indica
  REGION 1..436: note = tr|A0A4P6RNB0|A0A4P6RNB0_9MICC Queuine tRNA-ribosyltransferase OS=Kocuria indica OX=1049583; GN = tgt PE=3 SV=1
MSSTESPSPFTFRLHTRLRDSPVPQQRIRDNGGQFQARTGTITTPHGPIRTPAFIPVATQAAVKAVLPESMAAEGAQAMLANAYHLFLEPGDDILEAAGGLGTFMNWPGPTFTDSGGFQVMSLGSGLGKVIDMSAFTPSPGGAQPAPGHKRMARVDDDGVWFRSYLNGDLHRFTPEVSMRVQHNIGADIMFAFDELTTLHDSREYQEDALERTRKWALRCVAEHCRLTEARADKPYQALFGVIQGAQYEDLRRMACRDLAEMGFDGFGIGGALEKRQLGTIVRWCTEELPEETPKHLLGISEPDDIFTAIDNGVDTFDCVSPTRVARSSAVYSPDGRFNLTNIRFKRDFTPISDTCPCYTCAHYTRAYLRHLFKAKERNAATLASIHNERFILDLVSGARDAIDAGTYFDYRDDFLARYYGAPSTSTVPSETGGPR

SEQ ID NO: 56379 - protein, 440 aa, Kocuria palustris
  REGION 1..440: note = tr|A0A0X3QCQ3|A0A0X3QCQ3_9MICC Queuine tRNA-ribosyltransferase OS=Kocuria palustris OX=71999; GN = tgt PE=3 SV=1
MDSEQTPAPKPHPLSGRDSFSFRVRTRLTETVAQPPRTDPHGDPEPPWLGRTGEITTPHGTIRTPAFIPVATAATVKAVLPEAMKELGAQALLANAYHLYLRPGHDLLDEAGGLGRFMNWDGPTFTDSGGFQVMSLGSGFKKVIDMDGPSPKGPVGDDDVAEGKERLANVDDDGVTFISHLNGDKHRFTPEVSMQVQHGIGADIMFAFDELTTLHNSRGYQERALERTRLWALRCLEEHDRLTRARQHRPYQALFGVIQGAQYEDLRRQASRDLGAMDFDGYGIGGALEKKNLGTIVGWCAEELPEDRPRHLLGISEPDDIFVALEAGADTFDCVSPTRVARTGACYHPKGRFNLPAARFKRDFRPIDEDCDCYTCAHYTRAYIHHLFKAKERVAATLASIHNERFTVRLVDRAREAMEDGSYLAYRDATLADYYSGDHP

SEQ ID NO: 56380 - protein, 440 aa, Kocuria palustris
  REGION 1..440: note = tr|M2XXA4|M2XXA4_9MICC Queuine tRNA-ribosyltransferase OS=Kocuria palustris PEL; OX = 1236550 GN=tgt PE=3 SV=1
MDSEQTPAPKPHPLSGRDSFSFRVRTRLTETVAQPPRTDPHGDPEPPWLGRTGEITTPHGTIRTPAFIPVATAATVKAVLPEAMKELGAQALLANAYHLYLRPGHDLLDEAGGLGRFMNWDGPTFTDSGGFQVMSLGSGFKKVIDMDGPSPKGPVGDDDVAEGKERLANVDDDGVTFISHLNGDKHRFTPEVSMQVQHGIGADIMFAFDELTTLHNSRGYQERALERTRLWALRCLEEHDRLTRARPHRPYQALFGVIQGAQYEDLRRQASRGLGAMDFDGYGIGGALEKKNLGTIVGWCAEELPEDRPRHLLGISEPDDIFVALEAGADTFDCVSPTRVARTGACYHPKGRFNLPAARFKRDFRPIDEDCDCYTCTHYTRAYVHHLFKAKERVAATLASIHNERFTVRLVDRAREAMEDGSYLAYRDATLADYYSGGHP

SEQ ID NO: 56381 - protein, 426 aa, Kocuria polaris
  REGION 1..426: note = tr|A0A0A6VQ36|A0A0A6VQ36_9MICC Queuine tRNA-ribosyltransferase OS=Kocuria polaris OX=136273; GN = tgt PE=3 SV=1
MLPAAARSDFGFAVEHRLAETATIAGGRLEANGGPFLGRTGTITTPHGTIRTPAFVPVGTAATVKAVLPESMAELGAQALLANAYHLYLQPGADVLDAAGGLGAFMNWSGPTFTDSGGFQVMSLGSGFRKVIDMSTVAASAAGDDDVATGKERMARVDDDGVTFTSHINGDVHRFTPEISMQVQHRLGADIMFAFDELTTLHNSRGYQETSLERTRRWALRCVAEHARLTEERADRPYQALFGVIQGAQYEDLRRKACRDLGAMDFDGFGIGGALEKENLGTIVRWCNEELPEDRPRHLLGISEPDDIFTALENGADTFDCVSPTRVARTGAVYAPDGRFTVSNARFRTDLAPIDSGCDCYTCAHYTRAYLHHLFKAKERLSATLTSIHNERFVVRMVDGAREAMADGTYFEYRDEVLGRYYAGRS

SEQ ID NO: 56382 - protein, 430 aa, Kocuria polaris
  REGION 1..430: note = tr|A0A0W8IJK8|A0A0W8IJK8_9MICC Queuine tRNA-ribosyltransferase OS=Kocuria polaris OX=136273; GN = tgt PE=3 SV=1
MPAPEKTLPPTAARAAFGFEPEHRLADTAPAPRGRAGGGGPFLGRTGTITTPHGTIRTPAFVPVGTAATVKAVLPESMAELGAQALLANAYHLYLQPGADVLDAAGGLGSFMNWSGPTFTDSGGFQVMSLGSGFRKVIDMSTAATAGDDDVATGKERLARVDDDGVTFRSHINGDVHRFTPEISMQVQHRLGADVMFAFDELTTLHNSRGYQESSLERTRRWAQRCVTEHVRLTEERADRPYQALFGVIQGAQYEDLRRKACRDLGAMDFDGFGIGGALEKENLGTIVRWCSEELPEDRPRHLLGISEPDDIFTALENGVDTFDCVSPTRVARSGTVYAPDGRFTVSNARFRTDLAPIDAGCDCYTCTHYTRAYLHHLFKAKERLSATLTSIHNERFVVRMVDGAREAMADGTWVEYRDEVLGRYYAGRS

SEQ ID NO: 56383 - protein, 428 aa, Kocuria rhizophila
  REGION 1..428: note = tr|A0A2I1P0Y8|A0A2I1P0Y8_KOCRH Queuine tRNA-ribosyltransferase OS=Kocuria rhizophila OX=72000; GN = tgt PE=3 SV=1
MPISDPTPPFSFELHTRLRDSPSLPEERVRENGGQFQARTGTITTPHGQIQTPAFIPVATQAAMKAVLPESMAAEGAQAMLANAYHLFLEPGDDVLDEAGGLSTFMNWPGPTFTDSGGFQVMSLGSGLGKVIDMSTVANPLGDSQMAPGQKRMARVDDDGVWFRSYLNGDLHRFTPEVSMRVQHNIGADIMFAFDELTTLHNTREYQETALERTRKWALRCVAEHRRLTEERAHKPYQALFGVIQGAQYEDLRRRACRDLSEMGFDGFGIGGALEKSQLGTIVRWCTEELPENTPKHLLGISEPDDIFTAIDNGVDTFDCVSPTRVARSSAVYTPTGRVNLTNIRFKRDFTPISDTCPCYTCTHYTRAYLRHLFKSKERNAATLASIHNERFVLDLVAGARAAIEADTYFEYRDEFLGTYYGTVQPTA

SEQ ID NO: 56384 - protein, 454 aa, Kocuria rhizophila
  REGION 1..454: note = tr|B2GFG5|B2GFG5_KOCRD Queuine tRNA-ribosyltransferase OS=Kocuria rhizophila (strain ATCC 9341 / DSM 348 / NBRC 103217 / DC2201) OX=378753 GN=tgt; PE = 3 SV=1
MAPSGVVPASARARDPCGRRTRHNGRVPTTDSVPPFSFELHTRLRDSPTLPEERVRENGGQFQARTGTITTPHGQIRTPAFIPVATQAAMKAVLPESMAAEGAQAMLANAYHLFLEPGDDVLDEAGGLGTFMNWPGPTFTDSGGFQVMSLGSGLGKVIDMSTVANPLGDSQMAPGQKRMARVDDDGVWFRSYLNGDLHRFTPEVSMRVQHNIGADIMFAFDELTTLHNTREYQETALERTRKWALRCVAEHRRLTEERAHKPYQALFGVIQGAQYEDLRRQACRDLSEMGFDGFGIGGALEKSQLGTIVRWCTEELPENTPKHLLGISEPDDIFTAIDNGVDTFDCVSPTRVARSSAVYSPTGRFNLTNIRFKRDFTPISDTCPCYTCTHYTRAYLRHLFKSKERNAATLASIHNERFVLDLVAGARAAIETDTYFEYRDEFLGTYYGTARPTA

SEQ ID NO: 56385 - protein, 439 aa, Kocuria rosea
  REGION 1..439: note = tr|A0A543P656|A0A543P656_KOCRO Queuine tRNA-ribosyltransferase OS=Kocuria rosea OX=1275 GN=tgt; PE = 3 SV=1
MTHNGRVPAPEETLLPAAARSDFGFAVEHRLAETATIAGGRLEANGGPFLGRTGTITTPHGTIRTPAFVPVGTAATVKAVLPESMAELGAQALLANAYHLYLQPGADVLDAAGGLGAFMNWSGPTFTDSGGFQVMSLGSGFRKVIDMSTVAASAAGDDDVATGKERMARVDDDGVTFTSHINGDVHRFTPEISMQVQHRLGADIMFAFDELTTLHNSRGYQETSLERTRRWALRCVAEHARLTEERADRPYQALFGVIQGAQYEDLRRKACRDLGAMDFDGFGIGGALEKENLGTIVRWCNEELPEDRPRHLLGISEPDDIFTALENGADTFDCVSPTRVARTGTVYAPDGRFTVSNARFRTDLAPIDSGCDCYTCAHYTRAYLHHLFKAKERLSATLTSIHNERFVVRMVDGAREAMADGTYFEYRDEVLGRYYAGRS

SEQ ID NO: 56386 - protein, 439 aa, Kocuria rosea
  REGION 1..439: note = tr|A0A378GX25|A0A378GX25_KOCRO Queuine tRNA-ribosyltransferase OS=Kocuria rosea OX=1275 GN=tgt; PE = 3 SV=1
MTHNGRVPAPEETLLPAAARSDFGFAVEHRLAETATIAGGRLEANGGPFLGRTGTITTPHGTIRTPAFVPVGTAATVKAVLPESMAELGAQALLANAYHLYLQPGADVLDAAGGLGAFMNWSGPTFTDSGGFQVMSLGSGFRKVIDMSTVAASAAGDDDVATGKERMARVDDDGVTFTSHINGDVHRFTPEISMQVQHRLGADIMFAFDELTTLHNSRGYQETSLERTRRWALRCVAEHARLTEERADRPYQALFGVIQGAQYEDLRRKACRDLGAMDFDGFGIGGALEKENLGTIVRWCNEELPEDRPRHLLGISEPDDIFTALENGADTFDCVSPTRVARTGAVYAPDGRFTVSNARFRTDLAPIDSGCDCYTCAHYTRAYLHHLFKAKERLSATLTSIHNERFVVRMVDGAREAMADGTYFEYRDEVLGRYYAGRS

SEQ ID NO: 56387 - protein, 437 aa, Kocuria sp.
  REGION 1..437: note = tr|A0A1A0JH45|A0A1A0JH45_9MICC Queuine tRNA-ribosyltransferase OS=Kocuria sp. ICS0012 OX=1834155; GN = tgt PE=3 SV=1
MVSSTESPSPFTFRLHTRLRDSPVPQQRIRDNGGQFQARTGTITTPHGPIRTPAFIPVATQAAVKAVLPESMAAEGAQAMLANAYHLFLEPGDDILDAAGGLGTFMNWPGPTFTDSGGFQVMSLGSGLGKVIDMSALTPSPGGAQPAPGHKRMARVDDDGVWFRSYLNGDLHRFTPEVSMRVQHNIGADIMFAFDELTTLHDSREYQEDALERTRKWALRCVAEHCRLTEARAEKPYQALFGVIQGAQYEDLRRMACRDLAKMGFDGFGIGGALEKRQLGTIVRWCTEELPEETPKHLLGISEPDDIFTAIDNGVDTFDCVSPTRVARSSAVYSPDGRFNLTNIRFKRDFTPISDTCPCYTCTHYTRAYLRHLFKAKERNAATLASIHNERFILDLVSGARDAIDAGTYFDYRDDFLARYYGAPSTSPVPSETGGPR

SEQ ID NO: 56388 - protein, 441 aa, Kocuria sp.
  REGION 1..441: note = tr|A0A433GXY8|A0A433GXY8_9MICC Queuine tRNA-ribosyltransferase OS=Kocuria sp. HSID16901; OX = 2419505 GN=tgt PE=3 SV=1
MGRVPNTTFPNPQFGFTVGSRLSETAGNDSSRAARSRNDGGEFLGRTGVMTTPHGEIQTPAFIPVGTKATVKAVLPEAMSQLGSQALLANAYHLYLQPGPDVLDAAGGLGRFMNWNGPTFTDSGGFQVMSLGSGFKKVIDMGTVSGATGADGRPVGDDDVAAGKERMAHIDDDGVTFKSHLNGDLHRFSPEVSMSVQHRIGADVMFAFDELTTLYNSRGYQEQALERTRLWALRCIDEHQRLTQERSDKPYQALFGVIQGAQYEDLRRKACRDLGDMEFDGFGLGGALEKENLGTIVRWCNEELPDNKPRHLLGISEPDDIFVALENGADTFDCVSPTRVARTAAVYSPDGRFNVSNARFKTDFTPIYEGCDCYTCTHYTKAYLHHLFKAKERLAATLASIHNERFIVRMVDTARDTIASGEYFQYRDEFLGRYYAGKAKK

SEQ ID NO: 56389 - protein, 437 aa, Kocuria turfanensis
  REGION 1..437: note = tr|A0A512IA36|A0A512IA36_9MICC Queuine tRNA-ribosyltransferase OS=Kocuria turfanensis OX=388357; GN = tgt PE=3 SV=1
MPTPAPSSPSAPPSSAGRAAFGFEVEHRLEETTRATGSRVAADGGPFLGRTGTISTPHGQIRTPAFVPVGTAATVKAVLPESMAELGAQALLANAYHLYLQPGAEVLDAAGGLGAFMNWDGPTFTDSGGFQVMSLGSGFKKVIDMSTAASSAAGDDDVVTGKERMARVDDDGVTFTSHINGDVHRFTPEISMQVQHRLGADIMFAFDELTTLHNSRGYQETSLERTRRWARRCVAEHARLTEERADRPYQALFGVIQGAQYEDLRRKACRDLGAMDFDGFGIGGALEKENLGTIVRWCSEELPEDRPRHLLGISEPDDIFTALENGVDTFDCVSPTRVARTGAVYGPDGRFTVSNARFRTDFSPVQEGCDCYTCTHYTRAYLHHLFKAKERLSATLASIHNERFVVRMVDGARQAMADGTYVEYRDEVLGRYYAHRG

SEQ ID NO: 56390 - protein, 428 aa, unidentified
  source 1..428: note = Kocuria tytonicola
  REGION 1..428: note = tr|A0A3L9L588|A0A3L9L588_9MICC Queuine tRNA-ribosyltransferase OS=Kocuria tytonicola OX=2055946; GN = tgt PE=3 SV=1
MPTTEPTPPFSFELHTRLRDSPSVPPERVAENGGQFQARTGTITTPHGQIRTPAFIPVATQAAVKAVLPESMAAEGAQAMLANAYHLFLEPGDDVLDEAGGLSTFMNWPGPTFTDSGGFQVMSLGSGLGKVIDMSTVASPLGDSQMAPGQKRMARVDNDGVWFRSYLNGDLHRFTPEVSMRVQHNIGADIMFAFDELTTLHNTREYQEIALERTRQWALRCVAEHRRLTEERATKPYQALFGVIQGAQYEDFRRKACRDLSEMGFDGFGIGGALEKSQLGTIVRWCTEELPENTPKHLLGISEPDDIFTAIDNGVDTFDCVSPTRVARSSAVYTPTGRFNLTNIRFKRDFTPISDTCPCYTCTHYTRAYLRHLFKSKERNAATLASIHNERFVLDLVAGARTAIEAGDYFEYRDAFLGTYYGTTEPGA

SEQ ID NO: 56391 - protein, 428 aa, Kocuria varians
  REGION 1..428: note = tr|A0A4Y4D4E7|A0A4Y4D4E7_KOCVA Queuine tRNA-ribosyltransferase OS=Kocuria varians OX=1272 GN=tgt; PE = 3 SV=1
MPISDPASPFRFELHTRLRDSPSVTAERVADNGGQFQARTGTITTPHGQIQTPAFIPVATQAAMKAVLPESMAAEGAQAMLANAYHLFLEPGDDVLDEAGGLGTFMNWPGPTFTDSGGFQVMSLGSGLGKVIDMSTVSGPLGDNHQAPGVKRMARVDDDGVWFRSYLNGDLHRFTPEVSMQVQHNIGADIMFAFDELTTLHNSREYQETALERTRQWALRCVAEHRRLTEERAAKPYQALFGVVQGAQYEDLRRKACRDLSGMGFDGFGIGGALEKAQLGTIVRWCTEELPERTPKHLLGISEPDDIFTAIDNGVDTFDCVSPTRVARSSAVYSPTGRFNLTNIRFKKDFTPISETCRCYTCTHYTRAYLRHLFKSKERNAATLASIHNERFVLDLVAGARAAIEAGDYFEYRDEFLGAYYGVAQPSS

SEQ ID NO: 56392 - protein, 386 aa, unidentified
  source 1..386: note = Komagataeibacter cocois
  REGION 1..386: note = tr|A0A365YZP8|A0A365YZP8_9PROT Queuine tRNA-ribosyltransferase OS=Komagataeibacter cocois; OX = 1747507 GN=tgt PE=3 SV=1
MTAFRWRAQARSGHARAGYLDTAHGTVATPTFMPVGTVGTVKAMTMDAVRSTGAGIVLGNTYHLMLRPGAERVRALGGLHRFMDWPGPILTDSGGFQVMSLGPLRRLDADGVTFRSHIDGSEHRLTPERSTDIQHALDATISMCFDECPALPAPAEAIARSMRMSMRWAERCRAAFVPRPGYAQYGIIQGGTEPELRAESVRALTDIGFEGYAIGGLAVGEGQELMFSTLDVTVGLIPDDAPRYLMGVGTPDDLLGAVERGVDMFDCVMPTRAGRTARAYTERGTLNMRNARHATDSRPISPHCDCPACSRHSRAYLHHLFRTNEILGPMLLTWHNLSYYQRLMRGIRAAIVDGTLPEHAAHLRAQWAMEDWSPDEMPFPDIPPVP

SEQ ID NO: 56393 - protein, 386 aa, unidentified
  source 1..386: note = Komagataeibacter europaeus
  REGION 1..386: note = tr|A0A0M0EGC4|A0A0M0EGC4_KOMEU Queuine tRNA-ribosyltransferase OS=Komagataeibacter europaeus; OX = 33995 GN=tgt PE=3 SV=1
MTTFRWRPEARAGHARAGWLDTAHGSVPTPTFMPVGTVGTVKAMTMDSVRSTGAGIVLGNTYHLMLRPGAERVRALGGLHRFMDWPGPILTDSGGFQVMSLGPLRKLDQDGVTFRSHIDGSKHRLTPERSTDIQYALDATISMCFDECPALPAAPDVIAKSMRMSMRWAERCRTAFVQRPGYAQYGIIQGGTEPELRAESVKALTGIGFEGYAIGGLAVGEGQELMFSTLESTVPLIPDASPRYLMGVGTPDDLLGAVERGVDMFDCVMPTRAGRTARAYTERGTLNLRNARHATDSRPISPHCDCLACSRHSRAYLHHLFRANEILGPMLLTWHNLAYYQRLMRGMRAAIVDGAFTAHADHLRAQWAMDDWSGDEMPFPDIPPVA

SEQ ID NO: 56394 - protein, 386 aa, unidentified; identical to SEQ ID NO: 56393
  source 1..386: note = Komagataeibacter europaeus
  REGION 1..386: note = tr|A0A0D6Q0S8|A0A0D6Q0S8_KOMEU Queuine tRNA-ribosyltransferase OS=Komagataeibacter europaeus NBRC 3261 OX=1234669 GN=tgt PE=3 SV=1

SEQ ID NO: 56395 - protein, 386 aa, unidentified
  source 1..386: note = Komagataeibacter hansenii
  REGION 1..386: note = tr|A0A318PY57|A0A318PY57_KOMHA Queuine tRNA-ribosyltransferase OS=Komagataeibacter hansenii; OX = 436 GN=tgt PE=3 SV=1
MTAFRWRAQARSGQARAGYLETAHGTVPTPTFMPVGTVGTVKAMTMDAVRSTGAGIVLGNTYHLMLRPGAERVRALGGLHRFMDWPGPILTDSGGFQVMSLGPLRKLDADGVTFRSHIDGSRHRLTPERSTDIQHALDATISMCFDECPALPAPPETIAQSMRMSMRWAERCRTAFVARPGYAQYGIIQGGTEPELRAESVRALTDIGFEGYAIGGLAVGEGQELMFATLDATVGLIPQDAPRYLMGVGTPDDLLGAVERGVDMFDCVMPTRAGRTARAYTERGTLNLRNARHAADSRPISAHCDCLACSRHSRAYLHHLFRANEILGPMLLTWHNLAYYQRLMRGIRAAIVGDTLPEHAAHLRAQWAMEDWSPDEMPFPDIPPVP

SEQ ID NO: 56396 - protein, 386 aa, unidentified
  source 1..386: note = Komagataeibacter hansenii
  REGION 1..386: note = tr|D5QBB8|D5QBB8_KOMHA Queuine tRNA-ribosyltransferase OS=Komagataeibacter hansenii ATCC 23769 OX=714995 GN=tgt PE=3 SV=1
MTAFRWRAQARSGQARAGYLETAHGTVPTPTFMPVGTVGTVKAMTMDAVRSTGAGIVLGNTYHLMLRPGAERVRALGGLHRFMDWPGPILTDSGGFQVMSLGPLRKLDADGVTFRSHIDGSKHRLTPERSTDIQHALDATISMCFDECPALPAPPETIAQSMRMSMRWAERCRTAFVARPGYAQYGIIQGGTEPELRAESVRALTDIGFEGYAIGGLAVGEGQELMFSTLDATVGLIPQDAPRYLMGVGTPDDLLGAVERGVDMFDCVMPTRAGRTARAYTERGTLNLRNARHAADSRPISAHCDCLACSRHSRAYLHHLFRANEILGPMLLTWHNLAYYQRLMRGIRAAIVEDTLPEHAAHLRAQWAMEDWSPDEMPFPDIPPVP

SEQ ID NO: 56397 - protein, 386 aa, unidentified
  source 1..386: note = Komagataeibacter intermedius
  REGION 1..386: note = tr|A0A0N0MFX1|A0A0N0MFX1_9PROT Queuine tRNA-ribosyltransferase OS=Komagataeibacter intermedius AF2 OX=1458464 GN=tgt PE=3 SV=1
MTTFRWRPEARAGHARAGWLDTAHGSVPTPTFMPVGTAGTVKAMTMDSVRATGAGIVLGNTYHLMLRPGAERVRALGGLHRFMDWPGPILTDSGGFQVMSLGPLRKLDQDGVTFRSHIDGSRHRLTPERSTDIQHALDATITMCFDECPALPAAPDVIAKSMRMSMRWAERCRTAFIQRPGYAQYGIIQGGTEPELRAESVRALTGIGFEGYAIGGLAVGEGQELMFATLDATVPLIPDASPRYLMGVGTPDDLLGSVERGVDMFDCVMPTRAGRTARAYTERGTLNLRNARHATDSRPISPHCDCLACSRHSRAYLHHLFRANEILGPMLLTWHNLAYYQRLMRGMRAAIVDGAFAAHADHLRAQWAMDDWSGDEMPFPDIPPVA

SEQ ID NO: 56398 - protein, 386 aa, unidentified
  source 1..386: note = Komagataeibacter maltaceti
  REGION 1..386: note = tr|A0A2S3W2N1|A0A2S3W2N1_9PROT Queuine tRNA-ribosyltransferase OS=Komagataeibacter maltaceti; OX = 1203393 GN=tgt PE=3 SV=1
MTAFRWRAQARSGRARAGFLDTAHGTVATPTFMPVGTVGTVKAMTMDAVRSTGAGIVLGNTYHLMLRPGAERVRALGGLHRFMDWPGPILTDSGGFQVMSLGPLRKLDADGVTFRSHIDGSKHRLTPERSTDIQHALDATISMCFDECPALPAPPEVIAQSMRMSMRWAERCRTAFVARPGYAQYGIIQGGTEPDLRAESVRALTDIGFEGYAIGGLAVGEGQELMFSTLDVTVGLIPDDAPRYLMGVGTPDDLLGAVERGVDMFDCVMPTRAGRTARAYTERGTLNLRNARHATDSRPISPHCDCLACSRHSRAYLHHLFRANEILGPMLLTWHNLAYYQRLMRGIRAAIVDGTLPEHAAHLRAQWAMEDWSPDEMPFPDIPPVP

SEQ ID NO: 56399 - protein, 386 aa, unidentified
  source 1..386: note = Komagataeibacter medellinensis
  REGION 1..386: note = tr|G2I0K5|G2I0K5_KOMMN Queuine tRNA-ribosyltransferase OS=Komagataeibacter medellinensis (strain NBRC 3288 / BCRC 11682 / LMG 1693 / Kondo 51); OX = 634177 GN=tgt PE=3SV=1
MTAFRWRPEARNGHARAGWLDTAHGSVATPTFMPVGTVGTVKAMTMDSVRATGAGIVLGNTYHLMLRPGAERVRALGGLHRFMDWPGPILTDSGGFQVMSLGPLRKLDPDGVTFRSHIDGSKHRLTPERSTDIQHALDATISMCFDECPALPAAPEVIARSMRMSMRWAERCRTAFIQRPGYAQYGIIQGGTEPELRAESVRALTGIGFEGYAIGGLAVGEGQELMFATLDSTVPLIPDASPRYLMGVGTPDDLLGAVERGVDMFDCVMPTRAGRTARAYTERGTLNLRNARHATDSRPISPHCDCLACSRHSRAYLHHLFRANEILGPMLLTWHNLAYYQCLMRGMRATIVDGTFAAHAEHLRTQWAMDDWSGDEMPYPDFPPVP

SEQ ID NO: 56400 - protein, 386 aa, unidentified
  source 1..386: note = Komagataeibacter nataicola
  REGION 1..386: note = tr|A0A1U9RM17|A0A1U9RM17_9PROT Queuine tRNA-ribosyltransferase OS=Komagataeibacter nataicola; OX = 265960 GN=tgt PE=3 SV=1
MTTFRWRPEARSGHARAGWLDTAHGTVATPTFMPVGTVGTVKAMTMDSVRSTGAGIVLGNTYHLMLRPGAERVRALGGLHRFMDWPGPILTDSGGFQVMSLGPLRKLDQDGVTFRSHIDGSKHRLTPERSTDIQYALDATISMCFDECPALPAAPEVIAKSMRMSMRWAGRCREAFVQRPGYAQYGIIQGGTEPELRAESVKALTGIGFEGYAIGGLAVGEGQELMFSTLEATVPLIPDGSPRYLMGVGTPDDLLGAVERGVDMFDCVMPTRAGRTARAYTERGTLNIRNARHASDSRPISPHCDCLACSRHSRAYLHHLFRANEMLGPMLLTWHNIAYYQRLMRGMRAAIVDGGFEAHATHLRAQWAMDDWSGDEMPFPDIPPVA

SEQ ID NO: 56401 - protein, 386 aa, unidentified
  source 1..386: note = Komagataeibacter oboediens
  REGION 1..386: note = tr|A0A318R066|A0A318R066_9PROT Queuine tRNA-ribosyltransferase OS=Komagataeibacter oboediens; OX = 65958 GN=tgt PE=3 SV=1
MTTFRWRPEARAGHARAGWLDTAHGSVPTPTFMPVGTVGTVKAMTMDSVRSTGAGIVLGNTYHLMLRPGAERVRELGGLHRFMDWPGPILTDSGGFQVMSLGPLRKLDQDGVTFRSHIDGSKHRLTPERSTDIQHALDATITMCFDECPALPAAPEVIAKSMRMSMRWAERCRTVFIQRPGYAQYGIIQGGTEPELRAESVRALTGIGFEGYAIGGLAVGEGQELMFSTLESTVPLIPDASPRYLMGVGTPDDLLGSVERGVDMFDCVMPTRAGRTARAYTERGTLNLRNARHATDSRPISPHCDCLACSRHSRAYLHHLFRANEILGPMLLTWHNLAYYQRLMRGMRAAIVDGAFGAHADHLRAQWAMDDWSGDEMPFPDIPPVA

SEQ ID NO: 56402 - protein, 386 aa, unidentified
  source 1..386: note = Komagataeibacter pomaceti
  REGION 1..386: note = tr|A0A318QFQ7|A0A318QFQ7_9PROT Queuine tRNA-ribosyltransferase OS=Komagataeibacter pomaceti; OX = 2021998 GN=tgt PE=3 SV=1
MTAFRWRAQARSGHARAGYLDTAHGTVATPTFMPVGTVGTVKAMTMDAVRSTGAGIVLGNTYHLMLRPGAERVRALGGLHRFMDWPGPILTDSGGFQVMSLGPLRRLDADGVTFRSHIDGSEHRLTPERSTDIQHALDATISMCFDECPALPAPAEAIARSMRMSMRWAERCRAAFVPRPGYAQYGIIQGGTEPELRAESVRALTDIGFEGYAIGGLAVGEGQDLMFSTLDVTVGLIPDDAPRYLMGVGTPDDLLGAVERGVDMFDCVMPTRAGRTARAYTERGTLNMRNARHATDSRPISPDCDCPACSRHSRAYLHHLFRTNEILGPMLLTWHNLAYYQRLMRGIRAAIVDGTLPEHAAHLRAQWAMEDWSPDEMPFPDIPPVP

SEQ ID NO: 56403 - protein, 386 aa, unidentified; identical to SEQ ID NO: 55696
  source 1..386: note = Komagataeibacter rhaeticus
  REGION 1..386: note = tr|A0A181C6X8|A0A181C6X8_9PROT Queuine tRNA-ribosyltransferase OS=Komagataeibacter rhaeticus; OX = 215221 GN=tgt PE=3 SV=1

SEQ ID NO: 56404 - protein, 386 aa, unidentified; identical to SEQ ID NO: 55696
  source 1..386: note = Komagataeibacter rhaeticus
  REGION 1..386: note = tr|A0A070A370|A0A070A370_9PROT Queuine tRNA-ribosyltransferase OS=Komagataeibacter rhaeticus AF1; OX = 1432055 GN=tgt PE=3 SV=1

SEQ ID NO: 56405 - protein, 386 aa, unidentified
  source 1..386: note = Komagataeibacter saccharivorans
  REGION 1..386: note = tr|A0A347W9W3|A0A347W9W3_9PROT Queuine tRNA-ribosyltransferase OS=Komagataeibacter saccharivorans; OX = 265959 GN=tgt PE=3 SV=1
MTSFRWRPEARAGHARAGWLDTAHGSVPTPTFMPVGTVGTVKAMTMDNVRSTGAGIVLGNTYHLMLRPGAERVRELGGLHRFMDWPGPILTDSGGFQVMSLGPLRKLDADGVTFRSHIDGSKHRLSPERSTDIQHALDATISMCFDECPALPAEADVIAKSMRLSMRWAERCRDAFVQRPGYAQYGIIQGGTEPELRAESVKALTGIGFEGYAIGGLAVGEGQELMFSTLDVTVPLIPDASPRYLMGVGTPDDLLGAVERGVDMFDCVMPTRAGRTARAYTERGTLNLRNARHATDSRPISPHCDCLACSRHSRAYLHHLFRANEILGPMLLTWHNLAYYQRLMRGMRAAIVDGGFTAHATHLRAQWALDDWSGDEMPFPDIPPVA

SEQ ID NO: 56406 - protein, 386 aa, unidentified
  source 1..386: note = Komagataeibacter sp.
  REGION 1..386: note = tr|A0A4P5P128|A0A4P5P128_9PROT Queuine tRNA-ribosyltransferase OS=Komagataeibacter sp. MSKU15; OX = 1932664 GN=tgt PE=3 SV=1
MTTFRWRPEARAGHARAGWLDTAHGSVPTPTFMPVGTVGTVKAMTMDSVRSTGAGIVLGNTYHLMLRPGAERVRALGGLHRFMDWPGPILTDSGGFQVMSLGPLRKLDQDGVTFRSHIDGSKHRLTPERSTDIQYALDATISMCFDECPALPAAPDVIAKSMRMSMRWAERCRTAFVQRPGYAQYGIIQGGTEPELRAESVKALTGIGFEGYAIGGLAVGEGQELMFSTLEATVPLIPDASPRYLMGVGTPDDLLGAVERGVDMFDCVMPTRAGRTARAYTERGTLNLRNARHATDSRPISPHCDCLACSRHSRAYLHHLFRANEILGPMMLTWHNLAYYQRLMRGMRAAIVDGAFAAHADHLRAQWAMDDWSGDEMPFPDIPPVA

SEQ ID NO: 56407 - protein, 386 aa, unidentified; identical to SEQ ID NO: 56406
  source 1..386: note = Komagataeibacter sp.
  REGION 1..386: note = tr|A0A4P5NVI8|A0A4P5NVI8_9PROT Queuine tRNA-ribosyltransferase OS=Komagataeibacter sp. MSKU9; OX = 1932662 GN=tgt PE=3 SV=1

SEQ ID NO: 56408 - protein, 386 aa, unidentified
  source 1..386: note = Komagataeibacter sucrofermentans
  REGION 1..386: note = tr|A0A318QFX5|A0A318QFX5_9PROT Queuine tRNA-ribosyltransferase OS=Komagataeibacter sucrofermentans OX=1053551 GN=tgt PE=3 SV=1
MTTFSWRPEARCGHARAGWLDTAHGTVATPTFMPVGTVGTVKAMTMDSVRSTGAGIVLGNTYHLMLRPGAERVRELGGLHRFMDWPGPILTDSGGFQVMSLGPLRKLDPDGVTFRSHIDGSKHRLTPERSTDIQHALDATISMCFDECPALPAAPEVIAKSMRMSMRWAERCRTAFVQRPGYAQYGIIQGGTEPELRAESVKALTGIGFEGYAIGGLAVGEGQELMFSTLEATVPLIPDGSPRYLMGVGTPDDLLGAVERGVDMFDCVMPTRAGRTARAYTERGTLNIRNARHASDSRPISPHCDCLACSRHSRAYLHHLFRANEMLGPMLLTWHNIAYYQRLMRGMRAAIVDGTFEAHAAHLRAQWAMDDWSGDEMPFPDIPPVA

SEQ ID NO: 56409 - protein, 386 aa, unidentified
  source 1..386: note = Komagataeibacter swingsii
  REGION 1..386: note = tr|A0A2V4SD12|A0A2V4SD12_9PROT Queuine tRNA-ribosyltransferase OS=Komagataeibacter swingsii; OX = 215220 GN=tgt PE=3 SV=1
MTTFRWRPEARAGHARAGWLDTAHGSVPTPTFMPVGTVGTVKAMTMDSVRSTGAGIVLGNTYHLMLRPGAERVRALGGLHRFMDWPGPILTDSGGFQVMSLGPLRKLDQDGVTFRSHIDGSKHRLTPERSTDIQHALDATISMCFDECPALPAAPDVIAKSMRMSMRWAERCRTAFVQRPGYAQYGIIQGGTEPELRAESVRALTGIGFEGYAIGGLAVGEGQDLMFSTLDSTVPLIPDSSPRYLMGVGTPDDLLGAVERGVDMFDCVMPTRAGRTARAYTERGTLNLRNARHATDSRPISPHCDCLACSRHSRAYLHHLFRANEILGPMLLTWHNLAYYQRLMRGMRAAIVDGAFTAHAGHLRAEWAMDDWSGDEMPFPDIPPVA

SEQ ID NO: 56410 - protein, 386 aa, unidentified
  source 1..386: note = Komagataeibacter xylinus
  REGION 1..386: note = tr|A0A318PLM8|A0A318PLM8_KOMXY Queuine tRNA-ribosyltransferase OS=Komagataeibacter xylinus; OX = 28448 GN=tgt PE=3 SV=1
MTTFRWRPEARSGHARAGWLDTAHGTVATPTFMPVGTVGTVKAMTMDSVRSTGAGIVLGNTYHLMLRPGAERVRQLGGLHRFMDWPGPILTDSGGFQVMSLGPLRKLDQDGVTFRSHIDGSKHRLTPERSTDIQHALDATISMCFDECPALPAAPEVIAQSMRMSMRWAERCRTAFVQRPGYAQYGIIQGGTEPELRAESVKALTGIGFEGYAIGGLAVGEGQELMFSTLDSTVSLIPDGSPRYLMGVGTPDDLLGAVERGVDMFDCVMPTRAGRTARAYTERGTLNMRNARHASDSRPISPHCDCLACSRHSRAYLHHLFRANEMLGPMLLTWHNIAYYQRLMRGMRAAIVDGTFEAHAAHLRAEWEMDDWSGDEMPFPDIPPVP

SEQ ID NO: 56411 - protein, 386 aa, unidentified
  source 1..386: note = Komagataeibacter xylinus
  REGION 1..386: note = tr|A0A143WF77|A0A143WF77_KOMXY Queuine tRNA-ribosyltransferase OS=Komagataeibacter xylinus; OX = 28448 GN=tgt PE=3 SV=1
MTAFRWRAQARSGQARAGYLETAHGTVPTPTFMPVGTVGTVKAMTMDAVRSTGAGIVLGNTYHLMLRPGAERVRALGGLHRFMDWPGPILTDSGGFQVMSLGPLRKLDADGVTFRSHIDGSKHRLTPERSTDIQHALDATISMCFDECPALPAPPETIAQSMRMSMRWAERCRTAFVARPGYAQYGIIQGGTEPELRAESVRALTDIGFEGYAIGGLAVGEGQELMFSTLDATVGLIPQDAPRYLMGVGTPDDLLGAVERGVDMFDCVMPTRAGRTARAYTERGTLNLRNARHAADSRPISAHCDCLACSRHSRAYLHHLFRANEILGPMLLTWHNLAYYQRLMRGIRAAIVGDTLPEHAAHLRAQWAMEDWSPDEMPFPDIPPVP

SEQ ID NO: 56412 - protein, 376 aa, Kordia algicida
  REGION 1..376: note = tr|A9E5K1|A9E5K1_9FLAO Queuine tRNA-ribosyltransferase OS=Kordia algicida OT-1 OX=391587; GN = tgt PE=3 SV=1
MKFELQGKDPLSKARAATLTTDHGTIETPIFMPVGTIGTVKGVHQRELKEDINPDIILGNTYHLYLRPQTEILEKAGGLHKFINWDRNILTDSGGYQVYSLSANRKIKEEGVKFKSHIDGSYHFFTPENVMEIQRTIGADIIMAFDECTPYPCDYRYAKRSMHMTHRWLDRCIAHLEKTPYKYDYSQTFFPIVQGSTYKDLRKQSAEFIASREAEGNAIGGLSVGEPAEEMYAMTDVVCSILPEDKPRYLMGVGTPINILENIALGVDMFDCVMPTRNARNGMLFTAHGTINIKNKKWADDFSPIDEMGITYVDLEYSKAYVRHLFTVNELLGKQIATIHNLGFYLWLVREARKHILAGDFDAWKNKMVKQMDKRL

SEQ ID NO: 56413 - protein, 376 aa, Kordia periserrulae
  REGION 1..376: note = tr|A0A2T6BUR9|A0A2T6BUR9_9FLAO Queuine tRNA-ribosyltransferase OS=Kordia periserrulae OX=701523; GN = tgt PE=3 SV=1
MKFDLKGKDPQSKARAGVLTTDHGTIETPIFMPVGTVGTVKGVHQRELKEDINPDIILGNTYHLYLRPQTEILEKAGGLHKFINWDRNILTDSGGYQVYSLSANRKIKEEGVKFKSHIDGSYHFFTPENVIEIQRTIGADIIMAFDECTPYPCDYRYAKRSMHMTHRWLDRCLAHLEKTPFKYDYRQAFFPIVQGSTYKDLRKQSAEFIASREAEGNAIGGLSVGEPAEEMYAMTDVVCEILPEDKPRYLMGVGTPINILENIALGVDMFDCVMPTRNARNGMLFTAHGTINIKNKKWADDFSPIDEMGITYVDLEYSKAYVRHLFTVNELLGKQIATIHNLGFYLWLVREARKHILAGDFYEWKNKMVKQMDKRL

SEQ ID NO: 56414 - protein, 376 aa, Kordia sp.
  REGION 1..376: note = tr|A0A501HW73|A0A501HW73_9FLAO Queuine tRNA-ribosyltransferase OS=Kordia sp. TARA_039_SRF; OX = 2530203 GN=tgt PE=3 SV=1
MKFDLKGKDPQSKARAGVLKTDHGTIETPIFMPVGTIGTVKGVHQRELKEDINPDIILGNTYHLYLRPQTEILEKAGGLHKFINWDRNILTDSGGYQVYSLSANRKIKEEGVKFKSHIDGSYHFFTPENVMEIQRTIGADIIMAFDECTPYPCDYRYAKRSMHMTHRWLDRCLAHLEKTPYKYDYSQAFFPIVQGSTYKDLRKQSAEFIASREAEGNAIGGLSVGEPAEEMYAMTDVVCEILPEDKPRYLMGVGTPINILENIALGVDMFDCVMPTRNARNGMLFTAHGTINIKNKKWADDFSPIDEMGITYVDLEYSKAYVRHLFTVNELLGKQIATIHNLGFYLWLVREARKHILAGDFYEWKNKMVKQMDKRL

SEQ ID NO: 56415 - protein, 376 aa, Kordia sp.
  REGION 1..376: note = tr|A0A345H2T2|A0A345H2T2_9FLAO Queuine tRNA-ribosyltransferase OS=Kordia sp. SMS9 OX=2282170; GN = tgt PE=3 SV=1
MKFELQGKDPQSKARAATLTTDHGTIETPIFMPVGTIGTVKGVHQRELKEDINPDVILGNTYHLYLRPQTEILEKAGGLHKFINWDRNILTDSGGYQVYSLSANRKIKEEGVKFKSHIDGSYHFFTPENVMEIQRTIGADIIMAFDECTPYPCDYRYAKRSMHMTHRWLDRCIAHLEKTPYKYDYSQTFFPIVQGSTYKDLRRQSAEFIASCEAEGNAIGGLSVGEPAEEMYAMTDVVCEILPEDKPRYLMGVGTPINILENIALGVDMFDCVMPTRNARNGMLFTAHGSINIKNKKWADDFSPIDEMGITYVDLEYSKAYVRHLFTVNELLGKQIATIHNLGFYLWLVREARKHILAGDFYEWKNKMVKQMDKRL

SEQ ID NO: 56416 - protein, 378 aa, unidentified
  source 1..378: note = Kordiimonadales bacterium
  REGION 1..378: note = tr|A0A5A7NE73|A0A5A7NE73_9PROT Queuine tRNA-ribosyltransferase OS=Kordiimonadales bacterium JCM 17843 OX=1236965 GN=tgt PE=3 SV=1
MTRFSFDVHKTDGKARRGTITMQRGEIRTPAFMPVGTAATVKAMLPESVRQTGADIILGNTYHLMLRPGAERIAELGGLHQFMNWDRPILTDSGGFQVMSLAKLRKLTEEGVAFQSHIDGSRHMLTPERSIEIQRFLGSDIIMCFDECTPFPATYEQAKESKDLSMRWARRSREAFDSSAQQSGKSALFGIQQGSVFEDLREQSSKSLADIGFDGYAVGGLAVGEGQEAMFSTLDFCAPMLPAEKPRYLMGVGKPDDIVGAVMRGIDMFDCVMPTRSGRTAQAFTWRGPINLRNARHKDDPRPLDPDVPSPATHYSRAYLHHLVRCEEILAPMLVTWHNIAFYQALMQRLRDAIEQGCLADFAAQFLETYRGGDIDPL

SEQ ID NO: 56417 - protein, 378 aa, unidentified
  source 1..378: note = Kordiimonadales bacterium
  REGION 1..378: note = tr|A0A5A7MVL4|A0A5A7MVL4_9PROT Queuine tRNA-ribosyltransferase OS=Kordiimonadales bacterium JCM 17845 OX=1236967 GN=tgt PE=3 SV=1
MTRFSFDVHKTDGKARRGTITMQRGEIRTPAFMPVGTAATVKAMLPESVRQTGADIILGNTYHLMLRPGAERIAELGGLHQFMNWDRPILTDSGGFQVMSLAKLRKLTEEGVAFQSHIDGSRHMLTPERSIEIQRFLGSDIVMCFDECTPFPATYEQAKESKDLSMRWARRSREAFDSSAQQSGKSALFGIQQGSVFEDLREQSSKALADIGFDGYAVGGLAVGEGQEAMFSTLDFCAPMLPAEKPRYLMGVGKPDDIVGAVMRGIDMFDCVMPTRSGRTAQAFTWRGPINLRNARHKDDPRPLDPDVPSPATHYSRAYLHHLVRCEEILAPMLVTWHNIAFYQALMQRLRDAIEQGCLADFAAQFLETYRGGDIDPL

SEQ ID NO: 56418 - protein, 380 aa, Kordiimonas lacus
  REGION 1..380: note = tr|A0A1G6WMP7|A0A1G6WMP7_9PROT Queuine tRNA-ribosyltransferase OS=Kordiimonas lacus OX=637679; GN = tgt PE=3 SV=1
MRERFKYDIHATDGAARTGTIQMMRGDIRTPAFMPVGTAGTVKAMMPESVRSTGADILLGNTYHLMLRPTAERVHKLGGLHKFMNWDRPILTDSGGFQVMSLTQLRKMSEEGVTFQSHLDGSKILLTPERSMEIQRLLGSDIMMCFDECTPYPATEDQARQSMELSMRWAQRSRDGFDSGTDHAARSALFGIVQGSVYEDLRFRSIDALQEIGFDGYAVGGLAVGEGQEMMFRVLDFTMPRMPKETPRYLMGVGKPDDIVGAVERGIDMFDCVMPTRSGRTGQGFTWRGAINMKNARHKDDMRPIQEGCACPACTQYSRAYVHHLIRAGEILGAMLLTWHNLQFYQDLMAGLRQAISDGRLTEHANNFRETYALGDIDPL

SEQ ID NO: 56419 - protein, 381 aa, Kordiimonas sp.
  REGION 1..381: note = tr|A0A2E1CXX0|A0A2E1CXX0_9PROT Queuine tRNA-ribosyltransferase OS=Kordiimonas sp. OX=1970157; GN = tgt PE=3 SV=1
MNNAYHLNINATDGAARTGILRTPRGDIRTPAFMPVGTAATVKAMKPATVRQTGADIILGNTYHLMLRPTAERIHNLGGLHKFMDWDRPILTDSGGFQVMSLAQLRKITEEGVSFRSHIDGSKHLLTPERSMEIQKLLGADIIMAFDECTPYPATKAETDKSMRLSMRWAKRSYEAFENIDLPTAKSSAIFGIVQGGVYRDLREESLKSLTDIPFDGYAIGGLAVGEGQDVMFEVLDFTMPHMPTDKPRYLMGVGKPDDIVGAVARGIDMFDCVLPTRSGRNAQAFTRRGTVNLKNARHQDDPRPLDDQCACNACQRYSRAYLSHLIRSGEILGAMLLTEHNLQYYQDLMSGLRNAIEQQKLSNFINDFHKLREVGDIPPL

SEQ ID NO: 56420 - protein, 384 aa, unidentified
  source 1..384: note = Koribacter versatilis
  REGION 1..384: note = sp|Q1IVF1|TGT_KORVE Queuine tRNA-ribosyltransferase; OS = Koribacter versatilis (strain Ellin345) OX=204669; GN = tgt PE=3 SV=1
MSMSFSFQVEATQGAARAGRMITPHGEVETPVFMPVGTVATVKGIPQDLLEELGVQILLNNTYHLYLRPGVEQIRKLGGTHKFMSWDRSILTDSGGFQVFSLSELRKVTEEGVSFRSHLDGSSHLFSPESAMASQIGIGADIIMAFDECTEYPAERTRTERSMELTLRWAERSKNAFEAHKHEVPWFAERGKKSQALFGIVQGGMFPNLRKESAERTVEIGFPGYALGGFSVGEPREKTAELVANTVPLLPENKPRYLMGVGYPEEIVQYARMGIDMMDCVLPTRAARHGLLFTSEGRLTIKNQRFASDEGPLDPNCSCKVCKRYSRAYLRHLYASNEVLAQVLNTTHNLSYYLDTMRRVRQAIILGENSVSLPVVRSPHLSAT

SEQ ID NO: 56421 - protein, 375 aa, unidentified
  source 1..375: note = Kosakonia arachidis
  REGION 1..375: note = tr|A0A1I6XSD6|A0A1I6XSD6_9ENTR Queuine tRNA-ribosyltransferase OS=Kosakonia arachidis OX=551989; GN = tgt PE=3 SV=1
MKFELDTTDGRARRGRLVFERGVVETPAFMPVGTYGTVKGMTPEEVEATGAQIILGNTFHLWLRPGQEIMKLHGDLHDFMQWKGPILTDSGGFQVFSLGDIRKITESGVHFRNPINGDPIFLDPEKSMEIQYDLGSDIVMIFDECTPYPADWDYAKRSMEMSLRWAKRSRDRFDGLGNKNALFGIIQGSVYEDLRDISVKGLVEIGFDGYAVGGLAVGEPKEDMHRILEHVCPQIPADKPRYLMGVGKPEDLVEGVRRGIDMFDCVMPTRNARNGHLFVTNGVVKIRNAKYKSDTGPLDAECDCYTCRNYSLAYLHHLDRCNEILGARLNTIHNLRYYQRLMAGLRKAIEEGKLESFVADFYQRQGRLVPPLNVD

SEQ ID NO: 56422 - protein, 375 aa, unidentified
  source 1..375: note = Kosakonia cowanii
  REGION 1..375: note = tr|A0A3R5XMX8|A0A3R5XMX8_9ENTR Queuine tRNA-ribosyltransferase OS=Kosakonia cowanii OX=208223; GN = tgt PE=3 SV=1
MKFELDTTDGRARRGRLVFERGVVETPAFMPVGTYGTVKGMTPEEVEATGAQIILGNTFHLWLRPGQEIMKLHGDLHDFMQWKGPILTDSGGFQVFSLGDIRKITEAGVHFRNPINGDPIFLDPEKSMEIQYDLGSDIVMIFDECTPYPADWDYAKRSMEMSLRWAKRSRDRFDGLGNKNALFGIIQGSVYEDLRDISVKGLVEIGFDGYAVGGLAVGEPKEDMHRILEHVCPQIPADKPRYLMGVGKPEDLVEGVRRGIDMFDCVMPTRNARNGHLFVTNGVVKIRNAKYKSDTSPLDAECDCYTCRNYSLAYLHHLDRCNEILGARLNTIHNLRYYQRLMAGLRKAIEEGKLESFVADFYQRQGRPVPPLNVD

SEQ ID NO: 56423 - protein, 375 aa, unidentified
  source 1..375: note = Kosakonia oryzae
  REGION 1..375: note = tr|A0A1T5FV42|A0A1T5FV42_9ENTR Queuine tRNA-ribosyltransferase OS=Kosakonia oryzae OX=497725; GN = tgt PE=3 SV=1
MKFELDTTDGRARRGRLVFERGVVETPAFMPVGTYGTVKGMTPEEVEATGAQIILGNTFHLWLRPGQEIMKLHGDLHDFMQWKGPILTDSGGFQVFSLGDIRKITESGVHFRNPINGDPIFLDPEKSMEIQYDLGSDIVMIFDECTPYPADWDYAKRSMEMSLRWAKRSRDRFDGLGNKNALFGIIQGSVYEDLRDISVKGLVEIGFDGYAVGGLAVGEPKEDMHRILEHVCPQIPADKPRYLMGVGKPEDLVEGVRRGIDMFDCVMPTRNARNGHLFVTNGVVKIRNAKYKSDTSPLDAECDCYTCRNYSLAYLHHLDRCNEILGARLNTIHNLRYYQRLMAGLRKAIEEGKLERFVADFYQRQGRPVPPLNVD

SEQ ID NO: 56424 - protein, 375 aa, unidentified
  source 1..375: note = Kosakonia oryzendophytica
  REGION 1..375: note = tr|A0A1C4AQ92|A0A1C4AQ92_9ENTR Queuine tRNA-ribosyltransferase OS=Kosakonia oryzendophytica; OX = 1005665 GN=tgt PE=3 SV=1
MKFELDTTDGRARRGRLVFERGVVETPAFMPVGTYGTVKGMTPEEVEATGAQIILGNTFHLWLRPGQEIMKLHGDLHDFMQWKGPILTDSGGFQVFSLGDIRKITEAGVHFRNPINGDPIFLDPEKSMEIQYDLGSDIVMIFDECTPYPADWDYAKRSMEMSLRWAKRSRERFDGLGNKNALFGIIQGSVYEDLRDISVKGLVEIGFDGYAVGGLAVGEPKEDMHRILEHVCPQIPADKPRYLMGVGKPEDLVEGVRRGIDMFDCVMPTRNARNGHLFVTNGVVKIRNAKYKSDTGPLDPECDCYTCRNYSLAYLHHLDRCNEILGARLNTIHNLRFYQRLMAGLRKAIEEGKLESFVADFYQRQGRPVPPLNVD

SEQ ID NO: 56425 - protein, 375 aa, unidentified
  source 1..375: note = Kosakonia oryziphila
  REGION 1..375: note = tr|A0A1C4DD03|A0A1C4DD03_9ENTR Queuine tRNA-ribosyltransferase OS=Kosakonia oryziphila OX=1005667; GN = tgt PE=3 SV=1
MKFELDTTDGRARRGRLVFERGVVETPAFMPVGTYGTVKGMTPEEVEATGAQIILGNTFHLWLRPGQEIMKLHGDLHDFMQWKGPILTDSGGFQVFSLGDIRKITESGVHFRNPINGDPIFLDPEKSMEIQYDLGSDIVMIFDECTPYPADWDYAKRSMEMSLRWAKRSRERFDGLGNKNALFGIIQGSVYEDLRDISVKGLVEIGFDGYAVGGLAVGEPKEDMHRILEHVCPQIPADKPRYLMGVGKPEDLVEGVRRGIDMFDCVMPTRNARNGHLFVTNGVVKIRNAKYKSDTGPLDVECDCYTCRNYSLAYLHHLDRCNEILGARLNTIHNLRYYQRLMAGLRKAIEEGKLESFVADFYQRQGRPVPPLNVD

SEQ ID NO: 56426 - protein, 375 aa, unidentified; identical to SEQ ID NO: 56423
  source 1..375: note = Kosakonia radicincitans
  REGION 1..375: note = tr|A0A1V0LI09|A0A1V0LI09_9ENTR Queuine tRNA-ribosyltransferase OS=Kosakonia radicincitans DSM 16656 OX=1177180 GN=tgt PE=3 SV=1

SEQ ID NO: 56427 - protein, 375 aa, unidentified; identical to SEQ ID NO: 56423
  source 1..375: note = Kosakonia radicincitans
  REGION 1..375: note = tr|A0A5C1PEX7|A0A5C1PEX7_9ENTR Queuine tRNA-ribosyltransferase OS=Kosakonia radicincitans; OX = 283686 GN=tgt PE=3 SV=1

SEQ ID NO: 56428 - protein, 375 aa, unidentified; identical to SEQ ID NO: 54972
  source 1..375: note = Kosakonia sp.
  REGION 1..375: note = tr|A0A4R0HGM6|A0A4R0HGM6_9ENTR Queuine tRNA-ribosyltransferase OS=Kosakonia sp. WCHEs120001; OX = 2529380 GN=tgt PE=3 SV=1

SEQ ID NO: 56429 - protein, 375 aa, unidentified
  source 1..375: note = Kosakonia sp.
  REGION 1..375: note = tr|A0A368ZVP7|A0A368ZVP7_9ENTR Queuine tRNA-ribosyltransferase OS=Kosakonia sp. AG348 OX=2183906; GN = tgt PE=3 SV=1
MKFELDTTDGRARRGRLVFDRGVVETPAFMPVGTYGTVKGITPEEVEATGAQIILGNTFHLWLRPGQEIMKLHGDLHDFMQWKGPILTDSGGFQVFSLGDIRKITEAGVHFRNPINGDPIFLDPEKSMEIQYDLGSDIVMIFDECTPYPADWDYAKRSMEMSLRWAKRSRERFDGLGNKNALFGIIQGSVYEDLRDISVKGLVEIGFDGYAVGGLAVGEPKEDMHRILEHVCPQIPADKPRYLMGVGKPEDLVEGVRRGIDMFDCVMPTRNARNGHLFVTNGVVKIRNAKYKSDTGPLDSECDCYTCRNYSLAYLHHLDRCNEILGARLNTIHNLRYYQRLMAGLRKAIEEGKLESFVADFYQRQGRSVPPLNVD

SEQ ID NO: 56430 - protein, 375 aa, Kosmotoga arenicorallina
  REGION 1..375: note = tr|A0A176JZY9|A0A176JZY9_9BACT Queuine tRNA-ribosyltransferase OS=Kosmotoga arenicorallina S304; OX = 1453497 GN=tgt PE=3 SV=1
MVEYTLIKKDPNSRARLGKLKTRRGIIDTPIFMPVGTNATVKGIWQHQLEEIGAQIILGNAFHLYLKPGLEIIREFGGLHRFMGWDKPILTDSGGFQVFSIKNKKVSDDGVMFKSPIDGSKIFMTPELSMEIQMTLGSDIAMAFDECVAPEMSREYAEKSVKRTTEWAKRCLAYHDGSQALFGIVQGAFDKSLREQSAAEITSMDFDGFAVGGLSVGEPFPITKEILEYTVDLLPEDKPRYLMGIGSPDLIITAVENGIDMFDCVLPTRIGRHGTALTWNGKINLKAAKFKHSKEPIDNECSCKVCQHYSRGYIYHLFSRDEMLGKLLVSYHNIHFLLEFTGKIREAIASDTFKEFKEECYNSGLIKKEVLLPEL

SEQ ID NO: 56431 - protein, 377 aa, Kosmotoga olearia
  REGION 1..377: note = tr|C5CFG6|C5CFG6_KOSOT Queuine tRNA-ribosyltransferase OS=Kosmotoga olearia (strain ATCC BAA-1733 / DSM 21960 / TBF 19.5.1) OX=521045 GN=tgt PE=3; SV = 1
MVKFTVTKKDPVTSARTGKLETKHGVFETPVFMPVGTNATVKGLWQEQLKELGARIILGNAFHLYLKPGLEVIRSFGGLHSFMNWNNSILTDSGGFQVFSLKDKKVLDEGVLFKSPIDGSKIMMTPELSMEIQMTLGSDIAMAFDECVAPELDRTYAQESVERTTRWAEKCLAYHDRSQALFGIVQGAFYKDLREKSAREITAMDFDGFAVGGLSVGEPFEVTRDILEFTTKLLPEDKPRYLMGIGTPDMIIMAVENGIDMFDCVLPTRMGRHGTALTWSGKINLKAARHKFSKEPIDPECNCKVCRSYSKGYIYHLFSRDELLGKMMLSYHNVHFLLDFTDRLRNAIREERFLEFKELCTRKQLIKNDTGVNVSEG

SEQ ID NO: 56432 - protein, 374 aa, unidentified
  source 1..374: note = Kosmotoga pacifica
  REGION 1..374: note = tr|A0A0G2Z4K6|A0A0G2Z4K6_9BACT Queuine tRNA-ribosyltransferase OS=Kosmotoga pacifica OX=1330330; GN = tgt PE=3 SV=1
MVEYKLLNKDRYSRARLGKLQTRRGVIDTPIFMPVGTNATVKGIWQHQLEEMGAQIILGNAFHLYLKPGLEVMREFGGLHAFMNWEKPILTDSGGFQVFSIKDKKVTDEGVLFRSPIDGSKIMMTPELSMEIQMTLGSDIAMAFDECVAPGMSREYAEESVTRTTEWAKRCISYHDRSQALFGIVQGAFYKDLRKKSAAEITSMDFDGFAIGGLSVGEPFQVTKEILEYTVDLLPEDKPRYLMGIGSPDLIVTAVENGIDMFDCVLPTRIGRHGTALTWNGKINLKAAKFKYSKDPIDEECRCRVCQTYSRGYIQHLFSRDEMLGKILVSYHNIHFLLKFTERIREALATDSFKEFKEECYNRGLIKEALISES

SEQ ID NO: 56433 - protein, 373 aa, Kosmotoga sp.
  REGION 1..373: note = tr|A0A5D0RJM2|A0A5D0RJM2_9BACT Queuine tRNA-ribosyltransferase OS=Kosmotoga sp. OX=1955248 GN=tgt; PE = 3 SV=1
MLEFEVLSRDKKSLARRGRIITRKGNIETPVFMPVGTNGTVKGLWQHQLLEIDTQIILGNAFHLYLKPGLDVLKHFKGLHNFMNWSKPILTDSGGFQIFSIGEKKVTDDGVTIKSPLDGSWKEITPEFSMKIQQIIDSDIVMVLDECLPPGINRDYVEESVNRTTSWAIRCLKVHDKERAIFGIVQGGFYEELREKSAREITSLNFDGFAIGGLSVGEDFECTSRIMSFTVKILPDNKPRYVMGIGSPDLIINAVDNGIDMFDCVLPTRIGRHGTALTWDGKVNLKAARYKYDDNPVDPQCDCRVCRTYSRAYLHHLFRREELLGKLALSYHNTAFLNEFTRRIRNAIESNQYNEFKNDCIKRELIGSGVIKN

SEQ ID NO: 56434 - protein, 372 aa, unidentified
  source 1..372: note = Kosmotogaceae bacterium
  REGION 1..372: note = tr|A0A3B8NE51|A0A3B8NE51_9BACT Queuine tRNA-ribosyltransferase OS=Kosmotogaceae bacterium; OX = 2053567 GN=tgt PE=3 SV=1
MLSYEIISNSSTSRARVGRLNTSHGEILTPAFMPVGTNGTVKSLWQHELIEIGSQIILGNAFHLYLRPGLDVIEHFGGLHDFISWKGPILTDSGGFQVFSIRNKVVEDDGVRFRSPLDGSKLFITPELSMEIQMTLGSDIAMAFDECVEPGVSREYIEESVARTSVWARRCLNSHSGKQALFGIVQGGFFEDLRARSAEEICSMPFDGFAIGGLSVGEKFAITKDMLSFTVTFLPEDRPRYVMGIGSPEMIVVAVENGVDMFDCVLPTRIGRHGTALTSRGKVNLKAAKWRYDKDPIDKECGCKVCNTYSRGYIFHLFSRSEALGRSMVSYHNIFFLNEYVRKIRESIQRDCFEEFKEECLDKGLIGECVST

SEQ ID NO: 56435 - protein, 371 aa, unidentified
  source 1..371: note = Kouleothrix aurantiaca
  REGION 1..371: note = tr|A0A0P9DIA3|A0A0P9DIA3_9CHLR Queuine tRNA-ribosyltransferase (Fragment) OS=Kouleothrix aurantiaca OX=186479 GN=SE17_31590 PE=3 SV=1
FMPVGTRGTVKSLTPGEVRDAGAQIILGNTYHLYLQPGHELIARMGGLHRFMGWDGPILTDSGGFQVFSLVYGGIADEVKGRRPSQQAQLKPGMVKVTENGVIFRSYIDGSKHLFTPERSIEIQKGIGADIILCFDELPPFRAGYDYTARSLERTHRWEARCLQFHQNTLGGQNLSFAAPNLDQSLFGIVHGGVFENLRRASAEYIGTLGFDGLCIGGSLGKDKQQINEVVDMTVPHMPDALPRHLLGIGDVDDLLEGVARGIDMFDCVSPTRLGRHGAALVRDAARKWRLNVQNASLRNDDAPLDAQCRCYTCQHYSRAYIHHLFRAQELLGIRLVSVHNVAFLCDLMAEVRDSIREGRFAALRREWLGE

SEQ ID NO: 56436 - protein, 386 aa, Kozakia baliensis
  REGION 1..386: note = tr|A0A1D8UUY4|A0A1D8UUY4_9PROT Queuine tRNA-ribosyltransferase OS=Kozakia baliensis OX=153496; GN = tgt PE=3 SV=1
MNDMRWIAEATCGQARAGHLHTAHGVVPTPTFMPVGTAGTVKAMTMDAVRSTGAGIVLGNTYHLMLRPGPERVRKMGGLHKMMDWSGPILTDSGGFQVMSLGALRKLDQDGVTFNSHIDGSKHRLTPEISTEIQHALDATITMCFDECPALPATPERIEQSMALSMRWAARSREAFIARPGYGQFGIVQGGTERELRERSVKALTEIGFEGYAIGGLAVGEGQELMFSTLDYTTPLLPDSHARYLMGVGTPDDLLGAVERGVDMFDCVMPTRAGRTARAYTERGTLNMRNARHADDLRPISPHCDCLACSRHSRAYLHHLFRSNEILGPMLLTWHNLAYYQRLMRTIRAAIVAGNLPETAAKLRADWAAGDWSEDEFPQPKMPPVP

SEQ ID NO: 56437 - protein, 392 aa, Kriegella aquimaris
  REGION 1..392: note = tr|A0A1G9SDP9|A0A1G9SDP9_9FLAO Queuine tRNA-ribosyltransferase OS=Kriegella aquimaris OX=192904; GN = tgt PE=3 SV=1
MLCSLVGYICDFKINILKFTLNQTDSQSKARAGTMVTDHGVIETPIFMPVGTVASVKSVHQRELKEDIKPDIILGNTYHLFLRPKTDILKQAGGLHKFMGWDSNILTDSGGYQVYSLSANRKIKEEGVKFKSHIDGSMHMFTPENVMEIQREIGADIIMAFDECTPYPCDYNYAKRSMHMTHRWLDRCISHLDKVPYSYDYSQSFFPIVQGSTYKDLRKQSAEYIANAGAEGNAIGGLSVGEPAEEMYAMAEIVCDILPEDKPRYLMGVGTPINILENIALGVDMFDCVMPTRNARNGMLFTAHGTINIKNKKWEDDFSPVDEMGITFVDTEYSKAYLRHLFAANEYLGKQIATIHNLGFYLWLVREARKHILAGDFASWKTMMVKQMDKRL

SEQ ID NO: 56438 - protein, 378 aa, Kroppenstedtia eburnea
  REGION 1..378: note = tr|A0A1N7M720|A0A1N7M720_9BACL Queuine tRNA-ribosyltransferase OS=Kroppenstedtia eburnea; OX = 714067 GN=tgt PE=3 SV=1
MALRYELIKTCKQSGARLGRLHTPHGTVDTPVFMPVGTLATVKTMSPEELTEMGSGIILSNTYHLFLRPGHDVVREAGGLHRFMNWDRAILTDSGGFQVFSLSDLREITEEGVSFRSHLNGEPLFLSPEKSMEIQNALGADIIMAFDECPPYPADREYVKNSMDRTHRWLQRCATAHRRKEEQALFGIIQGGMYRDLREESARQITSVDLPGYAIGGLSVGEPKEMMYDALEWTTPLMPKEKPRYLMGVGSPDALVEGVVRGVDMFDCVLPTRIARNGTTMTSRGRVVVRNAKYARDFSPLDPECDCYTCRNYSRAYLRHLIKAEETFGLRLTTYHNLHFLLKLMEKVRQAIREDRLLDFRAHFFEEYYGSTRPTRNF

SEQ ID NO: 56439 - protein, 400 aa, unidentified
  source 1..400: note = Kroppenstedtia sanguinis
  REGION 1..400: note = tr|A0A482TYK0|A0A482TYK0_9BACL Queuine tRNA-ribosyltransferase OS=Kroppenstedtia sanguinis; OX = 1380684 GN=D1G38_002405 PE=3 SV=1
MTSGLGRTGVISTPHGDIATPAFIPVGTKATVKTVVPEAVAELGAQAVLANAYHLYLQPGPGIIDAAGGLGAFMNWPGPTYTDSGGFQVMSLGVGFKKVIEMSAGHAPDDGKIADGKERLANVDDDGVTFKSHLDGSAHRFTPELSMQIQHQLGADIIFAFDELTTLMNTRDYQENSLERTRLWAIRCLAEHNRLSVERSHRPQQSLWGVIQGAQYEDLRRKAARDLAALGARDEAEGGKGFGGFGIGGALEKENLGTIVGWVNSELPQDKPKHLLGISEPDDVFVAIENGVDTFDCVSPTRVARNGAIYTRDGRINITNARFRDDFAPLDAELTNYTSQYSRAYLHHLFRAKEGLGPTLATLHNLSFTIEMVDGARRAIEEGRYEDYRDDFLGRYYAKR

SEQ ID NO: 56440 - protein, 393 aa, Ktedonobacter racemifer
  REGION 1..393: note = tr|D6TNK4|D6TNK4_9CHLR Queuine tRNA-ribosyltransferase OS=Ktedonobacter racemifer DSM 44963 OX=485913 GN=tgt PE=3 SV=1
MSQFTFTIDAECSESWARAGTIQTPHGTIQTPIFMPVGTQATVKSVSPEELREVGAQIILSNTYHLMLRPGSELIDSFGGLHSFMRWDGPILTDSGGFQVWSLGHLRKLSEEGVLFKSHLDGSPQFLTPESVMRIEAELGSDIILPLDICAPFPCTPKEAREAMERTHRWEERALVAKERYRPEQTLFGIVQGAFEPELRQESARVIGSMPFPGLSIGGLSVGEPKTKMWEMLRATTPALPREKPRHLLGVGSPEDLVECVGLGMDMFDCVLPTRVARHGGLFTRDGRVNIKSARFKRATGPIEEGCDCHTCRNYSAAYVHHLIRAEEQLYYRLGTIHNLRFMLRLAADLRASILDGSYPVFREAFLARYQPASETVREQQREKWKAARERQS

SEQ ID NO: 56441 - protein, 370 aa, Ktedonobacter sp.
  REGION 1..370: note = tr|A0A1Q6ZAZ4|A0A1Q6ZAZ4_9CHLR Queuine tRNA-ribosyltransferase OS=Ktedonobacter sp. 13_2_20CM_53_11 OX=1805233 GN=AUH05_01105 PE=3 SV=1
MEQSTTSDNLEVTNPYGSLKLPYGQVSMPVFMPDATLGVVRAVDATDLLDCQVQAVVMNTFHLMQRPGSSTIHALGGLHRMSAWPRPIVTDSGGFQAYSLIQQNPKFGTINDDGITFKPESAERKFHLTPEKTIQLQMSYGADVVICLDECTHVDASYEMQETSVKRTIAWARRCKKEFLHQVNQKRLPPEQRPLLFAVIQGGGSLELRKRCADELLEIGFDGFGYGGWPMDGQGHLLTDLIAYTRELVPPQFPMHALGIGHPTNVVDCTKMGYGIFDSAMPTRDARHSRLYTFTSAAGLEDKWLSYTYINDDKHIKSNAPVSSYCDCLCCTNYSLGYLHHLFKINDTLFFRLATIHNLRFMTQLTERLR

SEQ ID NO: 56442 - protein, 395 aa, Ktedonobacter sp.
  REGION 1..395: note = tr|A0A1Q7WY01|A0A1Q7WY01_9CHLR Queuine tRNA-ribosyltransferase OS=Ktedonobacter sp. 13_1_20CM_3_54_15 OX=1805224 GN=tgt PE=3 SV=1
MSSGSFSFAIDAECSDTWARAGTIHTPHGTVRTPIFMPVGTQATVKSVSPEELRAAGTQIILANTYHLMLRPGSELVASLGGLHSFMHWDGPILTDSGGFQVFSLGHLRKLSEEGAAFKSHLDGSSHVLTPENVMHIEAELGADIVLPLDICAAYPCSFLEAKESMERTHRWAERALIAKEEYRAEQALFGIVQGAFDAELRRESANFVGSLPFPGLSIGGLSVGEPKQLMWEMLHEVTLALPREKPRHLLGVGSPEDFVVGVGLGMDMFDCALPTRVARHGGLFTPYGRVNIKSARFRTERGPIEDGCDCYTCQNYSAAYVHHLARTEEQLYFRLGTIHNIRFMLRLASQLRETIIAGTYAAFRDDFIARYQPAPEKVREEQRVKWKAARTRIV

SEQ ID NO: 56443 - protein, 383 aa, unidentified
  source 1..383: note = Ktedonobacterales bacterium
  REGION 1..383: note = tr|A0A4P6JVU1|A0A4P6JVU1_9CHLR Queuine tRNA-ribosyltransferase OS=Ktedonobacterales bacterium SCAWS-G2 OX=2509675 GN=tgt PE=3 SV=1
MDQALSKTPHEATATQQQYGSLQLPHGQLQLPVYMPDATLGVVRSIDSSDLERHAVQAVVMNTFHLMQHPGSSTVQALGGLHTMSSWPHPIVTDSGGFQAYSLIQQNARFGSLDADGISFKPEGAERKFHLTPEKAVQLQMSYDTDVVMCLDYCTHVDAPFATQEEAVLRTIAWAKRCKSEFVRLVEQKRLAPEKRPHLFGVIQGGGSHELRKRCAEALLEIGFDGYGYGGWPLDAQGKLLTDIIGYTRELIPAQFPMHALGVGHPDNVVECTRLGYGMFDSAMPTRDARHARLYVFNRQASEIEGKGKWFSYVYINDDKYIKDSAPISNLCDCLSCTRYTRAYLRHLFKVNDSLFFRLATIHNLRFMTMLTQRLREGYYARG

SEQ ID NO: 56444 - protein, 399 aa, unidentified
  source 1..399: note = Ktedonobacterales bacterium
  REGION 1..399: note = tr|A0A4P6K0Y5|A0A4P6K0Y5_9CHLR Queuine tRNA-ribosyltransferase OS=Ktedonobacterales bacterium SCAWS-G2 OX=2509675 GN=tgt PE=3 SV=1
MPAFKFTIDAESPETWARAGTIQTPHGIIHTPIYMPVGTQATVKSVSPEELRAAGAEIILANTYHLMLRPGSPLIDTLGGLHTFMHWDGPILTDSGGFQVWSLGHLRKLTEDGATFKSHLDGSEHVLTPERVMQIEAELGSDIILPLDICSPYPCSPQEARQAMEQTHRWEERALVAKERYRPEQTLFGIVQGAFEPELRAESARIIGNMPFPGLSIGGLSVGEPKEQMWEMLRHVTPALPRDKPRHLLGVGSPEDVVIGTGLGMDMFDCVLPTRVARHGGLFTQYGRVNIKSARFRTVAGPIEEGCDCYTCRNYSAAYVHHLIRTEEQLYYRLGSIHNIHFMLRLARQLRASIIDGSYPIFRDEFLARYVPASEQVRTDQREKWKAARARQNDIISLK

SEQ ID NO: 56445 - protein, 368 aa, unidentified
  source 1..368: note = Kuenenia stuttgartiensis
  REGION 1..368: note = tr|Q1Q058|Q1Q058_KUEST Queuine tRNA-ribosyltransferase OS=Kuenenia stuttgartiensis; OX = 174633 GN=Tgt PE=3 SV=1
MFFKVLATDKQTKARRGELHLAGQIIPTPVFMPVGTQGTVKTLTPLQIKETGAEIILCNAYHLCLRPGAEIIKQLGGLHRFMGWKGAIITDSGGFQVFSLSKLTKISSNGVEFQSPIDGSKLFLTPEKVIKIQNDIGANIIMAFDECVPYPCEKDMASVAVERTLNWAARCLDSHNNEDQALFGIVQGSVFEELRIECAKHLEKMNFQGYAIGGLSVGEGSLLMNEVMDYTVEYLPPGKPRYLMGVGFPEDILHAVERGVDMFDCVIPTRNGRNGCAFTHLGKVKILNSRYKEDTGPLDEMCDCYTCKNFSRAYLRHLFVAKETLGLTLLSLHNIFYFQRLMQQIRDSIERGEFRSFKEQFFSAYKNN

SEQ ID NO: 56446 - protein, 368 aa, unidentified
  source 1..368: note = Kuenenia stuttgartiensis
  REGION 1..368: note = tr|A0A2C9CEY8|A0A2C9CEY8_KUEST Queuine tRNA-ribosyltransferase OS=Kuenenia stuttgartiensis; OX = 174633 GN=tgt PE=3 SV=1
MFFKVLATDKQTKARRGELHLAGQIIPTPVFMPVGTQGTVKTLTPLQIKETGAEIILCNAYHLCLRPGAEIIKQLGGLHRFMGWKGAIITDSGGFQVFSLSKLTKISNNGVEFQSPIDGSKLLLTPEKVIKIQNDIGANIIMAFDECVPYPCEKDMASVAVERTLNWAARCLDSHNNEDQALFGIVQGSVFEELRIECAKHLEKMNFQGYAIGGLSVGEGSLLMNEVMDYTVEYLPPGKPRYLMGVGFPEDILHAVERGVDMFDCVIPTRNGRNGCAFTHLGKVKILNSRYKEDTGPLDEMCDCYTCKNFSRAYLRHLFVAKETLGLTLLSLHNIFYFQRLMQQIRDSIERGEFRSFKEQFFSAYKNN

SEQ ID NO: 56447 - protein, 381 aa, Kurthia sibirica
  REGION 1..381: note = tr|A0A2U3AIK2|A0A2U3AIK2_9BACL Queuine tRNA-ribosyltransferase OS=Kurthia sibirica OX=202750; GN = tgt PE=3 SV=1
MSQEAIRYELIKQDKQTGARLGIVHTPHGSFETPAFMPVGTQATVKTVAPEEIKEMGAGILLSNTYHLWLRPGNDIIKEAGGLHKFMNWDRAILTDSGGFQVFSLSDMRKITEEGVHFRNHLNGSKMFLSPEKAMEIQNDLGSDIMMAFDECPPFPATFDYMKASVERTSRWAERCLEAHARPQDQGLFGIIQGGEFEELRKQSARDLVSLDFPGYAIGGLSVGEPKPIMNRMLEYTTPLMPADKPRYLMGVGSPDSLIDGSIRGIDMFDCVLPTRIARNGTCMTSEGRVVIKNAKFARDFGPLDPKCGCYTCKNYSRAYIRHLIKADETFGIRLTSIHNLHFLQDLMRNVRQAIREDRLLDFKEEFFEAYGFNKPNAKNF

SEQ ID NO: 56448 - protein, 381 aa, Kurthia sp.
  REGION 1..381: note = tr|A0A433RRV2|A0A433RRV2_9BACL Queuine tRNA-ribosyltransferase OS=Kurthia sp. 3B1D OX=1562256; GN = tgt PE=3 SV=1
MSQQPIRYELIKKCKQTGARLGIVHTPHGSFETPAFMPVGTQATVKTMAPEEIKAMGANIILSNTYHLWLRPGHELIKEAGGLHKFMNWDGAILTDSGGFQVFSLSDMRKITEEGVHFRNHLNGSKMFLSPEKAMEIQNALGSDIMMAFDECPPFPATFEYMKASVERTTRWAERCLKAHARPDEQGLFGIIQGGEFEELRKQSARDLVAMDFPGYAIGGLSVGEPKPIMNRMLEYTTPLMPENKPRYLMGVGSPDSLIDGSIRGIDMFDCVLPTRIARNGTCMTSQGRVVVKNAKFAKDFTPIDPECDCYTCKNYTKAYIRHLIKADETFGIRLTSTHNLHFLQNLMRQVREAIREDRLGDFREEFFEKYGFNKPNAKNF

SEQ ID NO: 56449 - protein, 381 aa, Kurthia sp.
  REGION 1..381: note = tr|A0A0X1RW16|A0A0X1RW16_9BACL Queuine tRNA-ribosyltransferase OS=Kurthia sp. 11kri321 OX=1750719; GN = tgt PE=3 SV=1
MSEQPIRYELIKTCKQTGARLGIVHTPHGSFETPAFMPVGTQATVKTMAPEEIKEMGAGIILSNTYHLWLRPGHEIIKEAGGLHKFMNWDRAILTDSGGFQVFSLSDMRKITEEGVHFRNHLNGSKMFLSPEKAMEIQNALGSDIMMAFDECPPFPATYEYMKASVERTSRWAERCLEAHERPQDQGLFGIVQGGEFEELRKQSARDLVSMDFPGYAIGGLSVGEPKPIMNRMLEYTTPLLPSHKPRYLMGVGSPDSLIDGAIRGIDMFDCVLPTRIARNGTCMTSQGRVVVKNAKYAKDFTPLDPECDCYTCKNYTKAYIRHLIKADETFGIRLTSTHNLHFLQNLMRQVRQAIREDRLGDFREEFFEQYGFNKPNAKNF

SEQ ID NO: 56450 - protein, 381 aa, Kurthia zopfii
  REGION 1..381: note = tr|A0A2U3AHK0|A0A2U3AHK0_9BACL Queuine tRNA-ribosyltransferase OS=Kurthia zopfii OX=1650 GN=tgt; PE = 3 SV=1
MSEQPIRYELIKTCKQTGARLGIVHTPHGSFETPAFMPVGTQATVKTMAPEEIKAMGAGIILSNTYHLWLRPGNEIIKEAGGLHKFMNWDRAILTDSGGFQVFSLSDMRKITEEGVHFRNHLNGSKMFLSPEKAMEIQNDLGSDIMMAFDECPPFPATFEYMKASVERTSRWAERCLEAHARPQDQGLFGIVQGGEFEELRKQSAKDLVSMDFPGYAIGGLSVGEPKPIMNRMLEYTTPLLPDNKPRYLMGVGSPDSLIDGSIRGIDMFDCVLPTRIARNGTCMTSQGRVVLKNAKFAKDFTPIDPECDCYTCKNYTKAYIRHLIKADETFGIRLTSTHNLHFLQNLMRQVRQAIQEDRLGDFREEFFEQYGFNKPNAKNF

SEQ ID NO: 56451 - protein, 378 aa, Kushneria avicenniae
  REGION 1..378: note = tr|A0A1I1L0N4|A0A1I1L0N4_9GAMM Queuine tRNA-ribosyltransferase OS=Kushneria avicenniae OX=402385; GN = tgt PE=3 SV=1
MRQDCFMRFERMATDGRARRGRLTFPRGSVETPAFMPVGTYGTVKGMTPKDVEAIGAEIILGNTFHLWLRPGTEVIEAHGDLHDFAQWHKPILTDSGGFQVFSLGEMRKITEAGVHFRSPVDGARIFMGPEESMAVQRSLGSDIVMIFDECTPYPATHEEAEKSMELSLRWAQRSLDAHGDSPSALFGIIQGGMYPDLRERSLKGLEQISFDGLAIGGLSVGEPKEEMIRVLDYLPTWMPDDKPRYLMGVGKPEDLVEGVRRGVDMFDCVMPTRNARNGHLFTFDGVIRIRNATHRHDTRPLEEGCDCYTCQNFSRSYLHHLDRCGEMLGAQLNTIHNLRHYQQLMSGLRGAIEAGTLADFVAAFYARRGQAVPPLEA

SEQ ID NO: 56452 - protein, 378 aa, Kushneria indalinina
  REGION 1..378: note = tr|A0A3D9DSV8|A0A3D9DSV8_9GAMM Queuine tRNA-ribosyltransferase OS=Kushneria indalinina DSM 14324; OX = 1122140 GN=tgt PE=3 SV=1
MRQDCFMRFERMATDGRARRGRLTFPRGSVETPAFMPVGTYGTVKGMTPRDVEATGADIILGNTFHLWLRPGTEVIEVHGDLHDFAQWHKPILTDSGGFQVFSLGDMRKITEAGVHFRSPVDGAKIFMGPEESMAVQRSLGSDIVMIFDECTPYPATFEEAKTSMELSLRWAQRSLDAHGDSPSALFGIIQGGMYRELRERSLEGLEQIGFDGLAIGGLSVGEPKEEMIKVLDYLPGLMPDDKPRYLMGVGRPEDLVEGVRRGVDMFDCVMPTRNARNGHLFTFDGVIRIRNATHRHDTRPLEEGCDCYTCQNFSRSYLHHLDRCGEMLGAQLNTIHNLRHYQQLMSGLRGAIEAGTLADFVAAFYARRGLEVPPLEA

SEQ ID NO: 56453 - protein, 378 aa, unidentified
  source 1..378: note = Kushneria konosiri
  REGION 1..378: note = tr|A0A2Z2H6W1|A0A2Z2H6W1_9GAMM Queuine tRNA-ribosyltransferase OS=Kushneria konosiri OX=698828; GN = tgt PE=3 SV=1
MRQDCFMRFERMATDGRARRGRLTFPRGSIETPAFMPVGTYGTVKGMTPKDVEAIGAEIILGNTFHLWLRPGTEVIEAHGDLHDFAQWHKPILTDSGGFQVFSLGDMRKITEQGVHFRSPVDGAKVFMGPEESMAVQRSLGSDIVMIFDECTPYPATFDEARTSMELSLRWAQRSLDAHGDSPSALFGIIQGGMYRELRERSLEGLENIGFDGLAIGGLSVGEPKEEMIKVLDYLPGLMPDDKPRYLMGVGRPEDLVEGVRRGVDMFDCVMPTRNARNGHLFTFDGVIRIRNAVHRHDTRPLEEGCDCYTCQNFSRSYLHHLDRCGEMLGAQLNTIHNLRHYQQLMSGLRGAIEAGTLADFVAAFYARRGLEVPPLEA

SEQ ID NO: 56454 - protein, 378 aa, Kushneria marisflavi
  REGION 1..378: note = tr|A0A240UN37|A0A240UN37_9GAMM Queuine tRNA-ribosyltransferase OS=Kushneria marisflavi OX=157779; GN = tgt PE=3 SV=1
MRQDCFMRFERMATDGRARRGRLTFPRGSVETPAFMPVGTYGTVKGMTPKDVEATGADIILGNTFHLWLRPGTEVIEAHGDLHDFAQWHKPILTDSGGFQVFSLGDMRKITEAGVHFRSPVDGVKIFMGPEESMAVQRSLGSDIVMIFDECTPYPATFEEARTSMELSLRWAQRSFDAHGDSPSALFGIIQGGMYRELRERSLEGLEQIGFDGLAIGGLSVGEPKEEMIKVLDYLPGLMPDDKPRYLMGVGRPEDLVEGVRRGVDMFDCVMPTRNARNGHLFTFDGVVRIRNATHRHDTRPLEEGCDCYTCQNFSRSYLHHLDRCGEMLGAQLNTIHNLRHYQQLMSGLRGAIEAGTLADFVAAFYARRGQTVPPLEA

SEQ ID NO: 56455 - protein, 378 aa, unidentified
  source 1..378: note = Kushneria phyllosphaerae
  REGION 1..378: note = tr|A0A2R8CR55|A0A2R8CR55_9GAMM Queuine tRNA-ribosyltransferase OS=Kushneria phyllosphaerae; OX = 2100822 GN=tgt PE=3 SV=1
MRQDCFMRFERMATDGRARRGRLTFPRGSIETPAFMPVGTYGTVKGMTPKDVEAIGAEIILGNTFHLWLRPGTEVIEAHGDLHDFAQWHKPILTDSGGFQVFSLGDMRKITEQGVHFRSPVNGAKVFMGPEESMAVQRSLGSDIVMIFDECTPYPATFEEAKTSMELSLRWAQRSLDAHGDSPSALFGIIQGGMYRELRERSLEGLEQIGFDGLAIGGLSVGEPKEEMIKVLDYLPGLMPDDKPRYLMGVGRPEDLVEGVRRGVDMFDCVMPTRNARNGHLFTFDGVIRIRNAAHRHDTRALEEGCDCYTCQNFSRAYLHHLDRCGEMLGAQLNTIHNLRHYQQLMSGLRGAIEAGTLADFVAAFYARRGLEVPPLEA

SEQ ID NO: 56456 - protein, 378 aa, Kushneria sinocarnis
  REGION 1..378: note = tr|A0A420X028|A0A420X028_9GAMM Queuine tRNA-ribosyltransferase OS=Kushneria sinocarnis OX=595502; GN = tgt PE=3 SV=1
MRNDCFMKFEPLATDGRARRGRLSFPRGTVETPAFMPVGTYGTVKGMTPGAVEEIGAEIILGNTFHLWLRPGTEIVSAHGDLHDFAQWQRPILTDSGGFQVFSLGEMRKITEQGVHFRSPVDGAKVFMGPEESMAVQRALGSDVVMIFDECTPYPATFEEAERSMELSLRWAARSREAHGDSPAALFGIIQGGMYRDLRERSLAGLQEIGFDGLAIGGLSVGEPKEEMMGVLDYLPGLMPESSPRYLMGVGKPEDLVEGVRRGVDMFDCVMPTRNARNGHLFTDEGVIRLRNARHRTDTRPLEATCDCYTCQNFSRAYLHHLDRCGEMLGAQLNTIHNLRHYQRLMAGLRGAIEAGTLADFVARFYARRGLEVPPLAG

SEQ ID NO: 56457 - protein, 372 aa, Kushneria sp.
  REGION 1..372: note = tr|A0A1S1NRV9|A0A1S1NRV9_9GAMM Queuine tRNA-ribosyltransferase OS=Kushneria sp. YCWA18 OX=657387; GN = tgt PE=3 SV=1
MNFERLATDGRARRGRLSFPRGTVETPAFMPVGTYGTVKGMTPGAVEEIGAEIILGNTFHLWLRPGTEIVAAHGDLHDFAQWHRPILTDSGGFQVFSLGEMRKITEEGVHFRSPVDGAKVFMGPEESMAVQRALGSDVVMIFDECTPYPATFEEAERSMELSLRWAARSREAHGDSPAALFGIIQGGMYRELRERSLKDLLDIGFDGLAIGGLSVGEPKDEMMGVLDYLPELMPDHSPRYLMGVGKPEDLVEGVRRGVDMFDCVMPTRNARNGHLFTDDGVIRLRNARHRTDTRPLEEACDCYTCRNFSRAYLHHLDRCGEMLGAQLNTIHNLRHYQRLMAGLRGAIEAGTLADFVARFYARRGLEVPPLTG

SEQ ID NO: 56458 - protein, 378 aa, Kushneria sp.
  REGION 1..378: note = tr|A0A5C0ZUR9|A0A5C0ZUR9_9GAMM Queuine tRNA-ribosyltransferase OS=Kushneria sp. YCWA18 OX=657387; GN = tgt PE=3 SV=1
MRNDCFMNFERLATDGRARRGRLSFPRGTVETPAFMPVGTYGTVKGMTPGAVEEIGAEIILGNTFHLWLRPGTEIVAAHGDLHDFAQWHRPILTDSGGFQVFSLGEMRKITEEGVHFRSPVDGAKVFMGPEESMAVQRALGSDVVMIFDECTPYPATFEEAERSMELSLRWAARSREAHGDSPAALFGIIQGGMYRELRERSLKDLLDIGFDGLAIGGLSVGEPKDEMMGVLDYLPELMPDHSPRYLMGVGKPEDLVEGVRRGVDMFDCVMPTRNARNGHLFTDDGVIRLRNARHRTDTRPLEEACDCYTCRNFSRAYLHHLDRCGEMLGAQLNTIHNLRHYQRLMAGLRGAIEAGTLADFVARFYARRGLEVPPLTG

SEQ ID NO: 56459 - protein, 380 aa, unidentified
  source 1..380: note = Kyrpidia spormannii
  REGION 1..380: note = tr|A0A2K8N7V2|A0A2K8N7V2_9BACL Queuine tRNA-ribosyltransferase OS=Kyrpidia spormannii OX=2055160; GN = tgt PE=3 SV=1
MAVQFHLIKTDPSSRARRGRLYTRHGSVETPVFMPVGTQASVKTMSPHELLDIGVEMILSNTYHLFLRPGHDLIREAGGLHRFMAWSKSVLTDSGGFQVFSLSPLRRISEEGVTFRSHLSGETFFLSPERATEVQNALGADVIMAFDECPPYPAERSYVEESLERTLRWARRCQAAHRRPEDQGLFGIVQGGMEFDLRRHAVESLAEMDFPGYAVGGLSVGEPKEKMYDVLEYTTELLPVDKPRYLMGVGAPEDLIEGVWRGVDMFDCVLPTRIARNGTVWTRRGKLVVRNGAYARDFQPLDPECSCYTCRHFTRAYIRHLLKADEILGLRLTTYHNLYFLVHLMQDIRRAIEEDRFAEFRTVFYRTFEIRKSEDAEGGR

SEQ ID NO: 56460 - protein, 380 aa, unidentified
  source 1..380: note = Kyrpidia tusciae
  REGION 1..380: note = tr|D5WWM5|D5WWM5_KYRT2 Queuine tRNA-ribosyltransferase OS=Kyrpidia tusciae (strain DSM 2912 / NBRC 15312 / T2) OX=562970 GN=tgt PE=3 SV=1
MAVQFHLIKTDPSSRARRGRLYTRHGSVETPVFMPVGTQASVKTMSPHELLDIGVEMILSNTYHLFLRPGHDLIREAGGLHRFMAWPKSVLTDSGGFQVFSLSPLRRISEEGVTFRSHLSGETFFLSPERATEVQNALGADVIMAFDECPPYPAERSYVEESLERTLRWARRCQAAHRRPEDQGLFGIVQGGMELDLRRHAVESLAEMDFPGYAVGGLSVGEPKEKMYDVLEYTTELLPVDKPRYLMGVGAPEDLIEGVRRGVDMFDCVLPTRIARNGTVWTRRGKLVVRNGAYARDYRPLDPECSCYTCRHFTRAYIRHLLKADEILGLRLTTYHNLYFLVHLMQDIRRAIEEDRFAEFRSAFYRTFEIRKSEDAEGGR

SEQ ID NO: 56461 - protein, 376 aa, unidentified
  source 1..376: note = Labilibaculum antarcticum
  REGION 1..376: note = tr|A0A1Y1CKU0|A0A1Y1CKU0_9BACT Queuine tRNA-ribosyltransferase OS=Labilibaculum antarcticum; OX = 1717717 GN=tgt PE=3 SV=1
MDFKLLNTDPKSSARTGELTTDHGKIQTPIFMPVGTLGSVKGVHQRELRDDINAEIILGNTYHLYLRPGLDVLEKAGGLHKFNGWERPILTDSGGFQVFSLADNRKLSEEGAMFRSHIDGSKHFFTPENVMDTQRTIGADIIMAFDECPPGTSTYEYAKNSLELTQRWLERCVKRFDETEPKYGYSQTLFPIIQGCVYNDLRVKSAEHAASLDRDGYAIGGLAVGEPVEDMYSMIEVVNKVLPEDKPRYLMGVGTPVNILEAISRGVDMFDCVMPTRNGRNGMMFTSEGTINIKNKKWHDDFSPIDPNGTSYVDQAYSKAYVRHLVHSGELLGSQICSIHNLAFYLWLVREAREHIIAGTFSTWKEIMVKKLAVRL

SEQ ID NO: 56462 - protein, 376 aa, unidentified
  source 1..376: note = Labilibaculum filiforme
  REGION 1..376: note = tr|A0A2N3HQP8|A0A2N3HQP8_9BACT Queuine tRNA-ribosyltransferase OS=Labilibaculum filiforme; OX = 1940526 GN=tgt PE=3 SV=1
MDFKLLNTDPKSSARTGELTTDHGKIQTPIFMPVGTLGSVKGVHQRELRDDINAEIILGNTYHLYLRPGLDVLEKAGGLHKFNGWERPILTDSGGFQVFSLAENRKLTEEGAMFRSHIDGSKHFFTPENVMDTQRTIGADIIMAFDECPPGTSTYEYSKNSLELTQRWLERCVKRFDETEPKYGYSQTLFPIVQGCVYNDLRIKAAEHAASLNREGYAIGGLAVGEPVEDMYSMIEVVNEVLPKDKPRYLMGVGTPVNILEAISRGVDMFDCVMPTRNGRNGMIFTSEGTINIKNKKWYDDFSPIDPNGTSYVDQNYSKAYVRHLIHSGELLGSQICSIHNLAFYLWLVREAREHINAGTFASWKEIMVKKLATRL

SEQ ID NO: 56463 - protein, 376 aa, unidentified
  source 1..376: note = Labilibaculum manganireducens
  REGION 1..376: note = tr|A0A2N3HWJ6|A0A2N3HWJ6_9BACT Queuine tRNA-ribosyltransferase OS=Labilibaculum manganireducens; OX = 1940525 GN=tgt PE=3 SV=1
MDFKLLNTDTKSSARTGELTTDHGKIQTPIFMPVGTLGSVKGVHQRELRDDINAEIILGNTYHLYLRPGLDVLEKAGGLHKFNGWDRPILTDSGGFQVFSLAENRKLSEEGAMFRSHIDGSKHFFTPENVMDIQRTIGADIIMAFDECPPGTSTYEYAKTSLELTQRWLERCVKRFDETESKYGYSQTLFPIIQGCVYNDLRIKAAEHAASLNREGYAIGGLAVGEPVEDMYSMIEVVNEVLPKDKPRYLMGVGTPVNILEAISRGVDMFDCVMPTRNGRNGMIFTSEGIINIKNKKWHDDFSPIDPNGTSYVDQAYSKAYVRHLIHSGELLGSQICSIHNLAFYLWLVREAREHINAGTFASWKEIMVKKLAARL

SEQ ID NO: 56464 - protein, 390 aa, unidentified
  source 1..390: note = Labilithrix luteola
  REGION 1..390: note = tr|A0A0K1QCH6|A0A0K1QCH6_9DELT Queuine tRNA-ribosyltransferase OS=Labilithrix luteola OX=1391654; GN = tgt PE=3 SV=1
MAGPRTEGFSFRVLATSGHARRTVLTTPHGEVDTPTFMPVGTQGSVKGLTPEEVAQTGARIVLGNTYHLWLRPGPDIVSKMKGLHGFSRWPHAMLTDSGGFQAFSLGANGGKKPGESLVKLDEQGVTFRSHLDGSKQHLSPEEAVRVQGLLGADIQMQLDICPPGDSPRPVVEAAVKQTTRWAKRALATPRPPKQALFGIIQGACFADLRRAHAEELAALDPGFDGLALGGFSVGEPIPKMYETLHEMAHLVDPERPRYLMGVGTPRDLLEGIDAGIDMFDCVLPTRNARNGQALTRFGRVVVKQARHREDERPIDPECTCPCCKGGYSRAYLRHLYIAGEMTVLRLLSVHNLHFYGELVAGARAAIQDGTWPAYKAAAIARMSSGEDQE

SEQ ID NO: 56465 - protein, 384 aa, Labrenzia aggregata
  REGION 1..384: note = tr|A0NQV0|A0NQV0_LABAI Queuine tRNA-ribosyltransferase OS=Labrenzia aggregata (strain ATCC 25650 / DSM 13394 / JCM 20685 / NBRC 16684 / NCIMB 2208 / IAM 12614) OX=38 4765 GN=tgt PE=3 SV=1
MTEETGKTFSFKLITTDGAARRGEITTPHGVVRTPAFMPVGTQATVKAMYPEQVRETGADVVLGNTYHLMLRPTAERVAKLGGLHTFMNWPHTILTDSGGFQVMSLAQLRKLDEDGVRFQSHIDGQKYHLTPERSVEIQGLLGSDIQMQLDECIKLPSPREEVQRAMELSLRWAERSRKQFEAMGGPGKGQGLYGIVQGGDQPDLRVRSAEELGKMPFEGYSVGGLAVGEPQDVMLSMLDITTPVMPVNKPRYLMGVGTPDDLLESVKRGIDQFDCVMPTRAGRHGLAYTRYGKVNLKNARHQEDPRPLDEASTCPASSVYSRAYLHHLVRAGEGLAGMLLTWNNIAYYQFLMQGMRDAIEAGRFEDFYAKTKEDWARGDIAAL

SEQ ID NO: 56466 - protein, 384 aa, Labrenzia aggregata
  REGION 1..384: note = tr|A0A0M6XZ51|A0A0M6XZ51_9RHOB Queuine tRNA-ribosyltransferase OS=Labrenzia aggregata OX=187304; GN = tgt PE=3 SV=1
MTEKTGKTFSFKLITTDGAARRGEITTPHGVVRTPAFMPVGTQATVKAMYPEQVRETGADVVLGNTYHLMLRPTAERVARLGGLHTFMNWPHTILTDSGGFQVMSLAQLRKLDEDGVRFQSHIDGQKYHLTPERSVEIQGLLGSDIQMQLDECIKLPSPREEVQRAMELSLRWAERSRNQFEAMGGPGKGQGLYGIVQGGDQPDLRIRSAEELGKMPFEGYSVGGLAVGEPQDVMLSMLDITTPVMPVDKPRYLMGVGTPDDLLESVKRGIDQFDCVMPTRAGRHGLAYTRYGKVNLKNARHQDDPRPLDEASTCPASSVYSRAYLHHLVRAGEGLAGMLLTWNNIAYYQYLMQGMRDAIGAGSFEDFYSKTKEDWARGDIAAL

SEQ ID NO: 56467 - protein, 383 aa, Labrenzia alba
  REGION 1..383: note = tr|A0A0M6YV51|A0A0M6YV51_9RHOB Queuine tRNA-ribosyltransferase OS=Labrenzia alba OX=311410 GN=tgt; PE = 3 SV=1
MSDNNKKFGFKLIKTDGMARRGEISTPHGIVNTPVFMPVGTQGTVKAMYPEQVRQTGADVVLGNTYHLMLRPTAERVARLGGLHKFMNWPHTILTDSGGFQVMSLAQLRKLDEDGVRFQSHIDGSKHHLTPERSIEIQGLLGSDIQMQLDECIKLPSPKEEIQRAMELSLRWAERSRRQFEEMNGPLKGQGLYGIVQGGDQPDLRIRSAEELGKMPFEGYSVGGLAVGEPQEVMLRMLDITTPVMPTGKPRYLMGVGTPDDLLESVKRGIDQFDCVMPTRAGRHGLAYTRYGKVNLKNARHQDDPRSLDEGNDCPATSTYSRAYLHHLVRAGEGLAGMLLTWNNLAYYQQLMLGMREAIEQGRFEDFYAQTKADWAKGDIPAL

SEQ ID NO: 56468 - protein, 383 aa, Labrenzia alba
  REGION 1..383: note = tr|A0A0M7AUT2|A0A0M7AUT2_9RHOB Queuine tRNA-ribosyltransferase OS=Labrenzia alba OX=311410 GN=tgt; PE = 3 SV=1
MSETAKKFNFKLIATDGMARRGEITTPHGVVRTPAFMPVGTQATVKAMYPGQVRETGADVVLGNTYHLMLRPTAERVDRLGGLHTFMNWPHTILTDSGGFQVMSLAQLRKLDEEGVRFQSHIDGRKYHLTPERSVEIQGLLGSDIQMQLDECIKLPSPKEEIQRAMELSLRWAERSRTQFEAMGGPAKGQGLYGIVQGGDQPDLRIRSAESLGKLPFEGFSVGGLAVGEPQDVMLQMLDIATPVMPVDKPRYLMGVGTPDDLLESVKRGIDQFDCVMPTRAGRHGLAYTKFGKVNLKNARHQDDARPLDAENQCPASSVYSRAYLHHLVRAGEGLAGMLLTWNNIAYYQQLMQGMRDAIEEGRFDEFYARTKEDWARGDIAAL

SEQ ID NO: 56469 - protein, 382 aa, Labrenzia alexandrii
  REGION 1..382: note = tr|A0A0M7AL13|A0A0M7AL13_9RHOB Queuine tRNA-ribosyltransferase OS=Labrenzia alexandrii OX=388408; GN = tgt PE=3 SV=1
MTETKKFGFKLITTDGMARRGEINTPHGVVHTPAFMPVGTQATVKAMFTDHVRETGADVVLGNTYHLMLRPTAERVDRLGGLHKFMNWPHTILTDSGGFQVMSLAQLRKLDEDGVRFQSHIDGSKHHLTPERSVEIQGLLGSDIQMQLDECIKLPSPREEVQRAMELSLRWAERSRTQFEKMRGPGKGQGLYGIVQGGDVPELRIRSAEELAKLPMEGYSVGGLAVGEPQEVMLKMLDITTPVMPVDKPRYLMGVGTPDDLLESVKRGIDQFDCVMPTRAGRHGLAYTRFGKVNLKNARHQDDPRPLDEESACPATSTYSRAYLHHLFRAGEALSGMLLTWNNIAYYQTLMQGMRDAIEESRFEEFYAKTKEDWARGDIAAL

SEQ ID NO: 56470 - protein, 382 aa, Labrenzia alexandrii
  REGION 1..382: note = tr|A0A5E8GWW6|A0A5E8GWW6_LABAD Queuine tRNA-ribosyltransferase OS=Labrenzia alexandrii (strain DSM 17067 / NCIMB 14079 / DFL-11) OX=244592 GN=tgt PE=3; SV = 1
MTETKKFGFKLITTDGMARRGEINTPHGVVHTPAFMPVGTQATVKAMFTDHVRETGADVVLGNTYHLMLRPTAERVDRLGGLHKFMNWPHTILTDSGGFQVMSLAQLRKLDEDGVRFQSHIDGSKHHLTPERSVEIQGLLGSDIQMQLDECIKLPSPREEVQRAMELSLRWAERSRTQFDKMRGPGKGQGLYGIVQGGDVPELRIRSAEELAKLPMEGYSVGGLAVGEPQEVMLKMLDITTPVMPVDKPRYLMGVGTPDDLLESVKRGIDQFDCVMPTRAGRHGLAYTRFGKVNLKNARHQDDPRPLDEESACPATSTYSRAYLHHLFRAGEALSGMLLTWNNIAYYQTLMQGMRDAIEESRFEEFYAKTKEDWARGDIAAL

SEQ ID NO: 56471 - protein, 383 aa, Labrenzia marina
  REGION 1..383: note = tr|A0A2S3UP18|A0A2S3UP18_9RHOB Queuine tRNA-ribosyltransferase OS=Labrenzia marina OX=281252; GN = tgt PE=3 SV=1
MSENEKTFKFKLITTDGNARRGEISTPHGIVRTPAFMPVGTQATVKAMYPDQVRETGADVVLGNTYHLMLRPTAERVARLGGLHTFMNWPHTILTDSGGFQVMSLAQLRKLDEDGVRFQSHIDGSKHHLTPERSVEIQGLLGSDIQMQLDECIRLPSPKEEVQRAMELSLRWAERSRAQFERMGGPGKGRGLYGIVQGGDQPDLRIRSAQELGEMPFEGYSVGGLAVGEPQDVMLAMLDITTPVMPADKPRYLMGVGTPDDLLESVKRGIDQFDCVMPTRAGRHGLAYTRFGKVNLKNARHQDDPRPLDGENSCPAASIYSRAYLHHLVRAGEGLAGMLLTWNNIAYYQQLMQGMRDAIEAGGFEDFYARTKEDWARGDIPVL

SEQ ID NO: 56472 - protein, 383 aa, Labrenzia sp.
  REGION 1..383: note = tr|A0A222F2L8|A0A222F2L8_9RHOB Queuine tRNA-ribosyltransferase OS=Labrenzia sp. VG12 OX=2021862; GN = tgt PE=3 SV=1
MSQDQNTFGFKLITTDGTARRGEITTPHGIVRTPAFMPVGTQATVKAMYPEQVRETGADVVLGNTYHLMLRPTAERVAKLGGLHKFMNWPHTILTDSGGFQVMSLAQLRKLDEDGVRFQSHIDGQKYHLTPERSVEIQGLLGSDIQMQLDECIKLPSPKEEVQRAMELSLRWAERSRRQFEAMGGPVKGQGLYGIVQGGDQPDLRIRSAEELGKMPFEGYSVGGLAVGEPQEVMLKMLDITTPVMPVDKPRYLMGVGTPDDLLESVKRGIDQFDCVMPTRAGRHGLAYTRFGKVNLKNARHQEDPRPLDAEAECPAASIYSRAYLHHLVRAGEGLAGMLLTWNNIAYYQFLMQGMRDAIEAGRFEDFYAETKENWARGDIPAL

SEQ ID NO: 56473 - protein, 383 aa, Labrenzia sp.
  REGION 1..383: note = tr|A0A4Y6RZH5|A0A4Y6RZH5_9RHOB Queuine tRNA-ribosyltransferase OS=Labrenzia sp. PHM005 OX=2590016; GN = tgt PE=3 SV=1
MTDTQKKFGFKLIATDGLARRGEITTPHGVVRTPAFMPVGTQATVKAMFTDHVRETGADVVLGNTYHLMLRPTAERVDRLGGLHKFMNWPHTILTDSGGFQVMSLAQLRKLDEDGVRFQSHIDGSKHHLTPERSIEIQGLLGSDIQMQLDECIKLPSPKEEVQRAMELSLRWAARSRAQFESMGGPSKGQGLYGIVQGGDVPDLRVRSAEELGKMPFEGYSVGGLAVGEPQEVMLKMLDITTPVMPVDKPRYLMGVGTPDDLLESVKRGIDQFDCVMPTRAGRHGLAYTRFGKVNLKNARHQDDPRPLDEEAACPATSTYSRAYLHHLFRAGEALSGMLLTWNNIAYYQTLMQGMRDAIEEGRFEDFYAKTKEDWARGDIEAL

SEQ ID NO: 56474 - protein, 383 aa, unidentified
  source 1..383: note = Labrenzia suaedae
  REGION 1..383: note = tr|A0A1M7KFH6|A0A1M7KFH6_9RHOB Queuine tRNA-ribosyltransferase OS=Labrenzia suaedae OX=735517; GN = tgt PE=3 SV=1
MSASAKPFSFKLIKTDGMARRGEISTPHGTVQTPAFMPVGTQATVKAMFMDDVEQTGAEVVLGNTYHLMLRPTAERVDRLGGLHKFMNWPHTILTDSGGFQVMSLAQLRKLDEDGVKFQSHIDGQRYHLTPERSIEIQGLLGSDIQMQLDECIKLPSPPEEVKRAMELSLRWAERSRRQFETMGGPGKGQGLYGIVQGGDVPDLRIRSAEELGKMPFEGYSVGGLAVGEPQDVMLRMLDITTPVMPVDKPRYLMGVGTPDDLLESVKRGIDQFDCVMPTRAGRHGLAYTRFGKVNLKNARHADDPRPLDEEAACPATSTYSRAYLHHLVRCGEGLAAMLLTWNNIAYYQTLMKGMRDAIEAGTFEAFYQKTKEDWARGDIAAL

SEQ ID NO: 56475 - protein, 384 aa, Labrys okinawensis
  REGION 1..384: note = tr|A0A2S9QCK5|A0A2S9QCK5_9RHIZ Queuine tRNA-ribosyltransferase OS=Labrys okinawensis OX=346911; GN = tgt PE=3 SV=1
MLKTPETTTAGEVSFAIHATEGTARTGALHLGRGSVRTPAFMPVGTAGTVKAMYVDQVKDLGADIILGNTYHLMLRPGAERVAALGGLHEFSRWQGPILTDSGGFQVMSLAGLRKLDKNGVTFRSHIDGSHHRLTPERSVEIQTLLDSDIIMQLDECVRLPSTRKDIERAMRLSLDWAERSKSAFGTQPGKAIFGIVQGGDIPDLRIASAEALSSMNFPGYAIGGLAVGEPQAVMLDMIETVEPHLPREKPRYLMGVGTPDDLIESVSRGIDMFDCVMPTRAGRHGLAYSRFGKVNLKNARHAEDPRPLDEASSCPAARDYSRAYLHHLTKANEILGMMLLTWINLAYYQDLMAGMRAAIAEGRFADFKAKTKENWARGDIAKL

SEQ ID NO: 56476 - protein, 391 aa, Laceyella sacchari
  REGION 1..391: note = tr|A0A2I7SRE0|A0A2I7SRE0_LACSH Queuine tRNA-ribosyltransferase OS=Laceyella sacchari OX=37482; GN = tgt PE=3 SV=1
MVISDANLVGGNILAVRYELIKTCKQSGARLGRLHTPHGTIETPIFMPVGTQATVKTMSPEELKEMNAQIILSNTYHLFLRPGHDIVKEAGGLHSFMNWDRPILTDSGGFQVFSLSQLRNITEEGVTFRSHLSGEKLFISPEKAMEIQNALGADIIMAFDECPPHPAEKAYVKASTERTYRWLKRCIKAHARPHDQALFGIVQGGMHQDLREESAKQLVELDLPGYAVGGLSVGEPKEVMYEVLSYTTPHLPVHKPRYLMGVGSPDALIQGAILGIDMFDCVLPTRIARNGTTMTSQGRLVVRNAKFARDYTPLDPACDCYTCRNYTRAYLRHLIKADETFGLRLTTYHNLYFLLKLMEQVRQAIREDRLLDFRDEFMMKYYGSLSPNAAF

SEQ ID NO: 56477 - protein, 378 aa, Laceyella sacchari
  REGION 1..378: note = tr|A0A4R4ANL0|A0A4R4ANL0_LACSH Queuine tRNA-ribosyltransferase OS=Laceyella sacchari OX=37482; GN = tgt PE=3 SV=1
MAVRYELIKTCKQSGARLGRLHTPHGTIETPIFMPVGTQATVKTMSPEELKEMNAQIILSNTYHLFLRPGHDIVKEAGGLHSFMNWDRPILTDSGGFQVFSLSQLRNITEEGVTFRSHLSGEKLFISPEKAMEIQNALGADIIMAFDECPPHPAEKAYVKASTERTYRWLERCIKAHARPHDQALFGIVQGGMHQDLREESAKQLVELDLPGYAVGGLSVGEPKEVMYEVLSYTTPHLPVHKPRYLMGVGSPDALIQGAILGIDMFDCVLPTRIARNGTTMTSQGRLVVRNAKFARDYTPLDPACDCYTCRNYTRAYLRHLIKADETFGLRLTTYHNLYFLLKLMEQVRQAIREDRLLDFRDEFMMKYYGSLNPNAAF

SEQ ID NO: 56478 - protein, 378 aa, Laceyella sediminis
  REGION 1..378: note = tr|A0A2T0YKK5|A0A2T0YKK5_9BACL Queuine tRNA-ribosyltransferase OS=Laceyella sediminis OX=573074; GN = tgt PE=3 SV=1
MAVRYELIKTCKQSGARLGRLHTPHGTIETPIFMPVGTQATVKTMSPEELKEMNAQIILSNTYHLFLRPGHDIVKEAGGLHSFMNWDRPILTDSGGFQVFSLSQLRNITEEGVTFRSHLSGEKLFISPEKAMEIQNALGADIIMAFDECPPHPAEKAYVKASTERTYRWLKRCIKAHARPHDQALFGIVQGGMHQDLREESAKQLVELDLPGYAVGGLSVGEPKEVMYEVLSYTTPHLPEHKPRYLMGVGSPDALIQGAILGIDMFDCVLPTRIARNGTTMTSQGRLVVRNAKFARDYTPLDPACDCYTCRNYTRAYLRHLIKADETFGLRLTTYHNLYFLLKLMEQVRQAIREDRLLDFRDEFMMKYYGSLNPNAAF

SEQ ID NO: 56479 - protein, 376 aa, unidentified
  source 1..376: note = Lachnoanaerobaculum orale
  REGION 1..376: note = tr|A0A3P3Q4X7|A0A3P3Q4X7_9FIRM Queuine tRNA-ribosyltransferase OS=Lachnoanaerobaculum orale; OX = 979627 GN=tgt PE=3 SV=1
MKYEIKALDKKAKSATMETVHGTVETPLFMNVGTVAAIKGAVSTDDLKEIGCQVELSNTYHLHVRTGDKLIKEFGGLHEFMHWDRPILTDSGGFQVFSLAKLRKIKEEGVNFNSHIDGRKIFMGPEESMQIQSNLGSTIAMAFDECPPALAERKYIEASVARTTRWLQRCKTEMDRLNSLEDTVNKEQLLFAINQGGIIDDIRISHAKEISEMDLDGYAIGGLAVGESHDEMYHILDVTVEHLPQNKPTYLMGVGTPINILEAVERGVDFFDCVYPSRNGRHGHVYTNHGKLNLFNKKFELDKRPIEEGCNCPACRSYSRGYIRHLLKANEMLGMRLCVLHNLYFYNTMMSEIRTAIREGRYTEYKNNKIRTMLEG

SEQ ID NO: 56480 - protein, 376 aa, unidentified
  source 1..376: note = Lachnoanaerobaculum saburreum
  REGION 1..376: note = tr|E6LQG7|E6LQG7_9FIRM Queuine tRNA-ribosyltransferase OS=Lachnoanaerobaculum saburreum DSM 3986 OX=887325 GN=tgt PE=3 SV=1
MKYEIKAFDKKAKSATMETVHGTVETPLFMNVGTVAAIKGAVSTDDLKEIGCQVELSNTYHLHVRTGDKLIKEFGGLHEFMHWDRPILTDSGGFQVFSLAKLRKIKEEGVNFNSHIDGRKIFMGPEESMQIQSNLGSTIAMAFDECPPALAERKYIETSVARTTRWLQRCKTEMDRLNSLEDTVNKEQLLFAINQGGIIDDIRISHAKDISEMNLDGYAIGGLAVGESHEEMYHILDVTVEHLPQNKPTYLMGVGTPINILEAVDRGVDFFDCVYPSRNGRHGHVYTNHGKLNLFNKKFELDKRPIEEGCTCPACRSYSRGYIRHLLKANEMLGMRLCVLHNLYFYNTMMSEIRTAIREGRYTEYKNNKIRTMLEG

SEQ ID NO: 56481 - protein, 376 aa, unidentified
  source 1..376: note = Lachnoanaerobaculum saburreum
  REGION 1..376: note = tr|A0A133ZYG6|A0A133ZYG6_9FIRM Queuine tRNA-ribosyltransferase OS=Lachnoanaerobaculum saburreum; OX = 467210 GN=tgt PE=3 SV=1
MKYEIKALDKKAKSATMETVHGTVETPLFMNVGTVAAIKGAVSTDDLKEIGCQVELSNTYHLHVRTGDKLIKEFGGLHEFMHWDRPILTDSGGFQVFSLAKLRKIKEEGVNFNSHIDGRKIFMGPEESMQIQSNLGSTIAMAFDECPPALAERKYIEASVARTTRWLQRCKTEMERLNSLEDTINKEQLLFAINQGGILDDIRIAHAKEISEMDLDGYAIGGLAVGESHEEMYHILDVTVEHLPQNKPTYLMGVGTPINILEAVERGVDFFDCVYPSRNGRHGHVYTNHGKLNLFNKKFELDKRPIEEGCNCPACRSYSRGYIRHLLKANEMLGMRLCVLHNLYFYNTMMSEIRTAIREGRYTEYKNNKIRTMLEG

SEQ ID NO: 56482 - protein, 378 aa, unidentified
  source 1..378: note = Lachnoanaerobaculum sp.
  REGION 1..378: note = tr|A0A3P3QZP1|A0A3P3QZP1_9FIRM Queuine tRNA-ribosyltransferase OS=Lachnoanaerobaculum sp. KCOM 2030 OX=2490855 GN=tgt PE=3 SV=1
MKYEIKAVDNRAKSATMETVHGTVETPLFMNVGTVAAIKGAVSTDDLKEIGCQVELSNTYHLHVRTGDKLIKEFGGLHEFMHWDRPILTDSGGFQVFSLAKLRKIKEEGVAFNSHIDGRKIFMGPEESMQIQSNLGSTIAMAFDECPPALAERKYIEESVARTTRWLQRCKVEMDRLNSLEDTINKEQLLFGINQGGIIDDIRISHAKAISEMNLDGYAIGGLAVGESHEEMYHILDVTVEHLPKDKPTYLMGVGTPINILEAVDRGVDFFDCVYPSRNGRHGHVYTNCGKLNLFNKKYELDKRPIEEGCNCPACRSYSRGYIRHLLKANEMLGMRLCVLHNLYFYNTMMSEIRTAIRENRYTEYKNNKIRTMLEGSK

SEQ ID NO: 56483 - protein, 378 aa, unidentified
  source 1..378: note = Lachnoanaerobaculum sp.
  REGION 1..378: note = tr|K0Y377|K0Y377_9FIRM Queuine tRNA-ribosyltransferase OS=Lachnoanaerobaculum sp. OBRC5-5; OX = 936595 GN=tgt PE=3 SV=1
MKYEIKAVDNRAKSATMETVHGTVETPLFMNVGTVAAIKGAVSTDDLKEIGCQVELSNTYHLHVRTGDKLIKEFGGLHEFMHWDRPILTDSGGFQVFSLAKLRKIKEEGVAFNSHIDGRKIFMGPEESMQIQSNLGSTIAMAFDECPPALAERRYIEESVARTTRWLQRCKVEMDRLNSLEDTINKEQLLFGINQGGVIDDIRISHAKEISEMNLDGYAIGGLAVGESHEEMYHILDVTVEHLPKDKPTYLMGVGTPINILEAVDRGVDFFDCVYPSRNGRHGHVYTNYGKLNLFNKKYELDKRPIEEGCNCPACRSYSRGYIRHLLKANEMLGMRLCVLHNLYFYNTMMSEIRTAIRENRYTEYKNNKIRTMLEGSK

SEQ ID NO: 56484 - protein, 378 aa, unidentified
  source 1..378: note = Lachnoanaerobaculum umeaense
  REGION 1..378: note = tr|A0A385Q2Q3|A0A385Q2Q3_9FIRM Queuine tRNA-ribosyltransferase OS=Lachnoanaerobaculum umeaense; OX = 617123 GN=tgt PE=3 SV=1
MKYEIKAVDKRAKSATMETVHGTVETPLFMNVGTVAAIKGAVSTDDLKEIGCQIELSNTYHLHVRTGDKLIKEFGGLHEFMNWDRPILTDSGGFQVFSLAKLRKIKEEGVAFNSHIDGRKIFMGPEESMQIQSNLGSTIAMAFDECPPALAERKYIEDSVARTTRWLLRCKTEMDRLNSLEDTINKEQLLFGINQGGVIDDIRISHAKAISEINLDGYAIGGLAVGESHEEMYHILDVTVEHLPKDKPTYLMGVGTPINILEAVDRGVDFFDCVYPSRNGRHGHLYTNYGKLNLFNKKYELDKRPIEEGCKCPACRSYSRGYIRHLLKANEMLGMRLCVLHNLYFYNTMMSEIRTAIRENRYTEYKNNKIRTMLEGSK

SEQ ID NO: 56485 - protein, 386 aa, Lachnobacterium bovis
  REGION 1..386: note = tr|A0A1H3HM49|A0A1H3HM49_9FIRM Queuine tRNA-ribosyltransferase OS=Lachnobacterium bovis DSM 14045; OX = 1122142 GN=tgt PE=3 SV=1
MAKYELLKQEGRAKRGVFHTIHGDIQTPVFMNVGTVAAIKGAVSTNDLKNIKCQVELSNTYHLHVRTGDKLIKEVGGLHKFMNWDRPILTDSGGFQVFSLAGLRKIKEEGVYFNSHIDGRKIFMGPEESMQIQSNLGSTIAMAFDECPPALAERRYVSDSVARTTRWLERCKKEMARLNSLEDTVNKEQLLFGINQGAVYDDIRIDHAKRISEMDLDGYAVGGLAVGESHEQMYGVLDAVVPHLPVNKPTYLMGVGTPANILEGVERGIDFFDCVYPSRNGRHGHVYTNQGKINLFNKKYEKDMRPIEEGCGCPACQSYSRAYIRHLLKAKEMLGMRLCVLHNLYFYNTMMEEIRTSLEEGRFKSYKEEKLYNMGQINREKEQENG

SEQ ID NO: 56486 - protein, 386 aa, Lachnobacterium bovis
  REGION 1..386: note = tr|A0A1H9RJ69|A0A1H9RJ69_9FIRM Queuine tRNA-ribosyltransferase OS=Lachnobacterium bovis OX=140626; GN = tgt PE=3 SV=1
MAKYELLKQEGRAKRGVFHTTHGDIQTPVFMNVGTVAAIKGAVSTNDLKNIKCQVELSNTYHLHVRTGDKLIKEVGGLHKFMNWDRPILTDSGGFQVFSLAQLRKIKEEGVYFNSHIDGRKIFMGPEESMQIQSNLGSTIAMAFDECPPALAERKYVIDSVARTTRWLERCKKEMARLNSLEDTVNKEQLLFGINQGAVYDDIRIDHAKRISEMDLDGYAVGGLAVGESHEQMYSVLDAVVPHLPVNKPTYLMGVGTPANILEGVERGIDFFDCVYPSRNGRHGHVYTNQGKINLFNKKYEKDMRPIEEGCSCPACQSYSRAYIRHLLKAKEMLGMRLCVLHNLYFYNTMMEEIRTSLEEGRFKSYKEEKLYNMGQINREKEQENN

SEQ ID NO: 56487 - protein, 378 aa, unidentified
  source 1..378: note = Lachnoclostridium phytofermentans
  REGION 1..378: note = sp|A9KHU4|TGT_LACP7 Queuine tRNA-ribosyltransferase; OS = Lachnoclostridium phytofermentans (strain ATCC 700394 / DSM 18823 / ISDg) OX=357809 GN=tgt PE=3 SV=1
MYKLICKDGNAKRGEFTTVHGKIQTPVFMNVGTAAAIKGAVSTMDLQEIGTQVELSNTYHLHVRPGDEVVKKLGGLHKFMVWDKPILTDSGGFQVFSLAGLRKIKEEGVYFNSHIDGKKIFMGPEESMRIQSNLASTIAMAFDECPPHPATREYMEDSVARTTRWLLRCKNEMNRLNTLEDTINKHQMLFGINQGGTYTDIRVEHAKRISELDLDGYALGGLAVGESHSEMYRIIEETVPYLPEAKPTYLMGVGTPANILEAVERGVDFFDCVYPARNGRHGHAYTNHGKMNLLNAKYELDDRPIEEGCGCPVCKNYSRGYIRHLLKAKEMLGLRFLVTHNLYFYNKMMEEIREAIENQNFASYKKKKLEGFAAEQGN

SEQ ID NO: 56488 - protein, 378 aa, unidentified
  source 1..378: note = Lachnoclostridium phytofermentans
  REGION 1..378: note = tr|A0A3D2X7U7|A0A3D2X7U7_9FIRM Queuine tRNA-ribosyltransferase OS=Lachnoclostridium phytofermentans OX=66219 GN=tgt PE=3 SV=1
MYKLICKDGNAKRGEFSTVHGKIQTPVFMNVGTAAAIKGAVSTMDLQEIKTQVELSNTYHLHVRPGDEVIKKLGGLHKFMVWDKPILTDSGGFQVFSLSGLRKIKEEGVYFNSHVDGRKIFMGPEESMRIQSNLASTIAMAFDECPPHPATREYMEDSVARTTRWLLRCKNEMNRLNTLEDTINKHQMLFGINQGGTYTDIRIEHAKRISELDLDGYALGGLAVGESHSEMYRIIEETVPYLPEAKPTYLMGVGTPANILEAVERGVDFFDCVYPARNGRHGHAYTNHGKMNLLNAKYELDDRPIEEGCACPVCKTYSRGYIRHLLKAKEMLGLRFLVTHNLYFYNKMMEEIREAIENQNFASYKKKKLEGFAAEQGN

SEQ ID NO: 56489 - protein, 377 aa, unidentified
  source 1..377: note = Lachnoclostridium sp.
  REGION 1..377: note = tr|A0A2T3FPF3|A0A2T3FPF3_9FIRM Queuine tRNA-ribosyltransferase OS=Lachnoclostridium sp. SNUG30099; OX = 2126738 GN=tgt PE=3 SV=1
MKDFWYELKHVCKQSGARYGILHTPHGDVETPMFMPVGTLATVKGIAPEMLKEMGSQVILSNTYHLWLRPGEDIVAKAGGLHKFMNYDGPMLTDSGGFQVFSLGKTRKIKEEGVYFKSIIDGKSLFLSPEKAIDIQNKLGADMIMSLDECAPYPATYDYMKHSVERTIRWAKRGKEAHHNEKQALFGIVQGGEYPDLREKCAKALVEMDFPGYSIGGTSVGEPKDVMYKMVEDAIQWLPEDKPRYLMGVGNPIDLIEAAIRGIDMYDCVLPTRVARHGALMTHHGRMNINNEKFKEDFTPIDPECDCYTCRNYTRAYLRHLHKSDELFGKTLLSIHNVRFLLQLSEDIRKAIQEDRLLDFKEEFLDKYGRDVYKRAF

SEQ ID NO: 56490 - protein, 376 aa, unidentified
  source 1..376: note = Lachnoclostridium sp.
  REGION 1..376: note = tr|A0A1Y4SBF0|A0A1Y4SBF0_9FIRM Queuine tRNA-ribosyltransferase OS=Lachnoclostridium sp. An131; OX = 1965555 GN=tgt PE=3 SV=1
MYRIVKKDGNAKHAEFTTVHGTVQTPVFMNVGTAAAIKGAVATSDLEQIGTQIELSNTYHLHVRPGDQIVKKLGGLHKFMSWDKPILTDSGGFQVFSLSSLRKIKEEGVYFNSHVDGRKIFMGPEESMQIQSNLASTIAMAFDECAPALADRGYVERSVARTTRWLARCKAEMKRLNALPDTINPDQLLFGINQGAVYEDIRIEHAKQITEMELDGYAIGGLAVGETHEQMYQIIEAVVPHLPEDKPTYLMGVGTPANILEAVDRGVDFFDCVYPSRNGRHGHLYTNYGKINLFNAKYELDERPIEIGCQCPACRRYSRAYIRHLLKAKEMLGMRLCVLHNLYFYNTMMVEIRDAIDAGRYQAYKKEKLEKMRSGS

SEQ ID NO: 56491 - protein, 380 aa, Lachnospira multipara
  REGION 1..380: note = tr|A0A1H5UTN0|A0A1H5UTN0_9FIRM Queuine tRNA-ribosyltransferase OS=Lachnospira multipara OX=28051; GN = tgt PE=3 SV=1
MYKILATSGNAKRAEFTTVHGTVQTPVFMNVGTVAAIKGAVATTDLQEIGTQIELSNTYHLHVRTGDKLIKELGGLHKFMNWDKPILTDSGGFQVFSLAGLRKIKEEGVTFQSHIDGHKIFMGPEESMQIQSNLGSTIAMAFDECAPAKADRNYVEKSVARTTRWLERCKKEMDRLNSLEDTVNPHQMLFGINQGAVYDDIRIEHAKRITEMDLDGYAVGGLAVGETHEEMYHVLDKVVPYLPKEKPTYLMGVGTPANILEAVDRGIDFFDCVYPSRNGRHGHVYTKFGKINLFNAKYEKDLAPIEEGCNCPACRNYSRAYIRHLLKAKEMLGMRLCVLHNLYFYNHLMTDIRGAIEAGNYKSFKDERLYLLKTYDKDKK

SEQ ID NO: 56492 - protein, 378 aa, Lachnospira pectinoschiza
  REGION 1..378: note = tr|A0A174YIA8|A0A174YIA8_9FIRM Queuine tRNA-ribosyltransferase OS=Lachnospira pectinoschiza; OX = 28052 GN=tgt PE=3 SV=1
MYKILKTDGRAKRAEFTTVHGTVQTPVFMNVGTVAAIKGAVATTDLQEIGTQIELSNTYHLHVRPGDKLIKELGGLHKFMNWNKPILTDSGGFQVFSLAGLRKIKEEGVTFQSHIDGHKIFMGPEESMQIQSNLGSTIAMAFDECAPAKADRKYIINSVERTTRWLERCKKEMNRLNSLEDTINKSQMLFGINQGAIYDDIRIDHAKRISELDLDGYAVGGLAVGETHEEMYHVLDEVVPYLPQNKPTYLMGVGTPANILESVDRGIDFFDCVYPSRNGRHGHVYTKFGKINLFNAKYEKDTAPIEEGCQCPACRNYSRAYIRHLLKAKEMLGMRLCVLHNLYFYNHLMEDIRGAIDAGNYKSFKDERLYLLKTYDKK

SEQ ID NO: 56493 - protein, 380 aa, Lachnospira pectinoschiza; identical to SEQ ID NO: 56491
  REGION 1..380: note = tr|A0A1G9Z642|A0A1G9Z642_9FIRM Queuine tRNA-ribosyltransferase OS=Lachnospira pectinoschiza; OX = 28052 GN=tgt PE=3 SV=1

SEQ ID NO: 56494 - protein, 371 aa, unidentified
  source 1..371: note = Lachnospiraceae bacterium
  REGION 1..371: note = tr|F7JS93|F7JS93_9FIRM Queuine tRNA-ribosyltransferase OS=Lachnospiraceae bacterium 2_1_58FAA OX=658082 GN=tgt PE=3 SV=1
MYELIKKDGRAKRGRFHTVHGTIETPVFMNVGTAAAIKGAVSTDDLRGIKTQVELSNTYHLHVRPGDEVVKKMGGLHKFMNWDKPILTDSGGFQVFSLAGLRKIKEEGVHFNSHIDGRKIFMGPEESMQIQSNLASTIAMAFDECPSSVADRVYMRDSVARTTRWLKRCKAEMDRLNTLQDTINPHQMLFGINQGGIYEDIRIEHAKQIVDLDLDGYAVGGLAVGESHEEMYRILDAVVPYLPEQKPTYLMGVGTPINILEAVDRGVDFFDCVYPSRNGRHGHVYTNHGKLNLFNAKYELDDRPIEEGCQCPACRSYSRGYIRHLLKAKEMLGMRLCVLHNLYFYNTMMEEIRAAIEAGEYQVYKKKKSKE

SEQ ID NO: 56495 - protein, 380 aa, unidentified
  source 1..380: note = Lachnospiraceae bacterium
  REGION 1..380: note = tr|A0A352CNE0|A0A352CNE0_9FIRM Queuine tRNA-ribosyltransferase OS=Lachnospiraceae bacterium; OX = 1898203 GN=tgt PE=3 SV=1
MNRYTLLKKDGRARRGRLDTVHGTVETPVFMNVGTVGAIKGAVSTEDLKEIGCQIELSNTYHLHVRTGDEVIRRLGGLHSFMVWDRPILTDSGGFQVFSLAGLRRIKEEGVTFASHIDGHRIFMGPEESMRIQSNLGSTIAMAFDECPDARSSRDYVVDSVRRTERWLVRCREELDRLNSLPDTLNREQMLFGINQGAVFDDIRIENADMISEMGLDGYAIGGLAVGETHEEMYHVLDVTVPHLPEDKPIYLMGVGTPVNIVEAVYRGVDFFDCVYPSRNARHGQLYTHRGKLNIKNAAYEEDIRPIEEGCCCPACRRYSRAYIRHLIKAGEMLGLRLCVLHNLYFYNHLMEEIREAIEEDRYGQFRDDFISGFGESPVD

SEQ ID NO: 56496 - protein, 378 aa, unidentified
  source 1..378: note = Lachnospiraceae oral
  REGION 1..378: note = tr|F3B0V9|F3B0V9_9FIRM Queuine tRNA-ribosyltransferase OS=Lachnospiraceae oral taxon 107 str. F0167 OX=575593 GN=tgt PE=3 SV=1
MKYEIKAVDKRAKSATMETVHGTVETPLFMNVGTVAAIKGAVSTDDLKEIGCQVELSNTYHLHVRTGDKLIKEFGGLHEFMHWDRPILTDSGGFQVFSLAKLRKIKEEGVAFNSHIDGRKIFMGPEESMQIQSNLGSTIAMAFDECPPALAERKYIEDSVARTTRWLQRCKVEMDRLNSLEDTINKEQLLFGINQGGIIDDIRISHAKTISEMNLDGYAIGGLAVGESHEEMYHILDMTVEHLPKDKPTYLMGVGTPINILEAVDRGVDFFDCVYPSRNGRHGHVYTNYGKLNLFNKKYELDKRPIEEGCNCPTCRSYSRGYIRHLLKANEMLGMRLCVLHNLYFYNTMMSEIRTAIRENRYTEYKNNKIRTMLEGSK

SEQ ID NO: 56497 - protein, 383 aa, unidentified
  source 1..383: note = Lachnotalea glycerini
  REGION 1..383: note = tr|A0A255I7F4|A0A255I7F4_9FIRM Queuine tRNA-ribosyltransferase OS=Lachnotalea glycerini; OX = 1763509 GN=tgt PE=3 SV=1
MYKLIKQEGRAKRGEFHTVHGVIQTPVFMNVGTVAAIKGAVSTQDLYEIKTQVELSNTYHLHVRTGDKLIKQFGGLHKFMVWNKPILTDSGGFQVFSLAGLRKIKEEGVYFNSHIDGHKIFMGPEESMQIQSNLASTIAMAFDECPSSVAERKYIQASVERTTRWLHRCKKEMSRLNALEDTINKKQMLFGINQGGTFEDIRIEHAKIISELDMDGYAIGGLAVGESHSEMYRIIEETVPYLPVDKPTYLMGVGTPANILEAVERGVDFFDCVYPSRNGRHGHLYTRKGKINLFNVKYELDEKPIEEGCQCPACRTYSRAYIRHLLKAKEMLGMRLCVLHNLYFYNTMMEEIRQALDEGRFIEYKKAKLEGFLENDKPNITSF

SEQ ID NO: 56498 - protein, 378 aa, unidentified
  source 1..378: note = Lachnotalea sp.
  REGION 1..378: note = tr|A0A416EPS1|A0A416EPS1_9FIRM Queuine tRNA-ribosyltransferase OS=Lachnotalea sp. AF33-28; OX = 2292046 GN=tgt PE=3 SV=1
MYKLLKKDGRAKRAEFHTVHGVIQTPVFMNVGTVAAIKGAVSTADLEEIGTQVELSNTYHLHVRPGDHIVRQLGGLHKFMSWDRPILTDSGGFQVFSLAGLRKIKEEGVTFQSHIDGHKIFMGPEESMQIQSNLASTIAMAFDECAPHPCTREYMQNSVERTTRWLLRCKAEMDRLNSLPDTINRQQMLFGINQGGTFEDIRIWHAKEISQLKLDGYAVGGLAVGESHEEMYHILDVTVPFLPEDKPTYLMGVGTPANILEAVDRGVDFFDCVYPTRNGRHGHVYTNYGKLNLFNAKYELDDRPIEEGCQCPTCRRYSRAYIRHLLKAKEMLGMRLCVLHNLYFYNHLMEEIRGAIDAGCYGEFKQQKLAGFAMGGQK

SEQ ID NO: 56499 - protein, 379 aa, Lacibacter cauensis
  REGION 1..379: note = tr|A0A562SRL6|A0A562SRL6_9BACT Queuine tRNA-ribosyltransferase OS=Lacibacter cauensis OX=510947; GN = tgt PE=3 SV=1
MAALQFQLQHTDPQSKARAGEITTDHGTIQTPIFMPVGTVGSVKSLTVEQLKSEVKAEIILGNTYHLYLRPGTEVLEAAGGLHKFNGWDRPILTDSGGYQVFSLAGNRKIKEEGVVFQSHIDGSKHLFTPESVMDIQRSIGADIVMAFDECPPYPSDYTYAKKSMELTHRWLERCIKHFHNTPDKYGYTQNLFPIVQGSTYKDLRTASSQFVANTNLTGCAIGGLSVGEPEEMMYEFTELCCDELPIQKPRYLMGVGTPWNILECIALGVDMFDCVMPTRNGRNAMLFTSKGVINIDNKKWEKDFSPLDDGIDCHISNYYSKAYLRHLIKAKEITGLTLASVHNLAFYLWLVKEARKHVLAGDFVSWKNELVPVLKTRL

SEQ ID NO: 56500 - protein, 379 aa, Lacibacter sp.
  REGION 1..379: note = tr|A0A4Q1CFA3|A0A4Q1CFA3_9BACT Queuine tRNA-ribosyltransferase OS=Lacibacter sp. TTM-7 OX=2508719; GN = tgt PE=3 SV=1
MAALQFQLQYTDTQSKARAGEITTDHGTIQTPIFMPVGTVGSVKSLTVEQLKREVKAEIILGNTYHLYLRPGTDVLEAAGGLHKFNGWDKPILTDSGGYQVFSLAGNRKIKEEGVVFQSHIDGSKHLFTPENVMDVQRSIGADIVMAFDECPPYPSDYKYAHKSMELTHRWLDRCIKHFASTPDKYGYTQNLFPIIQGSTYKDLRKASSQFVANTNLTGCAIGGLSVGEPEEMMYEFTELCCDELPTQKPRYLMGVGTPWNILECIALGVDMFDCVMPTRNGRNAMLFTSKGVINIDNKKWEKDFSPLDDGIDCHISNYYSKAYLRHLIKAKEITGLTLASVHNLAFYLWLVKEARKHILAGDFTGWKNEMVPVLKTRL

SEQ ID NO: 56501 - protein, 372 aa, unidentified
  source 1..372: note = Lacimicrobium alkaliphilum
  REGION 1..372: note = tr|A0A0U2QNY7|A0A0U2QNY7_9ALTE Queuine tRNA-ribosyltransferase OS=Lacimicrobium alkaliphilum; OX = 1526571 GN=tgt PE=3 SV=1
MKFEVLATDGKARRGRLEFERGTVETPAFMPVGTYGTVKGMTPEELENTGAEICLGNTFHLMLRPGTEIMKMHGDLHDFMHWQKPILTDSGGFQVFSLGDLRKISEEGVTFRSPINGEKIMLTPEKSMQVQRDLGADIVMIFDECTPYPATYEEARTSMELSLRWAGRSKSEHGDNPSALFGIVQGGMYEDLRQLSLEGLEKIGFDGYAIGGLSVGEPKEDMIRILDHTAHRIPADKPRYLMGVGKPEDIVEAVRRGIDMFDCVMPTRNARNGHLFVTGGVVKIRNARHKTDTAPLDEKCDCYTCKNYSRSYLHHLDKCNEILGARLNTIHNLRYYQRVMEGLRNAIAAGTLDDFVAQFYAAKEMDMPALGE

SEQ ID NO: 56502 - protein, 376 aa, Lacinutrix sp.
  REGION 1..376: note = tr|A0A4U0EKX5|A0A4U0EKX5_9FLAO Queuine tRNA-ribosyltransferase OS=Lacinutrix sp. CAU 1491; OX = 2565367 GN=tgt PE=3 SV=1
MIFKLEGKDSQSKARAGSITTDHGKIETPIFMPVGTVASVKGVHQRELKNDINPDIILGNTYHLYLRPQTTILEKAGGLHKFMNWGRNILTDSGGYQVYSLSANRKIKEEGVKFKSHIDGSYHTFTPENVMEIQRAIGADIIMAFDECTPYPCDYNYAKRSMHMTHRWLDRCINHLEKTPLKYDYNQAFFPIVQGSTYKDLRMQSAEYIANSGAVGNAIGGLSVGEPAEEMYTMTDVVCNILPEDKPRYLMGVGTPINILENIALGVDMFDCVMPTRNARNGMLFTAHGTINIKNKKWEDDFSPVDEMGITYVDTDYTKAYLRHLFSVNERLGAQIATIHNLGFYLWLVREARKHILAGDFRTWKDNMVKQMDKRL

SEQ ID NO: 56503 - protein, 376 aa, Lacinutrix sp.
  REGION 1..376: note = tr|A0A2K8XGE3|A0A2K8XGE3_9FLAO Queuine tRNA-ribosyltransferase OS=Lacinutrix sp. Bg11-31; OX = 2057808 GN=tgt PE=3 SV=1
MTFELKGKDAQSSARAGVLTTDHGVIETPIFMPVGTVASVKGVHQRELKNDINPDIILGNTYHLYLRPQIDVLEKAGGLHKFMNWDRNILTDSGGYQVYSLSANRKIKEEGVKFKSHIDGSYHTFTPESVMEIQRSIGADIIMAFDECTPYPCDYNYAKRSMKMTHRWLDRCINHLEKVPFKYDYSQAFFPIVQGSCYKDLRVQSAEYIANSGAVGNAIGGLSVGEPAEEMYAMTEIVTAILPEDKPRYLMGVGTPINILENIALGVDMFDCVMPTRNARNGMLFTAHGSINIKNLKWRDDFSALDEMAITWVDTDYSKAYVRHLFTVNERLAAQIATIHNLGFYMWLVREARKHILAGDFRTWKDMMVKQMDKRL

SEQ ID NO: 56504 - protein, 376 aa, unidentified
  source 1..376: note = Lacinutrix venerupis
  REGION 1..376: note = tr|A0A420ZHE7|A0A420ZHE7_9FLAO Queuine tRNA-ribosyltransferase OS=Lacinutrix venerupis OX=1486034; GN = tgt PE=3 SV=1
MTFDLKAKDAQSSARAGVITTDHGVIETPIFMPVGTVASVKGVHQRELKNDINPDIILGNTYHLYLRPQIETLEKAGGLHKFMNWDRNILTDSGGYQVYSLSSRRKIKEEGVKFKSHIDGSYHTFTPENVMEIQRSIGADIIMAFDECTPYPCDYNYAKRSMKMTHRWLDRCINHLEKVPFKYDYSQAFFPIVQGSTYKDLRMQSAEYIANAGAVGNAIGGLSVGEPAEEMYAMTEVVTDILPEDKPRYLMGVGTPINILENIALGVDMFDCVMPTRNARNGMLFTAHGSINIKNLKWKDDFSPLDDMGITWVDTDYSKAYVRHLFSVNERLAAQIATIHNLGFYMWLVREARKHILAGDFRTWKDMMVKQMDKRL

SEQ ID NO: 56505 - protein, 381 aa, Lactobacillus acidifarinae
  REGION 1..381: note = tr|A0A0R1LD89|A0A0R1LD89_9LACO Queuine tRNA-ribosyltransferase OS=Lactobacillus acidifarinae DSM 19394 OX=1423715 GN=tgt PE=3 SV=1
MEPAIKYHLIKTEKHTGARLGEVITPHGTFQTPMFMPVGTQAAMKGAVSPEELAEMGSQVVLANTYHLWLQPGPDLVAEAGGLHQFMNWHKGILTDSGGFQVFSLAKHRKLTEEGVHFRNEINGDKLFLSPEKAINIQNKLGPDIMMSLDECPPFFESYDYVKHSVERTSRWAERGLKAHAHPDYQGLFGIVQGAGYEDLRRQSARDLVSLDFPGYSIGGLSVGESKPEMNRILELTTPLLPTNKPRYLMGVGTADSLIDGVIRGIDMFDCVLPTRIARKGTCMTSHGRLVVKNAAFAHDFRPIDPECDCYTCRHYTRAYLRHLFKADEDFGRRLTSYHNLYFLHHLMKRVRQAILDDHLLELREEVFEKYGYNAEHPKNF

SEQ ID NO: 56506 - protein, 381 aa, Lactobacillus acidipiscis
  REGION 1..381: note = tr|A0A0R2KBK2|A0A0R2KBK2_9LACO Queuine tRNA-ribosyltransferase OS=Lactobacillus acidipiscis; OX = 89059 GN=tgt PE=3 SV=1
MSEAAIKYRLIKKEKHTGARLGEITTPHGTIQTPIFMPVGTQATVKSLSPEELKEMNAQIILSNTYHLWERPGDDLVAEAGGLHKFMNWDRPILTDSGGFQVFSLAKLRDISEEGVHFRSNLNGAKLFLSPEKAIHIENNLGADIMMSFDECPPFFESYDYIKKSVERTSRWAERGLLAHQNPSSQGLFGIVQGGGHKELRKQSARDLTSMDFAGYSIGGLSVGESKAEMNHVLEFTTPLLPENKPRYLMGVGSPDALIDGALRGVDMFDCVLPTRIARNGTCMTSHGRLVVKNAKFARDFRPIDENCHCYTCRNFTRAYVRHLFKTDETFGLRLTSYHNLYFLLDLMKQVREAIKNDELLDFKEAFFEQYGLNKANAKNF

SEQ ID NO: 56507 - protein, 381 aa, Lactobacillus agilis
  REGION 1..381: note = tr|A0A231QN87|A0A231QN87_9LACO Queuine tRNA-ribosyltransferase OS=Lactobacillus agilis OX=1601; GN = tgt PE=3 SV=1
MTTPAVTYNLIKKDKHTGARLGQITTPHGTFDTPMFMPVGTQASVKAMAPEELKEMGAGVILANTYHLWLRPGEDLVEEAGGLHQFMNWDQGILTDSGGFQVFSLAELRNITEEGVHFKNHLNGQKLFLSPEKAIAIENALGADIMMSFDECPPFFESYDYIKKSIERTSRWAERGLRAHKNPQTQALFGIVQGGGHKALREQSARDLVSLDFPGYSIGGLSVGESKAEMNHVLDFTTPLLPENKPRYLMGVGSPDALIDGVIRGVDMFDCVLPTRIARNGTCMTSKGRLVVKNAKYARDFRPLDEKCNCYACRNYTRAYIRHLLKTDEIFGLRLTSYHNLYFLLDLMRKIRAAIKEDRLLDFRAEFFEEYGLNKENRKNF

SEQ ID NO: 56508 - protein, 381 aa, Lactobacillus agilis; identical to SEQ ID NO: 56507
  REGION 1..381: note = tr|A0A0R2A928|A0A0R2A928_9LACO Queuine tRNA-ribosyltransferase OS=Lactobacillus agilis DSM 20509; OX = 1423718 GN=tgt PE=3 SV=1

SEQ ID NO: 56509 - protein, 381 aa, Lactobacillus algidus
  REGION 1..381: note = tr|A0A0R1HP32|A0A0R1HP32_9LACO Queuine tRNA-ribosyltransferase OS=Lactobacillus algidus DSM 15638; OX = 1423719 GN=tgt PE=3 SV=1
MVEPAIKYRLIKKDKRTGARLGEIITPHGTFPTPMFMPVGTLASVKSMAPEELDELGANIILSNTYHLWLRPGEDIVQEAGGLHKFMNWDKGILTDSGGFQVFSLAKMRDISEEGVKFKSHLNGANLFLSPEKAIHVENALGADIMMSFDECPPFSESYDYISKSVDRTSRWAERGLKAHLNPKEQALFGIVQGGGHRNLRERSARDLVSMDFPGYSIGGLSVGESKAEMNRVLDFTTPLLPEDKPRYLMGVGSADALIDGVLRGIDMFDCVLPTRIARNGTTMTSMGRVVVKNAKYERDFRPLDENCDCYTCKNYTRAYLRHLIKADETFGIRLTSYHNLYFLTHLMADVRQAIMDDNLLEFREAFFEQYGFYDKNPKNF

SEQ ID NO: 56510 - protein, 381 aa, Lactobacillus algidus; identical to SEQ ID NO: 56509
  REGION 1..381: note = tr|A0A2C8ESF2|A0A2C8ESF2_9LACO Queuine tRNA-ribosyltransferase OS=Lactobacillus algidus OX=105612; GN = tgt PE=3 SV=1

SEQ ID NO: 56511 - protein, 380 aa, Lactobacillus alimentarius
  REGION 1..380: note = tr|A0A2N9YJN8|A0A2N9YJN8_9LACO Queuine tRNA-ribosyltransferase OS=Lactobacillus alimentarius DSM 20249 OX=1423720 GN=tgt PE=3 SV=1
MESAIKYTLIKKEKHTGARLGLLETPHGTFETPMFMPVGTEASVKNMAPEDLEKIGASIILANTYHLWLRPGEDIVKEAGGLHKFMNWDKGILTDSGGFQVFSLAKMRDITEVGVHFRNHLNGRQEFLSPEKAIKIENYLGPDIMMSLDECPPFFESYDYIKRSVARTSRWAERGLKAHRNPDWQALFGIVQGGGFEDLRKQSAKDLVSMDFPGYSIGGLSVGESKGEMNRVLGFTTPMLPENKPRYLMGVGTADSLIDGVIRGIDMFDCVLPTRIARNGTCMTSHGRLVVKNAKYAHDFTPLDDNCDCYVCRNYSRAYIRHLINANELFGIHLTSYHNLYFLLNLMKGVRQAIRDDNLLEFREHVFEDYGFNKKNAKKF

SEQ ID NO: 56512 - protein, 380 aa, unidentified
  source 1..380: note = Lactobacillus allii
  REGION 1..380: note = tr|A0A1P8PZS1|A0A1P8PZS1_9LACO Queuine tRNA-ribosyltransferase OS=Lactobacillus allii OX=1847728; GN = tgt PE=3 SV=1
MEPAVKYTLIKKEKHTGARLGMLETPHGTFETPMFMPVGTEASVKNMAPEDLEKIGASIILANTYHLWLRPGEDIVKEAGGLHKFMNWDKGILTDSGGFQVFSLANTRDITEAGVHFRNHLNGRREFLSPEKAMKIENYLGPDIMMSLDECPPFFESYDYIKKSVARTSRWAERGLKAHRNPDWQALFGIVQGAGFEDLRKQSVEDLTSMDFPGYSIGGLSVGESKEEMNHVLDFTAPLLPENKPRYLMGVGSTDALVDGVIRGIDMFDCVLPTRIARNGTCMTTKGRLVVKNAKYARDFRPIDEDCDCYVCRNYSRAYIRHLINANELFGTHLTSYHNLYYLLNLMKNVRQAIRDDNLLEFREHVFEEYGLNKENARNF

SEQ ID NO: 56513 - protein, 379 aa, Lactobacillus amylophilus
  REGION 1..379: note = tr|A0A4Y4JR36|A0A4Y4JR36_9LACO Queuine tRNA-ribosyltransferase OS=Lactobacillus amylophilus; OX = 1603 GN=tgt PE=3 SV=1
MSSPLTYKLIHQDKKTGARLGEITTPHGTFQTPMFMPVGTQASVKTLAPEELKEMGAGVILANTYHLWQRPGPEIVKEAGGLHKFMNWDQAILTDSGGFQVFSLAQMRDIKEEGVTFKSHISGAKMFLSPEKAIGIENDLGPDIMMSLDECPPYFSDFEYLQKSVARTSRWAERGLKAHRNPDTQALFGIVQGGPHEELRRQSAQDLVSLDFPGYSIGGLSVGESKEEMNRMLEFTTPLLPQNKPRYLMGVGSPDALIDGVIRGIDMFDCVLPTRIARNGTVMTSHGRLVVKNAKYAHDFTPMDPECDCYACRNYTRAYIRHLIKADETFGIRLTSYHNVYFLLNLMKKVRAAIMNDELLEFRADFFEKYGYNDSSRDF

SEQ ID NO: 56514 - protein, 379 aa, Lactobacillus amylophilus; identical to SEQ ID NO: 56513
  REGION 1..379: note = tr|A0A0R1YQA7|A0A0R1YQA7_9LACO Queuine tRNA-ribosyltransferase OS=Lactobacillus amylophilus DSM 20533 = JCM 1125 OX=1423721 GN=tgt PE=3 SV=1

SEQ ID NO: 56515 - protein, 379 aa, Lactobacillus amylotrophicus; identical to SEQ ID NO: 56513
  REGION 1..379: note = tr|A0A0R1GUA8|A0A0R1GUA8_9LACO Queuine tRNA-ribosyltransferase OS=Lactobacillus amylotrophicus DSM 20534 OX=1423722 GN=tgt PE=3 SV=1

SEQ ID NO: 56516 - protein, 381 aa, Lactobacillus animalis
  REGION 1..381: note = tr|A0A0R2A754|A0A0R2A754_9LACO Queuine tRNA-ribosyltransferase OS=Lactobacillus animalis KCTC 3501 = DSM 20602 OX=930942 GN=tgt PE=3 SV=1
MTEPAIKYRLIKKEKHTGARLGEIITPHGTFPTPMFMPVGTQATVKAMSPEELKAMGAGIILSNTYHLWLRPGEDLVKEAGGLHKFMNWDQGILTDSGGFQVFSLADMRNITEEGVHFKSHLNGAPLFLSPEKAIQIENALGSDIMMSFDECPPFYESYDYIKKSVERTSRWAERGLKAHQNPEKQALFGIVQGGGHEDLRKLSARDLVSLDFPGYSIGGLSVGESKAEMNRVLDFTTPLLPEDKPRYLMGVGSPDALIDGVLRGVDMFDCVLPTRIARNGTCMTSHGRLVVKNAKYARDFSPIDDNCDCYTCRNYTRAYVRHLFKADETFGLRLTSYHNLYFLLNLMKQVRQAIMDDNLLEFKEHFFEEYGLNVKNPKNF

SEQ ID NO: 56517 - protein, 381 aa, Lactobacillus animalis; identical to SEQ ID NO: 56516
  REGION 1..381: note = tr|A0A062XAV3|A0A062XAV3_9LACO Queuine tRNA-ribosyltransferase OS=Lactobacillus animalis OX=1605; GN = tgt PE=3 SV=1

SEQ ID NO: 56518 - protein, 367 aa, Lactobacillus antri
  REGION 1..367: note = tr|C8P761|C8P761_9LACO tRNA-guanine transglycosylase; OS = Lactobacillus antri DSM 16041 OX=525309; GN = HMPREF0494_1155 PE=4 SV=1
MRESSMKSKLEFEIQAQSGLARCGQLRCGHRQAATPLLVQTGAVTAILTSSELAAAGTHAVKQSALDYWLRAAGQPDQLGVTDLHDYLRWPGIIVGTPGATQAYRWAKPRGRKPTGVSFHDPATRQQKLYTPQLAQQWQQLLGCDLQVGFARWENYYAPVDELQAAARQTTAWLETVEWPANTLAPVVGGGLKRVRRASAAAAQAVQPGGYALLGIDPAVKLAEQRRILGELTALLPEAGVRYLPTCGALEQVLVAIAQGMDIIDSDCAATTALHGGAYVGTKRLHLTKEHLAGDSRVLVPGCQCPTCQAGYSRAYLHQLLQEQSPVGVRLLIVHNLFVLNRLVDQLRQAIRADRLAEFMADLAIDC

SEQ ID NO: 56519 - protein, 381 aa, Lactobacillus apodemi
  REGION 1..381: note = tr|A0A0R1TSC0|A0A0R1TSC0_9LACO Queuine tRNA-ribosyltransferase OS=Lactobacillus apodemi DSM 16634 = JCM 16172 OX=1423724 GN=tgt PE=3 SV=1
MVEPAIKYRLIKKEKHTGARLGEIITPHGTFPTPMFMPVGTQATVKSISPEELKAMGAGIILSNTYHLWLRPGEDLVKEAGGLHKFMNWDQGILTDSGGFQVFSLADMRNITEEGVHFKSHLNGAPLFLSPEKAIQIENALGSDIMMSFDECPPFFESYDYIKKSVERTSRWAERGLKAHQNPETQALFGIVQGGGHEDLRKLSARDLVSLDFPGYSIGGLSVGESKEEMNRVLDFTTPLLPENKPRYLMGVGSPDALIDGVLRGVDMFDCVLPTRIARNGTCMTSHGRLVVKNAKYARDFSPIDDNCDCYTCRNFTRAYVRHLFKADETFGLRLTSYHNLYFLINLMKQVRQAIMDDNLLEFKEHFFDEYGLNVKNPKNF

SEQ ID NO: 56520 - protein, 397 aa, Lactobacillus aquaticus
  REGION 1..397: note = tr|A0A0R2CWJ1|A0A0R2CWJ1_9LACO Queuine tRNA-ribosyltransferase OS=Lactobacillus aquaticus DSM 21051 OX=1423725 GN=tgt PE=3 SV=1
MRCLLSSIINKEWRILMTEPAIKYHLIKKEKHTGARLGEIITPHGRFPTPMFMPVGTQASVKSLAPEELDAMGANIILSNTYHLWLRPGEDIVKEAGGLHKFMNWDKGILTDSGGFQVFSLAKMRDITEEGVHFKSHLSGEKLFLSPEKAIQIENALGADIMMSFDECPPFFESYDYIKKSVERTSRWAERGLRAHQNAETQGLFGIVQGGGHKELRAQSAHDLVSMDFPGYSIGGLSVGESKSEMNHVLSFTTPMLPENKPRYLMGVGSADALIDGVIRGIDMFDCVLPTRIARNGSCMTSHGRLVVKNAVYARDFRPIDDNCNCYTCRNFSRAYIRHLIKADETFGLRLTSYHNLYFLIHLMQQVRQAIMDDNLLEFRENFFEEYGFNNENSRNF

SEQ ID NO: 56521 - protein, 381 aa, Lactobacillus aviarius
  REGION 1..381: note = tr|A0A510WUE0|A0A510WUE0_9LACO Queuine tRNA-ribosyltransferase OS=Lactobacillus aviarius subsp. aviarius OX=147810 GN=tgt PE=3 SV=1
MSEPAIKYRLIKKEKHTGARLGEIITPHGTFPTPIFMPVGTQATVKAMSPEELDELGADIILSNTYHLWLRPGEDLVREAGGLHKFMNWHKGILTDSGGFQVFSLAELRNITEEGVHFKNHLNGHQMFLSPEKAIHIENALGADIMMSFDECPPFFESYDYIKKSVERTSRWAERGLKAHQNPETQALFGIVQGGGHKDLRQQSARDLVAMDFPGYSIGGLSVGESKAEMNHVLDFTTPLLPENKPRYLMGVGSPDALIDGVIRGVDMFDCVLPTRIARNGTCMTSHGRLVVKNAQYEHDFGPIDDQCDCYACRNYTRAYVRHLLKVNETMGIRLTSYHNLYFLTHLMQKIRQAILDDNLLEFREDFFDQYGLNVKNPKNF

SEQ ID NO: 56522 - protein, 381 aa, Lactobacillus aviarius
  REGION 1..381: note = tr|A0A179CJT0|A0A179CJT0_9LACO Queuine tRNA-ribosyltransferase OS=Lactobacillus aviarius OX=1606; GN = tgt PE=3 SV=1
MSEPAIKYRLIKKEKHTGARLGEIITPHGTFPTPIFMPVGTQATVKAMSPEELEELGADIILSNTYHLWLRPGEDLVREAGGLHKFMNWHKGILTDSGGFQVFSLAELRNITEEGVHFKNHLNGHQMFLSPEKAIHIENALGADIMMSFDECPPFFESYDYIKKSVERTSRWAERGLKAHQNPETQALFGIVQGGGHKDLRQQSARDLVAMDFPGYSIGGLSVGESKAEMNHVLDFTTPLLPENKPRYLMGVGSPDALIDGVIRGVDMFDCVLPTRIARNGTCMTSHGRLVVKNAQYEHDFGPIDDQCDCYACRNYTRAYVRHLLKVNETMGIRLTSYHNLYFLTHLMQKIRQAILDDNLLEFREDFFDQYGLNVKNPKNF

SEQ ID NO: 56523 - protein, 380 aa, unidentified
  source 1..380: note = Lactobacillus backii
  REGION 1..380: note = tr|A0A192H1C7|A0A192H1C7_9LACO Queuine tRNA-ribosyltransferase OS=Lactobacillus backii OX=375175; GN = tgt PE=3 SV=1
MEPAIKYRLIKKEKHTGARLGEITTPHGTFQTPMFMPVGTNASVKTMAPEELDTMGAGIILANTYHLWLRPGEDIVKEAGGLHRFMNWDKGILTDSGGFQVFSLANTRNITEEGVHFKNHLNGAAMFLSPEKAMQIENDLGPDIMMSLDECPPFFESYEYVKHSVARTSRWAERGLKAHRNPETQGLFGIVQGAGFKDLREQSAKDLVSLDFPGYSIGGLSVGESKAEMNHVLDFTAPLLPENKPRYLMGVGSADALIDGAIRGIDMFDCVLPTRIARNGTVMTSHGRLVVKNAQYAHDFGPLDDNCQCYACRNYSRAYIRHLIKANEIFGIHLTSYHNLYFLLHLMKQVRQAIMDDNLLEFREAFFESYGFNQENARNF

SEQ ID NO: 56524 - protein, 380 aa, unidentified
  source 1..380: note = Lactobacillus backii
  REGION 1..380: note = tr|A0A2G9VL44|A0A2G9VL44_9LACO Queuine tRNA-ribosyltransferase OS=Lactobacillus backii OX=375175; GN = tgt PE=3 SV=1
MEPAIKYRLIKKEKHTGARLGEITTPHGTFQTPMFMPVGTNASVKTMAPEELDTMGAGIILANTYHLWLRPGEDIVKEAGGLHRFMNWDKGILTDSGGFQVFSLANTRNITEEGVHFKNHLNGAAMFLSPEKAMQIENDLGPDIMMSLDECPPFFESYEYVKHSVARTSRWAERGLKAHLNPETQGLFGIVQGAGFKDLREQSAKDLVSLDFPGYSIGGLSVGESKAEMNHVLDFTAPLLPENKPRYLMGVGSADALIDGAIRGIDMFDCVLPTRIARNGTVMTSHGRLVVKNAQYAHDFGPLDDNCQCYACRNYSRAYIRHLIKANEIFGIHLTSYHNLYFLLHLMKQVRQAIMDDNLLEFREAFFESYGFNQENARNF

SEQ ID NO: 56525 - protein, 380 aa, unidentified
  source 1..380: note = Lactobacillus bambusae
  REGION 1..380: note = tr|A0A2V1MWY2|A0A2V1MWY2_9LACO Queuine tRNA-ribosyltransferase OS=Lactobacillus bambusae; OX = 2024736 GN=tgt PE=3 SV=1
MEPAISYRLIKTEKHTGARLGEITTPHGTFKTPMFMPVGTNASVKGISPEQLDEMGSQIILANTYHLWLQPGSGLVKEAGGLHRFMNWKKGILTDSGGFQVWSLAKDRQISEEGVHFRNPVNGDKLFLSPEKAIHIENDLGPDIMMSLDECPPFFESYDYIKKSVERTSRWAERGLEAHRNPATQGIFGIVQGAGYEDLRRQSATDLVSMDFPGYSIGGLSVGESKAEMNHVLEFTTPMLPTDKPRYLMGVGSPDALIDGVIRGIDMFDCVLPTRIARKGTCMTSHGRLVVKNAAYEHDFNPIDDQCQCYTCRNYSRAYIRHLFKADEAFGRTLTSYHNLYFLNHLMAEVRQAIMDDNLPDFRERVFESYGYNQKGAKNF

SEQ ID NO: 56526 - protein, 380 aa, Lactobacillus bifermentans
  REGION 1..380: note = tr|A0A0R1HAY0|A0A0R1HAY0_9LACO Queuine tRNA-ribosyltransferase OS=Lactobacillus bifermentans DSM 20003 OX=1423726 GN=tgt PE=3 SV=1
MEPAIKYRLIKKEKHTGARLGELITPHGTFPTPMFMPVGTNASVKTMAPEELDEMGAGVILANTYHLWLRPGEEIVKEAGGLHKFMNWDKGILTDSGGFQVFSLANMRDITEEGVHFKNHLNGAKMFLSPEKAMQIENDLGPDIMMSLDECPPFFETYDYVKKSVARTSRWAERGLKAHRNPATQGLFGIVQGAGFQDLREQSAKDLVSLDFPGYSIGGLSVGESKAEMNHVLDFTTPLLPEHKPRYLMGVGSADALIDGAIRGIDMFDCVLPTRIARNGTVMTSHGRLVVKNAKYAHDFGPLDDNCHCYACRNYSRAYIRHLIKANEIFGIHLTSYHNLYFLLHLMRQVRQAIRDDNLLEFREQFFEMYGFNQENARNF

SEQ ID NO: 56527 - protein, 380 aa, unidentified
  source 1..380: note = Lactobacillus bombi
  REGION 1..380: note = tr|A0A347SQ92|A0A347SQ92_9LACO Queuine tRNA-ribosyltransferase OS=Lactobacillus bombi OX=1303590; GN = tgt PE=3 SV=1
MVQPIRYRLIKKEKHTGARLGELITPHGTFPTPIFMPVGTQASVKTMAPEELKEMGASVILANTYHLWLRPGSPLVKEAGGLHQFMNWDRGILTDSGGFQVFSLAKRRGISEEGVTFKSHLDGQKMFLSPEKAIHIENDLGPDIMMSLDECPPFFESYNYLKASVERTSRWAERGLKAHRNPDTQGIFGIVQGGGYQDLRQQSAHDLTSLDFAGYSIGGLSVGESKAEMNHVLDFTTPLLPENKPRYLMGVGTADSLIDGVIRGIDMFDCVLPTRIARNGTCMTSQGRLVVKNAQYAHDFTPLDPECDCYACRNYTRAYIRHLLQVDETFGIHLTSYHNLYYLIHLMAQVRQAIVDDNLLELRDQVFEKYGFNQKNAKNF

SEQ ID NO: 56528 - protein, 380 aa, unidentified
  source 1..380: note = Lactobacillus bombi
  REGION 1..380: note = tr|A0A417ZII7|A0A417ZII7_9LACO Queuine tRNA-ribosyltransferase OS=Lactobacillus bombi OX=1303590; GN = tgt PE=3 SV=1
MVQPIRYRLIKKEKHTGARLGELITPHGTFPTPIFMPVGTQASVKTMAPEELKEMGASVILANTYHLWLRPGSPLVKEAGGLHQFMNWDRGILTDSGGFQVFSLAKRRGISEEGVTFKSHLDGQKMFLSPEKAIHIENDLGPDIMMSLDECPPFFESYDYLKASVERTSRWAERGLKAHRNPDTQGIFGIVQGGGYQDLRQQSAHDLTSLDFAGYSIGGLSVGESKAEMNHVLDFTTPLLPENKPRYLMGVGTADSLIDGVIRGIDMFDCVLPTRIARNGTCMTSQGRLVVKNAQYAHDFTPLDPECDCYACRNYTRAYIRHLLQVDETFGIHLTSYHNLYYLIHLMAQVRQAIVDDNLLELRDQVFEKYGFNQKNAKNF

SEQ ID NO: 56529 - protein, 380 aa, unidentified
  source 1..380: note = Lactobacillus brantae
  REGION 1..380: note = tr|A0A0R2AXE0|A0A0R2AXE0_9LACO Queuine tRNA-ribosyltransferase OS=Lactobacillus brantae DSM 23927; OX = 1423727 GN=tgt PE=3 SV=1
MEPAVKYRLIHQDKHSGARLGEIITPHGTFPTPMFMPVGTLASVKTMAPEELDEMGANIILANTYHLWLRPGEELIEEAGGLHKFMNWDKGILTDSGGFQVFSLAEMRNISEEGVRFKNHLNGAKMFLSPEKAIAIENALGPDIMMSFDECPPFFESYDYVKKSVERTSRWAERGLKAHQNPDWQALFGIVQGAGFKDLRQQSARDLVSMDFPGYSIGGLSVGESKEEMNHVLDFTTPLLPENKPRYLMGVGSADALIDGALRGIDMFDCVLPTRIARNGTVMTSHGRLVVKNAKYAHDFGPLDDNCNCYTCRNYSRAYVRHLIHSDEAFGMRLATYHNLYFLLNLMKNVREAIANDQLLEFREAFFEEYGYNAANAKNF

SEQ ID NO: 56530 - protein, 380 aa, Lactobacillus brevis
  REGION 1..380: note = tr|C2D483|C2D483_LACBR Queuine tRNA-ribosyltransferase OS=Lactobacillus brevis subsp. gravesensis ATCC 27305 OX=525310 GN=tgt PE=3 SV=1
MQPAISYRLIKKEKHTGARLGEITTPHGTFRTPIFMPVGTQATVKTLAPEELNDMGATIILANTYHLWLRPGEDIVKEAGGLHKFMNWDHGILTDSGGFQVFSLAKNRDITEKGVTFKNEINGDRMFLSPEKAIQIENDLGPDIMMSLDECPPFFETYDYVKKSVERTSRWAERGLKAHRNPDTQGLFGIVQGAGFEDLRKQSAQDLVSLDFPGYSIGGLSVGESKAEMNRILETTTPLLPETKPRYLMGVGATDSLIDGVIRGIDMFDCVLPTRIARNGTVMTSHGRLVVKNAQYARDFRPLDDQCNCYTCRNYSRAYIRHLIKSGETFGLRLASYHNLYYLIHLMKRVQQAIMNDNLLDLRAEVFEQYGYNKANAKNF

SEQ ID NO: 56531 - protein, 381 aa, Lactobacillus brevis
  REGION 1..381: note = tr|U2QQF1|U2QQF1_LACBR Queuine tRNA-ribosyltransferase OS=Lactobacillus brevis ATCC 14869 = DSM 20054 OX=649758 GN=tgt PE=3 SV=1
MEPAIKYHLIKTEKHTGARLGELITPHGTFKTPMFMPVGTQAAIKGAISPEELDEMGSQVILANTYHLWLQPGPDLVQEAGGLHKFMNWDKGILTDSGGFQVFSLAKHRKLTEEGVHFRNELNGDRLFLSPEKAIDIQNKLGPDIMMSLDECPPFFESYDYVKHSLERTSRWAERGLRAHANPATQGLFGIVQGAGFEDLRRQSAKDLVSLDFPGYSIGGLSVGESKAEMNRVLDFTTPLLPTNKPRYLMGVGTADSLIDGVMRGVDMFDCVLPTRIARKGTCMTTHGRLVVKNAAYAHDFRPLDPDCDCYTCRNYTRAYLRHLFKADEAFGQRLASYHNLYFLHQLMKRVRQAIMDDNLTELREEVFETYGYNAEHPKNF

SEQ ID NO: 56532 - protein, 380 aa, Lactobacillus buchneri
  REGION 1..380: note = tr|A0A4R5NN56|A0A4R5NN56_LACBU Queuine tRNA-ribosyltransferase OS=Lactobacillus buchneri DSM 20057 OX=1423728 GN=tgt PE=3 SV=1
MQPAISYRLIKKEKHTGARLGEITTPHGTFKTPMFMPVGTQATVKTLAPEELEQMGSTIILANTYHLWLRPGEDIVKEAGGLHKFMNWHKGILTDSGGFQVFSLAKNRDITEEGVTFKNEINGSKMFLSPEKAIQIENDLGPDIMMSLDECPPFFESYDYVKKSVERTSRWAERGLKAHRNPDWQGLFGIVQGAGFEDLRKQSARDLVSLDFPGYSIGGLSVGESKQEMNRILESTSPLLPENKPRYLMGVGATDSLIDGVIRGIDMFDCVLPTRIARNGTVMTSHGRLVVKNAKYARDFTPLDDHCDCYTCRNYTRAYIRHLMKTDESFGMRLCSYHNLYYLIHLMKRVQQAIMDDNLLDLRAEVFEQYGYNKPNPKNF

SEQ ID NO: 56533 - protein, 380 aa, Lactobacillus buchneri; identical to SEQ ID NO: 56532
  REGION 1..380: note = tr|A0A4U0D1J6|A0A4U0D1J6_LACBU Queuine tRNA-ribosyltransferase OS=Lactobacillus buchneri OX=1581; GN = tgt PE=3 SV=1

SEQ ID NO: 56534 - protein, 381 aa, Lactobacillus cacaonum
  REGION 1..381: note = tr|A0A0R2CF82|A0A0R2CF82_9LACO Queuine tRNA-ribosyltransferase OS=Lactobacillus cacaonum DSM 21116 OX=1423729 GN=tgt PE=3 SV=1
MTEPAIKYRLIKKEKHTGARLGEIITPHGTFPTPMFMPVGTQASVKSLAPEELDEMGANIILSNTYHLWLRPGEKLVEEAGGLHQFMNWKKGILTDSGGFQVFSLAKMRDITEQGVHFKSHLSGEKLFLSPEKAIHIQNALGSDIMMSFDECPPFFESYDYIKKSVERTSRWAQRGLEAHLHADRQGLFGIVQGGGHKDLRELSARQLVGMDFPGYSIGGLSVGESKAEMNHVLDFTTPLLPENKPRYLMGVGSADALIDGVIRGVDMFDCVLPTRIARNGTCMTSSGRLVVKNAVYAHDFRPLDEKCDCYTCRNFTRAYIRHLIKADEIFGLRLASYHNLYFLLNLMKNVRQAIMDDNLLEFKESFFEEYGFNAKDARNF

SEQ ID NO: 56535 - protein, 379 aa, Lactobacillus camelliae
  REGION 1..379: note = tr|A0A0R2FDG2|A0A0R2FDG2_9LACO Queuine tRNA-ribosyltransferase OS=Lactobacillus camelliae DSM 22697 = JCM 13995 OX=1423730 GN=tgt PE=3 SV=1
MPALEYHLKHIDKHSGARLGEIVTPHGTFPTPMFMPVGTQATVKTLAPEELKTMGAGVILANTYHLWLRPGEDIVEEAGGLHKFMNWDRGLLTDSGGFQVFSLAKNRDITEEGVTFRNHLNGAKMFLSPEKAIGIENALGPDIMMSLDECPPFFESYDYVKASVARTSRWAERGLKAHQHPDRQALFGIVQGAGFRDLRAQSAKDLVSLDFPGYSIGGLSVGESKQEMNHVLDFTVPMLPANKPRYLMGVGSPDALIDGVLRGIDMFDCVLPTRIARKGTVMTSYGRLVVKNAQYARDFTPLDDNCDCYTCRNYSRAYIRHLLKANESFGERLTSYHNVYFLLHLMKQVREAIAEDALNDFRQDFFARYGYFKPNAKNF

SEQ ID NO: 56536 - protein, 381 aa, Lactobacillus capillatus
  REGION 1..381: note = tr|A0A0R1MFB8|A0A0R1MFB8_9LACO Queuine tRNA-ribosyltransferase OS=Lactobacillus capillatus DSM 19910 OX=1423731 GN=tgt PE=3 SV=1
MTEPAIKYRLIKKEKHTGARLGEIITPHGAFPTPMFMPVGTQASVKSLAPEELDAMGANIILSNTYHLWLRPGEELVKEAGGLHKFMNWPKGILTDSGGFQVFSLAKMRDITEEGVHFRSHLSGEKLFLSPEKAIQIENALGADIMMSFDECPPFFETYDYIKKSVERTSRWAERGLKAHQNEATQGLFGIVQGGGHKALRAQSAHDLVSMDFPGYSIGGLSVGESKAEMNHVLSFTTPMLPENKPRYLMGVGSADALIDGVIRGVDMFDCVLPTRIARNGTCMTSHGRLVVKNAVYAHDFRPIDDRCNCYTCRNFSRAYIRHLIKADETFGLRLTSYHNLYFLIHLMQQVRQAIKDDNLLEFRESFFEEYGFNSKNPRNF

SEQ ID NO: 56537 - protein, 380 aa, Lactobacillus casei
  REGION 1..380: note = tr|A0A125U605|A0A125U605_LACCD Queuine tRNA-ribosyltransferase OS=Lactobacillus casei (strain BD-II) OX=998820 GN=tgt PE=3 SV=1
MEPAVKYRLIHQDKHSGARLGELITPHGTFPTPMFMPVGTQASVKTMAPEELDTMGATVILANTYHLWLRPGPELIEEAGGLHKFMNWHKGILTDSGGFQVFSLADTRHITEEGVTFKNHLNGAKMFLSPEKAIAIENALGPDIMMSLDECPPFFESYDYVKKSVARTSRWAERGLQAHKNPDWQALFGIVQGAGFKDLREQSAKDLVSMDFPGYSIGGLSVGESKDEMNHVLDFTTPLLPENKPRYLMGVGSADALIDGALRGIDMFDCVLPTRIARNGTCMTSRGRIVIKNAKYAHDFGPLDPNCDCYTCRNYSRAYIRHLIHVGEAFGIRLTTYHNLYFLLHLMQQVREAIANDDLLAFREDFFEAYGYNKEKAKNF

SEQ ID NO: 56538 - protein, 380 aa, Lactobacillus casei
  REGION 1..380: note = tr|A0A510WS19|A0A510WS19_LACCA Queuine tRNA-ribosyltransferase OS=Lactobacillus casei OX=1582; GN = tgt PE=3 SV=1
MEPAVKYRLIHQDKHSGARLGELITPHGTFPTPMFMPVGTQASVKTMAPEELDTMGATVILANTYHLWLRPGPELIEEAGGLHKFMNWHKGILTDSGGFQVFSLADTRHITEEGVTFKNHLNGAKMFLSPEKAIAIENALGPDIMMSLDECPPFFESYDYVKKSVARTSRWAERGLQAHKNPDWQALFGIVQGAGFKDLREQSAKDLVSMDFPGYSIGGLSVGESKDEMNHVLDFTTPLLPENKPRYLMGVGSADALIDGALRGIDMFDCVLPTRIARNGTCMTSRGRLVIKNAKYAHDFGPLDPNCDCYTCRNYSRAYIRHLIHVGEAFGIRLTTYHNLYFLLHLMQQVREAIANDDLLAFREDFFEAYGYNKEKAKNF

SEQ ID NO: 56539 - protein, 381 aa, Lactobacillus ceti
  REGION 1..381: note = tr|A0A0R2KI20|A0A0R2KI20_9LACO Queuine tRNA-ribosyltransferase OS=Lactobacillus ceti DSM 22408; OX = 1122146 GN=tgt PE=3 SV=1
MTEPAIKYRLIKKEKHTGARLGEIITPHGTFPTPIFMPVGTQATVKAISPEELKAMGADIILSNTYHLWLRPGEDLVEEAGGLHKFMNWDKGILTDSGGFQVFSLAQMRDITEEGVHFKSHLSGEKLFLSPEKAIGIENALGADVMMSFDECPPFYETYDYIQKSVARTSRWAERGLKAHKNPDTQGLFGIVQGAGYEDLRRQSAQDLVSLDFPGYSIGGLSVGESKDEMNRVLDFTTPMLPENKPRYLMGVGSPDALIDGVIRGVDMFDCVLPTRIARNGTCMTSQGRVVVKNAKYARDFGPLDPKCDCYTCKNFSRAYIRHLFKADETFGLRLTSYHNLHFLINLMKDVRQAIMDDNLLEFREAFFEEYGYNADNKRNF

SEQ ID NO: 56540 - protein, 380 aa, unidentified
  source 1..380: note = Lactobacillus chiayiensis
  REGION 1..380: note = tr|A0A4Q1TXA8|A0A4Q1TXA8_9LACO Queuine tRNA-ribosyltransferase OS=Lactobacillus chiayiensis; OX = 2100821 GN=tgt PE=3 SV=1
MEPAVKYRLIHQDKHSGARLGELITPHGTFPTPMFMPVGTQASVKTMAPEELDTMGATVILANTYHLWLRPGPELIEEAGGLHRFMNWQKGILTDSGGFQVFSLADTRHITEDGVTFKNHLNGAKMFLSPEKAIAIENALGPDIMMSLDECPPFFESYDYVKKSVARTSRWAERGLKAHKNPDWQALFGIVQGAGFRDLREQSAKDLVSMDFPGYSIGGLSVGESKEEMNHVLDFTTPLLPQDKPRYLMGVGSADALIDGALRGIDMFDCVLPTRIARNGTCMTSRGRLVIKNAKYAHDFGPLDPNCDCYACRNYSRAYIRHLIHVGEAFGIRLTTYHNLYFLLHLMQQVREAIANDDLLAFREDFFEAYGYNKAKAKNF

SEQ ID NO: 56541 - protein, 355 aa, Lactobacillus coleohominis
  REGION 1..355: note = tr|C7XWK3|C7XWK3_9LACO tRNA-guanine transglycosylase; OS = Lactobacillus coleohominis 101-4-CHN OX=575594; GN = HMPREF0501_01006 PE=4 SV=1
MKNQFKILASRSEKEQLRRGELITDHGSIQTPAVIPFAKREAVSPLTTTELASLECQALVIPALPFFVQLGEKAMQKLGSLQRFMNWSRPLMSLVAEFGPMQKVKKNAGELGVRYEEPFTKAHKRLTSYQANQFQIMGKADIQFPIYQVPDYYSPVDDLKTAVELNLTWQKQINSEWGVVVGAGLRALRSHCITELGDKCGYLIADLPDEPEEWSRIVKETCELLPKDRPRMIIASDSWQIFAALRLGVDIVITASPMETAHRGELYTATGSCRIGHEKYQDDSRLITVHATTQVTYAYLHYLNHQRDPLADHYLGLNNWSWINSFAKQLRDAIQAENSVKINDLWRIAKYYTKA

SEQ ID NO: 56542 - protein, 380 aa, Lactobacillus collinoides
  REGION 1..380: note = tr|A0A166H5D6|A0A166H5D6_LACCL Queuine tRNA-ribosyltransferase OS=Lactobacillus collinoides; OX = 33960 GN=tgt PE=3 SV=1
MEPAIKYRLIKTEKHTGARLGELITPHGTFPTPMFMPVGTQATVKSLAPEELDEMGAGVILANTYHLWLQPGEDLVKEAGGLHKFMNWQKPILTDSGGFQVFSLADNRNITEEGVHFRNPSNGDKLFLSPEKAMQIENDLGPDIMMSLDECPPFFESYDYIKHSVERTSRWAERGLKAHSNPDWQGLFGIVQGAGYEDLRRQSANDLVSMDFPGYSIGGLSVGESKAEMNQVLSFTTPMLPTNKPRYLMGVGSPDSLIDGVMRGIDMFDCVLPTRIARRGTCMTSHGRVTVKNAKYERDFGPIDDNCDCYACRNYSRAYIRHLFKADESFGLRLTSYHNLYFLLHLMKQVRQAIMDDNLLDFKENFFEAYGYNVPNPKNF

SEQ ID NO: 56543 - protein, 380 aa, Lactobacillus collinoides; identical to SEQ ID NO: 56542
  REGION 1..380: note = tr|A0A0R2B6G4|A0A0R2B6G4_LACCL Queuine tRNA-ribosyltransferase OS=Lactobacillus collinoides DSM 20515 = JCM 1123 OX=1423733 GN=tgt PE=3 SV=1

SEQ ID NO: 56544 - protein, 380 aa, Lactobacillus composti
  REGION 1..380: note = tr|X0PEI9|X0PEI9_9LACO Queuine tRNA-ribosyltransferase OS=Lactobacillus composti DSM 18527 = JCM 14202 OX=1423734 GN=tgt PE=3 SV=1
MTAAITYRLIKQDKHTGARLGEITTPHGTFKTPMFMPVGTLASVKTMAPEELKDMGAGIILSNTYHLWLRPGEEIVKEAGGLHKFMNWDRGVLTDSGGFQVFSLADSRNITEEGVTFKNHLNGAKMFLSPEKALQIENDLGADIIMSLDECPPFFESYDYVKKSVARTTRWAARGLEAHAHPDTQGLFGIVQGAGFEDLRTQSAKDLVSLDFPGYSIGGLSVGESKAEMNRVLDFTTPLLPENKPRYLMGVGSPDALIDGVIRGIDMFDCVLPTRIARNGTVMTSQGRLVVKNAKYAKDFTPLDPNCDCYACRNYTRAYIRHLIKADEIFGIHLTSYHNLYFLLHLMQQVQQAIMDDDLLAFRQDFFETYGFNKEKARNF

SEQ ID NO: 56545 - protein, 380 aa, Lactobacillus concavus
  REGION 1..380: note = tr|A0A0R1W7R5|A0A0R1W7R5_9LACO Queuine tRNA-ribosyltransferase OS=Lactobacillus concavus DSM 17758 OX=1423735 GN=tgt PE=3 SV=1
MTSPIQYRLIKKEKHTGARLGELITPHGTFPTPMFMPVGTQASVKSLAPEELDEMGAGVILANTYHLWLRPGQEIVKEAGGLHKFMNWPKGILTDSGGFQVFSLAKIRDITEEGVHFRSHLSGEKLFLSPEKAIGIENDLGPDIMMSFDECPPYYESHDYVKKSIERTTRWAERGLKAHRNPDTQGLFGIVQGAGFKDLRKQSAADLVSMDFPGYSIGGLSVGESKPEMNEMLEFTTPLLPENKPRYLMGVGSADSLIDGVIRGVDMFDCVLPTRIARNGTCMTSHGRLVVKNAIYAHDFRPIDDQCNCYTCRNFSRAYVRHLIKADETFGLRLTSYHNLYFLLNVMKQVRQAIMDDNLLDFREAFFESYGFNKENAKNF

SEQ ID NO: 56546 - protein, 380 aa, Lactobacillus coryniformis
  REGION 1..380: note = tr|J2Z5X3|J2Z5X3_9LACO Queuine tRNA-ribosyltransferase OS=Lactobacillus coryniformis subsp. coryniformis CECT 5711 OX=1185325 GN=tgt PE=3 SV=1
MEPAIKYHLIKKEKHTGARLGEIITPHGTFPTPMFMPVGTNASVKTMAPEELDKMGANIILANTYHMWLRPGEEIVKEAGGLHKFMNWDKGILTDSGGFQVFSLAKMRDITEEGVHFKNHLNGAKMFLSPEKAMQIENDLGPDIMMSLDECPPFFESYDYVKKSVARTSRWAERGLKAHRNPATQGLFGIVQGAGFKDLREQSARDLVSLDFPGYSIGGLSVGESKAEMNHVLDFTTPLLPENKPRYLMGVGSADALIDGAIRGIDMFDCVLPTRIARNGTVMTSHGRLVVKNAKYAHDFGPLDDNCDCYACRNYSRAYIRHLIKADEIFGIHLTSYHNLYFLLHLMQQVRQAIMDDNLLEFREAFFESYGFNQKNARNF

SEQ ID NO: 56547 - protein, 380 aa, Lactobacillus coryniformis; identical to SEQ ID NO: 56546
  REGION 1..380: note = tr|A0A0R1F039|A0A0R1F039_9LACO Queuine tRNA-ribosyltransferase OS=Lactobacillus coryniformis subsp. coryniformis KCTC 3167 = DSM 20001 OX=913848 GN=tgt; PE = 3 SV=1

SEQ ID NO: 56548 - protein, 380 aa, Lactobacillus crustorum
  REGION 1..380: note = tr|A0A1L7ICG4|A0A1L7ICG4_9LACO Queuine tRNA-ribosyltransferase OS=Lactobacillus crustorum; OX = 392416 GN=tgt PE=3 SV=1
MEPAVKYTLLKKEKHTGARLGLLETPHGTFETPIFMPVGTEASVKNMAPEDLDKIGATIILANTYHLWLRPGEDIVKEAGGLHKFMNWDKGILTDSGGFQVFSLANTRDITEAGVHFRNHLNGRREFLSPEKAMKIENYLGPDIMMSLDECPPFFESYDYIKKSVARTSRWAERGLKAHRNPDWQALFGIVQGAGFEDLRKQSARDLVSMDFPGYSIGGLSVGESKSEMNRVLNFTTPMLPENKPRYLMGVGTADSLIDGVIRGIDMFDCVLPTRIARNGTCMTSHGRLVVKNGKYARDFGPLDDNCDCYVCRNYSRAYIRHLINANELFGTHLTSYHNLYFLLNLMKGVRQAIRDDNLLEFREHVFEDYGFNQENAKNF

SEQ ID NO: 56549 - protein, 380 aa, Lactobacillus crustorum
  REGION 1..380: note = tr|A0A512GTN1|A0A512GTN1_9LACO Queuine tRNA-ribosyltransferase OS=Lactobacillus crustorum; OX = 392416 GN=tgt PE=3 SV=1
MEPAVKYTLLKKEKHTGARLGLLETPHGTFETPIFMPVGTEASVKNMAPEDLDKIGATIILANTYHLWLRPGEDIVKEAGGLHKFMNWDKGILTDSGGFQVFSLANTRDITEAGVHFRNHLNGRREFLSPEKAMKIENYLGPDIMMSLDECPPFFESYDYIKKSVARTSRWAERGLKAHRNPDWQALFGIVQGAGFEDLRKQSARDLVSMDFPGYSIGGLSVGESKSEMNRVLNFTTPMLPENKPRYLMGVGTADSLIDGVIRGIDMFDCVLPTRIARNGTCMTSHGRLVVKNGKYARDFGPLDDNCACYVCRNYSRAYIRHLINANELFGTHLTSYHNLYFLLNLMKGVRQAIRDDNLLEFREHVFEDYGFNQENAKNF

SEQ ID NO: 56550 - protein, 49 aa, unidentified
  source 1..49: note = Lactobacillus curieae
  REGION 1..49: note = tr|A0A401FMY8|A0A401FMY8_9LACO tRNA-guanine transglycosylase OS=Lactobacillus curieae OX=1138822; GN = NBRC111893_1886 PE=4 SV=1
MRLCSLHNLHYLINLMKRVQQAIIDDNLLDLRAEVFEQYGYNEANPKNF

SEQ ID NO: 56551 - protein, 380 aa, unidentified
  source 1..380: note = Lactobacillus curieae
  REGION 1..380: note = tr|A0A1S6QKR0|A0A1S6QKR0_9LACO Queuine tRNA-ribosyltransferase OS=Lactobacillus curieae; OX = 1138822 GN=tgt PE=3 SV=1
MQPAITYRLIKKEKHTGARLGEITTPHGTFRTPIFMPVGTQATVKTLAPEELDDMGATIILANTYHLWVRPGEDIVEEAGGLHKFMNWDKGILTDSGGFQVFSLAKNRDITEDGVTFKNEINGSKMFLSPEKAMAIENALGPDIMMSLDECPPYFESYDYVKKSVERTSRWAERGLKAHKNPDWQGLFGIVQGAGFEDLRKQSAEDLVSLDFPGYSIGGLSVGESKQEMNRVLDFTAPLLPEDKPRYLMGVGATDSLIDGVIRGVDMFDCVLPTRIARNGTVMTSHGRLVVKNAKYARDFTPMDDQCDCYACRNYTRAYIRHLMKTDEAFGMRLCSIHNLHYLIHLMKRVQQAIIDDNLLDLRAEVFEQYGYNKPNPKNF

SEQ ID NO: 56552 - protein, 271 aa, Lactobacillus curvatus
  REGION 1..271: note = tr|A0A0B2XLN5|A0A0B2XLN5_LACCU Queuine tRNA-ribosyltransferase (Fragment) OS=Lactobacillus curvatus OX=28038 GN=OA78_1704 PE=3 SV=1
SGYADKFVQKFGLNLQSTLSPEKAIQVENALGADIMMSFDECPPFFESYDYVKKSVERTSRWAERGLIAHQNPATQGLFGIVQGAGFEDLRRQSARDLVGMDFPGYSIGGLSVGESKGEMNRVLDFTTPMLPEDKPRYLMGVGSPDALIDGVIRGVDMFDCVLPTRIARNGTTMTSQGRLVVKNAKYSEDFRPLDPKCDCYVCKNYTRAYIRHLIKADETFGIHLTSYHNLYFLINLMHQVQDAIEQDNLLEFREAFFEEYGYNEKNTRNF

SEQ ID NO: 56553 - protein, 380 aa, Lactobacillus curvatus
  REGION 1..380: note = tr|A0A1X7QMA2|A0A1X7QMA2_LACCU Queuine tRNA-ribosyltransferase OS=Lactobacillus curvatus OX=28038; GN = tgt PE=3 SV=1
MEPAIKYRLIKKEKHTGARLGEIVTPHGTFKTPMFMPVGTQASVKTMAPEELKEMGAGIILSNTYHLWLRPGEDIVEKAGGLHKFMNWDRGVLTDSGGFQVFSLAKLRDISEEGVAFKSHLSGEKLFLSPEKAIQVENALGADIMMSFDECPPFFESYDYVKKSVERTSRWAERGLIAHQNPATQGLFGIVQGAGFEDLRRQSARDLVGMDFPGYSIGGLSVGESKGEMNRVLDFTTPMLPEDKPRYLMGVGSPDALIDGVIRGVDMFDCVLPTRIARNGTTMTSQGRLVVKNAKYSEDFRPLDPKCDCYVCKNYTRAYIRHLIKADETFGIHLTSYHNLYFLINLMHQVQDAIEQDNLLEFREAFFEEYGYNEKNTRNF

SEQ ID NO: 56554 - protein, 380 aa, Lactobacillus dextrinicus
  REGION 1..380: note = tr|A0A0R2BEY7|A0A0R2BEY7_9LACO Queuine tRNA-ribosyltransferase OS=Lactobacillus dextrinicus DSM 20335 OX=1423738 GN=tgt PE=3 SV=1
MTEPIRYHLIKKEKHTGARLGELITPHGTFPTPMFMPVGTQASVKSIAPEELDEMGAGVILANTYHLWLRPGQEIVKEAGGLHKFMNWDKGILTDSGGFQVFSLAKIRDITEEGVHFRSHLSGEKLFLSPEKAIEIENDLGPDIMMSFDECPPYYESYDYVKKSIERTSRWAERGLKAHRNPDTQGLFGIVQGAGFKDLRKQSAAELTAMDFPGYSIGGLSVGESKAEMNEMLEFTTPLLPETKPRYLMGVGSPDALIDGVIRGIDMFDCVLPTRIARNGTCMTSHGRLVVKNAAYAHDFGPIDDNCDCYTCRNFSRAYVRHLIKADETFGLRLTSYHNLYFLLHTMKQVRQAIMDDNLLDFRAEFFENYGFNKPNARNF

SEQ ID NO: 56555 - protein, 380 aa, Lactobacillus dextrinicus; identical to SEQ ID NO: 56554
  REGION 1..380: note = tr|A0A5J6USX2|A0A5J6USX2_9LACO tRNA guanosine(34) transglycosylase Tgt OS=Lactobacillus dextrinicus OX=51664; GN = tgt PE=4 SV=1

SEQ ID NO: 56556 - protein, 380 aa, Lactobacillus diolivorans
  REGION 1..380: note = tr|A0A0R1SKD9|A0A0R1SKD9_9LACO Queuine tRNA-ribosyltransferase OS=Lactobacillus diolivorans DSM 14421 OX=1423739 GN=tgt PE=3 SV=1
MQPAITYRLIKKEKHTGARLGEITTPHGTFRTPIFMPVGTQATVKTLAPEELDKMGATIVLANTYHLWLRPGEDIVQQAGGLHKFMNWNKGILTDSGGFQVFSLAKNRDITEKGVTFKNEINGAKMFLSPEKAIQIENALGPDIMMSLDECPPFFESYDYVKKSVERTSRWAERGLKAHQNPDWQGLFGIVQGAGFEDLRKQSANDLVSLDFPGYSIGGLSVGESKSEMNRILEATTPLLPENKPRYLMGVGVTDSLIDGVIRGVDMFDCVLPTRIARNGTVMTSHGRLVVKNAAYARDFRPLDDHCNCYACRNYSRAYIRHLVKSNETFGLRLCSYHNLYYLIHLMKRVQQAILDDNLLDLRAEVFEQYGYNQPNAKNF

SEQ ID NO: 56557 - protein, 380 aa, Lactobacillus fabifermentans
  REGION 1..380: note = tr|W6T6K0|W6T6K0_9LACO Queuine tRNA-ribosyltransferase OS=Lactobacillus fabifermentans T30PCM01 OX=1400520 GN=tgt PE=3 SV=1
MEPAIKYRLIKKEKHTGARLGELITPHGTFPTPMFMPVGTQASVKSLAPEELDAMGAGVILSNTYHLWLRPGEEIVEEAGGLHQFMNWKKGILTDSGGFQVFSLAKNRDITEEGVHFKDHLSGAKRFLSPEKAIHVENALGPDIMMSLDECPPFFESYDYVRKSVARTSRWAERGLKAHQHPDYQGLFGIVQGAGFKDLREQSAKDLVAMDFPGYSIGGLSVGESKAEMNHVLDFTTPLLPENKPRYLMGVGSADALIDGAIRGVDMFDCVLPTRIARNGTCMTSHGRLVVKNAKYAHDFTPLDDNCDCYTCRNFTRAYIRHLIKADETFGLRLTSYHNLYFLLHLMQQVRQAIMDDNLLEFRENFFEMYGFNKKNAKNF

SEQ ID NO: 56558 - protein, 380 aa, Lactobacillus fabifermentans; identical to SEQ ID NO: 56557
  REGION 1..380: note = tr|A0A0R2NZJ8|A0A0R2NZJ8_9LACO Queuine tRNA-ribosyltransferase OS=Lactobacillus fabifermentans DSM 21115 OX=1413187 GN=tgt PE=3 SV=1

SEQ ID NO: 56559 - protein, 380 aa, Lactobacillus farciminis
  REGION 1..380: note = tr|A0A4R5NEH9|A0A4R5NEH9_9LACO Queuine tRNA-ribosyltransferase OS=Lactobacillus farciminis; OX = 1612 GN=tgt PE=3 SV=1
MEPAVKYTLIKKEKHTGARLGMLETPHGTFETPIFMPVGTEASVKNMAPEDLEKIGATIVLANTYHLWLRPGEDIVKEAGGLHKFMNWDKGILTDSGGFQVFSLANTRDITEAGVHFRNHLNGRREFLSPEKAIKIENYLGPDIMMSLDECPPFFESYDYIKKSVARTSRWAERGLKAHRNPDWQALFGIVQGAGFEDLRKQSAEDLVSMDFPGYSIGGLSVGESKSEMNRVLDFTTPLLPENKPRYLMGVGTADSLIDGVIRGIDMFDCVLPTRIARNGTCMTTHGRLVVKNAKYARDFGPIDPDCDCYVCRNYSRAYIRHLINANELFGTHLTSYHNLYFLLNLMKGVRQAIKDDNLLEFREHVFEDYGFNKENAKNF

SEQ ID NO: 56560 - protein, 380 aa, Lactobacillus farciminis
  REGION 1..380: note = tr|A0A0H4LPF9|A0A0H4LPF9_9LACO Queuine tRNA-ribosyltransferase OS=Lactobacillus farciminis; OX = 1612 GN=tgt PE=3 SV=1
MEPAVKYTLIKKEKHTGARLGMLETPHGTFETPIFMPVGTEASVKNMAPEDLEKIGATIVLANTYHLWLRPGEDIVKEAGGLHKFMNWDKGILTDSGGFQVFSLAKTRDITEAGVHFRNHLNGRREFLSPEKAIKIENYLGPDIMMSLDECPPFFESYDYIKKSVARTSRWAERGLKAHRNPDWQALFGIVQGAGFEDLRKQSAKDLVSMDFPGYSIGGLSVGESKSEMNRVLDFTTPLLPENKPRYLMGVGTADSLIDGVIRGIDMFDCVLPTRIARNGTCMTTHGRLVVKNAKYARDFGPIDPDCDCYVCRNYSRAYIRHLINANELFGTHLTSYHNLYFLLNLMKGVRQAIKDDNLLEFREHVFEDYGFNKENAKNF

SEQ ID NO: 56561 - protein, 247 aa, Lactobacillus farraginis
  REGION 1..247: note = tr|X0P969|X0P969_9LACO Queuine tRNA-ribosyltransferase OS=Lactobacillus farraginis DSM 18382 = JCM 14108 OX=1423743 GN=JCM14108_84 PE=3 SV=1
MQPAISYRLIKKEKHTGARLGEITTPHGTFRTPIFMPVGTQATVKTLAPEELDEMGATIILANTYHLWLRPGEDIVKQAGGLHKFMNWDHGILTDSGGFQVFSLAKNRDISEKGVTFKNEINGDRMFLSPEKAIQIENDLGPDIMMSLDECPPFFETYDYVKKSVERTSRWAERGLKAHRNPQTQGLFGIVQGAGFEDLRKQSASDLVSMDFPGYSIGGLSVGESKAEMNRILEVTTPLLPENKPVI

SEQ ID NO: 56562 - protein, 380 aa, Lactobacillus farraginis
  REGION 1..380: note = tr|A0A0R1VWV1|A0A0R1VWV1_9LACO Queuine tRNA-ribosyltransferase OS=Lactobacillus farraginis DSM 18382 = JCM 14108 OX=1423743 GN=tgt PE=3 SV=1
MQPAISYRLIKKEKHTGARLGEITTPHGTFRTPIFMPVGTQATVKTLAPEELDEMGATIILANTYHLWLRPGEDIVKQAGGLHKFMNWDHGILTDSGGFQVFSLAKNRDISEKGVTFKNEINGDRMFLSPEKAIQIENDLGPDIMMSLDECPPFFETYDYVKKSVERTSRWAERGLKAHRNPQTQGLFGIVQGAGFEDLRKQSASDLVSMDFPGYSIGGLSVGESKAEMNRILEVTTPLLPENKPRYLMGVGVTDSLIDGVIRGIDMFDCVLPTRIARNGTVMTSHGRLVVKNAEYARDFGPLDDQCSCYTCRNYSRAYIRHLIKSGETFGLRLASYHNLYYLIHLMKRVQQAILDDNLLDLRAEVFEQYGYNKPNAKSF

SEQ ID NO: 56563 - protein, 313 aa, Lactobacillus fermentum
  REGION 1..313: note = tr|A0A158SLA4|A0A158SLA4_LACFE K00773 queuine tRNA-ribosyltransferase OS=Lactobacillus fermentum OX=1613; GN = LFER_728 PE=4 SV=1
MTMTSYPLTVPMPVLKLPLLTTDPLTAGELFSHCGVRIVALPLAPAMDAPGAATLGEVGGLGAWLKWEGLTVALPGFGQPLTKVKKNSERVGVHYQLPHGGAKKTVNGAEYEEWLKAAHASVALPLSQAPDHYAPVDDIVRSVAVNAAWGTQTPTGWGVVQGAGLKAARQESIAYLVEQNITNFYLGGFGQPLEDEEWQRSLEMTTDLLPPNGLVMVEAATPFRIQAAIEAGVHLIISDLPLTLARHHRYLQEDLSDVPVEEGAPHGLPKQAWPYLTERHVGLATRLLTKANVKNWTAYFAKKTPGNVKLTGI

SEQ ID NO: 56564 - protein, 378 aa, Lactobacillus floricola
  REGION 1..378: note = tr|A0A0R2DUI8|A0A0R2DUI8_9LACO Queuine tRNA-ribosyltransferase OS=Lactobacillus floricola DSM 23037 = JCM 16512 OX=1423744 GN=tgt PE=3 SV=1
MAAIEYKLLHVDKQTGARLGEVKTPHGTFQTPIFMPVGTQATVKTMSPEDLEKVGAQIILANNYHLWLRPGEEIVKEAGGLHKFMNWNHPILTDSGGFQAFSLTEHVKFNEEGISFKSHLSGEPLFLSPEKAIQVENDLGADIIMSLDMLTDFHNDYAEMQKAVNRTTRWAERGLKAHKNPDTQALFGIVQGGGYEDLRKQSARDLVSLDFPGYSIGGLSVGETKEEMNQVLDYTVPELPENKPRYLMGVGTPDALIDGVIRGIDMFDCVLPTRIARNGTVMTSEGRLVIKNAAYARDFGPLDKNCDCYTCRNYSRAYIRHLLKAKESFGIHLTSYHNLYFLLDLMKQVREAIKNDRLADFRAEFFESYGYNSKHMNF

SEQ ID NO: 56565 - protein, 380 aa, unidentified; identical to SEQ ID NO: 56549
  source 1..380: note = Lactobacillus formosensis
  REGION 1..380: note = tr|A0A2P4R9G8|A0A2P4R9G8_9LACO Queuine tRNA-ribosyltransferase OS=Lactobacillus formosensis; OX = 1617889 GN=tgt PE=3 SV=1

SEQ ID NO: 56566 - protein, 380 aa, Lactobacillus fuchuensis
  REGION 1..380: note = tr|A0A0R1RMB4|A0A0R1RMB4_9LACO Queuine tRNA-ribosyltransferase OS=Lactobacillus fuchuensis DSM 14340 = JCM 11249 OX=1423747 GN=tgt PE=3 SV=1
MEPAIKYRLIKKEKHTGARLGEIITPHGTFKTPMFMPVGTQASVKTMAPEDLKEMGAGIILSNTYHLWLRPGEDIVEKAGGLHKFMNWDRGVLTDSGGFQVFSLAKLRDISEDGVAFRSHLSGEKLFLSPEKAIQVENALGADIMMSFDECPPFFESYDYVKKSVERTSRWAERGLIAHQNPATQGLFGIVQGAGFEDLRKQSARDLVGMDFPGYSIGGLSVGESKGEMNRVLDFTTPMLPEEKPRYLMGVGSPDALIDGVIRGIDMFDCVLPTRIARNGTTMTSQGRLVVKNAKYSEDFRPLDPKCNCYVCKNYTRAYIRHLIKANETFGIHLTSYHNLYFLINLMHQVQDAIEQDNLLEFRAAFFEEYGYNNDNGRNF

SEQ ID NO: 56567 - protein, 380 aa, Lactobacillus fuchuensis; identical to SEQ ID NO: 56566
  REGION 1..380: note = tr|A0A2N9DTR4|A0A2N9DTR4_9LACO Queuine tRNA-ribosyltransferase OS=Lactobacillus fuchuensis; OX = 164393 GN=tgt PE=3 SV=1

SEQ ID NO: 56568 - protein, 380 aa, Lactobacillus futsaii
  REGION 1..380: note = tr|A0A5B7T0C3|A0A5B7T0C3_9LACO Queuine tRNA-ribosyltransferase OS=Lactobacillus futsaii OX=938155; GN = tgt PE=3 SV=1
MEPAVKYTLIKKEKHTGARLGMLETPHGTFETPIFMPVGTEASVKNMAPEDLEKIGATIVLANTYHLWLRPGEDIVKEAGGLHKFMNWNKGILTDSGGFQVFSLANTRDITEAGVHFRNHLNGRREFLSPEKAIKIENYLGPDIMMSLDECPPFFESYDYIKKSVARTSRWAERGLKAHRNPDWQALFGIVQGAGFEDLRKQSAKDLVSMDFPGYSIGGLSVGESKSEMNRVLDFTTPLLPENKPRYLMGVGTADSLIDGVIRGIDMFDCVLPTRIARNGTCMTTHGRLVVKNAKYARDFGPIDPDCDCYVCRNYSRAYIRHLINANELFGTHLTSYHNLYFLLNLMKGVRQAIKDNNLLEFREHVFEDYGFNKANAKNF

SEQ ID NO: 56569 - protein, 381 aa, Lactobacillus ghanensis
  REGION 1..381: note = tr|A0A0R1VLI0|A0A0R1VLI0_9LACO Queuine tRNA-ribosyltransferase OS=Lactobacillus ghanensis DSM 18630 OX=1423750 GN=tgt PE=3 SV=1
MTEPAIKYHLLKKEAHTAARLGKLQTPHGTYPTPMFMPVGTQATVKTLTPEELESMGAGVILSNTYHLWLRPGEKIVEEAGGLHHFMNWKRGILTDSGGFQVFSLAKIRDITEEGVHFRSHLSGEKLFLSPEKAIQIQNALGSDIMMSFDECPPFFESYDYIKRSIERTTRWAERGLKAHQHPERQGLFGIVQGGGHLDLRQQSARDLVSLDFPGYSIGGLSVGESKAEMNHVLENTTPLLPENKPRYLMGVGSPDALIDGVIRGVDMFDCVLPTRIARNGTCMTSHGRLVVKNATYAHDFTPLDDNCDCYVCQNYTRAYLRHLFKADEILGLRLASYHNLYFLLNLMKQIRQAIEDDNLLDFRAEFFENYGFNQKNPRNF

SEQ ID NO: 56570 - protein, 381 aa, unidentified
  source 1..381: note = Lactobacillus ginsenosidimutans
  REGION 1..381: note = tr|A0A0H4QIT0|A0A0H4QIT0_9LACO Queuine tRNA-ribosyltransferase OS=Lactobacillus ginsenosidimutans; OX = 1007676 GN=tgt PE=3 SV=1
MPNPAVKYTLLKKEKHTGARLGLIETPHGTFETPMFMPVGTEATVKNMAPEDLEKIGATIILSNTYHLWLRPGEDIVKEAGGLHKFMNWNKGILTDSGGFQVFSLAKTRDITEAGVHFRNHLNGRREFLSPEKAIQIENDLGPDIMMSLDECPPFFESYDYIKDSVARTSRWAERGLQAHRNPDWQALFGIVQGAGYEDLRKQSAQDLVSMDFPGYSIGGLSVGESKEEMNHVLDFTTPMLPENKPRYLMGVGSADALIDGVIRGIDMFDCVLPTRIARNGTCMTTHGRLVVKNAKYARDFRPIDEDCDCYVCRNYTRAYIRHLINANELFGTHLTSYHNLYFLLKLMADVRQSIKDDNLLEFREHVFEQYGFNKKNAKNF

SEQ ID NO: 56571 - protein, 380 aa, Lactobacillus graminis
  REGION 1..380: note = tr|A0A0R1XAI2|A0A0R1XAI2_9LACO Queuine tRNA-ribosyltransferase OS=Lactobacillus graminis DSM 20719 OX=1423752 GN=tgt PE=3 SV=1
MEPAIKYRLIKKEKHTGARLGEIVTPHGTFKTPMFMPVGTQASVKTMAPEELKAIGAGIILSNTYHLWLRPGEDIVEKAGGLHKFMNWDRGVLTDSGGFQVFSLAKLRDISEDGVAFRSHLSGEKLFLSPEKAIQVENALGADIMMSFDECPPFFESYDYVKKSVERTSRWAERGLIAHQNPATQGLFGIVQGAGFEDLRRQSARDLVGMDFPGYSIGGLSVGESKGEMNRVLDFTTPLLPTDKPRYLMGVGSPDALIDGVIRGVDMFDCVLPTRIARNGTTMTSQGRLVVKNAQYAEDFRPLDPKCNCYVCKNYTRAYIRHLIKADETFGIHLTSYHNLYFLINLMHQVQNAIEQDNLLEFREAFFEEYGYNEKNSRNF

SEQ ID NO: 56572 - protein, 380 aa, Lactobacillus graminis; identical to SEQ ID NO: 56571
  REGION 1..380: note = tr|A0A5J6Z666|A0A5J6Z666_9LACO tRNA guanosine(34) transglycosylase Tgt OS=Lactobacillus graminis OX=60519; GN = tgt PE=4 SV=1

SEQ ID NO: 56573 - protein, 380 aa, Lactobacillus harbinensis
  REGION 1..380: note = tr|A0A0R1X207|A0A0R1X207_9LACO Queuine tRNA-ribosyltransferase OS=Lactobacillus harbinensis DSM 16991 OX=1122147 GN=tgt PE=3 SV=1
MTAPVRYRLIKTEKHTGARLGELITPHGTFPTPMFMPVGTQASVKLMSPEELKEMGAGVILSNTYHLWLRPGPEIVKEAGGLHKFMNWDQGILTDSGGFQVFSLAENRDITEEGVHFRSHLSGEKMFLSPEKAIQIENDLGPDIMMSLDECPPFFESYEYVRDSVARTSRWAERGLKAHCNPDTQGLFGIVQGAGFQDLREQSAKDLVSLDFPGYSIGGLSVGESKAEMNHVLDFTTPLLPENKPRYLMGVGSPDALIDGVIRGIDMFDCVLPTRIARNGTVMTHHGRLIVKNAKYAHDFTPLDPDCDCYTCTHYSRAYIRHLIKADETFGLRLTTYHNLYFLIHLMADVRQAIMDDNLIEFRQNLFDEYGYSDATTKNF

SEQ ID NO: 56574 - protein, 380 aa, Lactobacillus harbinensis
  REGION 1..380: note = tr|A0A510TXY3|A0A510TXY3_9LACO Queuine tRNA-ribosyltransferase OS=Lactobacillus harbinensis; OX = 304207 GN=tgt PE=3 SV=1
MTAPVRYRLIKTEKHTGARLGELITPHGTFPTPMFMPVGTQASVKLMSPEELKEMGAGVILSNTYHLWLRPGPEIVKEAGGLHKFMNWDQGILTDSGGFQVFSLAENRDITEEGVHFRSHLSGEKMFLSPEKAIQIENDLGPDIMMSLDECPPFFESYEYVRDSVARTSRWAERGLKAHRNPDTQGLFGIVQGAGFQDLREQSAKDLVSLDFPGYSIGGLSVGESKAEMNHVLDFTTPLLPENKPRYLMGVGSPDALIDGVIRGIDMFDCVLPTRIARNGTVMTHHGRLIVKNAKYAHDFTPLDPDCDCYTCTHYSRAYIRHLIKADETFGLRLTTYHNLYFLIHLMADVRQAIMDDNLIEFRQNLFDEYGYSDATTKNF

SEQ ID NO: 56575 - protein, 380 aa, Lactobacillus hayakitensis
  REGION 1..380: note = tr|A0A0R1WN80|A0A0R1WN80_9LACO Queuine tRNA-ribosyltransferase OS=Lactobacillus hayakitensis DSM 18933 = JCM 14209 OX=1423755 GN=tgt PE=3 SV=1
MTEPAIKYRLIKTDKHTGARLGEIITPHGTFPTPMFMPVGTLASVKAMAPEELDEMGANIILSNTYHLWLRPGEDLVEQAGGLHKFMNWDKGILTDSGGFQVFSLAELRNIKEEGVYFRNHLNGDKLFLSPEKAIHIENALGADIMMSFDECPPFFESYDYIKKSVERTSRWAERGLKAHKNPDRQGLFGIVQGGGYKDLRQQSARDLVSMDFPGYSIGGLSVGESKEEMNRVLDFTTPMLPENKPRYLMGVGSPDALIDGVIRGVDMFDCVLPTRIARNGTCMTSQGRLVVKNKKYERDFSPIDPKCNCYTCRNYTRAYVRHLIHADETFGLRLTSYHNLYFLLNLMKDVREAIMNDNLLEFREAFFEEYGYNNSKRNF

SEQ ID NO: 56576 - protein, 380 aa, unidentified
  source 1..380: note = Lactobacillus heilongjiangensis
  REGION 1..380: note = tr|A0A0K2LAQ5|A0A0K2LAQ5_9LACO Queuine tRNA-ribosyltransferase OS=Lactobacillus heilongjiangensis; OX = 1074467 GN=tgt PE=3 SV=1
MEPAVKYTLLKKEKHTGARLGLLETPHGTFETPIFMPVGTEASVKNMAPEDLEKIGATIVLANTYHLWLRPGEDIVQEAGGLHKFMNWNKGILTDSGGFQVFSLANNRDITEAGVHFKNHLNGRREFLSPEKAIKIENYLGPDIMMSLDECPPFFESYDYIKKSVARTSRWAERGLAAHRNPDWQALFGIVQGAGFEDLRKQSAQDLVSMDFPGYSIGGLSVGESKDEMNRVLDFTTPMLPENKPRYLMGVGTADSLIDGVIRGIDMFDCVLPTRIARNGTCMTTHGRLVVKNAKYARDFGPIDADCDCYVCRNYSRAYIRHLINANELFGTHLTSYHNLYFLLNLMKGVRQAIRDDNLLEFREHVFEDYGFNQENAKKF

SEQ ID NO: 56577 - protein, 380 aa, Lactobacillus hilgardii
  REGION 1..380: note = tr|C0XLD3|C0XLD3_LACHI Queuine tRNA-ribosyltransferase OS=Lactobacillus hilgardii DSM 20176 = ATCC 8290 OX=1423757 GN=tgt PE=3 SV=1
MQPAISYRLIKKEKHTGARLGEITTPHGTFRTPIFMPVGTQATVKTLAPEELNDMGATIILANTYHLWLRPGEDIVKEAGGLHKFMNWDHGILTDSGGFQVFSLAKNRDITEKGVTFKNEINGARMFLSPEKAIQIENDLGPDIMMSLDECPPFFETYDYVKKSVERTSRWAERGLKAHRNPDTQGLFGIVQGAGFEDLRKQSAQDLVSLDFPGYSIGGLSVGESKAEMNRILETTTPLLPETKPRYLMGVGATDSLIDGVIRGIDMFDCVLPTRIARNGTVMTSHGRLVVKNAQYARDFRPLDDQCNCYTCRNYSRAYIRHLIKSGETFGLRLASYHNLYYLIHLMKRVQQAIMDDDLLDLRAEVFEQYGYNKANAKNF

SEQ ID NO: 56578 - protein, 380 aa, unidentified
  source 1..380: note = Lactobacillus hokkaidonensis
  REGION 1..380: note = tr|A0A0A1GVN2|A0A0A1GVN2_9LACO Queuine tRNA-ribosyltransferase OS=Lactobacillus hokkaidonensis JCM 18461 OX=1291742 GN=tgt PE=3 SV=1
MEPAIKYRLIKKDKHTGARMGELITPHGTFPTPMFMPVGTQATVKSIAPDELDAMGAGVILANTYHLWLQPGEQIVEEAGGLHKFMNWDKGILTDSGGFQVFSLAKHRDIKEEGVTFRDPVSGSKMFLSPEKAMQIENALGPDIMMSFDECPPYFETYDYIKKSVERTSRWAQRGLEAHQNPDWQGLFGIVQGAGFKKLRQQSARDLVSMDFPGYSVGGLSVGESKEEMNRVLEFTTPLLPENKPRYLMGVGTADSLIDGVMRGIDMFDCVLPTRIARNGTCMTSHGRLVIKNAQYAHDFGPLDDECDCYVCRNYSRAYIRHLIHVNETFGIRLTSYHNLYFLIHLMQDLRQAIADDEVLEFREMVFEKYGFNQLNARNF

SEQ ID NO: 56579 - protein, 381 aa, Lactobacillus hordei
  REGION 1..381: note = tr|A0A0R1MRP8|A0A0R1MRP8_9LACO Queuine tRNA-ribosyltransferase OS=Lactobacillus hordei DSM 19519; OX = 1423759 GN=tgt PE=3 SV=1
MTEPAIKYRLIKKEKHTGARLGEIITPHGTFPTPMFMPVGTQASVKSLAPEELDEMGANIILSNTYHLWLRPGEDLVEEAGGLHQFMNWKKGILTDSGGFQVFSLAKMRDITEEGVHFRSHLSGEKLFLSPEKAIHIQNALGSDIMMSFDECPPFFESYDYIKKSVERTSRWAERGLNAHLHPNRQGLFGIVQGGGHKDLRELSARQLVSLDFPGYSIGGLSVGESKAEMNHVLDFTTPLLPENKPRYLMGVGSADALIDGVIRGVDMFDCVLPTRIARNGTCMTSHGRLVVKNAAYARDFRPLDENCDCYTCRNFTRAYIRHLIKADEIFGLRLASYHNLYFLLNLMKNVRQAIMDDNLLEFKEAFFEEYGFNEENARNF

SEQ ID NO: 56580 - protein, 381 aa, Lactobacillus hordei; identical to SEQ ID NO: 56579
  REGION 1..381: note = tr|A0A3Q8CJZ6|A0A3Q8CJZ6_9LACO Queuine tRNA-ribosyltransferase OS=Lactobacillus hordei OX=468911; GN = tgt PE=3 SV=1

SEQ ID NO: 56581 - protein, 380 aa, Lactobacillus kefiri
  REGION 1..380: note = tr|A0A511DQQ5|A0A511DQQ5_LACKE Queuine tRNA-ribosyltransferase OS=Lactobacillus kefiri OX=33962; GN = tgt PE=3 SV=1
MQPAITYRLIKKEKHTGARLGEITTPHGTFRTPMFMPVGTQATVKTLAPEELDDMGATIILANTYHLWLRPGEDIVKEAGGLHKFMNWNKGILTDSGGFQVFSLAKNRDITEEGVTFKNEINGSKMFLSPEKAIQIENDLGPDIMMSLDECPPFFESYDYVKKSVERTSRWAERGLKAHKNPDWQGLFGIVQGAGFEDLRKQSAKDLVSLDFPGYSIGGLSVGESKQEMNRILESTSPLLPENKPRYLMGVGATDSLIDGVIRGIDMFDCVLPTRIARNGTVMTSHGRLVVKNAKYARDFTPLDDQCNCYTCRNYTRAYIRHLVKTDETFGLRLCSYHNLYYLIHLMKRVQQAIMDDNLLDLRAEVFEQYGYNKPNPKNF

SEQ ID NO: 56582 - protein, 380 aa, Lactobacillus kimchicus
  REGION 1..380: note = tr|A0A0R1HWL7|A0A0R1HWL7_9LACO Queuine tRNA-ribosyltransferase OS=Lactobacillus kimchicus JCM 15530 OX=1302272 GN=tgt PE=3 SV=1
MEPAIKYRLIKTEKHTGARLGELITPHGTFPTPMFMPVGTQATVKAMAPEELDDMGAGVILANTYHLWLQPGEDLVKEAGGLHKFMNWHKPILTDSGGFQVFSLAEIRNITEEGVHFKNPLNGDRLFLSPEKAMQIENDLGPDIMMSLDECPPFFESYDYIKKSVERTSRWAERGLKAHQNPDWQGLFGIVQGAGYEDLRRQSAADLVGLDFPGYSIGGLSVGESKAEMNHVLEFTTPLLPSTKPRYLMGVGSPDALIDGVIRGVDMFDCVLPTRIARNGTMMTHHGRLNVKNAKYERDFGPVDDKCECYTCRNYSRAYIRHLFKADETFGLRLTSYHNLYFLLNLMKEIRQAIMDDELLEYREQLFEMYGYNQPNAKNF

SEQ ID NO: 56583 - protein, 380 aa, unidentified
  source 1..380: note = Lactobacillus kimchiensis
  REGION 1..380: note = tr|A0A0R2L813|A0A0R2L813_9LACO Queuine tRNA-ribosyltransferase OS=Lactobacillus kimchiensis; OX = 993692 GN=tgt PE=3 SV=1
MEPAVKYTLLKKEKHTGARLGLLETPHGTFETPMFMPVGTEASVKNMSPEDLEKIGSTIILANTYHLWLRPGEDIVKEAGGLHKFMNWDKGILTDSGGFQVFSLANNRDITEAGVHFKNHLNGRREFLSPEKAMQIENDLGPDIMMSLDECPPFFESYDYIKRSVARTSRWAERGLAAHRNPDWQALFGIVQGAGFEDLRKQSAQDLVSMDFPGYSIGGLSVGESKGEMNRVLDFTTPFLPENKPRYLMGVGTADSLIDGVIRGIDMFDCVLPTRIARNGTCMTSHGRLVVKNAKYARDFGPIDDNCDCYVCRNYSRAYVRHLINADELFGTHLTSYHNLYFLLNLMKGVRQAIRDDNLLEFREHVFEDYGFNQENAKKF

SEQ ID NO: 56584 - protein, 380 aa, Lactobacillus kisonensis
  REGION 1..380: note = tr|H1LJN6|H1LJN6_9LACO Queuine tRNA-ribosyltransferase OS=Lactobacillus kisonensis F0435; OX = 797516 GN=tgt PE=3 SV=1
MQPAITYRLIKKEKHTGARLGEITTPHGTFRTPIFMPVGTQATVKTLAPEELDQMGSTIILANTYHLWLRPGEDIVKEAGGLHKFMNWDKGILTDSGGFQVFSLAKNRDITEEGVTFKNEINGARMFLSPEKAIQIENDLGPDIMMSLDECPPFFESYDYVKKSVARTSRWAERGLKAHRNPDSQGLFGIVQGAGFEDLRQQSAKDLVSLDFPGYSIGGLSVGESKVEMNRILEATTPLLPENKPRYLMGVGVTDSLIDGVIRGVDMFDCVLPTRIARNGTVMTSHGRLVVKNAKYARDFTPLDDQCDCYACRNYTRAYIRHLVKSNETFGLRLCSYHNLYYLIHLMKRVQQAIIDDNLLDLRAEVFEQYGYNKPNAKNF

SEQ ID NO: 56585 - protein, 380 aa, Lactobacillus kisonensis; identical to SEQ ID NO: 56584
  REGION 1..380: note = tr|A0A0R1NNM8|A0A0R1NNM8_9LACO Queuine tRNA-ribosyltransferase OS=Lactobacillus kisonensis DSM 19906 = JCM 15041 OX=1423766 GN=tgt PE=3 SV=1

SEQ ID NO: 56586 - protein, 380 aa, Lactobacillus malefermentans
  REGION 1..380: note = tr|A0A4R5NIS4|A0A4R5NIS4_9LACO Queuine tRNA-ribosyltransferase OS=Lactobacillus malefermentans; OX = 176292 GN=tgt PE=3 SV=1
MDPAIKYRLIKKDKHTGARLGELITPHGTFPTPMFMPVGTQATVKSLAPEELDEMGAGVILSNTYHLWLQPGEDLVKEAGGLHKFMNWDKGILTDSGGYQVFSLAKNRKLTEEGVHFRNPSNGDKLFLSPEKAIQIENDLGPDIMMSLDECPPYYESYDYIKSSVERTSRWAERGLRAHQHADYQGLFGIVQGAGYEDLRKQSAKDLTSLDFPGYSIGGLSVGEPKKEMNRVLDFTTPLLPENKPRYLMGVGTADSLIDGVIRGIDMFDCVLPTRIARNGTCMTSHGRLVVKNAVYARDFSPIDDNCDCYTCRNYTRAYIRHLFKADESFGMRLTSYHNLYYLLNLMKRVREAIMNDQLLDLRAEVFENYGFNKPNAKNF

SEQ ID NO: 56587 - protein, 381 aa, Lactobacillus mali
  REGION 1..381: note = tr|J1F4F5|J1F4F5_9LACO Queuine tRNA-ribosyltransferase OS=Lactobacillus mali KCTC 3596 = DSM 20444 OX=1046596 GN=tgt PE=3 SV=1
MTEPAIKYRLIKKEKHTGARLGEIITPHGTFPTPMFMPVGTQASVKSLAPEELDKMGANIILSNTYHLWLRPGEDIVEEAGGLHQFMNWKKGILTDSGGFQVFSLAKMRDITERGVHFKSHLSGEKLFLSPEKAIHIQNALGSDIMMSFDECPPFFESYDYIKKSVERTSRWAERGLNAHLHPDRQGLFGIVQGGGHKELRELSARQLTSLDFPGYSIGGLSVGESKAEMNHVLDFTTPLLPENKPRYLMGVGSADALIDGVIRGVDMFDCVLPTRIARNGTCMTSHGRLVVKNAAYAHDFGPLDDNCDCYTCRNFTRAYIRHLIKADEIFGLRLASYHNLYFLLNLMKNVRQAIMDDNLLEFRESFFEEYGFNEKNARNF

SEQ ID NO: 56588 - protein, 381 aa, Lactobacillus mali
  REGION 1..381: note = tr|A0A0R2FT58|A0A0R2FT58_9LACO Queuine tRNA-ribosyltransferase OS=Lactobacillus mali OX=1618; GN = tgt PE=3 SV=1
MTEPAIKYRLIKKEKHTGARLGEIITPHGTFPTPMFMPVGTQASVKSLAPEELDKMGANIILSNTYHLWLRPGEDIVEEAGGLHQFMNWKKGILTDSGGFQVFSLAKMRDITERGVHFKSHLSGEKLFLSPEKAIHIQNALGSDIMMSFDECPPFFETYDYIKKSVERTSRWAERGLNAHLHPDRQGLFGIVQGGGHKELRELSARQLTSLDFPGYSIGGLSVGESKAEMNHVLDFTTPLLPENKPRYLMGVGSADALIDGVIRGVDMFDCVLPTRIARNGTCMTSHGRLVVKNAAYAHDFRPLDDNCDCYTCRNFTRAYIRHLIKADEIFGLRLASYHNLYFLLNLMKNVRQAIMDDNLLEFRESFFEEYGFNEKNARNF

SEQ ID NO: 56589 - protein, 380 aa, Lactobacillus manihotivorans
  REGION 1..380: note = tr|A0A0R1QB43|A0A0R1QB43_9LACO Queuine tRNA-ribosyltransferase OS=Lactobacillus manihotivorans DSM 13343 = JCM 12514 OX=1423769 GN=tgt PE=3 SV=1
MEPAVTYHLKHVDKHTGARLGELVTPHGTFPTPMFMPVGTLASVKTMAPEELDEMGAGVILANTYHLWLRPGEDIVEQAGGLHKFMNWDKGILTDSGGFQVFSLAELRDIQEEGVHFKNHLDGSKMFLSPEKAIAIENALGPDIMMSFDECPPFFESYDYVAKSVARTSRWAERGLKAHKNPDWQALFGIVQGAGFKDLRQQSARDLVSLDFPGYSIGGLSVGESKEEMNHVLEFTTLLLPEHKPRYLMGVGSPDALIDGAMRGIDMFDCVLPTRIARNGTTMTSNGRVVIKNAKYARDFTPLDPNCNCYTCRNYTRAYIRHLIHTDEAFGIRLTSYHNLYFLLHLMQQVREAIANDQLLDFREAFFEQYGYNKPDAKSF

SEQ ID NO: 56590 - protein, 380 aa, unidentified
  source 1..380: note = Lactobacillus mellifer
  REGION 1..380: note = tr|A0A0F4LW82|A0A0F4LW82_9LACO Queuine tRNA-ribosyltransferase OS=Lactobacillus mellifer; OX = 1218492 GN=tgt PE=3 SV=1
MEQPIQYRLIKKEKHTGARLGELITPHGTFSTPIFMPVGTQATVKTMAPEELKTIGASVILANTYHLWLRPGSQLVRAAGGLHQFMHWDQGILTDSGGFQVFSLAHRRGISEEGVTFKSHLDGQPMFLSPEKAIHIENDLGSDIMMSLDECPPFFESHAYLKASVERTSRWAQRGLQAHRHPDRQGIFGIVQGGGYHDLRRQSARDLTSLDFAGYSIGGLSVGESKAEMNHVLDFTTPWLPENKPRYLMGVGTADSLLDGVIRGIDMFDCVLPTRIARNGTCMTSQGRLVVKNAQYAQDFTPLDPQCDCYTCRNYTRAYIRHLIHVNETFGIHLTSYHNLYYLVHLMARIRQAIRDDNLLDLRAEVFDQYGFNEKNAKNF

SEQ ID NO: 56591 - protein, 380 aa, unidentified
  source 1..380: note = Lactobacillus mellis
  REGION 1..380: note = tr|A0A0F4KTW7|A0A0F4KTW7_9LACO Queuine tRNA-ribosyltransferase OS=Lactobacillus mellis OX=1218508; GN = tgt PE=3 SV=1
MEQPIRYHLIKKEKHTGARLGELITPHGTFPTPIFMPVGTQASVKTMAPEELQEMGATVILANTYHLWLRPGSPLVKEAGGLHQFMNWKQGILTDSGGFQVFSLAKRRGITEEGVTFKSHLDGRLMFLSPEKAIHIENDLGPDIMMSLDECPPFFESYDYLKASVARTSRWAQRGLQAHRNPNSQGIFGIVQGGGYEDLRRQSAQDLTSLDFAGYSIGGLSVGESKAEMNHVLEFTTPLLPENKPRYLMGVGTADSLIDGVIRGIDMFDCVLPTRIARNGTCMTSQGRLVVKNAQYAHDFTPLDPNCNCYACRNYSRAYIRHLLQVNETFGIHLTSYHNLYYLIHLMSQIRQAIQDDNLLDLRAQVFEQYGFNQKNAKNF

SEQ ID NO: 56592 - protein, 380 aa, Lactobacillus mindensis
  REGION 1..380: note = tr|A0A0R1QS49|A0A0R1QS49_9LACO Queuine tRNA-ribosyltransferase OS=Lactobacillus mindensis DSM 14500 OX=1423770 GN=tgt PE=3 SV=1
MEPAVKYTLLKKEKHTGARLGLLETPHGTFETPIFMPVGTEATVKNMSPEDLDKIGATIILANTYHLWLRPGEDIVQEAGGLHKFMNWDKGILTDSGGFQVFSLANSRDITEAGVHFKNHLNGRREFLSPEKAIKIENYLGPDIMMSLDECPPFFESYDYIKKSVARTSRWAERGLEAHRNPDWQALFGIVQGAGFKDLRKQSAQDLVSMDFPGYSIGGLSVGESKDEMNRVLDFTTPFLPENKPRYLMGVGTADSLIDGVIRGVDMFDCVLPTRIARNGTCMTSHGRLVVKNASYARDFGPIDDNCDCYVCRNYSRAYIRHLLNADELFGTHLTTYHNLYFLLNLMKGVRQAIKDDNLLEFREHVFEDYGFNKENAKKF

SEQ ID NO: 56593 - protein, 380 aa, unidentified
  source 1..380: note = Lactobacillus mixtipabuli
  REGION 1..380: note = tr|A0A1Z5IBL8|A0A1Z5IBL8_9LACO Queuine tRNA-ribosyltransferase OS=Lactobacillus mixtipabuli; OX = 1435342 GN=tgt PE=3 SV=1
MEPAIKYRLIKTEKDTGARLGELITPHGTFPTPMFMPVGTQATVKSLAPEELDEMGAGVILANTYHLWLQPGEDLVKEAGGLHQFMNWQKPILTDSGGFQVFSLAENRNITEEGVHFKNPSNGDRLFLSPEKAMQIENDLGPDIMMSLDECPPFFESYEYIKHSVERTSRWAERGLKAHANPNWQGLFGIVQGAGYEDLRRQSAHDLVSMDFPGYSIGGLSVGESKAEMNRVLDFTTPMLPSNKPRYLMGVGSPDSLIDGVMRGVDMFDCVLPTRIARRGTCMTSHGRLTVKNAKYARDFTPIDDRCDCYTCRNYTRAYIRHLFKADESFGLRLTSYHNLYFLLHLMKDVRAAIMADNLVDFRANFFEEYGYNQPNPKNF

SEQ ID NO: 56594 - protein, 363 aa, Lactobacillus mucosae
  REGION 1..363: note = tr|A0A508YKS7|A0A508YKS7_LACMC Queuine tRNA-ribosyltransferase OS=Lactobacillus mucosae OX=97478; GN = tgt PE=4 SV=1
MKFDFKLQHHAETARAAQLTIGRQTLETPSLIMPAPALTVHDLAPAEVKRSQIKGLSIDESIISQNPGTETVRDLGGLHRFMAWDGLVIAKPGDFRHLPLVKKNHLTKDGVRFHDVKTGAVRLMTPQTVIESQTELQPDIMLMLSQTPSYYAPYDYVEKAVAINSTWAAAAIQKLTADSPALFGVMQGAGFAQLRKQSIEALAKMDFSGYVIGGLSDIDNDKEFDRVLKLSVDLLPADKARMVVDIQSSAQLVSALKNGIDLIETSLPTHWGRYGKALTAQGLLPIKKARFAADPQPLAEDCHCPVCEQYSRAYLRHLLHMDNSVGPRLISQHNLWYLRQLVSQARLAIIHDQPITAIFENLI

SEQ ID NO: 56595 - protein, 381 aa, Lactobacillus murinus; identical to SEQ ID NO: 56516
  REGION 1..381: note = tr|A0A4S2EQQ3|A0A4S2EQQ3_9LACO Queuine tRNA-ribosyltransferase OS=Lactobacillus murinus OX=1622; GN = tgt PE=3 SV=1

SEQ ID NO: 56596 - protein, 381 aa, Lactobacillus murinus
  REGION 1..381: note = tr|A0A2Z4VYK8|A0A2Z4VYK8_9LACO Queuine tRNA-ribosyltransferase OS=Lactobacillus murinus OX=1622; GN = tgt PE=3 SV=1
MTEPAIKYRLIKKEKHTGARLGEIITPHGTFPTPMFMPVGTQATVKAMSPEELKAMGAGIILSNTYHLWLRPGEDLVKEAGGLHKFMNWDQGILTDSGGFQVFSLADMRNITEEGVHFKSHLNGAPLFLSPEKAIQIENALGSDIMMSFDECPPFYESYDYIKKSVERTSRWAERGLKAHQDPEKQALFGIVQGGGHEDLRKLSARDLVSLDFPGYSIGGLSVGESKAEMNRVLDFTTPLLPEDKPRYLMGVGSPDALIDGVLRGVDMFDCVLPTRIARNGTCMTSHGRLVVKNAKYARDFSPIDDNCDCYTCRNYTRAYVRHLFKADETFGLRLTSYHNLYFLLNLMKQVRQAIMDDNLLEFKEHFFEEYGLNVKNPKNF

SEQ ID NO: 56597 - protein, 381 aa, Lactobacillus nagelii
  REGION 1..381: note = tr|A0A3S6QTZ5|A0A3S6QTZ5_9LACO Queuine tRNA-ribosyltransferase OS=Lactobacillus nagelii OX=82688; GN = tgt PE=3 SV=1
MTEPAIKYHLLKKESHTAARLGKLQTPHGTFPTPMFMPVGTQATVKTLTPEELESMGAGVILSNTYHLWLRPGEKIVEEAGGLHHFMNWPKGILTDSGGFQVFSLAKIRDITEEGVHFRSHLSGEKLFLSPEKAIQIQNALGSDIMMSFDECPPFFESYDYIKSSIERTTRWAERGLRAHQNPEKQGLFGIVQGGGHLDLRRQSARDLVSLDFPGYSIGGLSVGESKVEMNHVLENTTPLLPENKPRYLMGVGSPDALIDGVIRGVDMFDCVLPTRIARNGTCMTSHGRLVVKNAKYAHDFTPLDENCNCYVCQNYTRAYLRHLFKADEILGPRLASYHNLYFLLNLMKQIRQAIENDNLLDFRAEFFENYGLNQKNPRNF

SEQ ID NO: 56598 - protein, 381 aa, Lactobacillus nagelii; identical to SEQ ID NO: 56597
  REGION 1..381: note = tr|A0A0R1QIX8|A0A0R1QIX8_9LACO Queuine tRNA-ribosyltransferase OS=Lactobacillus nagelii DSM 13675; OX = 1122150 GN=tgt PE=3 SV=1

SEQ ID NO: 56599 - protein, 380 aa, Lactobacillus nantensis
  REGION 1..380: note = tr|A0A0R1WN09|A0A0R1WN09_9LACO Queuine tRNA-ribosyltransferase OS=Lactobacillus nantensis DSM 16982 OX=1423774 GN=tgt PE=3 SV=1
MEPAVKYTLLKKEKHTGARLGLLETPHGTFETPMFMPVGTEASVKNMAPEDLDKIGASIILANTYHLWLRPGEDIVQEAGGLHKFMNWDKGILTDSGGFQVFSLANTRDITEAGVHFKNHLNGRREFLSPEKAIKIENYLGPDIMMSLDECPPFFESYDYIKKSVARTSRWAERGLEAHRNPDWQALFGIVQGAGFEDLRKQSAQDLVSMDFPGYSIGGLSVGESKDEMNRVLDFTTPMLPENKPRYLMGVGTADSLIDGVIRGIDMFDCVLPTRIARNGTCMTSHGRLVVKNAKYARDFSPLDDNCDCYVCRNYSRAYIRHLINANELFGTHLTSYHNLYFLLNLMKGVRQAIRDDNLLEFREHVFEDYGFNQENAKKF

SEQ ID NO: 56600 - protein, 380 aa, Lactobacillus nasuensis
  REGION 1..380: note = tr|A0A0R1JP42|A0A0R1JP42_9LACO Queuine tRNA-ribosyltransferase OS=Lactobacillus nasuensis JCM 17158 OX=1291734 GN=tgt PE=3 SV=1
MQPAVTYHLKHVDKHTGARLGEIVTPHGTFPTPMFMPVGTQASVKTLSPEELDTMGAGIILANTYHLWLRPGEDLIEEAGGLHQFMNWHKGLLTDSGGFQVFSLADMRNITEEGVHFKNHLNGANMFLSPEKAIAIENALGPDIMMSFDECPPFFESYDYVAKSVARTSRWAERGLAAHQHPDYQALFGIVQGAGFKDLRQQSARDLVSLDFPGYSIGGLSVGESKEEMNHVLDFTTPLLPADKPRYLMGVGSPDALIDGVIRGIDMFDCVLPTRIARNGTTMTSHGRVVIKNAKYARDFTPLDPDCDCYTCRNYTRAYIRHLIHTDEAFGIRLTSYHNLYFLLHLMQQVRDAIAHDDLAAFREDFFERYGYNRADAKSF

SEQ ID NO: 56601 - protein, 380 aa, Lactobacillus nodensis
  REGION 1..380: note = tr|A0A0R1K842|A0A0R1K842_9LACO Queuine tRNA-ribosyltransferase OS=Lactobacillus nodensis DSM 19682 = JCM 14932 = NBRC 107160 OX=1423775 GN=tgt PE=3 SV=1
MEPAVKYTLIKKEKHTGARLGKLETPHGTFETPMFMPVGTEASVKNMAPEDLEKIGASIILANTYHLWLRPGEDIVKEAGGLHKFMNWDKGILTDSGGFQVFSLANTRDITEAGVHFKNHLNGRREFLSPEKAIKIENYLGPDIMMSLDECPPFFESYDYIKKSVARTSRWAERGLEAHRNPDWQALFGIVQGAGFEDLRKQSAADLTSMDFPGYSIGGLSVGESKEEMNHVLDFTAPLLPENKPRYLMGVGSTDALIDGAIRGIDMFDCVLPTRIARNGTCMTTKGRLVVKNAKYARDFRPIDEDCDCYVCRNYSRAYIRHLINANELFGTHLTSYHNLYYLLNLMKGVRQAIRDDNLLEFRENVFEEYGLNEANARNF

SEQ ID NO: 56602 - protein, 380 aa, unidentified
  source 1..380: note = Lactobacillus nuruki
  REGION 1..380: note = tr|A0A2N7ASI5|A0A2N7ASI5_9LACO Queuine tRNA-ribosyltransferase OS=Lactobacillus nuruki OX=1993540; GN = tgt PE=3 SV=1
MEPAVKYTLLKKEKHTGARLGLLETPHGTFETPIFMPVGTEASVKNMSPEDLDKIGATIVLANTYHLWLRPGEDIVKEAGGLHKFMNWNKGILTDSGGFQVFSLANTRDITEAGVHFRNHLNGRREFLSPEKAIKIENYLGPDIMMSLDECPPFFESYDYIQKSVARTSRWAERGLKAHRNPDWQALFGIVQGAGFEDLRKQSARDLVSMDFPGYSIGGLSVGESKGEMNRVLDFTTPLLPEDKPRYLMGVGTADSLIDGVIRGIDMFDCVLPTRIARNGTCMTSHGRLVVKNAKYARDFGPLDDNCDCYVCRNYSRAYIRHLINANELFGTHLTSYHNLYFLLNLMKGVRQAIKDDNLLEFREHVFEDYGFNRENAKNF

SEQ ID NO: 56603 - protein, 380 aa, Lactobacillus odoratitofui
  REGION 1..380: note = tr|A0A0R1LY45|A0A0R1LY45_9LACO Queuine tRNA-ribosyltransferase OS=Lactobacillus odoratitofui DSM 19909 = JCM 15043 OX=1423776 GN=tgt PE=3 SV=1
MEPAIKYRLIKTEKDTGARLGELITPHGTFPTPMFMPVGTQATVKSLAPEELDQMGAGVILANTYHLWLQPGEDLVKEAGGLHKFMNWQKPILTDSGGFQVFSLAENRNITEEGVHFRNPANGDKLFLSPEKAMQIENDLGPDIMMSLDECPPFFESYDYIKHSVERTSRWAERGLKAHANPDWQGLFGIVQGAGYEDLRRQSAQDLVSMDFPGYSIGGLSVGESKAEMNRVLEFTTPMLPTTKPRYLMGVGSPDSLIDGVIRGIDMFDCVLPTRIARRGTCMTSHGRLTVKNAQFARDFNPIDDNCDCYTCRNYSRAYIRHLFKADESFGLRLTSYHNLYFLLHLMGDVRQAIMDDRLLDFKEQFFEAYGYNVPNPKNF

SEQ ID NO: 56604 - protein, 386 aa, Lactobacillus oeni
  REGION 1..386: note = tr|A0A0R1M9Y1|A0A0R1M9Y1_9LACO Queuine tRNA-ribosyltransferase OS=Lactobacillus oeni DSM 19972; OX = 1423777 GN=tgt PE=3 SV=1
MEKVQMTEPAINYHLIKKEKHTGARLGEIVTPHGTFKTPMFMPVGTQATVKSLAPEELDRMGADIILSNTYHLWLRPGEEIVQKAGGLHKFMNWNKGILTDSGGFQVFSLAKIRDITEKGVHFRSHLSGEKLFLSPEKAIHIQNALGSDIMMSFDECPPFFESYDYIKKSVERTSRWAERGLSAHLNPKMQGLFGIVQGGGHKDLRELSARQLVAMDFPGYSIGGLSVGESKAEMNHVLEFTTPMLPENKPRYLMGVGSADALIDGVIRGVDMFDCVLPTRIARNGTCMTSHGRVVIKNAAYARDFTPLDDNCDCYTCRNFTRAYIRHLFKADETFGLRLASYHNLYFLLHLMQNVRQAIQEDNLLEFRESFFEEYGFNKENARNF

SEQ ID NO: 56605 - protein, 380 aa, Lactobacillus oligofermentans
  REGION 1..380: note = tr|A0A0R1RLM0|A0A0R1RLM0_9LACO Queuine tRNA-ribosyltransferase OS=Lactobacillus oligofermentans DSM 15707 = LMG 22743 OX=1423778 GN=tgt PE=3 SV=1
MEPAIKYRLIHQDKYTGARTGEIITPHGTFPTPMFMPVGTQASVKSIAPEELDEMGAGIILANTYHLWLQPGEDLVEQAGGLHKFMNWDKGILTDSGGFQVFSLAKHRDIKEEGVTFKDPSSGRTMFLSPEKAIQVENALGPDIMMSFDECPPYFETYDYIKKSVERTSRWAERGLKAHQNPTNQGLFGIVQGAGFKALRQQSARDLVSMDFPGYSVGGLSVGESKEEMNRVLEFTTPLLPENKPRYLMGVGTADSLIDGVIRGIDMFDCVLPTRIARNGTCMTSHGRLVVKNSQYARDFNPLDDNCDCYVCRNYTRAYIRHLIHVNETFGIRLTSYHNLYFLIHLMEDMREAIKNDQVLEFREMVFEQYGFNEENARNF

SEQ ID NO: 56606 - protein, 362 aa, Lactobacillus oris
  REGION 1..362: note = tr|E3CAB6|E3CAB6_9LACO tRNA-guanine transglycosylase; OS = Lactobacillus oris PB013-T2-3 OX=908339; GN = HMPREF9265_0906 PE=4 SV=1
MESKLKFNIQAESGNARTGHLQLGSRTATTPMLVQTGMVPAILTSGELTALGTQAIKQSALEYWLRAQGQPEQLGFADIHEHLRWPGIVVGASGADHAYRWAKPRGRKKTGVSFHEPATGQQKMYTPQLAQQWQRLLGCDLLVGFARWEDYYAPVDDLQAAAQQTAEWLGMDKQSLNTLAPVVGGGLKRVRQASVAAAQATHPCGYALLGIDGAVKLAEQRRVIGEIVAMLPTEGLRYLPACGALEQVLIAIAQGMDIVDSDCAATTALHGTAYLGTKRLHLTQEHLAGDSRTLVPGCQCPTCQAGYSRAYLHQLLQEQSPVGVRLLTAHNLYVLNQLVDRFRQAIAAGRLAELMADLAIDY

SEQ ID NO: 56607 - protein, 380 aa, unidentified
  source 1..380: note = Lactobacillus oryzae
  REGION 1..380: note = tr|A0A081BJ22|A0A081BJ22_9LACO Queuine tRNA-ribosyltransferase OS=Lactobacillus oryzae JCM 18671; OX = 1291743 GN=tgt PE=3 SV=1
MEPAIKYRLIKKDKHTGARLGELITPHGTFPTPMFMPVGTNATVKSMAPEELDEMGAGVILANTYHMWLQPGESLVKEAGGLHKFMNWDKGILTDSGGFQVFSLAENRKLTEEGVHFRNPANGDKMFLSPEKAIQIENDLGPDIMMSLDECPPYFETYDYIKNSVERTSRWAERGLRAHQNPETQGLFGIVQGAGFEDLRKQSVQDLTSLDFPGYSIGGLSVGEPKEEMNRVLEFTTPMLPEDKPRYLMGVGSADSLIDGVIRGVDMFDCVLPTRIARKGTLMTSHGRLVVKNAAYAHDFSPVDDNCNCYTCRNYTRAYLRHLFKADEIFGMRLASYHNLYFLLNLMKRVREAIMNDQLLELREEVFESYGYNLPNAKNF

SEQ ID NO: 56608 - protein, 380 aa, Lactobacillus otakiensis
  REGION 1..380: note = tr|S4NB78|S4NB78_9LACO Queuine tRNA-ribosyltransferase OS=Lactobacillus otakiensis DSM 19908 = JCM 15040 OX=1423780 GN=tgt PE=3 SV=1
MQPAITYRLIKTEKHTGARLGEITTPHGTFKTPMFMPVGTQATVKTLAPEELDQMGSTIILANTYHLWLRPGEDIVKEAGGLHKFMNWHKGILTDSGGFQVFSLAKNRDITEEGVTFKNEINGSKMFLSPEKAMQIENDLGPDIMMSLDECPPFFESYDYVKKSVERTSRWAERGLKAHKNPDWQALFGIVQGAGFEDLRKQSAQDLVSLDFPGYSIGGLSVGESKQEMNRILESTTPLLPENKPRYLMGVGTTDSLIDGVIRGIDMFDCVLPTRIARNGTVMTSHGRLVVKNAKYARDFTPLDDQCNCYTCRNYTRAYIRHLIKTDESFGMRLCSYHNLYYLIHLMKRVQQAIMDDNLLDLRAEVFEQYGYNKPNPKNF

SEQ ID NO: 56609 - protein, 380 aa, Lactobacillus parabuchneri
  REGION 1..380: note = tr|A0A1X1FC37|A0A1X1FC37_9LACO Queuine tRNA-ribosyltransferase OS=Lactobacillus parabuchneri; OX = 152331 GN=tgt PE=3 SV=1
MQPAITYRLIKKEKHTGARLGEITTPHGTFRTPIFMPVGTQATVKTLAPEELDEMGSTIILANTYHLWLRPGEDIVKEAGGLHKFMNWDKGILTDSGGFQVFSLAKNRDITEDGVTFKNEINGAKMFLSPEKAIQIENDLGPDIMMSLDECPPFFESYDYVKKSVERTSRWAERGLKAHQNPDWQGLFGIVQGAGFEDLRKQSAQDLVSLDFPGYSIGGLSVGESKQEMNRILETTAPLLPENKPRYLMGVGATDSLIDGVIRGIDMFDCVLPTRIARNGTVMTSHGRLVVKNAKYARDFTPLDDQCNCYTCRNYTRAYIRHLCKTDETFGMRLCSYHNLYYLIHLMKRVQQAIMDDNLLDLRAEVFEQYGYNKPNPKNF

SEQ ID NO: 56610 - protein, 380 aa, Lactobacillus parabuchneri; identical to SEQ ID NO: 56609
  REGION 1..380: note = tr|A0A0R1Z7A3|A0A0R1Z7A3_9LACO Queuine tRNA-ribosyltransferase OS=Lactobacillus parabuchneri DSM 5707 = NBRC 107865 OX=1423784 GN=tgt PE=3 SV=1

SEQ ID NO: 56611 - protein, 380 aa, Lactobacillus paracasei
  REGION 1..380: note = tr|A0A1V0Q5B5|A0A1V0Q5B5_LACPA Queuine tRNA-ribosyltransferase OS=Lactobacillus paracasei OX=1597; GN = tgt PE=3 SV=1
MEPAVKYRLIHQDKHSGARLGELITPHGTFPTPMFMPVGTQASVKTMAPEELDTMGATVILANTYHLWLRPGPELIEEAGGLHNFMNWHKGILTDSGGFQVFSLADTRHITEEGVTFKNHLNGAKMFLSPEKAIAIENALGPDIMMSLDECPPFFESYDYVKKSVARTSRWAERGLQAHKNPDWQALFGIVQGAGFKDLREQSAKDLVSMDFPGYSIGGLSVGESKDEMNHVLDFTTPLLPENKPRYLMGVGSADALIDGALRGIDMFDCVLPTRIARNGTCMTSRGRLVIKNAKYAHDFGPLDPNCDCYTCRNYSRAYIRHLIHVGEAFGIRLTTYHNLYFLLHLMQQVREAIANDDLLAFREDFFEAYGYNKEKAKNF

SEQ ID NO: 56612 - protein, 380 aa, Lactobacillus paracasei; identical to SEQ ID NO: 56538
  REGION 1..380: note = tr|A0A0K1KY93|A0A0K1KY93_LACPA Queuine tRNA-ribosyltransferase OS=Lactobacillus paracasei OX=1597; GN = tgt PE=3 SV=1

SEQ ID NO: 56613 - protein, 380 aa, Lactobacillus paracollinoides
  REGION 1..380: note = tr|A0A0R1TCI6|A0A0R1TCI6_9LACO Queuine tRNA-ribosyltransferase OS=Lactobacillus paracollinoides DSM 15502 = JCM 11969 OX=1423785 GN=tgt PE=3 SV=1
MEPAIKYRLIKTEKHTGARLGELITPHGTFPTPMFMPVGTQATVKSLAPEELDEMGAGVILANTYHLWLQPGEDLVKEAGGLHKFMNWQKPILTDSGGFQVFSLAENRNITEEGVHFRNPSNGDKLFLSPEKAMQIENDLGPDIMMSLDECPPFFESYDYIKHSVERTSRWAERGLNAHRNPDWQGLFGIVQGAGYEELRRQSANDLVSMDFPGYSIGGLSVGESKAEMNQVLEFTTPMLPTNKPRYLMGVGSPDSLIDGVMRGIDMFDCVLPTRIARRGTCMTSHGRVTVKNAQYERDFSPIDDNCDCYACRNYTRAYIRHLFKADESFGLRLTSYHNLYFLLHLMKQVRQAIMDDNLLEFRENFFEAYGYNVPNPKNF

SEQ ID NO: 56614 - protein, 380 aa, Lactobacillus paracollinoides; identical to SEQ ID NO: 56613
  REGION 1..380: note = tr|A0A1B2J1W5|A0A1B2J1W5_9LACO Queuine tRNA-ribosyltransferase OS=Lactobacillus paracollinoides; OX = 240427 GN=tgt PE=3 SV=1

SEQ ID NO: 56615 - protein, 380 aa, Lactobacillus parafarraginis
  REGION 1..380: note = tr|G9ZT44|G9ZT44_9LACO Queuine tRNA-ribosyltransferase OS=Lactobacillus parafarraginis F0439 OX=797515 GN=tgt PE=3 SV=1
MQPAITYRLIKKEKHTGARLGEITTPHGTFRTPVFMPVGTQATVKTLAPEELEDMGAGIILANTYHLWLRPGEDIIKQAGGLHKFMNWDHPILTDSGGFQVFSLAKNRDITEQGVTFKNEINGDRMFLSPEKAMQIENDLGPDIMMSLDECPPFFESYDYVKKSVERTSRWAERGLKAHRNPDSQGLFGIVQGAGFEDLRKQSAKDLVSLDFPGYSIGGLSVGESKAEMNRILETTAPLLPENKPRYLMGVGVTDSLIDGVIRGIDMFDCVLPTRIARNGTVMTSHGRLVVKNAAYARDFGPLDDQCDCYACRNYSRAYIHHLIRADETFGMRLASYHNLYYLIHLMKRVQQAILDDNLLDLRQEVFEQYGYNKPNPKNF

SEQ ID NO: 56616 - protein, 380 aa, Lactobacillus parafarraginis; identical to SEQ ID NO: 56615
  REGION 1..380: note = tr|A0A0R1YT68|A0A0R1YT68_9LACO Queuine tRNA-ribosyltransferase OS=Lactobacillus parafarraginis DSM 18390 = JCM 14109 OX=1423786 GN=tgt PE=3 SV=1

SEQ ID NO: 56617 - protein, 380 aa, Lactobacillus parakefiri
  REGION 1..380: note = tr|A0A269YM75|A0A269YM75_9LACO Queuine tRNA-ribosyltransferase OS=Lactobacillus parakefiri; OX = 152332 GN=tgt PE=3 SV=1
MQPAITYRLIKKEKHTGARLGEITTPHGTFKTPMFMPVGTQATVKTLAPEELDQMGSTIILANTYHLWLRPGEDIVKEAGGLHKFMNWHKGILTDSGGFQVFSLAKNRDITEEGVTFKNEINGSKMFLSPEKAIQIENDLGPDIMMSLDECPPFFESYDYVKKSVERTSRWAERGLKAHRNADWQGLFGIVQGAGFEDLRKQSAKDLVSLDFPGYSIGGLSVGESKQEMNRILEATSPLLPENKPRYLMGVGATDSLIDGVIRGIDMFDCVLPTRIARNGTVMTSHGRLVVKNAKYARDFTPLDDQCGCYTCRNYTRAYIRHLMKTDESFGMRLCSYHNLYYLIHLMKRVQQAIIDDNLLDLRAEVFEQYGYNKPNPKNF

SEQ ID NO: 56618 - protein, 380 aa, Lactobacillus parakefiri
  REGION 1..380: note = tr|A0A4R5NZJ3|A0A4R5NZJ3_9LACO Queuine tRNA-ribosyltransferase OS=Lactobacillus parakefiri; OX = 152332 GN=tgt PE=3 SV=1
MQPAITYRLIKKEKHTGARLGEITTPHGTFKTPMFMPVGTQATVKTLAPEELDQMGSTIILANTYHLWLRPGEDIVEEAGGLHKFMNWHKGILTDSGGFQVFSLAKNRDITEEGVTFKNEINGSKMFLSPEKAIQIENDLGPDIMMSLDECPPFFESYDYVKKSVERTSRWAERGLKAHRNADWQGLFGIVQGAGFEDLRKQSAKDLVSLDFPGYSIGGLSVGESKQEMNRILEATSPLLPENKPRYLMGVGATDSLIDGVIRGIDMFDCVLPTRIARNGTVMTSHGRLVVKNAKYARDFTPLDDQCGCYTCRNYTRAYIRHLMKTDESFGMRLCSYHNLYYLIHLMKRVQQAIIDDNLLDLRAEVFEQYGYNKPNPKNF

SEQ ID NO: 56619 - protein, 380 aa, Lactobacillus paralimentarius
  REGION 1..380: note = tr|A0A0R1KPM6|A0A0R1KPM6_9LACO Queuine tRNA-ribosyltransferase OS=Lactobacillus paralimentarius DSM 19674 OX=1423788 GN=tgt PE=3 SV=1
MESAIKYTLIKKEKHTGARLGLLETPHGTFETPMFMPVGTEASVKNMAPEDLEKIGASIILANTYHLWLRPGEDIVQEAGGLHKFMNWDKGILTDSGGFQVFSLANMRDITEAGVHFRNHLNGRQEFLSPEKAIKIENYLGPDIMMSLDECPPFFESYDYIKKSVARTSRWAERGLQAHRNPDWQALFGIVQGGGFEDLRKQSARDLVSMDFPGYSIGGLSVGESKGEMNRVLDFTTPMLPENKPRYLMGVGTADSLIDGVIRGIDMFDCVLPTRIARNGTCMTSHGRLVVKNSKYAHDFTPLDDNCDCYVCRNYTRAYIRHLINANELFGTHLTSYHNLYFLLNLMKGVRQAIRDDNLLEFREHVFEEYGFNKKDAKKF

SEQ ID NO: 56620 - protein, 380 aa, Lactobacillus paralimentarius; identical to SEQ ID NO: 56619
  REGION 1..380: note = tr|A0A0R1I271|A0A0R1I271_9LACO Queuine tRNA-ribosyltransferase OS=Lactobacillus paralimentarius DSM 13961 = JCM 10707 OX=1423765 GN=tgt PE=3 SV=1

SEQ ID NO: 56621 - protein, 380 aa, Lactobacillus paraplantarum
  REGION 1..380: note = tr|A0A098R1M9|A0A098R1M9_9LACO Queuine tRNA-ribosyltransferase OS=Lactobacillus paraplantarum; OX = 60520 GN=tgt PE=3 SV=1
MEPAIKYRLIKKEKHTGARLGELITPHGTFPTPMFMPVGTQASVKSLAPEELDAMGAGVILSNTYHLWLRPGEQIVKEAGGLHQFMNWKKGILTDSGGFQVFSLAKNRDITEEGVHFKNHLNGSKMFLSPEKAIQIENDLGPDIMMSLDECPPFFESYDYVSKSVARTSRWAERGLKVHQHPDYQGLFGIVQGAGFKDLREQSAKDLVSLDFPGYSIGGLSVGESKAEMNHVLDFTTPLLPENKPRYLMGVGSADALIDGAIRGVDMFDCVLPTRIARNGTCMTSHGRLVVKNAAYAHDFTPLDDNCDCYTCRNFTRAYIRHLIKADETFGLRLTSYHNLYFLLHLMKQVRQAIMDDNLLEFRQNFFEMYGFNEKNPKNF

SEQ ID NO: 56622 - protein, 380 aa, unidentified
  source 1..380: note = Lactobacillus pentosiphilus
  REGION 1..380: note = tr|A0A1Z5IPU3|A0A1Z5IPU3_9LACO Queuine tRNA-ribosyltransferase OS=Lactobacillus pentosiphilus; OX = 1714682 GN=tgt PE=3 SV=1
MEPAIKYRLIKTEKHTGARLGELITPHGTFPTPMFMPVGTQATVKSLAPEELDEMGAGVILANTYHLWLQPGEGLVKEAGGLHQFMNWHKPILTDSGGFQVFSLAENRNITEEGVHFRNPSNGDQLFLSPEKAMQIENDLGPDIMMSLDECPPFFESYEYIKHSVERTSRWAERGLKAHANPDWQGLFGIVQGAGYEDLRSQSAHDLVSMDFPGYSIGGLSVGESKAEMNRVLDFTAPMLPTNKPRYLMGVGSPDSLIDSVMRGIDMFDCVLPTRIARRGTCMTSHGRLTVKNAKYARDFSPIDDQCDCYTCRNYTRAYIRHLFKADESFGLRLTSYHNLYFLLHLMKKVREAIMADNLLDFRANFFEEYGYNQPNPKNF

SEQ ID NO: 56623 - protein, 380 aa, unidentified
  source 1..380: note = Lactobacillus pentosiphilus
  REGION 1..380: note = tr|A0A1Z5IUE7|A0A1Z5IUE7_9LACO Queuine tRNA-ribosyltransferase OS=Lactobacillus pentosiphilus; OX = 1714682 GN=tgt PE=3 SV=1
MEPAIKYRLIKTEKHTGARLGELITPHGTFPTPMFMPVGTQATVKSLAPEELDEMGAGVILANTYHLWLQPGEDLVKEAGGLHQFMNWHKPILTDSGGFQVFSLAENRNITEEGVHFRNPSNGDQLFLSPEKAMQIENDLGPDIMMSLDECPPFFESYEYIKHSVERTSRWAERGLKAHANPDWQGLFGIVQGAGYEDLRRQSAHDLVSMDFPGYSIGGLSVGESKAEMNRVLGFTAPMLPTNKPRYLMGVGSPDSLIDGVMRGIDMFDCVLPTRIARRGTCMTSHGRLTVKNAKYARDFSPIDDQCDCYTCRNYTRAYIRHLFKADESFGLRLTSYHNLYFLLHLMKKVREAIMADNLLDFRANFFEEYGYNQPNPKNF

SEQ ID NO: 56624 - protein, 380 aa, Lactobacillus pentosus
  REGION 1..380: note = tr|G0M186|G0M186_LACPE Queuine tRNA-ribosyltransferase OS=Lactobacillus pentosus IG1; OX = 1042160 GN=tgt PE=3 SV=1
MEPAIKYRLIKKEKHTGARLGELITPHGTFPTPMFMPVGTQASVKSLAPEELDAMGAGVILSNTYHLWLRPGEQIVKEAGGLHQFMNWKKGILTDSGGFQVFSLAKNRDITEEGVHFKNHLNGSKMFLSPEKAIQIENDLGPDIMMSLDECPPFFESYDYVSKSVARTSRWAERGLKVHQHPDYQGLFGIVQGAGFKDLREQSAKDLVSLDFPGYSIGGLSVGESKAEMNHVLDFTTPLLPENKPRYLMGVGSADALIDGAIRGVDMFDCVLPTRIARNGTCMTSHGRLVVKNAAYAHDFTPLDDNCDCYTCRNFTRAYIRHLIKADETFGLRLTSYHNLYFLLHLMQQVRQAIMDDNLLEFRQNFFEMYGFNEKNPKNF

SEQ ID NO: 56625 - protein, 380 aa, Lactobacillus pentosus; identical to SEQ ID NO: 56624
  REGION 1..380: note = tr|I9KZY6|I9KZY6_LACPE Queuine tRNA-ribosyltransferase OS=Lactobacillus pentosus KCA1; OX = 1136177 GN=tgt PE=3 SV=1

SEQ ID NO: 56626 - protein, 380 aa, Lactobacillus perolens
  REGION 1..380: note = tr|A0A0R1MXH8|A0A0R1MXH8_9LACO Queuine tRNA-ribosyltransferase OS=Lactobacillus perolens DSM 12744 OX=1423792 GN=tgt PE=3 SV=1
MTVPVRYHLIKKEKHTGARLGELITPHGTFPTPMFMPVGTQASVKLMSPEELKEMGAGVILSNTYHLWLRPGPEIVKEAGGLHQFMNWDQGILTDSGGFQVFSLANNRDLTEEGVHFRSHLSGEKMFLSPEKAIQIENDLGPDIMMSLDECPPFFESYEYVRDSVARTSRWAERGLKAHRNPDTQGLFGIVQGAGFQDLREQSARDLVSLDFPGYSIGGLSVGESKAEMNHVLDFTTPLLPENKPRYLMGVGSPDALIDGVIRGIDMFDCVLPTRIARNGTVMTHHGRLVVKNAQYAHDFTPLDADCDCYTCTHYTRAYIRHLIKADETFGLRLTTYHNLYFLIHLMADVRQAIMDDNLLEFRENLFEQYGYDDVHAKNF

SEQ ID NO: 56627 - protein, 380 aa, Lactobacillus plantarum
  REGION 1..380: note = sp|Q88V05|TGT_LACPL Queuine tRNA-ribosyltransferase; OS = Lactobacillus plantarum (strain ATCC BAA-793 / NCIMB 8826 / WCFS1) OX=220668 GN=tgt PE=3 SV=1
MEPAIKYRLIKKEKHTGARLGELITPHGTFPTPMFMPVGTQASVKSLAPEELDAMGAGVILSNTYHLWLRPGEQIVKEAGGLHQFMNWKKGILTDSGGFQVFSLAKNRDITEEGVHFKNHLNGSKMFLSPEKAIQIENDLGPDIMMSLDECPPFFESYDYVSKSVARTSRWAERGLKVHQHPDYQGLFGIVQGAGFKDLREQSAKDLVSLDFPGYSIGGLSVGESKAEMNHVLDFTTPLLPENKPRYLMGVGSADALIDGAIRGVDMFDCVLPTRIARNGTCMTSHGRLVVKNAAYAHDFTPLDDNCDCYTCRNFTRAYIRHLIKADETFGLRLTSYHNLYFLLHLMKQVRQAIMDDNLLEFRQNFFEMYGFNDKNPKNF

SEQ ID NO: 56628 - protein, 380 aa, Lactobacillus plantarum; identical to SEQ ID NO: 56621
  REGION 1..380: note = tr|A0A199QHF5|A0A199QHF5_LACPN Queuine tRNA-ribosyltransferase OS=Lactobacillus plantarum OX=1590; GN = tgt PE=3 SV=1

SEQ ID NO: 56629 - protein, 381 aa, Lactobacillus pobuzihii
  REGION 1..381: note = tr|A0A0R2L3T0|A0A0R2L3T0_9LACO Queuine tRNA-ribosyltransferase OS=Lactobacillus pobuzihii; OX = 449659 GN=tgt PE=3 SV=1
MSEAAIKYRLIKKEKHTGARLGEITTPHGTIQTPIFMPVGTQATVKSLSPEELKEMNAQIILSNTYHLWERPGDDLVAEAGGLHKFMNWDRPILTDSGGFQVFSLAKLRDINEQGVNFRSNLNGAKLFLSPEKAIHIENNLGADIMMSFDECPPFFESYDYIKKSVERTSRWAERGLNAHRNPKTQGLFGIVQGGGHKQLRQQSARDLTAMDFAGYSIGGLSVGESKSEMNHVLEFTTPMLPENKPRYLMGVGSPDALIDGAIRGVDMFDCVLPTRIARNGTCMTSHGRLVVKNAKFARDFRPIDENCNCYTCRNFTRAYVRHLFKADETFGLRLTSYHNLYFLINLMKQVREAIKNDELLDFKEAFFEQYGLNVANPKNF

SEQ ID NO: 56630 - protein, 380 aa, Lactobacillus rapi
  REGION 1..380: note = tr|A0A512PJW9|A0A512PJW9_9LACO Queuine tRNA-ribosyltransferase OS=Lactobacillus rapi OX=481723; GN = tgt PE=3 SV=1
MQPAITYRLIKKEKHTGARLGEITTPHGTFRTPIFMPVGTQATVKTLAPEELDKMGATIVLANTYHLWLRPGEDIVKEAGGLHKFMNWHKGLLTDSGGFQVFSLAKNRDITEQGVTFKNELNGSRMFLSPEKAIQIENDLGPDIMMSLDECPPFFESYDYVKKSVERTSRWAERGLKAHRNPDTQGLFGIVQGAGFEDLRQQSAKDLVSLDFPGYSIGGLSVGESKTEMNRILEATTPLLPENKPRYLMGVGVTDSLIDGVIRGIDMFDCVLPTRIARNGTVMTSHGRLVVKNAQFARDFTPLDDQCDCYTCRNYTRAYIRHLIKADETFGLRLCSYHNLYYLIHLMKRVQQAIMDDNLLDLRAEVFEQYGYNKPNAKNF

SEQ ID NO: 56631 - protein, 399 aa, Lactobacillus rennini
  REGION 1..399: note = tr|A0A0R2CWV0|A0A0R2CWV0_9LACO Queuine tRNA-ribosyltransferase OS=Lactobacillus rennini DSM 20253; OX = 1423796 GN=tgt PE=3 SV=1
MVKYDSQFKLNLNANEGVFMKPAIQYHLIKKEKHTGARLGEIITPHGTFPTPMFMPVGTNASVKTMAPEELAKMGATIILANTYHMWLRPGEQIVKEAGGLHQFMNWPQGILTDSGGFQVFSLAKMRDITEEGVHFKNHLNGAKMFLSPEKAIQIENDLGPDIMMSLDECPPFFQSYDYVRHSVARTSRWAERGLKAHRHPDTQGLFGIVQGAGFKDLRVQSARDLVSMDFPGYSIGGLSVGESKAEMNHVLEFTTPLLPENKPRYLMGVGSADALIDGALRGVDMFDCVLPTRIARNGTVMTSHGRLVVKNARYAHDFGPLDDNCDCYACRNYSRAYIRHLIKANEIFGIHLTSYHNLYFLLHLMQQVRQAIRMDNLLDFRAHFFEQYGFNQKNARNF

SEQ ID NO: 56632 - protein, 380 aa, Lactobacillus rennini
  REGION 1..380: note = tr|A0A1K2I7L9|A0A1K2I7L9_9LACO Queuine tRNA-ribosyltransferase OS=Lactobacillus rennini OX=238013; GN = tgt PE=3 SV=1
MKPAIQYHLIKKEKHTGARLGEIITPHGTFPTPMFMPVGTNASVKTMAPEELAKMGATIILANTYHMWLRPGEQIVKEAGGLHQFMNWPQGILTDSGGFQVFSLAKMRDITEEGVHFKNHLNGAKMFLSPEKAIQIENDLGPDIMMSLDECPPFFQSYDYVRHSVARTSRWAERGLKAHRHPDTQGLFGIVQGAGFKDLRVQSARDLVSMDFPGYSIGGLSVGESKAEMNHVLEFTTPLLPENKPRYLMGVGSADALIDGALRGVDMFDCVLPTRIARNGTVMTSHGRLVVKNARYAHDFGPLDDNCDCYACRNYSRAYIRHLIKANEIFGIHLTSYHNLYFLLHLMQQVRQAIRMDNLLDFRAHFFEQYGFNQKNARNF

SEQ ID NO: 56633 - protein, 362 aa, Lactobacillus reuteri
  REGION 1..362: note = tr|B3XRC7|B3XRC7_LACR1 tRNA-guanine transglycosylase; OS = Lactobacillus reuteri (strain DSM 17509 / CIP 109821 / 100-23) OX=349123 GN=Lreu23DRAFT_3589 PE=4 SV=1
MSKLEFTINQSDRQARTGLLQVNGRQIETPALVASGDELAKLSPSQLNLAGVSAVKTSGLKRWLKYDSVTEKLGDLHQLFQWDGLLFVDLETEEAYRLAKPRGKKHDGVRFHDPATGQLKFWQPETALQIQEVLGADIFQSFDQATDYYAPVDDLKAGVKQTSDWLSVVKLQKGQSLGSIVGGGLRDLRTASIEAVDEAGLSGYRLSGIPNNLDDQEFRRIINEITPKLAEQKLRYLPAALSFAQLIAAILAGVDLIDSNLAAQKAANGVALVNQGVTVLHLDRQHFSFDSQVLDRQCACATCRAGYSRALLHSLINNRSFYGEQLLLQHNLFTLNKLMGGLRQAIKNHQTKKFVQELLQNQ

SEQ ID NO: 56634 - protein, 362 aa, Lactobacillus reuteri
  REGION 1..362: note = tr|A5VIX3|A5VIX3_LACRD tRNA-guanine transglycosylase; OS = Lactobacillus reuteri (strain DSM 20016) OX=557436; GN = Lreu_0529 PE=4 SV=1
MCKLEFTINQSDHQARTGLLQVNGRQIETPALAASGDELAKLSPIQLNQAGVSVVKTSGLKRWLKYDSMTEKLGDLHRFFQWDGLLLVDLETEEAYHLAKPRGKKHDGVRFHDPATRQLKFWQPETALQVQEALGADIFQSFDQATDYYAPVDDLKAGVKQTSDWLSVVKPQKGQSLGSIGGGGLKDLRTASIKAVDEAELSGYRLSGIPNNLDDQEFSRIINEITPKLEEEKLRYLPAALSFDQMIEAILAGVDLIDSNLAAKKAANGIALVNQGATVLHLDRQHFSFDSEVLDRQCACATCRAGYSRALLHSLITNHSFYGEQLLLQHNLFTLNKLMSSLRQAIKYHQTKKFVQELLQNQ

SEQ ID NO: 56635 - protein, 380 aa, Lactobacillus rhamnosus
  REGION 1..380: note = tr|A0A249N7W5|A0A249N7W5_LACRH Queuine tRNA-ribosyltransferase OS=Lactobacillus rhamnosus DSM 14870 OX=1380361 GN=tgt PE=3 SV=1
MEPAVKYRLIHQDKHSGARLGELITPHGTFPTPMFMPVGTQASVKTMAPEELDTMGATVILANTYHLWLRPGPDLIEEAGGLHRFMNWHKGILTDSGGFQVFSLADTRHITEDGVTFKNHLNGAKMFLSPEKAIAIENALGPDIMMSLDECPPFFESYDYVKKSVARTSRWAERGLKAHKNPDWQALFGIVQGAGFKDLREQSAKDLVSMDFPGYSIGGLSVGESKDEMNHVLDFTTPLLPEDKPRYLMGVGSADALIDGALRGIDMFDCVLPTRIARNGTCMTSRGRLVIKNAKYAHDFGPLDPNCDCYACRNYSRAYIRHLIHVGEAFGIRLTTYHNLYFLLHLMQQVREAIANDDLLAFREDFFEAYGYNKEKAKNF

SEQ ID NO: 56636 - protein, 380 aa, Lactobacillus rhamnosus
  REGION 1..380: note = tr|K8QUK6|K8QUK6_LACRH Queuine tRNA-ribosyltransferase OS=Lactobacillus rhamnosus LRHMDP2; OX = 1203258 GN=tgt PE=3 SV=1
MEPAVKYRLIHQDKHSGARLGELITPHGTFPTPMFMPVGTQASVKTMAPEELDTMGATVILANTYHLWLRPGPDLIEEAGGLHRFMNWHKGILTDSGGFQVFSLADTRHITEDGVTFKNHLNGAKMFLSPEKAIAIENALGPDIMMSLDECPPFFESYEYVKKSVARTSRWAERGLKAHKNPDWQALFGIVQGAGFKDLREQSAKDLVSMDFPGYSIGGLSVGESKDEMNHVLDFTTPLLPADKPRYLMGVGSADALIDGALRGIDMFDCVLPTRIARNGTCMTSRGRLVIKNAKYAHDFGPLDPNCDCYACRNYSRAYIRHLIHVGEAFGIRLTTYHNLYFLLHLMQQVREAIANDDLLAFREDFFEAYGYNKEKAKNF

SEQ ID NO: 56637 - protein, 381 aa, Lactobacillus ruminis
  REGION 1..381: note = tr|A0A1I2QBH4|A0A1I2QBH4_9LACO Queuine tRNA-ribosyltransferase OS=Lactobacillus ruminis DSM 20403 = NBRC 102161 OX=1423798 GN=tgt PE=3 SV=1
MSEPAVKYRLIKKEKHTGARLGELITPHGTFPTPMFMPVGTQATVKSMSPEELKEMGAGVILSNTYHLWLRPGEDLVKEAGGLHKFMNWDRGILTDSGGFQVFSLAEMRNITEEGVHFRSHLSGEPLFLSPEKAIHIENCLGSDIMMSFDECPPFFESYDYIKKSIERTSRWAERGLRAHENPETQALFGIIQGGGHKELREQSARDLVSLDFPGYSIGGLSVGESKAEMNHVLDFTTPLIPENKPRYLMGVGSPDALIDGAIRGIDMFDCVLPTRIARNGTCMTSHGRLVVKNAKYARDFSPIDDNCNCYTCRNYTRAYVRHLFKADETFGLRLTSYHNLYFLLNLMKQVRQAIMDDNLLEFRQDFFERYGLNVANPKNF

SEQ ID NO: 56638 - protein, 381 aa, Lactobacillus ruminis
  REGION 1..381: note = tr|A0A0G8G5B8|A0A0G8G5B8_9LACO Queuine tRNA-ribosyltransferase OS=Lactobacillus ruminis OX=1623; GN = tgt PE=3 SV=1
MSEPAVKYRLIKKEKHTGARLGELITPHGTFPTPMFMPVGTQATVKSMSPEELKEMGAGVILSNTYHLWLRPGEDLVKEAGGLHKFMNWNRGILTDSGGFQVFSLAEMRNITEEGVHFRSHLSGEPLFLSPEKAIHIENCLGSDIMMSFDECPPFFESYDYIKKSIERTSRWAERGLRAHENPETQALFGIIQGGGHKNLREQSARDLVSLDFPGYSIGGLSVGESKAEMNHVLDFTTPLIPENKPRYLMGVGSPDALIDGAIRGIDMFDCVLPTRIARNGTCMTSHGRLVVKNAKYARDFSPIDDNCNCYTCRNYTRAYVRHLFKADETFGLRLTSYHNLYFLLNLMKQVRQAIMDDNLLEFRQDFFERYGLNVANPKNF

SEQ ID NO: 56639 - protein, 381 aa, Lactobacillus saerimneri
  REGION 1..381: note = tr|M5J566|M5J566_9LACO Queuine tRNA-ribosyltransferase OS=Lactobacillus saerimneri 30a; OX = 1227363 GN=tgt PE=3 SV=1
MTEPAVKYHLKKKEKHTGARLGTLETPHGTFPTPMFMPVGTQATVKAISPRELKEMGAGIILSNTYHLWLRPGEELVAEAGGLHHFMNWDQGILTDSGGFQVFSLAQMRDITEKGVHFKSHLDGRNLFLSPEKAIAVENALGADIIMSFDECPPFFESYDYIKKSVERTSRWAERGLKAHKHPDRQALFGIVQGGGHKDLRELSAKALVSLDFPGYSIGGLSVGESKAEMNHVLDFTTPLLPENKPRYLMGVGSPDALIDGVIRGVDMFDCVLPTRIARNGTCMTSHGRVVIKNAVYAHDFNPLDDNCDCYVCQNYTRAYLRHLFKAQETLGLRLASYHNLYFLLHLMKQIRQAIADDNLLDFREQFFEEYGYNKQNSRNF

SEQ ID NO: 56640 - protein, 381 aa, Lactobacillus saerimneri
  REGION 1..381: note = tr|A0A0R1SXI5|A0A0R1SXI5_9LACO Queuine tRNA-ribosyltransferase OS=Lactobacillus saerimneri DSM 16049 OX=1122153 GN=tgt PE=3 SV=1
MTEPAVKYHLKKKEKHTGARLGTLETPHGTFPTPMFMPVGTQATVKAISPRELKEMGAGIILSNTYHLWLRPGEELVAEAGGLHHFMNWDQGILTDSGGFQVFSLAQMRDITEKGVHFKSHLDGRNLFLSPEKAIAVENALGADIIMSFDECPPFFESYDYIKKSVERTSRWAERGLKAHKHPDRQALFGIVQGGGHKDLRELSAKALVSLDFPGYSIGGLSVGESKAEMNHVLDFTTPLLPENKPRYLMGVGSPDALIDGVIRGVDMFDCVLPTRIARNGTCMTSHGRVVIKNAVYAHDFNPLDDNCDCYVCQNYTRAYLRHLFKAQETLGLRLASYHNLYFLLHLMKQIRQAIADDNLLDFREQFFEEYGYNRQNSRNF

SEQ ID NO: 56641 - protein, 380 aa, Lactobacillus sakei
  REGION 1..380: note = tr|A0A512KGX7|A0A512KGX7_LACSK Queuine tRNA-ribosyltransferase OS=Lactobacillus sakei subsp. carnosus OX=214325 GN=tgt PE=3 SV=1
MEPAIKYRLIKKEKHTGARLGEIVTPHGTFKTPMFMPVGTQASVKTMAPEDLKEMGAGIILSNTYHLWLRPGEDIVEKAGGLHKFMNWDRGVLTDSGGFQVFSLAKLRDISEEGVAFKSHLNGEKLFLSPEKAIHVENALGADIMMSFDECPPFFESYDYVKKSVERTSRWAERGLIAHQNPATQGLFGIVQGAGFEDLRRQSARDLVGMDFPGYSIGGLSVGESKGEMNRVLDFTTPMLPEDKPRYLMGVGSPDALIDGVIRGVDMFDCVLPTRIARNGTTMTSQGRLVVKNAKYSEDFRPLDPKCDCYVCKNYTRAYIRHLIKADETFGIHLTSYHNLYFLINLMHQVQDAIEQDNLLEFREAFFEEYGYNENNGRNF

SEQ ID NO: 56642 - protein, 380 aa, Lactobacillus sakei; identical to SEQ ID NO: 56641
  REGION 1..380: note = sp|Q38YP9|TGT_LACSS Queuine tRNA-ribosyltransferase; OS = Lactobacillus sakei subsp. sakei (strain 23K) OX=314315; GN = tgt PE=3 SV=1

SEQ ID NO: 56643 - protein, 381 aa, Lactobacillus salivarius
  REGION 1..381: note = tr|F7QSK8|F7QSK8_9LACO Queuine tRNA-ribosyltransferase OS=Lactobacillus salivarius GJ-24; OX = 1041521 GN=tgt PE=3 SV=1
MAAEPAIKYRLIKKEKHTGARLGEIMTPHGTFPTPMFMPVGTQASVKSIAPEELDAMGANIILSNTYHLWLRPGEDLVEEAGGLHKFMNWDKGILTDSGGFQVFSLADLRNIKEEGVYFRNHLNGQKLFLSPEKAINIENALGADIIMSFDECPPFFESYDYIKKSVERTSRWAERGLKAHKYPDRQGLFGIVQGGGHKDLRQQSARDLVSLDFPGYSIGGLSVGESKAEMNNVLEFTTPLLPENKPRYLMGVGSPDALIDGVIRGVDMFDCVLPTRIARNGTCMTSHGRLVVKNAKYARDFTPIDDNCNCYTCRNFTRAYVRHLLKADETFGLRLTSYHNLYFLINLMKQVREAIMNDNLLEFREHFFEEYGYNESKRNF

SEQ ID NO: 56644 - protein, 381 aa, Lactobacillus salivarius
  REGION 1..381: note = tr|A0A2U2M921|A0A2U2M921_9LACO Queuine tRNA-ribosyltransferase OS=Lactobacillus salivarius; OX = 1624 GN=tgt PE=3 SV=1
MAAEPAIKYRLIKKEKHTGARLGEIITPHGTFPTPMFMPVGTQASVKSIAPEELDAMGANIILSNTYHLWLRPGEDLVEEAGGLHKFMNWNKGILTDSGGFQVFSLADLRNIKEEGVYFRNHLNGQKLFLSPEKAINIENALGADIIMSFDECPPFFESYDYIKKSVERTSRWAERGLKAHKYPDRQGLFGIVQGGGHKDLRQQSARDLVSLDFPGYSIGGLSVGESKAEMNNVLEFTTPLLPENKPRYLMGVGSPDALIDGVIRGVDMFDCVLPTRIARNGTCMTSHGRLVVKNAKYARDFTPIDDNCNCYTCCNFTRAYVRHLLKADETFGLRLTSYHNLYFLINLMKQVREAIMNDNLLEFREYFFEEYGYNESKRNF

SEQ ID NO: 56645 - protein, 380 aa, Lactobacillus saniviri
  REGION 1..380: note = tr|A0A0R2MX03|A0A0R2MX03_9LACO Queuine tRNA-ribosyltransferase OS=Lactobacillus saniviri JCM 17471 = DSM 24301 OX=1293598 GN=tgt PE=3 SV=1
MEPAIKYRLIHQDKHSGARLGEIITPHGTFPTPMFMPVGTLASVKTMAPEELDEMGAGIILANTYHLWLRPGEDLIEEAGGLHKFMNWDKGILTDSGGFQVFSLAGMRDIKEEGVHFKNHLNGAPMFLSPEKAIAIENALGPDIMMSFDECPPFFESYDYVKKSVARTSRWAERGLEAHKNPDYQALFGIVQGAGFQDLREQSAKDLVSMDFPGYSIGGLSVGESKDEMNRVLDFTTPLLPENKPRYLMGVGSADALIDGALRGIDMFDCVLPTRIARNGTVMTSHGRLVVKNAKYARDFSPLDDNCNCYACRNFTRAYIRHLIHTDEAFGMRLTTYHNLYFLLHLMQQVREAIANDALLDFKESFFEEYGYNTANAKNF

SEQ ID NO: 56646 - protein, 381 aa, Lactobacillus satsumensis
  REGION 1..381: note = tr|A0A0R1UW95|A0A0R1UW95_9LACO Queuine tRNA-ribosyltransferase OS=Lactobacillus satsumensis DSM 16230 = JCM 12392 OX=1423801 GN=tgt PE=3 SV=1
MTEPAIKYRLLKKEKHTGARLGEIITPHGTFPTPMFMPVGTQATVKSLAPEELEEMGANIVLSNTYHLWLRPGEEIVEQAGGLHRFMNWNKGILTDSGGFQVFSLAKIRDITEKGVHFRSHLSGEKLFLSPEKAIHIQNSLGADIMMSFDECPPFFESYDYIKKSVERTSRWAERGLKAHLNPERQGLFGIVQGGGHQDLRQLSARQLVAMDFPGYSIGGLSVGESKTEMNHVLDFTTPLLPENKPRYLMGVGSADALIDGVIRGVDMFDCVLPTRIARNGTCMTSHGRIVIKNATYARDFSPLDDRCNCYTCRNFTRAYLRHLFKADETFGLRLASYHNLYFLLHLMQNVRQAIKDDHLLEFREAFFEEYGFNKKNARNF

SEQ ID NO: 56647 - protein, 380 aa, Lactobacillus selangorensis
  REGION 1..380: note = tr|A0A0R2FS87|A0A0R2FS87_9LACO Queuine tRNA-ribosyltransferase OS=Lactobacillus selangorensis; OX = 81857 GN=tgt PE=3 SV=1
MESPIQYHLIKKEKHTGARLGEIVTPHGTFPTPMFMPVGTQATVKAMSPEQLAEMGAGIILANTYHLWLRPGPEIVEEAGGLHPFMNWPKGILTDSGGFQVFSLAKMRDITEEGVHFKNHLNGAKMFLSPEKAIHIENALGPDIMMSFDECPPFFESYDYVKKSVARTSRWAERGLKAHRNPDKQGLFGIVQGAGFKDLREQSAKDLVSMDFPGYSIGGLSVGESKAEMNHVLDFTTPLLPENKPRYLMGVGSPDALIDGVLRGIDMFDCVLPTRIARNGTVMTSHGRLVVKNAKYAHDFGPMDDNCDCYACRNYSRAYIRHLIKSDETFGIHLTTYHNLYFLIHLMGDVRQAIMDDNLLEFRQDFFERYGLNQENARNF

SEQ ID NO: 56648 - protein, 380 aa, Lactobacillus senioris
  REGION 1..380: note = tr|A0A0R2D247|A0A0R2D247_9LACO Queuine tRNA-ribosyltransferase OS=Lactobacillus senioris DSM 24302 = JCM 17472 OX=1423802 GN=tgt PE=3 SV=1
MEPAIKYRLIKTEKHTGARLGEIITPHGTFPTPMFMPVGTQATVKTLAPEELDEMGAGIILANTYHLWLRPGEDIVEQAGGLHKFMNWDKGILTDSGGFQVFSLASNRNITEEGVTFKNEINGSKMFLSPEKAIQIENALGPDIMMSFDECPPYFESYDYVKHSVERTSRWAERGLKSHQNPDWQALFGIVQGAGFEDLRKQSAADLVSLDFPGYSIGGLSVGESKEEMNRVLEFTTPLLPTNKPRYLMGVGTTDSLIDGVIRGVDMFDCVLPTRIARNGTVMTSHGRLVVKNAKYARDFTPLDDQCNCYTCRNYTRAYIRHLMKTDESFGMRLASYHNLYYLLNLMKRVRQAIMDDNLLELREEVFEQYGYNLPNAKNF

SEQ ID NO: 56649 - protein, 380 aa, unidentified
  source 1..380: note = Lactobacillus shenzhenensis
  REGION 1..380: note = tr|U4TKV7|U4TKV7_9LACO Queuine tRNA-ribosyltransferase OS=Lactobacillus shenzhenensis LY-73 OX=1231336 GN=tgt PE=3 SV=1
MTPPIQYRLIKKEKHTGARLGELITPHGTFPTPMFMPVGTQASVKLMSPEELKEMGAGVILSNTYHLWLRPGPEIVKEAGGLHQFMNWDQGILTDSGGFQVFSLAENRDLTEEGVHFKSHLSGAKMFLSPEKAIAIENDLGPDIMMSLDECPPFFASYEYVRDSVARTSRWAERGLKAHRNPDTQGLFGIVQGAGFQDLREQSAKDLVSLDFPGYSIGGLSVGESKAEMNHVLDFTTPLLPEHKPRYLMGVGSPDALVDGVIRGIDMFDCVLPTRIARNGTVMTHHGRLVVKNAQYAHDFTPLDPDCDCYTCTHYTRAYIRHLIKADETFGLRLTTYHNLYFLIHLMADVRQAIMDDNLLEFRQNLFDEYGYTGATAKNF

SEQ ID NO: 56650 - protein, 380 aa, unidentified
  source 1..380: note = Lactobacillus silagei
  REGION 1..380: note = tr|A0A1Z5IK75|A0A1Z5IK75_9LACO Queuine tRNA-ribosyltransferase OS=Lactobacillus silagei JCM 19001; OX = 1302250 GN=tgt PE=3 SV=1
MEPAIKYRLIKTEKDTGARLGELITPHGTFPTPMFMPVGTQATVKSLAPEELDEMGAGVILANTYHLWLQPGEDLIKEAGGLHQFMNWHKPILTDSGGFQVFSLAENRNIMEEGVHFRNPSNGDQLFLSPEKAMQIENDLGPDIMMSLDECPPFFESYDYIKHSVERTSRWAERGLKAHANPDWQGLFGIVQGAGYEDLRRQSAHDLVSMDFPGYSIGGLSVGESKAEMNRVLDFTAPMLPTNKPRYLMGVGSPDSLIDGVMRGIDMFDCVLPTRIARRGTCMTSHGRLTVKNAKYARDFTPIDDQCDCYTCRNYTRAYIRHLFKADESFGLRLTSYHNLYFLLHLMGKVREAIMNDNLVDFRAQFFEEYGYNQPNPKNF

SEQ ID NO: 56651 - protein, 380 aa, unidentified
  source 1..380: note = Lactobacillus silagincola
  REGION 1..380: note = tr|A0A1Z5J3S8|A0A1Z5J3S8_9LACO Queuine tRNA-ribosyltransferase OS=Lactobacillus silagincola; OX = 1714681 GN=tgt PE=3 SV=1
MEPAIKYRLIKTEKDTGARLGELITPHGTFPTPMFMPVGTQATVKSLAPEELDEMGAGVILANTYHLWLQPGEDLVKEAGGLHKFMNWHKPILTDSGGFQVFSLAENRNITEEGVHFRNPSNGDRMFLSPEKAMQIENDLGPDIMMSLDECPPFFESYDYIKHSVERTSRWAERGLKAHANPDWQGLFGIVQGAGYEDLRRQSAHDLVSMDFPGYSIGGLSVGESKAEMNRVLDFTAPMLPTNKPRYLMGVGSPDSLIDGVMRGIDMFDCVLPTRIARRGTCMTSHGRLTVKNAKYARDFSPIDDQCDCYTCRNYTRAYIRHLFKADESFGLRLTSYHNLYFLLHLMQKVREAIMADNLLDFRANFFEEYGYNQPNPKNF

SEQ ID NO: 56652 - protein, 380 aa, Lactobacillus similis
  REGION 1..380: note = tr|A0A0R2EX27|A0A0R2EX27_9LACO Queuine tRNA-ribosyltransferase OS=Lactobacillus similis DSM 23365 = JCM 2765 OX=1423804 GN=tgt PE=3 SV=1
MEPAVKYRLIKTEKHTGARLGELITPHGTFPTPMFMPVGTQATVKAIAPEELDEMGAGVILANTYHLWLQPGEDLIKEAGGLHKFMNWQKPILTDSGGFQVFSLAENRNITEEGVKFKNPINGDRLFLSPEKAMQIENDLGPDIMMSLDECPPFFESYDYIKHSVERTSRWAERGLKAHQNPDWQALFGIVQGAGYEDLRRQSAQDLVSLDFPGYSIGGLSVGESKAEMNRVLDFTTPMLPTNKPRYLMGVGSPDSLIDGVMRGVDMFDCVLPTRIARNGTCMTSRGRLAVKNAKFARDFRPLDEKCDCYTCRHYSRAYIRHLFKADETFGLRLTSYHNLYFLLNLMRQIRQAIMDDSLLDFKQDFFEEYGYNLPNAKNF

SEQ ID NO: 56653 - protein, 380 aa, Lactobacillus sp.
  REGION 1..380: note = tr|A0A351DJI8|A0A351DJI8_9LACO Queuine tRNA-ribosyltransferase OS=Lactobacillus sp. OX=1591; GN = tgt PE=3 SV=1
MTAPVRYRLIKTEKHTGARLGELITPHGTFPTPMFMPVGTQASVKLMSPEELKEMGAGVILSNTYHLWLRPGPEIVKEAGGLHKFMNWDQGILTDSGGFQVFSLAENRDITEEGVHFRSHLSGEKMFLSPEKAIQIENDLGPDIMMSLDECPPFFESYEYVRDSVARTSRWAERWLNAHRKPDAQGRFGIVQGAGFQDLREQSAKDLVSLDFPGYSIGGLSVGESKAEMNHVLDFTTPLLPENKPRYLMGVGSPDALIDGVIRGIDMFDCVLPTRIARNGTVMTHHGRLIVKNAKYAHDFTPLDPDCDCYTCTHYSRAYIRHLIKADETFGLRLTTYHNLYFLIHLMADVRQAIMDDNLIEFRQNLFDEYGYSDATTKNF

SEQ ID NO: 56654 - protein, 381 aa, Lactobacillus sp.
  REGION 1..381: note = tr|A0A401ISW3|A0A401ISW3_9LACO Queuine tRNA-ribosyltransferase OS=Lactobacillus sp. YK43; OX = 2163553 GN=tgt PE=3 SV=1
MSEAAVKYRLIKKDKHTGARLGEVTTPHGTFQTPIFMPVGTQATVKSIAPEELKEMNAGIILSNTYHLWERPGDDIVAEAGGLHKFMNWDRSILTDSGGFQVFSLAKLRDISEEGVHFRSNLNGAPLFLSPEKAIQIENNLGADIMMSFDECPPFFESYDYIKKSVERTSRWAERGLKAHQRPNDQGLFGIVQGGGHKDLRQLSARALTSMDFAGYSIGGLSVGESKAEMNHVLEFTTPMLPENKPRYLMGVGSPDALIDGAIRGIDMFDCVLPTRIARNGTCMTSHGRLVVKNAKFARDFRPLDENCNCYTCRNYTRAYLRHLFKTNETFGLRLTSYHNLYFLLDLMRQVREAIKNDELLDFKEAFFEQYGLNRENPKNF

SEQ ID NO: 56655 - protein, 381 aa, unidentified
  source 1..381: note = Lactobacillus suantsaii
  REGION 1..381: note = tr|A0A4Q0VL61|A0A4Q0VL61_9LACO Queuine tRNA-ribosyltransferase OS=Lactobacillus suantsaii; OX = 2292255 GN=tgt PE=3 SV=1
MEPAIKYRLIKTEKHTGARLGELMTPHGTFATPMFMPVGTQAAMKGAISPEELDEMGSQVILANTYHLWLQPGADLIAEAGGLHRFMNWPKGILTDSGGFQVFSLAKNRRLTEEGVHFRNAVNGDRLFLSPEKAIHIQNQLGPDIMMSLDECPPFFESYDYVKHSVERTSRWAERGLKAHAHPDYQGLFGIVQGAGYEDLRRESARDLVSLDFPGYSIGGLSVGESKDEMNRILALTTPLLPTSKPRYLMGVGTADSLIDGVIRGVDMFDCVLPTRIARKGTCMTTHGRLVVKNAKYARDFRPIDPDCDCYTCQHYSRAYLRHLFKADEDFGLRLASYHNLYFLHHLMKRVRQAIQNDSLLDLRAEVFDTYGYNAEHPKNF

SEQ ID NO: 56656 - protein, 381 aa, Lactobacillus sucicola
  REGION 1..381: note = tr|A0A023CVX2|A0A023CVX2_9LACO Queuine tRNA-ribosyltransferase OS=Lactobacillus sucicola DSM 21376 = JCM 15457 OX=1423806 GN=tgt PE=3 SV=1
MTEPAIKYRLIKKEKHTGARLGEIVTPHGTFPTPMFMPVGTQASVKSLAPEELDAMGANIILSNTYHLWLRPGEDIVKEAGGLHKFMNWKKGILTDSGGFQVFSLAKMRDITEEGVHFRSHLSGEKLFLSPEKAIQIENALGADIMMSFDECPPFFETYDYIKKSVERTSRWAERGLKAHQNKGTQGLFGIVQGGGHKDLRAQSARDLVSMDFPGYSIGGLSVGESKAEMNHVLSFTTPMLPENKPRYLMGVGSADALIDGVIRGIDMFDCVLPTRIARNGSCMTSHGRLVVKNAIYARDFRPIDDNCNCYTCRNFSRAYIRHLIKADETFGLRLTSYHNLYFLINLMKQVRQAIMDDNLLEFRESFFEEYGFNRENHRNF

SEQ ID NO: 56657 - protein, 380 aa, Lactobacillus suebicus
  REGION 1..380: note = tr|A0A0R1W7N1|A0A0R1W7N1_9LACO Queuine tRNA-ribosyltransferase OS=Lactobacillus suebicus DSM 5007 = KCTC 3549 OX=1423807 GN=tgt PE=3 SV=1
MEPAVKYRLIKKDKHTGARAGELITPHGTFKTPMFMPVGTQATVKSIAPEELDEMGAGVILANTYHLWLQPGEKLVEEAGGLHKFMNWDKGILTDSGGFQVFSLAEHRNIKEDGVRFRDPVSGSTMFLSPEKAIQIENALGPDIMMSFDECPPYFETYDYIKASVERTSRWAERGLKAHQNPDWQGLFGIVQGAGFKKLRQQSAHDLVSMDFPGYSVGGLSVGESKEEMNRVLEMTTPFLPEDKPRYLMGVGTADSLIDGVMRGIDMFDCVLPTRIARNGTCMTSHGRLVVKNAEYAHDFNPIDPECNCYACRNYSRAYIRHLLHVNETFGLRLTSYHNLYFLIHLMQDLREAILEDRVLDFREMVFEKYGFNKENARNF

SEQ ID NO: 56658 - protein, 380 aa, Lactobacillus sunkii
  REGION 1..380: note = tr|A0A1E7XDF9|A0A1E7XDF9_9LACO Queuine tRNA-ribosyltransferase OS=Lactobacillus sunkii OX=481719; GN = tgt PE=3 SV=1
MQPAITYRLIKKEKHTGARLGEITTPHGTFRTPMFMPVGTQATVKTLAPEELDQMGSTIILANTYHLWLRPGEDIVKEAGGLHKFMNWDKGILTDSGGFQVFSLAKNRDITEEGVTFKNEINGSKMFLSPEKAIQIENDLGPDIMMSLDECPPFFESYDYVKKSVERTSRWAERGLKAHKNPDWQGLFGIVQGAGFEDLRKQSAQDLVSLDFPGYSIGGLSVGESKQEMNRILESTSPLLPENKPRYLMGVGATDSLIDGVIRGIDMFDCVLPTRIARNGTVMTSHGRLVVKNAKYARDFTPLDDQCNCYTCRNYTRAYIRHLVKTDETFGLRLCSYHNLYYLIHLMKRVQQAIMDDNLLDLRAEVFEQYGYNKPNAKNF

SEQ ID NO: 56659 - protein, 380 aa, Lactobacillus sunkii; identical to SEQ ID NO: 56658
  REGION 1..380: note = tr|A0A0R1L075|A0A0R1L075_9LACO Queuine tRNA-ribosyltransferase OS=Lactobacillus sunkii DSM 19904; OX = 1423808 GN=tgt PE=3 SV=1

SEQ ID NO: 56660 - protein, 380 aa, Lactobacillus tucceti
  REGION 1..380: note = tr|A0A0R1IXY4|A0A0R1IXY4_9LACO Queuine tRNA-ribosyltransferase OS=Lactobacillus tucceti DSM 20183; OX = 1423811 GN=tgt PE=3 SV=1
MEPAVKYTLLKKEKHTGARLGLLETPHGTFETPMFMPVGTEASVKNMAPEDLDKIGASIILANTYHLWLRPGEDIVKEAGGLHKFMNWDKGILTDSGGFQVFSLANTRDITEAGVHFRNHLNGRREFLSPEKAIKIENYLGPDIMMSLDECPPFFESYDYIKKSVARTSRWAERGLEAHRNPDWQALFGIVQGAGFEDLRKQSAHDLVSMDFPGYSIGGLSVGESKEEMNNVLDFTTPLLPENKPRYLMGVGSTDALIDGVIRGIDMFDCVLPTRIARNGTCMTTKGRLVVKNAKYARDFRPLDENCDCYVCRNYSRAYIRHLINANELFGTHLTSYHNLYYLLNLMKGVRQAIKDDNLIEFREHVFEEYGLNKENARNF

SEQ ID NO: 56661 - protein, 381 aa, Lactobacillus uvarum
  REGION 1..381: note = tr|A0A0R1Q2D0|A0A0R1Q2D0_9LACO Queuine tRNA-ribosyltransferase OS=Lactobacillus uvarum DSM 19971; OX = 1423812 GN=tgt PE=3 SV=1
MTEPAIKYHLIKKEKHTGARLGEIITPHGTFPTPMFMPVGTQASVKSLAPEELDAMGANIILSNTYHLWLRPGEEIVKEAGGLHKFMNWNKGILTDSGGFQVFSLAKMRDITEEGVHFRSHLSGEKLFLSPEKAIQIENALGADIMMSFDECPPFFESYDYIKKSVERTSRWAERGLKAHQNAEKQGLFGIVQGGGHKELRAQSAHDLVSMDFPGYSIGGLSVGESKSEMNHVLSFTTPMLPENKPRYLMGVGSADALIDGVIRGIDMFDCVLPTRIARNGSCMTSHGRLVVKNAVYAHDFRPIDDNCNCYTCRNFSRAYIRHLIKADETFGLRLTSYHNLYFLIHLMQQVRQAIMDDNLLEFRENFFEEYGFNSENSRNF

SEQ ID NO: 56662 - protein, 380 aa, Lactobacillus vaccinostercus
  REGION 1..380: note = tr|A0A0R2A0Y7|A0A0R2A0Y7_9LACO Queuine tRNA-ribosyltransferase OS=Lactobacillus vaccinostercus DSM 20634 OX=1423813 GN=tgt PE=3 SV=1
MEPAIKYRLIKKDKHTGARAGELITPHGTFKTPMFMPVGTQATVKSIAPEELDEMGAGVILANTYHLWLQPGEKLVEEAGGLHKFMNWDKGILTDSGGFQVFSLAKHRNIKENGVTFKDPVSGQTMFLSPEKAIQIENALGPDIMMSFDECPPYFETYDYIKASVERTSRWAERGLKAHQNPDWQGLFGIVQGAGFKKLRQQSARDLVSMDFPGYSVGGLSVGESKEEMNRVLEMTTPFLPENKPRYLMGVGTADSLIDGVMRGIDMFDCVLPTRIGRNGTCMTSHGRLVVKNAQYTHDFGPLDDECNCYVCRNYTRAYIRHLLHVNETFGIRLTSYHNLYFLIHLMHDMRQAILDDQVLEFREMVFEKYGFNKENAGNF

SEQ ID NO: 56663 - protein, 346 aa, Lactobacillus vaginalis
  REGION 1..346: note = tr|C2ETT8|C2ETT8_9LACO tRNA-guanine transglycosylase; OS = Lactobacillus vaginalis DSM 5837 = ATCC 49540; OX = 1423814 GN=tgt PE=4 SV=1
MRVAMNRYFKINRTEDGLRTGKLVVNGLELRTPLLVHSENVIRYLRPEQVRATNTKALYYDPIVLAEKLDKRDLADLPDLHRVLGWQGVFFTTSGAAEIGKLAKPRGYKTNGINFRLPNQGQLISLSPKKAIQLQEQLGADITEQLYRDVNYYAPVDDLAAAVELTGRWYLTNQNELFPITGGGLKKLHRQSVDSVTGQQPFGYFITQTEQIDSLAEIERNLSAIIKLLPFESLRVTKTRANFEQLTTVIRSGIDVVYSDVAVHEAVMGNALVDNGKRLNFTRESFSNDWEAIDPECQCPVCTSHYSRAYLHYLARINSPQYISLILEHNLFWLNQFVANLSSKIK

SEQ ID NO: 56664 - protein, 381 aa, Lactobacillus versmoldensis
  REGION 1..381: note = tr|A0A0R1S999|A0A0R1S999_9LACO Queuine tRNA-ribosyltransferase OS=Lactobacillus versmoldensis DSM 14857 = KCTC 3814 OX=1423815 GN=tgt PE=3 SV=1
MTEPAIKYKLIQKEKHTGARLGLIETPHGTFETPMFMPVGTEATVKNMAPEDLEKIGATIILSNTYHLWLRPGEDIVKEAGGLHKFMNWNKGILTDSGGFQVFSLANTRDITEAGVHFRNHLNGRREFLSPEKAIQIENDLGPDIMMSLDECPPFFESYDYIKDSVARTSRWAERGLRAHRNPDWQALFGIVQGAGYEDLRKQSAQDLVSMDFPGYSIGGLSVGESKSEMNHVLDFTAPLLPENKPRYLMGVGSADALIDGVIRGIDMFDCVLPTRIARNGTCMTTHGRLVVKNAKYARDFRPLDEDCDCYVCRNYSRAYIRHLINANELFGTHLTSYHNLYFLLKLMADVRQSIKDDNLLEFREHVFEQYGFNKKNAKNF

SEQ ID NO: 56665 - protein, 381 aa, Lactobacillus vini
  REGION 1..381: note = tr|A0A0R2CAQ7|A0A0R2CAQ7_9LACO Queuine tRNA-ribosyltransferase OS=Lactobacillus vini DSM 20605; OX = 1133569 GN=tgt PE=3 SV=1
MSQPAVRYRLIKEEKHTGARLGELITPHGTFPTPMFMPVGTQATVKTLTPEELKAMGAGVILSNTYHLWLRPGEKIVQEAGGLHRFMNWPRGILTDSGGFQVFSLAKIRDITEAGVHFRSHLSGEKLFLSPEKSIQIQNALGADIIMSFDECPPFFESYSYIKHSVERTSRWAERGLKAHQHPDRQALFGIIQGGGHQALRQQSARDLVAMDFPGYSIGGLSVGESKAEMNHVLDFTTPLLPTNKPRYLMGVGSADSLIDGVIRGIDMFDCVLPTRIARNGSCMTSHGRVVIKNASYAHDFGPLDDHCDCYVCQNYSRAYLRHLFKAGETLGLRLASYHNLYFLLHLMQNIRQAILADNLLEFRENFFEEYGFNRSNHRNF

SEQ ID NO: 56666 - protein, 380 aa, unidentified
  source 1..380: note = Lactobacillus wasatchensis
  REGION 1..380: note = tr|A0A0D1A8V5|A0A0D1A8V5_9LACO Queuine tRNA-ribosyltransferase OS=Lactobacillus wasatchensis; OX = 1335616 GN=tgt PE=3 SV=1
MEPAIKYRLIKKDKHTGARLGELITPHGTFPTPMFMPVGTQATVKSISPDELDEMGAGVILANTYHLWLQPGEDLIEQAGGLHKFMNWDKGILTDSGGFQVFSLAKHRDIKEEGVTFRDPVSGSKMFLSPEKAIQVENALGPDIMMSFDECPPYFETYDYIKKSVERTSRWAQRGLEAHQNPAWQGLFGIVQGAGFKSLRQQSARDLVSMDFPGYSVGGLSVGESKEEMNRVLEFTTPLLPENKPRYLMGVGTADSLIDGVMRGIDMFDCVLPTRIARNGTCMTSHGRLVIKNAQYARDFGPLDDECDCYVCCNYSRAYIRHLIHVNETFGIRLTSYHNLYFLIHLMQDLRQAIADDQVLEFREMVFEKYGFNELNARNF

SEQ ID NO: 56667 - protein, 380 aa, Lactobacillus xiangfangensis
  REGION 1..380: note = tr|A0A0R2M1S1|A0A0R2M1S1_9LACO Queuine tRNA-ribosyltransferase OS=Lactobacillus xiangfangensis; OX = 942150 GN=tgt PE=3 SV=1
MEPAIKYRLIKKEKHTGARLGELITPHGTFPTPMFMPVGTQASVKSLAPEELDAMGAGVILSNTYHLWLRPGEQIVKEAGGLHKFMNWNKGILTDSGGFQVFSLAKNRDITEEGVHFKNHLNGSKMFLSPEKAIQIENDLGPDIMMSLDECPPFFESYDYVSKSVARTSRWAERGLKVHQHPDYQGLFGIVQGAGFKDLREQSAKDLVSLDFPGYSIGGLSVGESKAEMNHVLDFTTPLLPENKPRYLMGVGSADALIDGAIRGVDMFDCVLPTRIARNGTCMTSHGRLVVKNAAYAHDFSPLDDNCDCYTCRNFSRAYIRHLIKADETFGLRLTSYHNLYFLLNVMKQVRQAILDDNLLEFRQDFFEMYGFNEKNPKNF

SEQ ID NO: 56668 - protein, 380 aa, Lactobacillus zeae
  REGION 1..380: note = tr|A0A0R1ETS7|A0A0R1ETS7_LACZE Queuine tRNA-ribosyltransferase OS=Lactobacillus zeae DSM 20178 = KCTC 3804 OX=1423816 GN=tgt PE=3 SV=1
MEPAVKYRLIHQDKHSGARLGELITPHGTFPTPMFMPVGTQASVKTMAPEELDTMGATVILANTYHLWLRPGPELIEEAGGLHKFMNWHKGILTDSGGFQVFSLADTRHITEDGVTFKNHLNGAKMFLSPEKAIAIENALGPDIMMSLDECPPFFESYDYVKKSVARTSRWAERGLKAHKNPDWQALFGIVQGAGFRDLREQSAKDLVSMDFPGYSIGGLSVGESKDEMNHVLDFTTPLLPENKPRYLMGVGSADALIDGALRGIDMFDCVLPTRIARNGTCMTSRGRLVIKNAKYAHDFGPLDPNCDCYACRNYSRAYIRHLIHVGEAFGIRLTTYHNLYFLLHLMQEVREAIANDDLLAFREDFFEAYGYNKEKAKNF

SEQ ID NO: 56669 - protein, 381 aa, Lactobacillus zymae
  REGION 1..381: note = tr|A0A1Y6JXF4|A0A1Y6JXF4_9LACO Queuine tRNA-ribosyltransferase OS=Lactobacillus zymae OX=267363; GN = tgt PE=3 SV=1
MEPAIKYQLIKTEKHTGARLGEVITPHGTFQTPMFMPVGTQAAMKGALSPEELDEMGSQVVLANTYHLWLQPGPDLVAEAGGLHQFMNWPKGILTDSGGFQVFSLAKHRKLTEAGVHFRNELNGDKLFLSPEKAINIQNKLGPDIMMSLDECPPFFESYDYVKHSVERTSRWAERGLKAHAHPDYQGLFGIVQGAGYADLRRQSAHDLVSLDFPGYSIGGLSVGESKSEMNRILELTTPLLPTNKPRYLMGVGTADSLIDGVIRGVDMFDCVLPTRIARRGTCMTSHGRLVVRNAAYAHDFRPIDSECDCYTCRHYTRAYLRHLFKADEDLGRRLTSYHNLYFLHHLMKRVRQAILDDNLLDLRAKVFEKYGYNAEHPKNF

SEQ ID NO: 56670 - protein, 381 aa, Lactobacillus zymae
  REGION 1..381: note = tr|A0A0R1MRL6|A0A0R1MRL6_9LACO Queuine tRNA-ribosyltransferase OS=Lactobacillus zymae DSM 19395; OX = 1423817 GN=tgt PE=3 SV=1
MEPAIKYQLIKTEKHTGARLGEVITPHGTFQTPMFMPVGTQAAMKGALSPEELDEMGSQVVLANTYHLWLQPGPDLVAEAGGLHQFMNWPKGILTDSGGFQVFSLAKHRKLTEAGVHFRNELNGDKLFLSPEKAINIQNKLGPDIMMSLDECPPFFESYDYVKHSVERTSRWAERGLKAHAHPDYQGLFGIVQGAGYADLRRQSAHDLVSLDFPGYSIGGLSVGESKSEMNRILELTTPLLPTNKPRYLMGVGTADSLIDGVIRGVDMFDCVLPTRIARRGTCMTSHGRLVVRNAAYAHDFRPIDSECDCYTCRHYTRAYLRHLFKADEDLGRRLTSYHNLYFLHHLMKRVRQAILDDNLLDLRAEVFEKYGYNAEHPKNF

SEQ ID NO: 56671 - protein, 432 aa, Lactococcus chungangensis
  REGION 1..432: note = tr|A0A1K2HDJ6|A0A1K2HDJ6_9LACT Queuine tRNA-ribosyltransferase OS=Lactococcus chungangensis CAU 28 = DSM 22330 OX=1122154 GN=tgt PE=3 SV=1
MTQNKEALTFDIKRKIPNTLARSGTISTPHGDIQTPAYIGAATAATMKTLTNAEIDALGAQSILANTYHLMLRPGADLLEKAGGIHKFMNYHKPMYTDSGGFQVYSLGMAFKKGLDATSHTTRGSSENAVMSADQLTKVEKEGVWFKSHLNGDKIYMTPEYSMELQHQIAADIHMAFDELTSPLAGREQIKSALDTTHAWAERSLRRHAELNTLHAEKGELQQALFGVVQGAREEDYRRESASFLGNLTLENGEQFDGFGIGGTFQPEELPDVLTWINETLPEEKPRHLLGMGAQPADLFLGVESGCDTFDCVAPTRQARNGAIFTYDGRINIKNKKFEDDFTPLDRDCDCYTCENHTKAYLRHLFKANEVTGMVLASIHNERFVVRTVEEIRQKLNDSEPAFWAYKRDFLVRYYGEERARDFLYTSPTEWQ

SEQ ID NO: 56672 - protein, 382 aa, Lactococcus fujiensis
  REGION 1..382: note = tr|A0A2A5RML0|A0A2A5RML0_9LACT Queuine tRNA-ribosyltransferase OS=Lactococcus fujiensis JCM 16395; OX = 1291764 GN=tgt PE=3 SV=1
MTDHAIKYRLIKKEKHTGARLGEIITPHGTFPTPMFMPVGTQATVKTQSPEELKEIGSGIILSNTYHLWNRPGDELIAEAGGLHKFMNWDQPILTDSGGFQVYSLVQNKKNINEEGVKFKSHLDGRNLFMSPETSIGIQNNLGSDIMMSFDECPQFYQPYDYVKNSIERTTRWAERGMKAHRRWNDQGLFGIVQGAGFKDLREQSARDLTSMDFSGYSIGGLAVGESHQEMNDVLDFTTPLLPEDKPRYLMGVGAPDSLIDGVIRGVDMFDCVLPTRIARNGTLMTHFGRVNIKNAKFERDFTPLDPMCDCYTCTHYTRAYLRHLIKADETFGLRLCSYHNLYFLVNLMKDVRQAIINDNLLEFREDFCERYGYNLPNAKDF

SEQ ID NO: 56673 - protein, 382 aa, Lactococcus garvieae
  REGION 1..382: note = tr|F9VG74|F9VG74_LACGL Queuine tRNA-ribosyltransferase OS=Lactococcus garvieae (strain Lg2) OX=420890 GN=tgt PE=3 SV=1
MTEHAIKYRLIKKEKHTGARLGEIITPHGTFPTPMFMPVGTQATVKTQSPEELKEMGSGIILANTYHLWLRPGDELVAQAGGLHKFMNWDQPILTDSGGFQVYSLVQNKKNISEEGVKFKSHLDGRELFLNPEKAISIQNNLGSDIMMSFDECPPFYQPYDYVKASVERTSRWAERGLKAHQRPHDQGLFGIVQGAGFEDLRRQSARDLVSMDFPGYSIGGLAVGESHAEMNAVLDFTTPLLPEDKPRYLMGVGAPDSLIDGVIRGVDMFDCVLPTRIARNGTAMTSFGRVNIKNAKYELDFTPLDPECDCYCCSNYTRAYLRHLFKADETFGLRLLSYHNLHFLINLMTNVRQAIMDDNLLEFREDFCEKYGYNKPNAKNF

SEQ ID NO: 56674 - protein, 382 aa, Lactococcus garvieae; identical to SEQ ID NO: 56673
  REGION 1..382: note = tr|A0A098CQN7|A0A098CQN7_9LACT Queuine tRNA-ribosyltransferase OS=Lactococcus garvieae OX=1363; GN = tgt PE=3 SV=1

SEQ ID NO: 56675 - protein, 382 aa, Lactococcus lactis
  REGION 1..382: note = sp|Q9CJ54|TGT_LACLA Queuine tRNA-ribosyltransferase; OS = Lactococcus lactis subsp. lactis (strain IL1403); OX = 272623 GN=tgt PE=3 SV=1
MTEHAIKYRLIKKEKHTGARLGEIITPHGTFPTPMFMPVGTQATVKTMSPEELKTLGSGIILSNTYHLWLRPGDELVAEAGGLHKFMNWDQPILTDSGGFQVYSLVQNKKNITEEGVKFKSHLDGRELFLNPEKAISIQNNLGSDIMMSFDECPPFYQPYDYVKASVERTSRWAERGLNAHRRPNDQGLFGIVQGAGFEDLRRQSARDLTSMDFAGYSIGGLAVGESHKEMNAVLDFTTPMLPEDKPRYLMGVGAPDSLIDGVIRGVDMFDCVLPTRIARNGTLMTHFGRVNIRNAKYEHDFTPLDPMCDCYTCTNYTRAYLRHLIKADETFGLRLCSYHNLHFLVNLMKDVRGAIMDDNLLEFREDFCERYGYNQPNAKDF

SEQ ID NO: 56676 - protein, 382 aa, Lactococcus lactis
  REGION 1..382: note = sp|A2RHN5|TGT_LACLM Queuine tRNA-ribosyltransferase; OS = Lactococcus lactis subsp. cremoris (strain MG1363); OX = 416870 GN=tgt PE=3 SV=1
MTEHAIKYRLIKKEKHTGARLGEIITPHGTFPTPMFMPVGTQATVKTMSPEELKTLGSGIILSNTYHLWLRPGDELVAEAGGLHKFMNWDQPILTDSGGFQVYSLVQNKKNITEEGVKFKSHLDGRELFLNPEKAISIQNNLGSDIMMSFDECPPFYQPYDYVKASVERTSRWAERGLNAHRRPNDQGLFGIVQGAGFEDLRRQSASDLTSMDFAGYSIGGLAVGESHKEMNAVLDFTTPMLPEDKPRYLMGVGAPDSLIDGVIRGVDMFDCVLPTRIARNGTLMTHFGRVNIRNAKYEYDFTPLDPMCDCYTCTNYTRAYLRHLIKADETFGLRLCSYHNLHFLVNLMKDVRQAIMDDNLLEFREDFCERYGYNQPNAKDF

SEQ ID NO: 56677 - protein, 382 aa, unidentified; identical to SEQ ID NO: 56673
  source 1..382: note = Lactococcus petauri
  REGION 1..382: note = tr|A0A252CB77|A0A252CB77_9LACT Queuine tRNA-ribosyltransferase OS=Lactococcus petauri OX=1940789; GN = tgt PE=3 SV=1

SEQ ID NO: 56678 - protein, 448 aa, Lactococcus piscium
  REGION 1..448: note = tr|A0A0D6DW51|A0A0D6DW51_9LACT Queuine tRNA-ribosyltransferase OS=Lactococcus piscium MKFS47; OX = 297352 GN=tgt PE=3 SV=1
MIARPSATCQDIKKVKMTQNKQALTFDIKRKIPNTLARSGTISTPHGDIQTPAYIGAATAATMKTLTNAEIDALGAQSILSNTYHLMLRPGADLMEKAGGIHKFMNYHKPMYTDSGGFQVYSLGMAYKKGLDATSHTTKGSSENAVMSADQLTKVDKEGVWFKSHLNGDKIFMTPEYSMELQHQIAADIHMAFDELTSPLSGREQIKSALDTTHAWAERSLRRHVALNAVHAEKGENQQALFGVVQGAREEDFRYESAGFLGGLTLETGEQFDGFGIGGTFQPEELPDVLTWINETLPEGKPRHLLGMGAQPADLFLGVEFGCDTFDCVAPTRQGRNGAIFTYDGRINITNKRFEDDFTPIDSECDCYTCLTHTKAYMRHLFKANEVTGMVLASIHNERFVVKTVEDIRQKLNESDAAFWAYKRDFLVRYYGQERAQDFLYTSPTDWQ

SEQ ID NO: 56679 - protein, 448 aa, Lactococcus piscium
  REGION 1..448: note = tr|A0A1C3SUT6|A0A1C3SUT6_9LACT Queuine tRNA-ribosyltransferase OS=Lactococcus piscium OX=1364; GN = tgt PE=3 SV=1
MIARPSATCQDIKKVKMTQNKQALTFDIKRKIPNTLARSGTISTPHGDIQTPAYIGAATAATMKTLTNAEIDALGAQSILSNTYHLMLRPGADLMEKAGGIHKFMNYNKPMYTDSGGFQVYSLGMAYKKGLDATSHTTKGSSENAVMSADQLTKVDKEGVWFKSHLNGDKIFMTPEYSMELQHQIAADVHMAFDELTSPLSGREQIKSALDTTHAWAERSLRRHVALNAVHSEKGENQQALFGVVQGAREEDFRYESAGFLGGLTLETGEQFDGFGIGGTFQPEELPDVLTWINETLPEGKPRHLLGMGAQPADLFLGVEFGCDTFDCVAPTRQGRNGAIFTYDGRINITNKRFEDDFTPIDSECDCYTCLNHTKAYIRHLFKANEVTGMVLASIHNERFVVKTVEDIRQKLNESDAAFWAYKRDFLVRYYGQERAQDFLYTSPKDWQ

SEQ ID NO: 56680 - protein, 432 aa, Lactococcus plantarum
  REGION 1..432: note = tr|A0A2A5S3C3|A0A2A5S3C3_9LACT Queuine tRNA-ribosyltransferase OS=Lactococcus plantarum OX=1365; GN = tgt PE=3 SV=1
MTQHTPPLTFDIKRKLPDTLARTGVISTPHGDIQTPAYIGAATAATMKTLTNAEIDELGAQSILSNTYHLMLRPGADLLAKAGGIHKFMNYHKPMYTDSGGFQVFSLGMAYKKGLDATSHTTKGSSDNAVMSSDQLTKVNKEGVWFKSHLNGDKIFMTPEYSMELQHKIAADIHMAFDELTSPLSGREQIKSALDTTHAWAERSLKRHVELNRLHAEKGEHQQALFGVVQGAREEDFRYESAGFLGGLTLETGEQFDGFGIGGTFQPEELPDVLTWINETLPEGKPRHLLGMGAQPADLFLGVEFGCDTFDCVAPTRQGRNGAIFTYDGRINIKNKKFEDDFTPIDQDCDCYTCLNHTKAYMRHLFKANEVTGMVLASIHNERFVIRTVEEIRQKLNESDAAFWAYKRDFLIRYYGQERAQDFLYTSPKDWQ

SEQ ID NO: 56681 - protein, 432 aa, Lactococcus raffinolactis
  REGION 1..432: note = tr|A0A290Q0S4|A0A290Q0S4_9LACT Queuine tRNA-ribosyltransferase OS=Lactococcus raffinolactis; OX = 1366 GN=tgt PE=3 SV=1
MTQNKEALSFDIKRKIPNTLARSGTISTPHGDIQTPAYIGAATAATMKTLTNAEIDALGAQSILSNTYHLMLRPGADLLAKAGGIHKFMNYHKPMYTDSGGFQVYSLGMAFKKGLDATSHTTKGSAENAVMSADQLTKVEKEGVWFKSHLNGDKIYMTPEYSMELQHQIAADIHMAFDELTSPLAGREQIKSALDTTHAWAERSLRRHAELNTVHTEKGERQQALFGVVQGAREEDYRRESAGFLGGLTLENGEQFDGFGIGGTFQPEELPDVLTWINETLPEGKPRHLLGMGAQPADLFLGVEYGCDTFDCVAPTRQARNGAIFTYDGRINIKNKKFEDDFTPLDRECDCYTCENHTKAYLRHLFKANEVTGMVLASIHNERFVVRTVEEIRQKLNDSDHAFWAYKRDFLVRYYGEERARDFLYTSPAEWQ

SEQ ID NO: 56682 - protein, 432 aa, Lactococcus raffinolactis
  REGION 1..432: note = tr|I7KHN8|I7KHN8_9LACT Queuine tRNA-ribosyltransferase OS=Lactococcus raffinolactis 4877; OX = 1215915 GN=tgt PE=3 SV=1
MTRNKEALTFDIKRKIPNTLARSGTISTPHGDIQTPAYIGAATAATMKTLTNAEIDALGAQSILSNTYHLMLRPGADLLAKAGGIHKFMNYHKPMYTDSGGFQVYSLGMAFKKGLDATSHTTKGSAENAVMSADQLTKVEKEGVWFKSHLNGDKIYMTPEYSMELQHQIAADIHMAFDELTSPLAGREQIKSALDTTHAWAERSLRRHAELNALHAEKGELQQALFGVVQGAREEDYRRESASFLGGLTLENGEQFDGFGIGGTFQPEELPDVLTWINETLPEEKPRHLLGMGAQPADLFLGVEYGCDTFDCVAPTRQARNGAIFTYDGRINIKNKKFEDDFTPLDSECDCYTCENHTKAYLRHLFKANEVTGMVLASIHNERFVVRTVEEIRQKLNVSENAFWAYKRDFLVRYYGEERALDFLYTSQAEWQ

SEQ ID NO: 56683 - protein, 432 aa, unidentified
  source 1..432: note = Lactococcus reticulitermitis
  REGION 1..432: note = tr|A0A224XB40|A0A224XB40_9LACT Queuine tRNA-ribosyltransferase OS=Lactococcus reticulitermitis; OX = 2025039 GN=tgt PE=3 SV=1
MTQNKEALSFAIKRQIPNTLARSGTISTPHGEIQTPAYIGAATAATMKTLTNAEIDALGAQSILSNTYHLMLRPGADLLAKAGGIHKFMNYHKPMYTDSGGFQVYSLGMAFKKGLDATSHTTKGAAENAVMSADQLTKVEKEGVWFKSHLNGDKIFMTPEYSMELQHKIAADIHMAFDELTSPLAGREQIKSALDTTHAWAERSLRRHAELNAIHAEKNECQQALFGVVQGAREADYRRESASFLGSLTLENGEQFDGFGIGGTFQPEELPDVLTWINETLPEGKPRHLLGMGAQPADLFLGVEYGCDTFDCVAPTRQARNGAIFTYDGRINIKNKKFEEDFTPLDRDCDCYTCENHTKAYLRHLFKANEVTGMVLASIHNERFVVRTVEEIRQKLNESDAAFWAYKRDFLVRYYGEERARDFLYTSPAEWQ

SEQ ID NO: 56684 - protein, 382 aa, Lactococcus sp.
  REGION 1..382: note = tr|A0A387BCA7|A0A387BCA7_9LACT Queuine tRNA-ribosyltransferase OS=Lactococcus sp. 1JSPR-7; OX = 2419773 GN=tgt PE=3 SV=1
MVEHAIKYRLVKKEKHTGARLGEIITPHGTFPTPMFMPVGTQATVKTMSPEELKQLGSGIILSNTYHLWLRPGDELVAKAGGLHKFMNWDQPILTDSGGFQVYSLVQNKKNITEEGVKFKSHLDGRELFLNPEKAIGIQNNLGSDIMMSFDECPPFYQPYDYVKASVERTSRWAERGLNAHRRAHDQGLFGIVQGAGFEDLRRQSANDLTSMDFAGYSIGGLAVGESHKEMNAVLDFTTPMLPENKPRYLMGVGAPDSLIDGVIRGVDMFDCVLPTRIARNGTLMTHFGRVNIRNAKYEHDFTPLDPMCNCYTCTNYTRAYLRHLIKADETFGLRLCSYHNLHFLVNLMKDVRQAIIDDNLLEFREDFCERYGYNKPDAKDF

SEQ ID NO: 56685 - protein, 382 aa, Lactococcus sp.
  REGION 1..382: note = tr|A0A5C8JJS7|A0A5C8JJS7_9LACT Queuine tRNA-ribosyltransferase OS=Lactococcus sp. dk310; OX = 2603289 GN=tgt PE=3 SV=1
MTEHAIKYRLIKKEKHTGARLGEIITPHGTFPTPMFMPVGTQATVKTQSPEELKEIGSGIILSNTYHLWNRPGDELIAEAGGLHKFMNWDQPILTDSGGFQVYSLVQNKKNITEEGVTFKSHLDGRKLFMAPETSIGIQNNLGSDIMMSFDECPQFYQPYDYVKNSIERTSRWAERGMEAHKRWHDQGLFGIVQGAGFEDLRKQSARDLTSMDFSGYSIGGLAVGETHKEMNAVLDFTTPLLPKDKPRYLMGVGAPDSLIDGVIRGVDMFDCVLPTRIARNGTLMTHFGRINIKNAKFEHDFTTLDPMCDCYTCTHYTRAYLRHLIKADETFGLRLCSYHNLYFLVNLMKDVRQAIINDNLLEFREDFCERYGYNLPNAKDF

SEQ ID NO: 56686 - protein, 382 aa, unidentified
  source 1..382: note = Lactococcus termiticola
  REGION 1..382: note = tr|A0A2R5HIM5|A0A2R5HIM5_9LACT Queuine tRNA-ribosyltransferase OS=Lactococcus termiticola; OX = 2169526 GN=tgt PE=3 SV=1
MTEPAIKYRLIKKEKHTGARLGEIITPHGTFPTPMFMPVGTQATVKTMAPEELKEMGSGIILANTYHLWLRPGDELVAEAGGLHKFMNWDQPILTDSGGFQVYSLVENKKNITEEGVTFKSHLNGDRLFLSPEKAIQIQNNLGSDIMMSFDECPPFHQPYDYVKASVERTSRWAERGLKAHQRPHDQGLFGIVQGAGFKDLREQSARDLVSMDFPGYSIGGLAVGESHAEMNAVLDFTTPMLPEDKPRYLMGVGAPDSLIDGVIRGIDMFDCVLPTRIARNGTLMTSYGRVNIRNAQYEHDFTALDPECDCYTCRNYSRAYLRHLIKADETFGMRLCSYHNLYFLVNLMKRTRQAIMDDNLLEFREDFCEKYGYNKPNAKDF

SEQ ID NO: 56687 - protein, 373 aa, Lactonifactor longoviformis
  REGION 1..373: note = tr|A0A1M4ZYY0|A0A1M4ZYY0_9CLOT Queuine tRNA-ribosyltransferase OS=Lactonifactor longoviformis DSM 17459 OX=1122155 GN=tgt PE=3 SV=1
MYKILKKDGKAKRAEFTTVHGTIQTPVFMNVGTAAAIKGAVATTDLREIGTQVELSNTYHLHVRPGDEVVKKMGGLHKFMNWDRPILTDSGGFQVFSLAGLRKIKEEGVYFQSHIDGRKIFMGPEESMQIQSNLASTIAMAFDECPSSVASREYVQASVDRTTRWLRRCRTEMDRLNQKEDTINRHQLLFGINQGAVYEDIRIAHAREIADMDLDGYAVGGLAVGESHEEMYRILDAVVPCLPEEKPTYLMGVGTPANILEAVDRGVDFFDCVYPSRNGRHGHVYTNQGKLNLFNAKFELDSRPIEEGCQCPACRNYSRAYIRHLLKAKEMLGMRLCVLHNLYFYNKMMEEIREAIEQGTYQDYKKQKLEGFL

SEQ ID NO: 56688 - protein, 680 aa, unidentified
  source 1..680: note = Lacunisphaera limnophila
  REGION 1..680: note = tr|A0A1D8AYS3|A0A1D8AYS3_9BACT Queuine tRNA-ribosyltransferase OS=Lacunisphaera limnophila; OX = 1838286 GN=tgt_2 PE=3 SV=1
MSRLAFTLEKESPGSKARAAHFTTAHGEVRTPVFMPVGTQATVKNMTVDGLKAVDAQVLLANTYHLLLRPGPEVFRKFGGIHRFMDWDRPVLTDSGGFQIFSLPESRVMTEAGAQFRSYVDGAVHFLSPESSIAMQRAIGSDIMMVLDQCIPSTASHAETETAMHLTHRWAVRSLEARGDSPQALFGIVQGACHRDLRQQSAEFLRALPFDGLAIGGLAVGETHEQRYEFCGLATDHLPKNLPRYLMGVGTPIDILESVHRGVDMFDCIIPTQLAQRGTAFTSHGRIHCRRGIYKFAETPLDAACPCPTCTRYSRAYLHHLTKSDEVLGWHLLSIHNLSFYTRLMAEIRASILAGDFLAYYERQRVALVREDEANPSVPTSKPRAKANPHRGDYEIQTSPQGFSSIRQRSSGEVMHSVSAPEDEANRLYIEQSRLAHRLRRRSPEDTAPLVVWDVGLGAASNAMAAIHRLEAELAAAGPDALRPLHLISFERDLDPLLLAARHASHFPHLRHGAPHGLLHKSRWGHASGLIDWRLLRGDFLEHLEGAPPPDLIYYDPFSAKTDTGLWVPEVFARIHRHVAARPAELYTYAAGTGVRAALLSAGFFVAEGVGTGPKATTTVAFTHRDTRADDPAAPKLLGADWIARWRRSDAKFPAGLTEAQQAAFAAKIESHPQFAGMMK

SEQ ID NO: 56689 - protein, 382 aa, unidentified
  source 1..382: note = Lacunisphaera limnophila
  REGION 1..382: note = tr|A0A1D8AR76|A0A1D8AR76_9BACT Queuine tRNA-ribosyltransferase OS=Lacunisphaera limnophila; OX = 1838286 GN=tgt_1 PE=3 SV=1
MSSHFQLLKTDTGTAARRGRLQTLHGPIETPIFMPVGTQGTVKSLTPAQIKETGAQIILGNTYHLNLRPGSELVRDLGGLHQFMGWDGPILTDSGGFQVFSLAKLRDIRDDGIAFSSHLDGSKLFLGPREVMTIQANLGSDIAMVIDECPPWPCTREACRDAVDRSYRWAQQCKQIATDNGFLAGGHHVFAIAQGSTFDDLRREAAESLAALDFPGYAVGGVSVGEPEPEMLKQVGATTPFMPADKPRYTMGLGTPPQILKMIALGVDMFDCVHPTRVARNGAAFTPDGLINLRNERYRADPAPLVEGLDNYTCRKFTRAYLRHLVMANEILACTLLTLHNLHFYLDLMAQARAHIEAGDFGPWHRAWVERFEAGEAAAQRK

SEQ ID NO: 56690 - protein, 379 aa, unidentified
  source 1..379: note = Lacunisphaera sp.
  REGION 1..379: note = tr|A0A4Q1C435|A0A4Q1C435_9BACT Queuine tRNA-ribosyltransferase OS=Lacunisphaera sp. TWA-58; OX = 2508720 GN=tgt PE=3 SV=1
MPSHFQLLKTDTATAARRGRLQTLHGVIETPIFMPVGTQGTVKAVTPVQLREVGAQIILGNTYHLNLRPGSELVRDMGGLHKFMGWDGPILTDSGGFQVFSLSKLRNIQDDGIAFQSHLDGAKLFLGPREVMTIQANLGSDIAMVIDECPPWPCTRDECRAAVDRSYRWAKLCKQIATDNGFLAGGHHVFAIAQGSTYDDLRREAAESLAELDFPGYAVGGVSVGEPEPEMLKQVAATTPFMPAGKPRYTMGLGTPSQILKMIGLGVDMFDCVHPTRVSRNGAAFTPDGMINLRNERYRADSSPLVEGLDNYTCRQFSRAYLRHLVMANEILASTLLTIHNLHFYLDLVAQARARIEAGDFAAWSKAWISRYEAGEASG

SEQ ID NO: 56691 - protein, 680 aa, unidentified
  source 1..680: note = Lacunisphaera sp.
  REGION 1..680: note = tr|A0A4Q1CBM0|A0A4Q1CBM0_9BACT Queuine tRNA-ribosyltransferase OS=Lacunisphaera sp. TWA-58; OX = 2508720 GN=tgt PE=3 SV=1
MSRLAFTLERESPGSKARAARFTTLHGPVRTPVFMPVGTQATVKNLDVEDLKAVDAQVLLANTYHLLLRPGPEVFRKFGGIHRFMNWDRPVLTDSGGFQIFSLPDSRVMTEAGAQFRSYVDGQVHFLSPESSIAMQRDIGSDIMMVLDQCIASTASHAETEMAMHLTHRWAERSLAARGDSAQALFGIIQGACHRDLRLRSAEFLRALPFDGLAIGGLAVGETHAQRYEFTGLVTDQLPAHLPRYLMGVGTPLDILEAVHRGVDMFDCIIPTQLAQRGTAYTSHGRIHCRRGIYKFSEEPLDAACSCPTCAKYSRAYLHHLNKADEVLGWQLLSIHNLAFYTRLMAEIRAAILGGEFLAYYERQRLVLGREDEANPSVLRTKPRPKSAPHRGDYEIQTSPQGFSSIRQRSSGEVMHSVSAPADEANRLYIDQSRLALRLRRRTPEDDQPLVVWDVGLGAASNAMAAIHRLEAELSAVGAAALRPLQLISFERDLDPLILAARHASHFPHLRHGAPHDLLNLGRWAHASGLIEWRLLRGDFLDHLEGAPTPDLIYYDPFSAKTDTALWQPGVFARLHQHCRSRPAELYTYAAGTGVRAAMLSAGFFVAEGVGTGPKATTTVACTHPASQPDDPAGPRLLAAEWLARWRRSEAKFPTGLDDAAKAAFEQRIESHPQFAGLQG

SEQ ID NO: 56692 - protein, 390 aa, unidentified
  source 1..390: note = Lampropedia cohaerens
  REGION 1..390: note = tr|A0A0U1PY60|A0A0U1PY60_9BURK Queuine tRNA-ribosyltransferase OS=Lampropedia cohaerens; OX = 1610491 GN=tgt PE=3 SV=1
MLQFDLITTDSASHARRARLTLNHGVVQTPIFMPVGTYGTVKGVMPRSLEEMGAQIILGNTFHLWMRPGLDVMRSFGGLHAFEQWDKPILTDSGGFQVWSLGEMRKITEEGVHFASPVNGDKLFMSPEVSMQIQTVLNSDIVMQLDECTPYETKGHITTEAEARQSMEMSLRWARRSQEEFARLQNPNALFGIVQGGMFEHLREESLQQLVAMDFPGYAIGGVSVGEPKEEMRRIMAHTPHRLPQDKPRYLMGVGTPEDLVEGVACGVDMFDCVMPTRNARNGTVFTRYGDLKIRNARHRSDHQPLDPSCTCYTCAGTSGVSWENGGRGGFSRAYLHHLDRCGEMLGPMLTTIHNLHYYLNLMQEIRTALEQACFGAFRTAFAEQRARGV

SEQ ID NO: 56693 - protein, 390 aa, Lampropedia hyalina
  REGION 1..390: note = tr|A0A1M4ZSB4|A0A1M4ZSB4_9BURK Queuine tRNA-ribosyltransferase OS=Lampropedia hyalina DSM 16112; OX = 1122156 GN=tgt PE=3 SV=1
MLQFDLLQTDPSSHARRGQLTLNHGVVQTPIFMPVGTYGTVKGVMPRSLEEMGAQIILGNTFHLWMRPGLDVMQSFGGLHGFEQWHKPILTDSGGFQVWSLGDMRKITEEGVHFASPVNGDKLFMSPEVSMQIQTVLNSDIVMQLDECTPYETKGHLTTEAEARQSMEMSIRWARRSQAEFARLENPNALFGIVQGGMFEHLRQESLEQLVELDFPGYAVGGVSVGEPKDEMRRIMAHTPHRLPAHKPRYLMGVGTPEDLVEGVTQGVDMFDCVMPTRNARNGTIFTRYGDLKIRNARHRDDHQPLDVTCTCHACAGTSGVSWENGGRGGFSRAYLHHLDRCGEMLGPMLTTIHNLHYYLNLMQEIRHALDAGTFTALRQQFATDRARGV

SEQ ID NO: 56694 - protein, 390 aa, unidentified
  source 1..390: note = Lampropedia puyangensis
  REGION 1..390: note = tr|A0A4S8F5C9|A0A4S8F5C9_9BURK Queuine tRNA-ribosyltransferase OS=Lampropedia puyangensis; OX = 1330072 GN=tgt PE=3 SV=1
MLQFDLLATDASSHARRGQLTLNHGVVQTPIFMPVGTYGTVKGVMPRSLEEMGAQIILGNTFHLWMRPGLDVMASFGGLHAFEQWHKPILTDSGGFQVWSLGDMRKITEEGVHFASPVNGDKLFMSPEVSMQIQTALNSDIVMQLDECTPYETKGHITTEDEARRSMEMSIRWAKRSQNEFARLNNPNALFGIVQGGMFEHLRQESLEQLVALDFPGYAVGGVSVGEPKEDMRRIMAHTPHRLPAHKPRYLMGVGTPEDLVEGVASGVDMFDCVMPTRNARNGTVFTRYGDLKVRNARHKQDHQPLDTSCSCHACAGVSGISWDKGGRAGFSRAYLHHLDRCGEMLGPMLTTIHNLHYYLNLMQEVRDALEHNRFSAFRQQFATDRSRGI

SEQ ID NO: 56695 - protein, 390 aa, Lampropedia sp.
  REGION 1..390: note = tr|A0A4S5BPU7|A0A4S5BPU7_9BURK Queuine tRNA-ribosyltransferase OS=Lampropedia sp. YIM MLB12; OX = 2562762 GN=tgt PE=3 SV=1
MLQFDLLATDSSSHARRGQLTLNHGVVQTPIFMPVGTYGTVKGVMPRSLEEMGAQIILGNTFHLWMRPGQDVMSSFGGLHAFEQWHKPILTDSGGFQVWSLGDMRKITEEGVHFASPVNGDKLFMSPEVSMQIQTTLNSDIAMQLDECTPYELKGHITTADEARRSMEMSIRWAKRSQNEFHRLNNPNALFGIVQGGMFEHLRQESLEQLVELDFPGYAVGGVSVGEPKEDMRRIMAHTPHRLPANKPRYLMGVGTPEDLVQGVASGVDMFDCVMPTRNARNGTVFTRYGDLKLRNARHKQDHQPLDTSCTCHACAGTSGVSWDQGGRGGFSRAYLHHLDRCGEMLGPMLTTIHNLHYYLNLMQDVRNALDNNRFAEFRQQFATERARGV

SEQ ID NO: 56696 - protein, 370 aa, Laribacter hongkongensis
  REGION 1..370: note = sp|C1DDA7|TGT_LARHH Queuine tRNA-ribosyltransferase; OS = Laribacter hongkongensis (strain HLHK9) OX=557598; GN = tgt PE=3 SV=1
MLEFTLHKTSGHARRGTLRLNHGTIETPVFMPVGTYGAVKAMTPDRLDETGAQIILGNTFHLWLRPGLDVIGTFGGLHDFTGWHKPILTDSGGFQVFSLGDLRKITEEGVHFQSPINGDKLFLSPEKSMEIQTVLNSDIVMQLDECTPGQVDHATAKASMQMSLRWAERSRRAFDDYRNPNALFGIVQGNLYLDLREESLKGLTDIGFDGIAVGGLSVGEPKPEMYRVLREVGPMLPADKPHYLMGVGTPEDLVEGVANGIDMFDCVMPTRNARNGWLFTRWGDVKIKNARYKDDTRPLDEQCSCYTCRHFSRGYLHHLHRTGEITGAMLNTVHNLHYYQELMADMRAAIEADSFAGFQQEFHAQRARGA

SEQ ID NO: 56697 - protein, 370 aa, Laribacter hongkongensis
  REGION 1..370: note = tr|A0A248LLG4|A0A248LLG4_9NEIS Queuine tRNA-ribosyltransferase OS=Laribacter hongkongensis; OX = 168471 GN=tgt PE=3 SV=1
MLEFTLHKTSGHARRGTLRLNHGTIETPAFMPVGTYGAVKAMTPDRLDETGAQIILGNTFHLWLRPGLDVIGTFGGLHDFIGWHKPILTDSGGFQVFSLGDLRKITEEGVHFQSPINGDKLFLSPEKSMEIQTVLNSDIVMQLDECTPGQVDHATAKASMQMSLRWAERSRRAFDNYRNPNALFGIVQGNLYLDLREESLKGLTDIGFDGIAVGGLSVGEPKPEMYRVLREVGPMLPADKPHYLMGVGTPEDLVEGVANGIDMFDCVMPTRNARNGWLFTRWGDVKIKNARYKDDTRPLDEQCSCYTCRHFSRGYLHHLHRTGEITGAMLNTVHNLHYYQELMAGIRAAIEADSFAGFQQEFHAQRARGA

SEQ ID NO: 56698 - protein, 376 aa, Larkinella arboricola
  REGION 1..376: note = tr|A0A327WW96|A0A327WW96_9BACT Queuine tRNA-ribosyltransferase OS=Larkinella arboricola OX=643671; GN = tgt PE=3 SV=1
MQFTIQATDPESKARTGVLSTDHGLIETPIFMPVGTAGTVKAVHQRELVEDVRAEIILGNTYHLYLRPGLDVIGKAGGLHRFNGWKRPILTDSGGYQVYSLSNTRKIKEDGVTFKSHIDGSKHIFTPEGVMDIQRTIGADIIMAFDECTPYPCEYGYARASMDMTHRWLTRCIERFDSTPAKYGYEQTLFPIVQGSTYKDLRQQSAEFVAEQRREGNAIGGLAVGEPAEEMYKTIELVNAILPSDKPRYLMGVGTPENILEAIALGVDMFDCVMPTRNARHGIVFTTQGIINIKNERWKDDFSPIDEELGGYASTFYSKAYLRHLMRSEEILGAQIASLQNLTFYLWLVKQARKEIVAGNFAKWKGIMTKKLMQRL

SEQ ID NO: 56699 - protein, 376 aa, unidentified
  source 1..376: note = Larkinella knui
  REGION 1..376: note = tr|A0A3P1CQT1|A0A3P1CQT1_9BACT Queuine tRNA-ribosyltransferase OS=Larkinella knui OX=2025310; GN = tgt PE=3 SV=1
MQFTIQSADPHSKARTGLLTTDHGLIETPIFMPVGTAGTVKAVHQRELVADVKAEIILGNTYHLYLRPGLDVLEKAGGLHRFNGWERPILTDSGGYQVYSLSNTRKIKEEGVTFKSHIDGSKHIFTPEGVMDIQRSIGADIMMAFDECTPYPCEYGYARDSMEMTHRWLIRCLNRFDTTENKYGYRQTLFPIVQGSTYKDLRQQSAEFVAEQQREGNAIGGLAVGEPADEMYGMIEHVNAILPSDKPRYLMGVGTPENILEAIALGIDMFDCVMPTRNARHGFVFTSQGIINIKNEKWKDDFSPIDEELGGYAGTCYSKAYLRHLIKSEEILGAQIASLQNLTFYLWLVKQARQQINLGNFMKWKSSMSKKLMQRL

SEQ ID NO: 56700 - protein, 376 aa, unidentified
  source 1..376: note = Larkinella rosea
  REGION 1..376: note = tr|A0A3P1BDP8|A0A3P1BDP8_9BACT Queuine tRNA-ribosyltransferase OS=Larkinella rosea OX=2025312; GN = tgt PE=3 SV=1
MQFTIQSADSQSKARTGLITTDHGLIETPIFMPVGTAGTVKAVHQRELVSDVKAEIILGNTYHLYLRPGLDVLEKAGGLHRFNGWERPILTDSGGYQVYSLSNTRKIKEEGVTFKSHIDGSKHVFTPEGVMDIQRIIGADIIMAFDECTPYPCEYGYARASMEMTHRWLTRCIDRFDATEGKYGYQQTLFPIVQGSTYKDLRQQSAEFVARQERDGNAIGGLAVGEPAEEMYGMIDHVNAILPSDKPRYLMGVGTPENILEAIALGIDMFDCVMPTRNARHGLLFTSQGIINIKNEKWKEDFSPIDEELGGYVGLCYSKAYLRHLIRSEEILGAQIASLQNLTFYLWLVKEARRQINAGNFSSWKRIMTKKLMQRL

SEQ ID NO: 56701 - protein, 376 aa, Larkinella sp.
  REGION 1..376: note = tr|A0A4R8D4P1|A0A4R8D4P1_9BACT Queuine tRNA-ribosyltransferase OS=Larkinella sp. BK230 OX=2512173; GN = tgt PE=3 SV=1
MQFTIQATDPQSKARTGLLATDHGLIETPIFMPVGTAGTVKAVHQRELVEDVKAEIILGNTYHLYLRPGLDVLEKAGGLHRFNGWNRPILTDSGGYQVYSLSNTRKIKEEGVTFKSHIDGSKHIFTPEGVMDIQRIIGADIIMAFDECTPYPCEYGYARASMDMTHRWLTRCINRFDSTPAKYGYQQTLFPIVQGSTYKDLRRQSAEFVAEQQRDGNAIGGLAVGEPAEEMYETIEHVNAILPSDKPRYLMGVGTPENILEAIALGIDMFDCVMPTRNARHGIVFTTQGIINIKNEKWKDDFSPVDEELGGYASTIYSKAYLRHLMRSEEILGAQIASLQNLTFYLWLVKEARQQINTGNFMKWKGSMTKKLMQRL

SEQ ID NO: 56702 - protein, 376 aa, Larkinella sp.
  REGION 1..376: note = tr|A0A368JQ95|A0A368JQ95_9BACT Queuine tRNA-ribosyltransferase OS=Larkinella sp. ZZJ9 OX=2315727; GN = tgt PE=3 SV=1
MQFTLQATDPHSKARTGLLTTDHGLIETPIFMPVGTAGTVKAVHQRELVADVKAEIILGNTYHLYLRPGLDTLEKAGGLHRFNGWERPILTDSGGYQVYSLSNTRKIKEEGVTFKSHIDGSKHVFTPESVMDIQRIIGADIIMAFDECTPYPCEYGYARASMEMTHRWLTRCIDRFDATEGKYGYQQTLFPIVQGSTYKDLRQQSAEFVAEQQRDGNAIGGLAVGEPAEEMYTTIEQVNAILPSDKPRYLMGVGTPENILEAIALGIDMFDCVMPTRNARHGVLYTTQGIINIKNERWKDDFSPIDAELGGYAGTCYSKAYLRHLIKSEEILGAQIASLQNLTFYLWLVKEARQEINTGNFVKWKANMTKKLMQRL

SEQ ID NO: 56703 - protein, 378 aa, unidentified
  source 1..378: note = Latescibacteria bacterium
  REGION 1..378: note = tr|A0A0S7XBK8|A0A0S7XBK8_9BACT Queuine tRNA-ribosyltransferase OS=Latescibacteria bacterium DG_63; OX = 1703781 GN=tgt PE=3 SV=1
MEFQLEKRDKDSNARAGVIVTARGDVETPVFMPVGTQATVKTLSPHELEEIGAQIVLANTYHLYLRPGHSLIHELGGLHEFMNWKRPILTDSGGFQVFSLSDLRVVRKEGVVFRSHLDGSEHFISPELAVEIQDSLGSDLVTTLDQCVGFPADLPLAKRALKNTLDWARRSKLAWQDAHSSGNAALFGIVQGSTYENLRRQCAKALVEMDFDGYAIGGLSVGEPKSATFDITSLTIAELPEGRPRYLMGVGFPNDIIEAVMRGVDMFDCVMPTRNARNGTVFTSRGKLVVKNIEYAKDRRPLDEDCDCYACRNFSRAYLRHLFQAGELLGPRLATLHSLRFFFRMMAAMRESIIDDRFAGWREDFLQKYQSGEGINGQ

SEQ ID NO: 56704 - protein, 377 aa, Lautropia mirabilis
  REGION 1..377: note = tr|E7RY56|E7RY56_9BURK Queuine tRNA-ribosyltransferase OS=Lautropia mirabilis ATCC 51599; OX = 887898 GN=tgt PE=3 SV=1
MLHYTLNHTDGLARQGTLRLNHGEIETPIFMPVGTYGAVKGMSPADLEAVGARIILGNTFHLWLRPGTTVMEKLGGLHGFNGWHRPILTDSGGFQVWSLGDLRKISEEGVRFASPINGDKLFLTPEVSMQVQRALNSDIAMVFDECTPIEIDGRPTTHEEAARSMQLSLRWARRSRDEFLRGENPNALFGIVQGGMFEDLRDESLAGLTDIGFEGYAVGGLSVGEPKEDMLRILDHIGHRLPADRPRYLMGVGTPEDLLDGIARGIDMFDCVMPTRNARNGWLFTRFGDLKIRNARWRDDERPLDPTCQCSTCRHHSRAYLHHLQRVGEMLGAHLATVHNLHFYLDLMAQARQAIAEGRFAAFHAAFLKDRQRGLDG

SEQ ID NO: 56705 - protein, 380 aa, Lautropia sp.
  REGION 1..380: note = tr|A0A426FQB2|A0A426FQB2_9BURK Queuine tRNA-ribosyltransferase OS=Lautropia sp. KCOM 2505; OX = 2490857 GN=tgt PE=3 SV=1
MLEYTLHHTDDLARHGTLKLNHGAFQTPMFMPVGTYGAVKGMSPDDLEAVGARIILGNTFHLWLRPGTTVMEKLGGLHGFNGWHRPILTDSGGFQVWSLGELRKISEEGVRFASPINGDRLFLTPEISMQVQRALNSDIAMVFDECTPYEVDGRPTTRDEAAQSMQLSLRWARRSRNEFLDGKNPNALFGIVQGGMFEDLRDESLAGLKEIGFEGYAIGGLSVGEPKADMLRILDHVGHRLPADRPRYLMGVGTPEDLLDGIARGIDLFDCVMPTRNARNGWLFTRFGDLKIRNARWRDDERPLDPTCLCSTCRKHSRAYLHHLNRVGEMLGAHLATVHNLHFYLNLMGEAREAIAEGRFAAFKAQFEADRQRGLDEGQS

SEQ ID NO: 56706 - protein, 320 aa, Lautropia sp.
  REGION 1..320: note = tr|A0A3B8R8H2|A0A3B8R8H2_9BURK Queuine tRNA-ribosyltransferase (Fragment) OS=Lautropia sp.; OX = 2053568 GN=DCE31_03735 PE=3 SV=1
LGNTFHLWLRPGTEVIEKLGGLHGFNAWNDPILTDSGGFQVWSLAELRNISEEGVRFASPINGDRLFLTPEVSMRIQTALNADVVMIFDECTPYEVKGRIIQKDEAAASMQRSLRWAKRSKDAFEALKNHNALFGIVQGGMHEALRLESLQALAEMNFHGYAIGGLSVGEPKEDMQRVLAYTAPRLPHHKPRYLMGVGTPEDLVEGVRQGVDMFDCVMPTRNARNGSLFTRRGDLRLRNARYKDDEKPIDPGCSCYCCRDFSRAYLHHLQRVDEMLGAQLATIHNLHFYLDIMRQMREAIEEGRFQAWRDEFLAIRLEGV

SEQ ID NO: 56707 - protein, 452 aa, unidentified
  source 1..452: note = Lawsonella clevelandensis
  REGION 1..452: note = tr|A0A5E3ZWH4|A0A5E3ZWH4_9ACTN Queuine tRNA-ribosyltransferase OS=Lawsonella clevelandensis; OX = 1528099 GN=tgt PE=3 SV=1
MFTAQGHKAGVVVSLIYNVCMTVDQQPRTPFTLGAYLSEPTSGEPITRRHTGEPLGRTGTIHTPHGDIHTPAFIPVGTRATVKTLTPEQIRSTGAQAVLGNAYHLYLQPGPDIVDEAGGIATFMNWDGPTYTDSGGFQVLSLGSGFKKVLAAEFAGTDRDGEVRKGKERMANVDDDGVTFRSHLDGSLHRFTPEVSMQIQHHLGADIIFAFDELTTLLNSRGYQEEALERTRLWAERCLAEHSRLTAERTHCPPQALWGVIQGAQYEDLRRKACRDLQQLSLESEERGGVGFGGFGIGGALQKENLGTIVGWCNQELPEDKPRHLLGISEPDDIFTAVENGADTFDCVAPSRLGRHGGVYTKDGRMNLVAAKYKRDFRPIDPELASYTSQNYSRAYLRHLLKSGEKLGQTLCTIHNLFFIVQLVDGIREAMENGTYWEYKAEVLGRYYGGTR

SEQ ID NO: 56708 - protein, 443 aa, unidentified
  source 1..443: note = Lawsonella clevelandensis
  REGION 1..443: note = tr|A0A2W5K9C6|A0A2W5K9C6_9ACTN Queuine tRNA-ribosyltransferase OS=Lawsonella clevelandensis; OX = 1528099 GN=tgt PE=3 SV=1
MAVHQQPATPFTLGTHLSEPTGAHASAYGTITRRTTGEPLGRTGTIHTPHGDIHTPAFIPVGTRATVKTLTPEQIRSTGAQAVLGNAYHLYLQPGADIVDEAGGIAEFMNWHGPTYTDSGGFQVLSLGSGFKKVLAAEFAGTDRDGEVRRGKERMANVDDEGVTFRSHLDGSRHRFTPEVSMQIQHQLGADIIFAFDELTTLLNSRGYQEEALERTRLWAERCLVEHSRLTVERAHRPPQALWGVIQGAQYEDLRRKACRDLQQLSLESEERGGVGFGGFGIGGALQKENLGTIVGWCNQELPEDKPRHLLGISEPDDIFTAVENGADTFDCVAPSRLGRHGGVYTKDGRMNLAAAKYKRDFRPIDPELASYTSQNYSRAYIRHLLKAGEKLGQTLCTIHNLFFIVQLVDGIRASMEDGTYWDYKAEVMGRYYANGGRNMIDR

SEQ ID NO: 56709 - protein, 371 aa, Lawsonia intracellularis
  REGION 1..371: note = sp|Q1MPU5|TGT_LAWIP Queuine tRNA-ribosyltransferase; OS = Lawsonia intracellularis (strain PHE/MN1-00) OX=363253; GN = tgt PE=3 SV=1
MNPPGTFHITATDGSARTGVLYTAHGIVNTPIFMPVGTVGSVKAIAPDDLEAISAEIILGNTYHLYLRPGDELIARRGGLHVFNAWEKPILTDSGGFQIFSLSSLRKLHKDGVIFRSHIDGSKHVFTPERVITIQRNLNSDIMMVLDECVAANADYTYTAQSLDLTIHWAKRSRDVYPKGEGDNLLFGIVQGGMFKSLRHSSVSQLIDLDFDGYAIGGLSVGEPKEIMMELLYDTAPLLPKTKPRYLMGVGTPLDILKGIEAGVDMFDCVLPTRNARNGTLYTSQGKLNIKRKEYAEDDLPLDENCSCYTCQTFSRAYLRHLFHSQELLAFRLNSIHNLTYFLNIIFGARKAIHGGYFFNYKQQVEQLYCN

SEQ ID NO: 56710 - protein, 377 aa, unidentified
  source 1..377: note = Lawsonibacter asaccharolyticus
  REGION 1..377: note = tr|A0A2P2FBA8|A0A2P2FBA8_9FIRM Queuine tRNA-ribosyltransferase OS=Lawsonibacter asaccharolyticus; OX = 2108523 GN=tgt PE=3 SV=1
MFQILKTEGRARRGVFTCAHGTAQTPVFMNVGTQGAIKGAVSSHDLKTLGCQIELSNTYHLHLRPGDGVVRQLGGLHRFMDWDGPILTDSGGFQVFSLSGLRKITEEGVTFASHIDGRRIFMGPEESMQIQSNLGSDIAMAFDECIENPAPFDYVEASCARTYRWLERCVAEHQRLNRQPGCVNPQQMLFGINQGGTYPELRVRHMEQIAQLPCDGFAIGGLAVGEPTQTMYDIIDAVEPHMPREKPRYLMGVGTPSNIIEGVARGIDFFDCVMPARNARHGKLFTWEGTINIKNEKYKLDDRPIDPACTCPTCAAFSRAYVRHLLAAGEMLAMRLAVMHNLHFYNELMARIRQALDEGRFEAFRAEYSEKLGRPAP

SEQ ID NO: 56711 - protein, 376 aa, Leadbetterella byssophila
  REGION 1..376: note = tr|E4RSI7|E4RSI7_LEAB4 Queuine tRNA-ribosyltransferase OS=Leadbetterella byssophila (strain DSM 17132 / KACC 11308 / 4M15) OX=649349 GN=tgt; PE = 3 SV=1
MIFEIHSTDPGSFARAGKLQTDHGEILTPIFMPVGTAGTVKGVHQRELLDDIEAQIILGNTYHLYLRPGLDILRKAGGLHKFNGWSKPILTDSGGYQVFSLKEIRKITEEGVYFNSHIDGSKHLFTPEYVMDIQRVIGGDIIMAFDECPPYPCDYKYAEKSMHLTHRWLKRCVERIQTTEPLYGHHQSLFPIVQGSVFPDLRVQSAEYIASQEQDGNAIGGLSVGEPAEEMYKMIEVVNAILPKDKPRYLMGVGTPENILEGIALGIDMFDCVMPTRNARNGMLFTTEGIINIRNKKWEDDFTPIDPGLGGYVSTFYSKAYLKHLMKCQELLGAQIASIHNLRFYLWLVGEARKHILAGDYASWKDQAVKKLMTRL

SEQ ID NO: 56712 - protein, 373 aa, unidentified
  source 1..373: note = Lebetimonas natsushimae
  REGION 1..373: note = tr|A0A292YD30|A0A292YD30_9PROT Queuine tRNA-ribosyltransferase OS=Lebetimonas natsushimae; OX = 1936991 GN=tgt PE=3 SV=1
MEFKIDATDGRARAATIKTVHSEIKTPIFMPVGTAAAVKSLDAIDLMDVLDAKIILANTYHLYLRPGDEVVKSFGGLHGFSGYKRSFLTDSGGFQAFSLGDNVKINDNGIWFKSHIDGSSHFFSPEKVIDIEYNLNSDIMMVLDDLIALPNTKERIKKSIERTTQWAKRSLVHHIEKGAKNNLFAIVQGGTDFEFRKISAESLVGIEVEGKTFDGFAIGGLSVGEENQLMYDTIEFTTPFLPENKPRYLMGVGTPEDIIEAIERGVDMFDCVMPTRNARNGYLFTTFGTLRIKNAKYKLDDKPIDENCSCYTCRHFSRGYLNHLFKAKELTYFRLATIHNLHYYLNLVKEAREAIIDKRFNEFKKEFYSKRIN

SEQ ID NO: 56713 - protein, 375 aa, Leclercia adecarboxylata
  REGION 1..375: note = tr|A0A3E1ZZF2|A0A3E1ZZF2_9ENTR Queuine tRNA-ribosyltransferase OS=Leclercia adecarboxylata; OX = 83655 GN=tgt PE=3 SV=1
MKFELDTTDGRARRGRLVFDRGVVETPAFMPVGTYGTVKGMTPEEVEATGAQIILGNTFHLWLRPGQEVMKLHGDLHDFMQWKGPILTDSGGFQVFSLGDIRKITEKGVHFRNPINGDPIFLDPEKSMEIQYDLGSDIVMIFDECTPYPADWDYAKRSMEMSLRWAKRSRDRFDGLGNKNALFGIIQGSVYEDLRDISVKGLVEIGFDGYAVGGLAVGEPKEDMHRILEHVCPQIPTDKPRYLMGVGKPEDLVEGVRRGIDMFDCVMPTRNARNGHLFVTDGVVKIRNAKHKSDTSTLDAECDCYTCRNYSRAYLHHLDRCNEILGARLNTIHNLRYYQRLMAGLRKAIEEGKLESFVTDFYQRQGREVPPLNVD

SEQ ID NO: 56714 - protein, 375 aa, Leclercia adecarboxylata
  REGION 1..375: note = tr|A0A514VE98|A0A514VE98_9ENTR Queuine tRNA-ribosyltransferase OS=Leclercia adecarboxylata; OX = 83655 GN=tgt PE=3 SV=1
MKFELDTTDGRARRGRLVFDRGVVETPAFMPVGTYGTVKGMTPEEVEATGAQIILGNTFHLWLRPGQEVMKLHGDLHDFMQWKGPILTDSGGFQVFSLGDIRKITEKGVHFRNPINGDPIFLDPEKSMEIQYDLGSDIVMIFDECTPYPADWDYAKRSMEMSLRWAKRSRDRFDGLGNKNALFGIIQGSVYEDLRDISVKGLVEIGFDGYAVGGLAVGEPKEDMHRILEHVCPQIPTDKPRYLMGVGKPEDLVEGVRRGIDMFDCVMPTRNARNGHLFVTDGVVKIRNAKHKSDTSTLDAECDCYTCRNYSRAYLHHLDRCNEILGARLNTIHNLRYYQRLMAGLRKAIEEGKLESFVTDFYQRQGRDVPPLNVD

SEQ ID NO: 56715 - protein, 375 aa, Leclercia sp.
  REGION 1..375: note = tr|A0A345CDY9|A0A345CDY9_9ENTR Queuine tRNA-ribosyltransferase OS=Leclercia sp. W17 OX=2282309; GN = tgt PE=3 SV=1
MKFELDTTDGRARRGRLVFDRGVVETPAFMPVGTYGTVKGMTPEEVEATGAQIILGNTFHLWLRPGQEIMKLHGDLHDFMQWKGPILTDSGGFQVFSLGDIRKITEKGVHFRNPINGDPIFLDPEKSMEIQYDLGSDIVMIFDECTPYPADWDYAKRSMEMSLRWAKRSRDRFDSLGNKNALFGIIQGSVYEDLRDISVKGLVEIGFDGYAVGGLAVGEPKEDMHRILEHVCPQIPTDKPRYLMGVGKPEDLVEGVRRGIDMFDCVMPTRNARNGHLFVTDGVVKIRNAKHKSDTSPLDAECDCYTCRNYSRAYLHHLDRCNEILGARLNTIHNLRYYQRLMAGLRKAIEEGKLESFVTDFYQRQGRDVPPLNVD

SEQ ID NO: 56716 - protein, 375 aa, Leclercia sp.; identical to SEQ ID NO: 54949
  REGION 1..375: note = tr|A0A0J6MCY0|A0A0J6MCY0_9ENTR Queuine tRNA-ribosyltransferase OS=Leclercia sp. LK8 OX=1628210; GN = tgt PE=3 SV=1

SEQ ID NO: 56717 - protein, 376 aa, Leeuwenhoekiella aequorea
  REGION 1..376: note = tr|A0A4Q0P3A0|A0A4Q0P3A0_9FLAO Queuine tRNA-ribosyltransferase OS=Leeuwenhoekiella aequorea; OX = 283736 GN=tgt PE=3 SV=1
MQFNLLNTDAGSQARAGTITTNHGTIETPIFMPVGTVGTVKGVHQRELKEDINPDIILGNTYHLYLRPQIDILEKAGGLHKFMNWDRNILTDSGGYQVYSLSANRKIKEEGVKFKSHIDGSVHLFTPERVMEIQRSIGADIIMAFDECTPYPCDYNYAKRSMHMTHRWLDRCINHLDKTPVKYGYDQAFFPIVQGSTYKDLRQQSAEYIANSGAVGNAIGGLSVGEPAEEMYAMTEIVTAILPKEKPRYLMGVGTPINILENIALGIDMFDCVMPTRNGRNGTLFTQHGSINIKNKKWEADFSPLDPDGTTWVDNAYSKAYVRHLFSVNEILGRQIGTIHNLGFYMWLVREARKHIIAGDFYSWKEKMVKQMDKRL

SEQ ID NO: 56718 - protein, 376 aa, Leeuwenhoekiella blandensis
  REGION 1..376: note = tr|A3XJ99|A3XJ99_LEEBM Queuine tRNA-ribosyltransferase OS=Leeuwenhoekiella blandensis (strain CECT 7118 / CCUG 51940 / MED217) OX=398720 GN=tgt; PE = 3 SV=1
MQFNLVTKDAASKARAGAITTDHGTIETPIFMPVGTVATVKGVHQRELEQDINPDIILGNTYHLYLRPQTEILEKAGGLHKFMNWDRNILTDSGGYQVYSLSANRKIKEEGVKFKSHIDGSFHMFTPERVMEIQRSIGADIIMAFDECTPYPCDYNYAKRSMHMTHRWLDRCIDHLAKTPVKYGYDQAFFPIVQGSTYKDLRKQSAEYIANSGAVGNAIGGLSVGEPAEEMYAMTEIVTDILPEDKPRYLMGVGTPINILENIALGVDMFDCVMPTRNGRNGTLFTQHGTINIKNKKWEDDFSPLDPDGTTWVDTAYSKAYVRHLFSVNEILGRQIGTIHNLGFYMWLVREARKHIIAGDFYTWKEKMVKQMDKRL

SEQ ID NO: 56719 - protein, 376 aa, Leeuwenhoekiella marinoflava
  REGION 1..376: note = tr|A0A4Q0PKL5|A0A4Q0PKL5_9FLAO Queuine tRNA-ribosyltransferase OS=Leeuwenhoekiella marinoflava; OX = 988 GN=tgt PE=3 SV=1
MQFNLVTKDAASKARAGAITTDHGTIETPIFMPVGTVATVKGVHQRELEQDISPDIILGNTYHLYLRPQTEILEKAGGLHKFMNWDRNILTDSGGYQVYSLSANRKIKEEGVKFKSHIDGSFHMFTPERVMEIQRSIGADIIMAFDECTPYPCDYNYAKRSMHMTHRWLDRCINHLEKTPVKYGYDQAFFPIVQGSTYKDLRKQSAEYIANSGAVGNAIGGLSVGEPAEEMYAMTEIVTEILPEEKPRYLMGVGTPINILENIALGVDMFDCVMPTRNGRNGTLFTQHGTINIKNKKWEDDFSPLDPDGTTWVDAAYSKAYVRHLFTVSEALGRQIGTLHNLGFYMWLVREARKHIIAGDFYTWKEKMVKQMDKRL

SEQ ID NO: 56720 - protein, 376 aa, unidentified
  source 1..376: note = Leeuwenhoekiella nanhaiensis
  REGION 1..376: note = tr|A0A2G1VRC2|A0A2G1VRC2_9FLAO Queuine tRNA-ribosyltransferase OS=Leeuwenhoekiella nanhaiensis; OX = 1655491 GN=tgt PE=3 SV=1
MQFELVSTDAASKARAGTLTTDHGTIETPIFMPVGTVGTVKGVHQRELTQDIDPDIILGNTYHLYLRPQTTILEKAGGLHKFMNWDRNILTDSGGYQVYSLSANRKIKEEGVKFKSHIDGSFHMFTPERVMEIQRSIGADIIMAFDECTPYPCDYNYAKRSMHMTHRWLDRCIKHLAKTPVKYGYDQAFFPIVQGSTYKDLRKQSAEYIANSGAVGNAIGGLSVGEPAEEMYAMTEIVTDILPFEKPRYLMGVGTPINILENIALGVDMFDCVMPTRNGRNGTLFTQHGTINIKNKKWEDDFSPLDPDGTTWVDTAYSKAYVRHLFSVNEILGRQIGTIHNLGFYMWLVREARKHIIAGDFNAWKEKMVKQMDKRL

SEQ ID NO: 56721 - protein, 376 aa, Leeuwenhoekiella palythoae
  REGION 1..376: note = tr|A0A1M5ZHV4|A0A1M5ZHV4_9FLAO Queuine tRNA-ribosyltransferase OS=Leeuwenhoekiella palythoae; OX = 573501 GN=tgt PE=3 SV=1
MLFNLVTKDAASKARAGAITTDHGTIETPIFMPVGTVATVKGVHQRELEQDINPDIILGNTYHLYLRPQTEILEKAGGLHKFMNWDRNILTDSGGYQVYSLSANRKIKEEGVKFKSHIDGSFHMFTPERVMEIQRSIGADIIMAFDECTPYPCDYNYAKRSMHMTHRWLDRCINHLAKTPVKYGYDQAFFPIVQGSTYKDLRKQSAEYIANSGAVGNAIGGLSVGEPAEEMYAMTEVVTEILPEDKPRYLMGVGTPINILENIALGIDMFDCVMPTRNGRNGTLFTQHGTINIKNKKWEADFSALDPDGTTWVDTAYSKAYVRHLFSVNEILGRQIGTIHNLGFYMWLVREARKHIIAGDFYSWKEKMVKQMDKRL

SEQ ID NO: 56722 - protein, 376 aa, unidentified
  source 1..376: note = Leeuwenhoekiella polynyae
  REGION 1..376: note = tr|A0A4V1KRY8|A0A4V1KRY8_9FLAO Queuine tRNA-ribosyltransferase OS=Leeuwenhoekiella polynyae; OX = 1550906 GN=tgt PE=3 SV=1
MRFNLVTKDAASKARAGAIITDHGTIDTPIFMPVGTVATVKGVHQRELEQDINPDIILGNTYHLYLRPQTEILEKAGGLHKFMNWDRNILTDSGGYQVYSLSANRKIKEEGVKFKSHIDGSFHMFTPERVMEIQRTIGADIIMAFDECTPYPCDYNYAKRSMHMTHRWLDRCISHLEKTPVKYGYDQAFFPIVQGSTYKDLRKQSAEYIANSGAVGNAIGGLSVGEPAEEMYAMTEIVTEILPEDKPRYLMGVGTPINILENIALGVDMFDCVMPTRNGRNGTLFTQHGTINIKNKKWEDDFSPLDPDGTTWVDAAYSKAYVRHLFTVSEALGRQIGTLHNLGFYMWLVREARKHIIAGDFYTWKEKMVKQMDKRL

SEQ ID NO: 56723 - protein, 376 aa, Leeuwenhoekiella sp.
  REGION 1..376: note = tr|A0A2E5GQU6|A0A2E5GQU6_9FLAO Queuine tRNA-ribosyltransferase OS=Leeuwenhoekiella sp. OX=1977054; GN = tgt PE=3 SV=1
MQFNLVTKDAASKARAGAITTDHGTIETPIFMPVGTVATVKGVHQRELEQDINPDIILGNTYHLYLRPQTEILEKAGGLHKFMNWDRNILTDSGGYQVYSLSANRKIKEEGVKFKSHIDGSFHMFTPERVMEIQRSIGADIIMAFDECTPYPCDYNYAKRSMHMTHRWLDRCVNHLAKTPVKYGYDQAFFPIVQGSTYKDLRKQSAEYIANSGAVGNAIGGLSVGEPAEEMYAMTEVVTEILPEDKPRYLMGVGTPINILENIALGIDMFDCVMPTRNGRNGTLFTQHGTINIKNKKWEADFSALDPDGTTWVDTAYSKAYVRHLFSVNEILGRQIGTIHNLGFYMWLVREARKHIIAGDFYSWKEKMVKQMDKRL

SEQ ID NO: 56724 - protein, 376 aa, Leeuwenhoekiella sp.
  REGION 1..376: note = tr|A0A4Q0NWA0|A0A4Q0NWA0_9FLAO Queuine tRNA-ribosyltransferase OS=Leeuwenhoekiella sp. R-50232; OX = 2249425 GN=tgt PE=3 SV=1
MLFNLVTKDAASKARAGAITTDHGTIETPIFMPVGTVATVKGVHQRELEQDINPDIILGNTYHLYLRPQTEILEKAGGLHKFMNWDRNILTDSGGYQVYSLSANRKIKEEGVKFKSHIDGSFHMFTPERVMEIQRTIGADIIMAFDECTPYPCDYNYAKRSMHMTHRWLDRCINHLAKTPVKYGYDQAFFPIVQGSTYKDLRKQSAEYIANSGAVGNAIGGLSVGEPAEEMYAMTEIVTEILPEDKPRYLMGVGTPINILENIALGVDMFDCVMPTRNGRNGTLFTQHGTINIKNKKWEDDFSPLDPDGTTWVDTAYSKAYVRHLFTVSEALGRQIGTLHNLGFYMWLVREARKHIIAGDFYIWKEKMVKQMDKRL

SEQ ID NO: 56725 - protein, 265 aa, Legionella adelaidensis
  REGION 1..265: note = tr|A0A0W0R1I1|A0A0W0R1I1_9GAMM Queuine tRNA-ribosyltransferase OS=Legionella adelaidensis; OX = 45056 GN=tgt PE=4 SV=1
MSIIPIITSKEGASLTFANWLEAGVEKVACYLSDLLIKPGIQLLKERPLKQYISWPGEIALNLDGLKANDEGVIKIRSPYDGSIISTTTSEILALVISLKPEKVIIPERFCNKMNDFLEQIPKEIFVYVSEKCLPINSKKTYGIYLRYQHQDFTEFLEVIKSYRDYSCYVSGDFDFYALERLKEKKVSIETDFLAKEGVQGFVISQGNLVDLKDEAYSLDFEKIDNACQCPSCNLNFTKAYLHHLYFNTPLLCHRLLIQHNAWNL

SEQ ID NO: 56726 - protein, 386 aa, Legionella adelaidensis
  REGION 1..386: note = tr|A0A0W0R607|A0A0W0R607_9GAMM Queuine tRNA-ribosyltransferase OS=Legionella adelaidensis; OX = 45056 GN=tgt PE=3 SV=1
MSIFRSEILYRCKYNSARVTKITTAHGEFLTPVFMPVGTRAGVNNMTPLELKTAGSQIILGGNTYHMLCAPGMEVIKKAGGMHLFMGWDGPMLTDSGGFQVFSLSKNKEICFIDEKGAHFRLPNSSTLIHMTPEMSIETQKIIGADIIMAFDQCTPDSCSREEVQHIMQRTHRWLKQSVAYHQDHPLSSYGYPQALFGIVQGGIYEDLRQESADFVSTMNTDGVAIGGETVGFDMPKTVELLRWIQKSLPENKPRYSMGVGMSPQDLLDVVAWGVDMFDCVAPTRNARHGALYAGEVIKKNNWLVFQSEHPDCRLQIKKAQYANDLSPIMAECKCYTCLNYSRSYLHHLFKQKATAFTALASIHNIHVLHDVCAKMRSFIIENPQD

SEQ ID NO: 56727 - protein, 386 aa, Legionella anisa
  REGION 1..386: note = tr|A0A2Z3KSU5|A0A2Z3KSU5_9GAMM Queuine tRNA-ribosyltransferase OS=Legionella anisa OX=28082; GN = DLD14_01485 PE=3 SV=1
MKTFSCDVLYKHSATQARVTRVTTAHGEFITPVFMPVGTRAGVNNMTPVELHDAHSQIILGGNTYHMLCAPGMDVIEKAGGMHSFMGWHGPMLTDSGGFQVFSLSKNKEICTIDEEGAHFRLPNSGRLIHMTPEMSLETQKIIGADIIMAFDQCTPDSCTKDEVNHIMTRTHRWLKQSMQYHQQYPNSRYGYEQALFGIIQGGTFKDLRRESADFVSSMNTEGIAIGGETIGFDMKTTVEVIRWVRDYLPENKPRYTMGVGMSPQDLLDVVAEGVDMFDCVAPTRNARHGALYCGQLIQDGNWLRFVSEYENERIQIKKSCFADDMSPIMAQCSCYTCLNYSRSYLHQLAKQKTNLFTALASIHNVHVMHDVCDKMRELIMSDSLN

SEQ ID NO: 56728 - protein, 282 aa, Legionella beliardensis
  REGION 1..282: note = tr|A0A378I346|A0A378I346_9GAMM Queuine tRNA-ribosyltransferase OS=Legionella beliardensis; OX = 91822 GN=NCTC13315_01892 PE=4 SV=1
MQQRQGTLVPVLTSQAGSCLTFANWQDASVTTIAYQLDALMIKPGVAFLKKLIQLRDYISWPGTIVLNAVLPPANSNGIYLIRSTYDGQLVQLSIQELASLIAELKPNKVLLPLDSLTFFNEFWQTLVTETDIELYFPQGEPSHLNLDHLNYYGIYKQQSFKDFFNDVQKLDKPMYLLGDFNLAQMQELLENKHTVETNRPALDGMMGLFYSREKDEQLTIIAQEMSMDYQTLDNSCQCKTCSAQLTRAYLHHLLGQTPLLAQRYLVQHNLYFCQNYIINQN

SEQ ID NO: 56729 - protein, 384 aa, Legionella beliardensis
  REGION 1..384: note = tr|A0A378I3W7|A0A378I3W7_9GAMM Queuine tRNA-ribosyltransferase OS=Legionella beliardensis; OX = 91822 GN=tgt PE=3 SV=1
MTNFACQVIYKHKYTHARVTKVSTAHGDFITPAFMPVGTRAGVNNMTSAELIAAGSQIILGGNTYHMLCAPGMEIIRQAGGMHPFMGWQGPMLTDSGGFQVFSLSKNKEICIIDEEGAHFKLPDTNRIIHMTPEMSLATQKIIGADIIMAFDQCTPDDCSREEVERIMVRTHRWLKQSIHYHQEHPHSIYGFPQALFGIVQGGIHRDLRRESAQYIVSMNLDGIAIGGETIGFDMKKTVEIIHWIREFLPTNKPRYTMGVGMSPQDLLDVVAEGIDMFDCVAPTRNARHGALYCGEIIKENNWLRFASEFDNHRLQIKKAVFADDLSPIMATCTCYTCKHYSRAALHHLFKQKTNLFTALASIHNIHVMHNVCVKMRDLIATNC

SEQ ID NO: 56730 - protein, 386 aa, Legionella birminghamensis
  REGION 1..386: note = tr|A0A378ID11|A0A378ID11_9GAMM Queuine tRNA-ribosyltransferase OS=Legionella birminghamensis; OX = 28083 GN=tgt_2 PE=3 SV=1
MSTFQCEVLAEYPHNKARIIRVNTPHGSFTSPVFMPVGTRAGVNNMTPWELQEAGSQIILGGNTYHMLCAPGMEVIEQAGGMHPFMGWQGPMLTDSGGFQVFSLSKNREICRIDEEGAHFQLPGGSRLIHMTPEMSLETQKIIGADIIMAFDQCTPDASSYEEVVHIMERTHRWLQQSMDYHQQYPCSRYGAKQALFGIVQGGIFEELRCESAKFVASMDLDGVAIGGETVGFDMKKTVEIIQWVRQYLPENKPRYTMGVGMSPQDLLDVVAEGIDMFDCVAPTRNARHGALYSGQIVKEGHWLRFASDYENHRLQIKKSCFANDLAPVMESCLCYTCKTHSRAYLHHLFKQKSNVFTALASIHNIHVMHEVCTQMRNLIFQATNH

SEQ ID NO: 56731 - protein, 279 aa, Legionella birminghamensis
  REGION 1..279: note = tr|A0A378I7K1|A0A378I7K1_9GAMM Queuine tRNA-ribosyltransferase OS=Legionella birminghamensis; OX = 28083 GN=tgt_1 PE=4 SV=1
MSGNNQFIPVITTAAGTCLTMANWKAAGVSQITFYLDELLMKPGLAFFEGMNVSLQSYCGWSGDIVLNLSSLQIKNDQIVIRSHYDGQIIRIDLPVLAGLISTLNPAYLVLPITNGSLEVLWRDLPASIKTISSSKENADSRHHSSYLQFSDSQCFEAFYNIAQASKQPLYIAGRFNWQQFQRLAQLPLHTLESDQPASDALLGQVYTESLVLDIQDETMRDDHQPIDRNCGCEACRQGLTRAYFHHLLQHTPLLCQRFLIQHNIHYCLHHLPEQQITI

SEQ ID NO: 56732 - protein, 383 aa, Legionella brunensis
  REGION 1..383: note = tr|A0A0W0SPE6|A0A0W0SPE6_9GAMM Queuine tRNA-ribosyltransferase OS=Legionella brunensis OX=29422; GN = tgt PE=3 SV=1
MSNQFKCEIIKRHSHTQARVTRVSTPHGTFVTPSFMPVGTRAGVNNMTPNELLQAGSQIILGGNTYHMLCAPGMKVIEEAGGMHPFMGWHGPMLTDSGGFQVFSLSKNKEICVIDEEGAHFKLPDSERLIHMTPEMSLETQKIIGADIIMAFDQCTPDNCSRDEVQKIMTRTHRWLRQSVAYHQQFPTSRYGAHQALFGIIQGGIYEDLRRESAEFIASMNTDGIAIGGETIGFNMETTVEVIRWVRSFLPENKPRYTMGVGMSPQDLLEVVAEGIDMFDCVAPTRNARHGALYCGEVAKVGNWLKFESPYENERIQIKKACFAEDLEPVMANCSCYTCKHYSRASLHHLCKQKANVFTALASIHNIHVMHDVCAKMRDLMMA

SEQ ID NO: 56733 - protein, 277 aa, Legionella busanensis
  REGION 1..277: note = tr|A0A378JKW9|A0A378JKW9_9GAMM Queuine tRNA-ribosyltransferase OS=Legionella busanensis OX=190655; GN = tgt_1 PE=4 SV=1
MQENAVSHYIPLLSSQAGSCLTFANWQNAGAKIVAYQLDELLVKPGLPVLQKLTHLQDYLAWSGDLVLNALLKPVNAKGVYEIRSSYDGQLVQISVLELSSLIKTLKPNKVLLPLGSAPYFKQFWQPLLAEIELYLHFEEAKDDITTTGYYYSFTEQPFDYLYKNLPKFNKLYLIGAFQLHEMQLLLQNNYSVQSNLPAEDGMQGVFYDEKEKFNILEQTFEQDYQTLKHNCQCETCNRQLTRAYLHHLLQHTPLLAQRYLIQHNVYYCQNYLINQN

SEQ ID NO: 56734 - protein, 384 aa, Legionella busanensis
  REGION 1..384: note = tr|A0A378JQP6|A0A378JQP6_9GAMM Queuine tRNA-ribosyltransferase OS=Legionella busanensis OX=190655; GN = tgt_2 PE=3 SV=1
MTRFTCQVLHNHQHTKARITKIKTAHGDFITPTFMPVGTRAGVNNMTIPELTAAGSQIILGGNTYHMLCAPGMDIIKQAGGMHPFMGWHGPMLTDSGGFQVFSLSKNKEICTIDEEGAHFKLPRVERIIHMTPEMSLATQKIIGADIIMAFDQCTPDDCSRDEVQRIMTRTHRWLKQSLNYHQEHPNSIYGFPQALFGIVQGSIHQDLRRESAQYVASMNTDGIAIGGETIGFDMVKTVEVIRWVREFLPENKPRYTMGVGMSPQDLLDVVAEGIDMFDCVAPTRNARHGALYCGEVIKENNWLRFASDYTNHRLQIKKASFADDLSPVMPTCTCYTCKNYSRAALHHLFKQRSNLFTALASIHNIHVMHDVCAKMRDLIASNV

SEQ ID NO: 56735 - protein, 386 aa, Legionella cherrii
  REGION 1..386: note = tr|A0A0W0SKJ0|A0A0W0SKJ0_9GAMM Queuine tRNA-ribosyltransferase OS=Legionella cherrii OX=28084; GN = tgt PE=3 SV=1
MNTFSCTVLHKHAATQARVTRVTTAHGEFITPVFMPVGTRAGVNNMTPAELRDAHSQIILGGNTYHMLCAPGMEIIEKAGGMHPFMGWHGPMLTDSGGFQVFSLSKNKEICTIDEQGAHFTLPGSQRLIHMTPEMSLETQKIIGADIIMAFDQCTPDSCTKDEVQHIMNRTHRWLKQSIQYHHQHPNSRYGYQQALFGIIQGGTFKDLRRESADFISSMNTDGIAIGGETIGFDMKTTVEVIRWVREYLPENKPRYTMGVGMSPQDLLDVVAEGIDMFDCVAPTRNARHGSLYCGELIREGNWLRFASEYENERIQIKKSCFAEDMSPIMAQCSCYTCQNYSRSYLHQLAKQKTNLFTALASIHNVHVMHDVCDKMRELIINERSN

SEQ ID NO: 56736 - protein, 277 aa, Legionella cincinnatiensis
  REGION 1..277: note = tr|A0A378IMF0|A0A378IMF0_9GAMM Queuine tRNA-ribosyltransferase OS=Legionella cincinnatiensis; OX = 28085 GN=tgt_2 PE=4 SV=1
MFAVTQNFIPILTSEAGLCLTAKNWQEVNVSAASYSLESLLYKPGMDVLKKITDIGRYLAWPGYIIFNGMSLVVNKEGLFVLKSPYDGSKIKFTLVDLLELIQHLNPTAIMLPKNIMNDFPQFWDHWNCSIFPFFHENDVEKQNTNQSYGVYFNVEASKLDWQQLAHWSNIPRYVIGNFEPRLIQELRHQGVAFIETDEPAKAALQGKVYTQSGTIDLTDLNIQMQFEPIDAKCICPTCSQQFSRAYLHHLLQHTPLLCQRFLIQHNVFYLQNASCN

SEQ ID NO: 56737 - protein, 386 aa, Legionella cincinnatiensis
  REGION 1..386: note = tr|A0A378IEV1|A0A378IEV1_9GAMM Queuine tRNA-ribosyltransferase OS=Legionella cincinnatiensis; OX = 28085 GN=tgt_1 PE=3 SV=1
MKTFSCQVLHKHSATQARVTRIVTAHGEFITPVFMPVGTRAGVNNMTPIELHEAHSQIILGGNTYHMLCAPGMKVIEQAGGMHPFMGWHGPMLTDSGGFQVFSLSKNNEICTIDEEGAHFRLPGSQGLIHMTPEMSLETQKIIGADIIMAFDQCTPDSCTRDEVSHIMTRTHRWLKQSMEYHRQYPNSRYGYAQALFGIIQGGTFKDLRRESADFVASMNPEGIAIGGETIGFNMATTVEVIRWVRDYLPENKPRYTMGVGMSPQDLLDVVAEGIDMFDCVAPTRNARHGSLYCGELVREGNWMRFVSEYENERIQIKKSCFADDMSPIMAQCTCYTCRHYSRAYLHQLSKQKTNLFTALASIHNVHVMHDVCDKMRDLIMNEGVT

SEQ ID NO: 56738 - protein, 272 aa, unidentified
  source 1..272: note = Legionella clemsonensis
  REGION 1..272: note = tr|A0A222P3Y5|A0A222P3Y5_9GAMM Queuine tRNA-ribosyltransferase OS=Legionella clemsonensis; OX = 1867846 GN=tgt_2 PE=4 SV=1
MNQRIVMPMYIPTLTTEAGSCLTLANWQEVGVRAVSYHLEALLLKPGISLLKSLPHLKAYIPWQGSIVLNAALPPAKQGQYTVRSPYDGSVMQISQDEVACLVEKLQPDIVVLPIDFDPGLMRSFTKTSQIFTIPELHVEQQFGWYLPYEPSLSFIALQEKIKRYNTTPIYLAGDFDLQQLAALTQYDSLMIESNLPAQHAFSGKVYYEGGVLDLCADEIAHQQVVIDRHCKCPTCEQQLTRAYLHHLINQTPLLCQRLLIQHNAYYYQNCY

SEQ ID NO: 56739 - protein, 383 aa, unidentified
  source 1..383: note = Legionella clemsonensis
  REGION 1..383: note = tr|A0A222NZN7|A0A222NZN7_9GAMM Queuine tRNA-ribosyltransferase OS=Legionella clemsonensis; OX = 1867846 GN=tgt_1 PE=3 SV=1
MTNQFHCEVLKRHTYTQARVTRVSTPHGDFITPSFMPVGTRAGVNNMTPQELLRAGSQIILGGNTYHMLCAPGMKVIEEAGGMHAFMGWHGPMLTDSGGFQVFSLSKNKEICVIDEEGAHFKLPGSNRLIHMTPEMSLETQKIIGADIIMAFDQCTPDSCARDEVQHIMTRTHRWLKQSVAYHQQFPTSRYGARQALFGIIQGGIYEDLRRESAEFIASMDTDGLAIGGETIGFNMDTTVEVIRWIREFLPENKPRYTMGVGMSPQDLLDVVAEGIDMFDCVAPTRNARHGALYCGEIVKKGHWLKFESPYENERMQIKKACFAQDLQPIMESCSCYTCTHYSRAFLYHLSKQKANLFTALASIHNIHVMHEVCARMRDLIMA

SEQ ID NO: 56740 - protein, 384 aa, unidentified
  source 1..384: note = Legionella donaldsonii
  REGION 1..384: note = tr|A0A378J092|A0A378J092_9GAMM Queuine tRNA-ribosyltransferase OS=Legionella donaldsonii OX=45060; GN = tgt_1 PE=3 SV=1
MTNKFHCEVLKNYPFNKARVTRVNTPHGDFVTPVFMPVGTRAGVNNMTPCELLEAGSQIILGGNTYHMLCAPGMQIIEQAGGMHRFMGWQGPMLTDSGGFQVFSLSKNKEICTIDEEGAHFKLPGTQRLIHMTPEMSLETQKIIGADIIMAFDQCTPDSCSREEVQKIMVRTHRWLKQSIAYHERYPNSRYGASQALFGIVQGGIYEELRRESADFVSSMHTDGIAIGGETVGFDMPTTVEIIRWVREYLPENKPRYTMGVGMSPQDLLDVVAEGIDMFDCVAPTRNARHGALYCGELLPEGQWLRFVSSYENQRIQIKKACFADDTSPVMASCLCYTCRNYTRAFLHHLSKQKANLFTALASIHNIHVMHDVCAKMRDLILAS

SEQ ID NO: 56741 - protein, 282 aa, unidentified
  source 1..282: note = Legionella donaldsonii
  REGION 1..282: note = tr|A0A378J2A5|A0A378J2A5_9GAMM Queuine tRNA-ribosyltransferase OS=Legionella donaldsonii OX=45060; GN = tgt_2 PE=4 SV=1
MINKKQGLGLTPVLTAEAGNCLTLANWQEVGIKAGAYYLDALLMKPGVVCLKKLAPLSHYTGWQGITVLNASLLTARNGVYTIRSCYDGSRIITDQNELTSLISLLQADRVVLPYGILNNSNLKVWQTLAETSRLFVSVDEHAPIYPDWLLGRYLRYDCTKPFSDFMQELRQHADAPLYLSGEFTSEQLHELARYPVWHVESDKPARDAMEGRVYNKEGIIDILDSQQAEDYRPIADCSCPTCQQSLTRAYLHHLLGHTPLLCQRFLIQHNVHYYQQLLLPS

SEQ ID NO: 56742 - protein, 341 aa, Legionella drancourtii
  REGION 1..341: note = tr|G9ESI0|G9ESI0_9GAMM Queuine tRNA-ribosyltransferase OS=Legionella drancourtii LLAP12; OX = 658187 GN=LDG_8254 PE=3 SV=1
MTPNELHAAHSQIILGGNTYHMLCAPGMEVIEQAGGMHPFMGWHGPMLTDSGGFQVFSLSKNKEICTIDEEGAHFKLPGSQGLIHMTPEMSLETQKIIGADIIMAFDQCTPDSCTKDEVGQIMTRTHRWLKQSLQYHQQHPSSRYGYQQALFGIIQGGIFKDLRRESADFVSSMQTDGIAIGGETVGFDMKTTVEVIRWVRDYLPENKPRYTMGVGMSPQDLLDVVAEGIDMFDCVAPTRNARHGALYCGEVVQEGNWLRFASEHENERIQIKKSCFADDPSPIMAHCTCYTCCNYSRSYLHQLFKQKANLFTALASIHNIHVMHDVCDKMRELVINSQEI

SEQ ID NO: 56743 - protein, 383 aa, Legionella drozanskii
  REGION 1..383: note = tr|A0A0W0SVE1|A0A0W0SVE1_9GAMM Queuine tRNA-ribosyltransferase OS=Legionella drozanskii LLAP-1; OX = 1212489 GN=tgt_1 PE=3 SV=1
MKKFHSELIKNHAFTKARVTRVSTPHGDFITPVFMPVGTRAGVNNMTPRELVAAGSQIILGGNTYHMLCAPGMEVIEKAGGMHSFMGWHGPMLTDSGGFQVFSLSRNKEICTIDEEGAHFRLPGTTRLIHMTPEMSLETQKIIGADIIMAFDQCTPDSCSREEVQHIMRRTHRWLKQSINYHRQYPNSRYGASQALFGIVQGGIYEDLRQESAEFVASMNTDGIAIGGETVGFDMKMTVNIIRWIKDYLPENKPRYTMGVGMSPQDLLDVVAEGIDMFDCVAPTRNARHGALYCGEIVKDGNWLRFASPYENERIQIKKACFANDFSPIMPSCTCYTCQHHSRAFLHHLSKQKANLFTALATIHNIHVMHEVCAKMRDLILNS

SEQ ID NO: 56744 - protein, 390 aa, Legionella erythra
  REGION 1..390: note = tr|A0A0W0TQ83|A0A0W0TQ83_LEGER Queuine tRNA-ribosyltransferase OS=Legionella erythra OX=448; GN = tgt PE=3 SV=1
MSSFHCEVLRAYPHNKARVTRVKTAHGELITPVFMPVGTRAGVNNMMPEELIEAGSQIILGGNTYHMLCAPGMDVIEKAGGMHPFMNWHGPMLTDSGGFQVFSLSRNKEICTIDEEGAHFKLPMGDRIIHMTPEMSLETQKIIGADIIMAFDQCTPDALSFEEAEQIMTRTHRWLKQSIAYHQQHPASRYGYSQALFGIIQGGIYEDLRRESAAFVSAVNTDGVAIGGETVGFDMEKTVEIVRWVHAFLPENKPRYTMGVGMSPQDLLDVVKEGIDMFDCVAPTRNARHGALYCGEVIKEGHWLKFDSPHENQRIQIKKAQYAHDDNPIMPDCQCYTCRHYSRAFLHHLFKQKAVLFTALASIHNIHVMHDVCAKMRDLILSSSNDERHV

SEQ ID NO: 56745 - protein, 279 aa, Legionella fallonii
  REGION 1..279: note = tr|A0A098G513|A0A098G513_9GAMM Queuine tRNA-ribosyltransferase OS=Legionella fallonii LLAP-10; OX = 1212491 GN=tgt PE=4 SV=1
MLDREQSYIPIMTSEAGLCLTSANWQEAKINTMSFHLDSLLLKPGYDFLKKIHDLAQYLGWSGGLILNATKCVANKGGVFTLVSPYDGSKIKLSYEQLVELIQHIKPDAVLLPLKIIREFPQLWDNWNDAIIPFIAAEDLSQQELQRQHGVYFNINHSSSNALADELRKWSALPRYIIGHGDLANLDELKKDESLWIESDAPAAMAMRGIVFSQQGNLHLIEDVYAMQFTTIDAACACPSCSQRFTKAYLHHLYLHTPLLCQRFLIQHNVYYAQNYVRN

SEQ ID NO: 56746 - protein, 383 aa, Legionella fallonii
  REGION 1..383: note = tr|A0A098G1F0|A0A098G1F0_9GAMM Queuine tRNA-ribosyltransferase OS=Legionella fallonii LLAP-10; OX = 1212491 GN=tgt PE=3 SV=1
MKSFSCEVLYRHSGTNARVTRVTTSHGEFITPVFMPVGTRAGVNNMTPTELQAAGSQIILGGNTYHMLCAPGMSVIEKAGGMHHFMGWHGPMLTDSGGFQVFSLSKNKEICTIDEEGAHFKLPGNQRLIHMTPEMSLETQKIIGADIIMAFDQCTPDSCTKDEVRLIMTRTHRWLKQSVAYHQQHPNSRYDYPQALFGIVQGGVFEDLRRESADFVSSMDTDGIAIGGETIGFDMDTTVEVIRWVRDYLPEYKPRYTMGVGMSPQDLLDVVAEGIDMFDCVAPTRNARHGALYCGELVTDGSWLRFASEYDNERIQIKKSCFANDLSPVMKTCRCYTCLNYSRACLHHLSKQKANLFTALASIHNVHVLHDVCAKMRDLIMSS

SEQ ID NO: 56747 - protein, 282 aa, Legionella feeleii
  REGION 1..282: note = tr|A0A378IVY8|A0A378IVY8_9GAMM Queuine tRNA-ribosyltransferase OS=Legionella feeleii OX=453; GN = tgt_1 PE=4 SV=1
MINKKQGSGLTPVLTSEAGSCLTLASWHEVGIKAAAYYLDALLMKPGVACLKKLAPLSNYAGWQGITVLNASLLTARNGVYTIRSCYDGSRIITDQNELTSLIGLLQADRVVLPYGILNNSNLKVWQTLAETSMLFVSVDEHPPIYPDWLLGRYMRYDCTKRFSDFMQELRQYADAPLYLSGEFTSEQLQELARYPVWHVESDKPARDAMEGRVYNKESVINILDSQQAEDYRPIADCSCPTCQQSLTRAYLHHLLGHTPLLCQRFLIQHNVHYYQHLLLPS

SEQ ID NO: 56748 - protein, 286 aa, Legionella feeleii
  REGION 1..286: note = tr|A0A0W0TUD4|A0A0W0TUD4_9GAMM Queuine tRNA-ribosyltransferase OS=Legionella feeleii OX=453; GN = tgt PE=4 SV=1
MINKKQGSGLTPVLTTEAGSCLTLANWHEVGIKAAAYYLDALLMKPGVACLEKLAPLSNYAGWQGITVLNASLLTARNGVYTIRSCYDGSRIIIDQSELTSLISLLQADRVVLPYGILNNSNLKVWQTLAETSMLFVSVDEHPPIYPDWLLGRYLRYDCTKPFSDFMQELRQYADAPLYLSGEFTSEQLQELARYPVWHVESDKPARDAMEGRVYNKESVINILDSQQAEDYRPIADCSCPTCQQSLTRAYLHHLLGHTPLLCQRFLIQHNVHYYQHLLLPSLQTS

SEQ ID NO: 56749 - protein, 391 aa, Legionella geestiana
  REGION 1..391: note = tr|A0A0W0U2V2|A0A0W0U2V2_9GAMM Queuine tRNA-ribosyltransferase OS=Legionella geestiana OX=45065; GN = tgt PE=3 SV=1
MPAFRCEVLCVHAHTRARVTRVHTPHGTFDTPVFMPVGTRAGVNNMTPGELRAAGSQIILGGNTYHMLCAPGMDVIRGAGGMHQLMGWNGPMLTDSGGFQVFSLSKNQEICTINETGAHFVIPETGRHIHMTPEMSLATQKTIGADIIMAFDQCTPDAATRDEAQHILTRTHRWLMQSIAYQEAHPCSDYGLEQALFGIIQGGQFADLRRESAEFVAHSGVDGVAIGGETVGFNMPATVDVLRAVHDLLPAHTSRYTMGVGMSPQDLLDVVAEGVDMFDCVAPTRNARHGALYSGRLVADGNWLRFASDFDQGRLHIKKACFASDKDPIMPGCTCYTCTHYSRACLHQLFKQKAIAFSALASIHNVHVLHAVCTGMRELILKNPQPSEEHP

SEQ ID NO: 56750 - protein, 386 aa, Legionella gratiana
  REGION 1..386: note = tr|A0A378J1B1|A0A378J1B1_9GAMM Queuine tRNA-ribosyltransferase OS=Legionella gratiana OX=45066; GN = tgt_1 PE=3 SV=1
MKTFSCEVLYKHSATQARVTRVITAHGEFITPVFMPVGTRAGVNNMTPSELHEAHSQIILGGNTYHMLCAPGMKVIEQAGGMHPFMGWHGPMLTDSGGFQVFSLSKNNEICTIDEEGAHFRLPGSQGLIHMTPEMSLETQKIIGADIIMAFDQCTPDRCTKDEVSHIMTRTHRWLKQSMDYHQQHPNSRYGYEQALFGIIQGGTFNDLRRESADFVSSMNPEGIAIGGETIGFNMETTVEVIRWVRDYLPDNKPRYTMGVGMSPQDLLEVVAEGIDMFDCVAPTRNARHGSLYCGELVREGNWMRFVSEYENERIQIKKSCFAEDMSPIMAQCTCYTCRHYSRSYLHQLSKQKTNLFTALASIHNVHVMHYVCDKIRDLIMNERVT

SEQ ID NO: 56751 - protein, 274 aa, Legionella gratiana
  REGION 1..274: note = tr|A0A378J5N8|A0A378J5N8_9GAMM Queuine tRNA-ribosyltransferase OS=Legionella gratiana OX=45066; GN = tgt_2 PE=4 SV=1
MFAVTQNFIPILTSEAGLCLTAKNWQEVKISAASYSLEHLLYKPGKDILKKITDIGHYLACPGFIIFNALSLVANREGFFVLKSPYDGSKIKFTFFDLLELIQHLNPKAVILPKNIINDFPAFWDHWNHSIFPFLHADDVEKQSISQLHGVYFNAEASKLNWEQFDQWSNVPRYVIGNFEPELIQHFRDKGIEFIETDEPAKAALQGKVYNRSGTIDLTDLNTQMQFEAIDAECICPTCSQQFTRAYLHHLLQHTPLLCQRFLIQHNVFYVQNT

SEQ ID NO: 56752 - protein, 383 aa, Legionella hackeliae
  REGION 1..383: note = tr|A0A0A8UXB7|A0A0A8UXB7_LEGHA Queuine tRNA-ribosyltransferase OS=Legionella hackeliae OX=449; GN = tgt PE=3 SV=1
MTNRFSCEVLKRHAHSKARVTRVSTPHGYFITPAFMPVGTRAGVNNMMPHELLQAGSQIILGGNTYHMLCAPGMKVIEEAGGMHPFMGWHGPMLTDSGGFQVFSLSKNKEICVIDEEGAHFKLPGSERLIHMTPEMSLETQKIIGADIIMAFDQCTPDHCSRDEVQLIMTRTHRWLKQSVAYHQQFPTSRYGAVQALFGIIQGGVYEDLRRESAAFIASMNTDGLAIGGETIGFNMETTVEVIRWVREFLPENKPRYTMGVGMSPQDLLDVVAEGIDIFDCVAPTRNARHGALYCGEVVKTGNWLKFESPYENERIQIKKACFAHDLQPIMASCSCYTCKHYSRSFLHHLCKQKSNLFTALASIHNIHVMHDVCAKMRDLVMA

SEQ ID NO: 56753 - protein, 386 aa, Legionella israelensis
  REGION 1..386: note = tr|A0A0W0V298|A0A0W0V298_9GAMM Queuine tRNA-ribosyltransferase OS=Legionella israelensis OX=454; GN = tgt PE=3 SV=1
MNRFQCKILHRHALTQARVTEITTPHGQFLTPAFMPVGTRAGVNNMTPAELRQAGSQIILGGNTYHMLCAPGMKVIEAAGGMHPFMGWDGPMLTDSGGFQIFSLSKNSEICRIDEQGAHFKLPNSGGIIHMTPEMSMETQKIIGADIIMAFDQCTPDDSTRKEVRHIMNRTHRWLRQSMAYHQKNPLSRYGHQQALFGIIQGGIYEELRCESAEFIASMNTDGIAIGGETIGFNMPATVDVIRWVRRYLPEDKPRYTMGVGMSPQDLLDVVAEGIDMFDCVAPTRNARHGALYCGEVVSDGHWLRFDSPYKHQRIQIKKASFADDLSPIMSGCQCYTCRHYSRAFLHQLIKQKAELFTALACIHNVHVLHDLCAKMRAKLENQSIY

SEQ ID NO: 56754 - protein, 386 aa, Legionella israelensis
  REGION 1..386: note = tr|A0A516MWU3|A0A516MWU3_9GAMM Queuine tRNA-ribosyltransferase OS=Legionella israelensis OX=454; GN = tgt PE=3 SV=1
MNRFQCKILHRHALNQARVTEITTPHGQFLTPAFMPVGTRAGVNNMTPAELRQAGSQIILGGNTYHMLCAPGMKVIEAAGGMHPFMGWDGPMLTDSGGFQIFSLSKNSEICRIDEQGAHFKLPNSGGIIHMTPEMSMETQKIIGADIIMAFDQCTPDDSTRKEVRHIMNRTHRWLRESMAYHQKNPKSRYGHQQALFGIIQGGIYEELRCESAEFIASMNTDGIAIGGETIGFNMPATVDVIRWVRRYLPEDKPRYTMGVGMSPQDLLDVVAEGIDMFDCVAPTRNARHGALYCGEVVSDGHWLRFDSAYKHQRIQIKKASFADDLSPIMSGCQCYTCRHYSRAFLHQLIKQKAELFTALACIHNVHVLHDLCAKMRAKLENQSIY

SEQ ID NO: 56755 - protein, 384 aa, Legionella jordanis
  REGION 1..384: note = tr|A0A0W0VBQ5|A0A0W0VBQ5_9GAMM Queuine tRNA-ribosyltransferase OS=Legionella jordanis OX=456; GN = tgt_1 PE=3 SV=1
MNKPFSCEVLKSHAASKARVTQVTTPHGAFITPTFMPVGTRAGVNNMTPKELKEAGSQIILGGNTYHMLCAPGMEVIKEAGGMHEFMAWHGPMLTDSGGFQVFSLSKNKEICSIDEEGAHFRLPGSERLIHMTPEMSLETQKIIGADIIMAFDQCTPDDCSRDEVQKIMARTHRWLKQSVAYHQQHPTSLYGLPQALFGIIQGGIYEDLRKESAHFIASMNTDGLAIGGETIGFDMKKTVEVISWVRPFLPENKVRYSMGVGMSPQDLLDVVAEGIDIFDCVAPTRNARHGALYCGEVVRDGKWLKFESPFENERIQIKKACFAHDLEPIMASCLCYTCQHYSRAFLHHLSKQKANLFTALASIHNIHVMHDVCAKMRDLILAE

SEQ ID NO: 56756 - protein, 385 aa, Legionella lansingensis
  REGION 1..385: note = tr|A0A0W0VQJ3|A0A0W0VQJ3_9GAMM Queuine tRNA-ribosyltransferase OS=Legionella lansingensis; OX = 45067 GN=tgt_2 PE=3 SV=1
MSNTFRCEVVKNHSRTQSRVVRVTTPHGVFLTPTFMPVGTRAGVNNMMPQELLAAGSQIILGGNTYHMLCSPGMKVIQEAGGMHPFMGWHGPMLTDSGGFQVFSLSKNKEICTIDEEGAHFKLPGGERLIHMTPEMSMETQKIIGADIIMAFDQCTPDHCSRDEVQHIMARTHRWLKQSVAYHQQYPTSHYGLPQALFGIIQGGVFADLRRESAEFIASMNTDGIAIGGETIGFNMETTVEVIRWVRSVLPENKVRYTMGVGMSPQDLLAVVAEGIDIFDCVAPTRNARHGALYCGEIVKHGNWLKFESPYENERIQIKKACFANDLEPVMANCLCYTCKNYSRAFLHHLAKQKASSFTALASIHNIHVMHDVCAKMRDLILTEI

SEQ ID NO: 56757 - protein, 385 aa, Legionella londiniensis
  REGION 1..385: note = tr|A0A0W0VSG0|A0A0W0VSG0_9GAMM Queuine tRNA-ribosyltransferase OS=Legionella londiniensis; OX = 45068 GN=Llon_0288 PE=3 SV=1
MNVFRCEVLCRHKHTRARVTKVTTPHGAFVTPVFMPVGTRAGVNNMMPGELIDAGSQIILGGNTYHMLCAPGMEIIKKARGMHEFMGWHGPMLTDSGGFQVFSLSKNKEICTIDEEGAHFRLPDSGHMIHMTPEMSMETQKIIGADIIMAFDQCTPDSADREMARHIMTRTHRWLKQSLAYHSQHPTSVYGKQQALFGIVQGGIYQDMRRESADFVASLSLDGIAVGGETIGFDMMKTVEVIRWIHEFLPEHKPRYSMGVGMSPQDLLDVVAEGIDMFDCVAPTRNARHGALYCGKTVNEGNWLKFVSEHDNGRIQIKKACYANDLDPIMADCSCYTCLHYTRAYLHHLCKQKTTLFTALASIHNIHVLHDVCAKMRNLIMTHSK

SEQ ID NO: 56758 - protein, 386 aa, Legionella longbeachae
  REGION 1..386: note = tr|D3HP46|D3HP46_LEGLN Queuine tRNA-ribosyltransferase OS=Legionella longbeachae serogroup 1 (strain NSW150) OX=661367 GN=tgt PE=3 SV=1
MKTFSCQVLHKHSATKARVTRVVTAHGEFITPVFMPVGTRAGVNNMTPVELHEAHSQIILGGNTYHMLCAPGMKVIEQAGGMHPFMGWHGPMLTDSGGFQVFSLSKNNEICTIDEEGAHFKLPGSQGLIHMTPEMSLETQKIIGADIIMAFDQCTPDSCTRDEVSHIMTRTHRWLKQSMDYHRQYPNSLYGYEQALFGIIQGGTFKDLRRESADFVTSMNPDGIAIGGETIGFNMVTTVEVIRWVHDYLPENKPRYTMGVGMSPQDLLDVVAEGVDMFDCVAPTRNARHGSLYCGELVREGNWLRFASEYENERIQIKKSCFADDMSPIMAQCTCYTCRHYSRAYLHQLSKQKTNLFTALASIHNVHVMHDVCDKMRDLIINESAL

SEQ ID NO: 56759 - protein, 385 aa, Legionella longbeachae
  REGION 1..385: note = tr|A0A378KN14|A0A378KN14_LEGLO Queuine tRNA-ribosyltransferase OS=Legionella longbeachae OX=450; GN = tgt_1 PE=3 SV=1
MNTFHCEVIHRHKHTAARITKVITPHGEFITPVFMPVGTRAGVNNMMPSELRAAGSQIILGGNTYHMLCAPGMAVIEQAGGMHAFMGWHGPMLTDSGGFQVFSLSKNKEICTIDETGAHFLLPGSQRVIHMTPEMSLQTQKIIGADIIMAFDQCTPDHCSPAEAHQIMCRTHRWLRQSMTYHQEHPVSRYGARQALFGIVQGGIYRDLRRESADFVASMNMDGFAIGGETIGFDMEKTVEVIRWIKEFLPENKPRYTMGVGMSPQDLLDVVAEGIDMFDCVAPTRNARHGALYCGEIVKAGNWLKFASEHQNARLQIKKSCYAEDLSPIMENCACYTCRHYSRAYLHHLVKRKANLFTVLASIHNVHVLQDVCAKMRAVITEDCS

SEQ ID NO: 56760 - protein, 383 aa, unidentified
  source 1..383: note = Legionella maceachernii
  REGION 1..383: note = tr|A0A0W0W0S6|A0A0W0W0S6_9GAMM Queuine tRNA-ribosyltransferase OS=Legionella maceachernii OX=466; GN = tgt_2 PE=3 SV=1
MNKFSSELIKHHTFTKARVTRISTPHGDFLTPVFMPVGTRAGVNNMTPRELLAAGSQIILGGNTYHMLCAPGMSVIEKAGGMHPFMGWQGPMLTDSGGFQVFSLSKNKEICTIDEKGAHFRLPGTTRLIHMTPEMSLETQKIIGADIIMAFDQCTPDQCSRDEVQHIMKRTHRWLKQSIDYHQQHPTSHYGAAQALFGIVQGGIYEDLRRESADFISSMNPDGIAIGGETIGFNMKTTIDIIRWINEYLPENKPRYTMGVGMSPQDLLDVVAEGIDMFDCVAPTRNARHGSLYCGEVVKEGNWLRFASSYENARLQIKKACFANDLSPIMSTCTCYTCQHHSRAFLHHLSKQRANLFTVLASIHNVHVMNEVCARMRDLILNS

SEQ ID NO: 56761 - protein, 394 aa, unidentified
  source 1..394: note = Legionella massiliensis
  REGION 1..394: note = tr|A0A078L1M4|A0A078L1M4_9GAMM Queuine tRNA-ribosyltransferase OS=Legionella massiliensis; OX = 1034943 GN=tgt PE=3 SV=1
MNRFSTEVIKNHSYTQARVTRVSTPHGDFLTPVFMPVGTRAGVNNMTPNELQVAGSQIILGGNTYHMLCAPGMQIIEQAGGMHPFMGWHGPMLTDSGGFQVFSLSKNKEICTIDEEGAHFKLPGTERLIHMTPEMSLETQKIIGADIIMAFDQCTPDSCSRDEVQKIMTRTHRWLGQSTAYHQQHPNSRYGAAQALFGIIQGGIYQDLRQESADFVASMNTDGIAIGGETIGFNMETTIEVIRWVRQYLPQNKPRYTMGVGMSPQDLLEVVAEGIDMFDCVAPTRNARHGALYCGEVIKDGNWLRFASSYENERIQIKRACFADDLSPVMESCSCYTCQNHSRAFLHHLSKQKANLFTALASIHNVHVMHDVCAKMRNLILGSVGNWRQDQKPS

SEQ ID NO: 56762 - protein, 384 aa, Legionella moravica
  REGION 1..384: note = tr|A0A378JZ45|A0A378JZ45_9GAMM Queuine tRNA-ribosyltransferase OS=Legionella moravica OX=39962; GN = tgt_2 PE=3 SV=1
MNKFSCEVLHRHAGTKARVTRVTTPHGEFITPVFMPVGTRAGVNNMTPGELLAAGSQIILGGNTYHMLCAPGMNVIEKAGGMHPFMGWHGPMLTDSGGFQVFSLSKNKEICTIDEEGAHFKLPGSQGLIHMTPEMSLETQKIIGADIIMAFDQCTPDSCTKDEVAHIMSRTHRWLKQSVNYHLEHPASRYGNQQALFGIVQGGIFEDLRRECADFVASMNTDGIAIGGETIGFDMKTTVEVIRWVRDFLPEHKPRYTMGVGMSPQDLLDVVAEGIDMFDCVAPTRNARHGALYCGELVQEGNWLRFSSEYENERIQIKKSCFADDLSPVMASCSCYTCLNYSRSYLHHLFKRKANLFTALASIHNIHVLHDVCAKMRALVINCS

SEQ ID NO: 56763 - protein, 277 aa, Legionella moravica
  REGION 1..277: note = tr|A0A378JVZ8|A0A378JVZ8_9GAMM Queuine tRNA-ribosyltransferase OS=Legionella moravica OX=39962; GN = tgt_1 PE=4 SV=1
MSGKVNHYVPVVTTEAGSCLTSANWQQAKATAVACYLDDLLLKPGVNLLKKIDGLAGYLGWPSTVILNASRLSANKEGVFVLVSPFDGARIKINYAELFELVNALKPDVFLMPEHALNDAPDLWETLNDSILPFIPVTDLINQGCQKRHGVYFKYEQEDHQSLTQSMSKWSHLPRYLCGTLDLNLIHNLCDAGIDYIESDEPAHAAYQGRVYSGAETVDLTNSSTELQFDVIDPDCQCPTCSQRLTKAYLHHLYLHTPLLCQRFLIQHNVFQAQCST

SEQ ID NO: 56764 - protein, 383 aa, Legionella nautarum
  REGION 1..383: note = tr|A0A0W0WLX5|A0A0W0WLX5_9GAMM Queuine tRNA-ribosyltransferase OS=Legionella nautarum OX=45070; GN = tgt_2 PE=3 SV=1
MKKFHFELIKNHAFTKARVTRVSTPHGDFITPVFMPVGTRAGVNNMTPRELLAAGSQIILGGNTYHMLCAPGMEVIEKAGGMHPFMGWHGPMLTDSGGFQVFSLSKNKEICTIDEEGAHFRLPGTTRLIHMTPEMSLETQKIIGADIIMAFDQCTPDNCSREEVQHIMTRTHRWLKQSINYHQQYPSSRYGANQALFGIVQGGIYQDLRQESAEFVASMDTDGIAIGGETVGFDMKMTVNIIRWVKDYLPENKPRYTMGVGMSPQDLLDVVAEGIDMFDCVAPTRNARHGALYCGEVVKEGNWLRFASPYENERIQIKKACFANDFSPIMSSCTCYTCQHHSRAFLHHLSKQKTNLFTALATIHNIHVMHEVCAKMRDLILNS

SEQ ID NO: 56765 - protein, 385 aa, Legionella oakridgensis; identical to SEQ ID NO: 56759
  REGION 1..385: note = tr|A0A0W0XH69|A0A0W0XH69_9GAMM Queuine tRNA-ribosyltransferase OS=Legionella oakridgensis; OX = 29423 GN=Loak_0377 PE=3 SV=1

SEQ ID NO: 56766 - protein, 284 aa, Legionella oakridgensis
  REGION 1..284: note = tr|W0BDW8|W0BDW8_9GAMM Queuine/archaeosine tRNA-ribosyltransferase OS=Legionella oakridgensis ATCC 33761 = DSM 21215 OX=1268635 GN=Loa_01058 PE=4 SV=1
MGKISQENHFAGLVPILTTTAGSTLTAENWQDVGVTTMSCSLASLLVKPGYEVLKQLPNLGCYIGWSGQIVLNASSLNADEHGVYTLRSPYDGSYIRHSMDDVLTLIAQLQPHFVILSQDVMQKKPFAWQSLPDAIFPFLPMNTLSHREVVKPYGFYLDDDKVDVRQQQRKQCKSRPYYVAGELSLPQMQAYVADGACYLESDKPAMDGIQGRVYSHEGDFSLTELSEATRFEVIDNKCQCPVCQQQLTRAYLHHLLAQTPLLCQRFLIQHNIFYCQEILAGQR

SEQ ID NO: 56767 - protein, 386 aa, Legionella parisiensis
  REGION 1..386: note = tr|A0A1E5JR96|A0A1E5JR96_9GAMM Queuine tRNA-ribosyltransferase OS=Legionella parisiensis OX=45071; GN = tgt_1 PE=3 SV=1
MKTFSCDVLHKHTATQARVTRVTTAHGEFITPVFMPVGTRAGVNNMTPAELRDAHSQIILGGNTYHMLCAPGMEVIEKAGGMHPFMGWHGPMLTDSGGFQVFSLSKNKEICTIDEEGAHFRLPGSGRLIHMTPEMSLETQKIIGADIIMAFDQCTPDSCTKDEVNHIMTRTHRWLKQSMQYHQQYPNSRYGYEQALFGIIQGGTFQDLRRESADFVSSMNTEGIAIGGETIGFDMKTTVEVIRWVRNYLPENKPRYTMGVGMSPQDLLDVVAEGIDMFDCVAPTRNARHGSLYCGELIREGNWLRFASEHENERIQIKKSCFADDMSPIMTHCSCYTCLNYSRSYLHQLAKQKTNLFTALASIHNVHVMHDVCDKMRELIMSERSN

SEQ ID NO: 56768 - protein, 388 aa, Legionella pneumophila
  REGION 1..388: note = tr|Q5ZRZ3|Q5ZRZ3_LEGPH Queuine tRNA-ribosyltransferase OS=Legionella pneumophila subsp. pneumophila (strain Philadelphia 1 / ATCC 33152 / DSM 7513) OX=272624 GN=tgtPE=3 SV=1
MPFLRMNTFSCEVLYQHSGTKARVTRVVTPHGEFITPVFMPVGTRAGVNNMMPSELSAAGTQIILGGNTYHMLCAPGMKVIENAGGMHRFMGWHGPMLTDSGGFQVFSLSKNKEICSIDESGAHFKLPGSKGIIHMTPEMSLETQKIIGADIIMAFDQCTPDSCSKDEVSQIMLRTHRWLKQSIDYHQQYPNSRYGYKQALFGIVQGGVFQDLRRESADFVSAMNTDGIAIGGETVGFDMDTTVEVIRWVYEYLPGNKPRYTMGVGMSPQDLLDVVAEGIDMFDCVAPTRNARHGALYCGKLVREGNWLKFQSEHENGRIQIKKSCFADDLAPVMESCSCYTCLNYSRSYLHHLSKQKANLFTALASIHNVHVLHDVCNHMRHLIINS

SEQ ID NO: 56769 - protein, 277 aa, Legionella pneumophila
  REGION 1..277: note = tr|Q5ZU05|Q5ZU05_LEGPH Queuine tRNA-ribosyltransferase OS=Legionella pneumophila subsp. pneumophila (strain Philadelphia 1 / ATCC 33152 / DSM 7513) OX=272624 GN=tgtPE=4 SV=1
MLSTNQNFVPVLNTEAGLCLTAANWQEIKITIASCYLDLLLLKPGYSLLKNITDFTKYLGWSGHLILNASRLVSDKNGMVILISPYDGSRIKLTNSELVHLILHIKPVAVLLPETIMNGFSGLWEQWDDTILPFLSAKQLETLQVPGKHGVYFNFSEAKYNDDFLSQLQKWSEFPLYVSGPIGADLIEDLNRKKSILIESDEPAKNAMRGIVYGREGNVDLTDESQAFNFQLIDENCSCPTCSAQLTRAYLHHLLANTPLLCQRFLIQHNAYYVQGN

SEQ ID NO: 56770 - protein, 383 aa, Legionella quateirensis
  REGION 1..383: note = tr|A0A378L0N7|A0A378L0N7_9GAMM Queuine tRNA-ribosyltransferase OS=Legionella quateirensis; OX = 45072 GN=tgt_2 PE=3 SV=1
MNKFSCEVLYRHAGTKARVTRVTSPHGEFITPVFMPVGTRAGVNNMTPRELLSAGSQIILGGNTYHMLCAPGMNVIEKAGGMHPFMGWHGPMLTDSGGFQVFSLSKNKEICTIDEEGAHFKLPGSQGLIHMTPEMSLETQKIIGADIIMAFDQCTPDSCSKDEVAHIMSRTHRWLKQSVNYHLEHPDSRYGNQQALFGIVQGGIFEDLRRECADFVASMNTDGIAIGGETIGFDMKTTVDVIRWVRDFLPENKPRYTMGVGMSPQDLLDVVAEGIDMFDCVAPTRNARHGALYCGELVQEGNWLRFSSEYENERIQIKKSCFSDDLSPVMASCSCYTCLNYSRSYLHHLFKRKANLFTALASIHNIHVLHDVCAKMRALVINS

SEQ ID NO: 56771 - protein, 278 aa, Legionella quateirensis
  REGION 1..278: note = tr|A0A378KUL4|A0A378KUL4_9GAMM Queuine tRNA-ribosyltransferase OS=Legionella quateirensis; OX = 45072 GN=tgt_1 PE=4 SV=1
MSGKVQQYVPVVTTEAGSCLTSANWHEVNVKTVACYLDDLLLKPGADLLKKIDNLAAYLGWPGTVILNASRLLANKEGIFTLISPFDGARIKFNYSELFELVNNLKPDVFLVPKNAINDAPELWETLDNSIIPYIPINDLVNQACHKPHGVYFNFVDEHTNQSVTEYLSRWSHLPSYMSGKIPLNLIHSLRDLGVEYIESDEPALSAFQGTVYSGSDTVDLIDSSTELQFDVIDPDCDCPTCSQQLTKAYLHHLYLHTPLLCQRFLIQHNVFQAQRST

SEQ ID NO: 56772 - protein, 386 aa, Legionella quinlivanii
  REGION 1..386: note = tr|A0A364LGF0|A0A364LGF0_9GAMM Queuine tRNA-ribosyltransferase OS=Legionella quinlivanii OX=45073; GN = tgt PE=3 SV=1
MSTFNCEVIARYSRNKARIIRVSTPHGEFISPVFMPVGTRAGVNNMMPLELKEAGSQIILGGNTYHMLCAPGMEVIEQAGGMHPFMGWDGPMLTDSGGFQVFSLSKNKEICRIDEEGAHFQLPGDSRLIHMTPEMSLETQKIIGADIIMAFDQCTPDASSFEEVRQIMERTHRWLLQSIDYHQQYPASRYGARQALFGIIQGGIFQELRSESAKFVASMDLDGIAIGGETVGFDMKKTVEIIQWVREYLPENKPRYTMGVGMSPQDLLDVVAQGIDMFDCVAPTRNARHGALYSGKIVKDGHWLRFASEYDNHRLQIKKSCFANDLAPIMEDCLCYTCKTHSRAYLHHLFKQKSNVFTALASIHNVHVMHEVCTQMRNLILNETRN

SEQ ID NO: 56773 - protein, 386 aa, Legionella quinlivanii
  REGION 1..386: note = tr|A0A0W0XYH0|A0A0W0XYH0_9GAMM Queuine tRNA-ribosyltransferase OS=Legionella quinlivanii OX=45073; GN = Lqui_1951 PE=3 SV=1
MSTFNCEVIARYSRNNARIVRVSTPHGEFISPVFMPVGTRAGVNNMMPLELKEAGSQIILGGNTYHMLCAPGMDVIEQAGGMHPFMGWHGPMLTDSGGFQVFSLSKNKEICRIDEEGAHFQLPGDSRLIHMTPEMSLETQKIIGADIIMAFDQCTPDASSFEEVRHIMERTHRWLLQSIDYHQQYPASRYGARQALFGIIQGGIFQELRSESAKFVASMDLDGIAIGGETVGFDMKKTVEIIQWVRQYLPENKPRYTMGVGMSPQDLLDVVAQGIDMFDCVAPTRNARHGALYSGKIVRDGHWLRFASEYDNHRLQIKKSCFANDLAPIMEDCFCYTCKTHSRAYLHHLFKQKSNVFTALASIHNVHVMHEVCTQMRNLILNEAHN

SEQ ID NO: 56774 - protein, 390 aa, Legionella rubrilucens
  REGION 1..390: note = tr|A0A0W0XZY4|A0A0W0XZY4_9GAMM Queuine tRNA-ribosyltransferase OS=Legionella rubrilucens OX=458; GN = tgt_1 PE=3 SV=1
MSSFHCEVLHAYPHNKARVTRVKTAHGEFITPVFMPVGTRAGVNNMMPDELTEAGSQIILGGNTYHMLCAPGMTVIEKAGGMHPFMNWHGPMLTDSGGFQVFSLSRNKEICTIDEEGAHFKLPDGDRVIHMTPEMSLETQKIIGADIIMAFDQCTPDALSREEAQHIMTRTHRWLKQSIAYHQEHPDSRYGYSQALFGIIQGGIYEDLRRESAAFVSSVTTDGVAIGGETVGFDMEKTVEIIRWVHAFLPENKPRYTMGVGMSPQDLLDVVKEGVDMFDCVAPTRNARHGALYCGEVIKEGHWLKFDSPHENQRIQIKKAQYAKDDSPIMPGCQCYTCRHYSRAFLHHLFKQKATLFTALASIHNIHVMHDVCAKMRDLILSSSNDERHV

SEQ ID NO: 56775 - protein, 386 aa, Legionella sainthelensi
  REGION 1..386: note = tr|A0A447SUL2|A0A447SUL2_9GAMM Queuine tRNA-ribosyltransferase OS=Legionella sainthelensi; OX = 28087 GN=tgt_1 PE=3 SV=1
MKTFSCQVLHKHSATQARVTRVVTAHGEFITPVFMPVGTRAGVNNMTPIELHEAHSQIILGGNTYHMLCAPGMKVIEQAGGMHPFMGWHGPMLTDSGGFQVFSLSKNNEICTIDEEGAHFKLPGSQGLIHMTPEMSLETQKIIGADIIMAFDQCTPDSCTRDEVSQIMTRTHRWLKQSMDYHHQYPHSRYGYEQALFGIIQGGTFKDLRRESADFVSSMNPEGIAIGGETIGFNMATTVEVIRWVRDYLPDNKPRYTMGVGMSPQDLLEVVAEGIDMFDCVAPTRNARHGSLYCGELVREGNWMRFVSEYENERIQIKKACFADDMSPIMAQCTCYTCRHYSRAYLHQLSKQKTNLFTALASIHNVHVMHDVCDKMRDLIINESAI

SEQ ID NO: 56776 - protein, 386 aa, Legionella sainthelensi
  REGION 1..386: note = tr|A0A0W0YNK2|A0A0W0YNK2_9GAMM Queuine tRNA-ribosyltransferase OS=Legionella sainthelensi; OX = 28087 GN=tgt PE=3 SV=1
MKTFSCQVLHKHSATQARVTRVVTAHGEFMTPVFMPVGTRAGVNNMTPIELREAHSQIILGGNTYHMLCAPGMKVIEQAGGMHPFMGWHGPMLTDSGGFQVFSLSKNNEICTIDEEGAHFKLPGSQGLIHMTPEMSLETQKIIGADIIMAFDQCTPDSCTRDEVSQIMTRTHRWLKQSMDYHRQYPHSRYGYEQALFGIIQGGTFKDLRRESADFVSSMNPEGIAIGGETIGFNMATTVEVIRWVRDYLPENKPRYTMGVGMSPQDLLEVVAEGIDMFDCVAPTRNARHGSLYCGELVREGNWMRFVSEYENERIQIKKACFADDMSPIMAQCTCYTCRHYSRAYLHQLSKQKTNLFTALASIHNVHVMHDVCDKMRDLIINESAI

SEQ ID NO: 56777 - protein, 386 aa, Legionella santicrucis
  REGION 1..386: note = tr|A0A0W0ZCE3|A0A0W0ZCE3_9GAMM Queuine tRNA-ribosyltransferase OS=Legionella santicrucis OX=45074; GN = tgt PE=3 SV=1
MKTFSCQVLHKHSATQARVTRVITAHGEFITPVFMPVGTRAGVNNMTPIELHEAHSQIILGGNTYHMLCAPGMKIIEQAGGMHPFMGWHGPMLTDSGGFQVFSLSKNNEICTIDEEGAHFRVPGSQSLIHMTPEMSLETQKIIGADIIMAFDQCTPDNCSRDEVSHIMARTHRWLKQSMNYHRQYPNSRYGYEQALFGIIQGGTFKDLRRESADFVASMNPEGIAIGGETIGFNMATTVEVIRWVRDYLPENKPRYTMGVGMSPQDLLEVVAEGIDMFDCVAPTRNARHGSLYCGELVREGNWMRFISEYENERIQIKKSCFADDMSPIMAQCTCYTCRHYSRSYLHQLSKQKTNLFTALASIHNVHVMHDVCDKMRELIINESAA

SEQ ID NO: 56778 - protein, 389 aa, Legionella shakespearei
  REGION 1..389: note = tr|A0A0W0YTH8|A0A0W0YTH8_9GAMM Queuine tRNA-ribosyltransferase OS=Legionella shakespearei DSM 23087 OX=1122169 GN=tgt_2 PE=3 SV=1
MTTFSCEVLYRHSATKARVTRVTTPHGEFITPVFMPVGTRAGVNNMTAKELQEAGSQIILGGNTYHMLCAPGMRVIEKAGGMHPFMDWHSPMLTDSGGFQVFSLSKNKEICTIDEEGAHFKLPGSQGLIHMTPEMSLETQKIIGADIIMAFDQCTPDSCSKEEVQHIMTRTHRWLRQSMNYHQQHPLSRYGYQQALFGIVQGGIFEDLRQESADFVASMNTDGIAIGGETIGFDMKTTVDVIRWVRDYLPENKPRYTMGVGMSPQDLLEVVAEGIDMFDCVAPTRNARHGALYCGGLVPDGDWLRFKSDYENERIQIKKSCFADDLSPVMASCTCYTCRNYSRSCLHHLFKRKANLFTALASIHNIHVLHDVCDKMRALVINSSQSSYS

SEQ ID NO: 56779 - protein, 384 aa, Legionella sp.
  REGION 1..384: note = tr|A0A433K8V7|A0A433K8V7_9GAMM Queuine tRNA-ribosyltransferase OS=Legionella sp. km535 OX=2498107; GN = ELY21_09425 PE=3 SV=1
MNKFSCEVLYRHAGTKARVTRVTTPHGEFITPVFMPVGTRAGVNNMTPGELLAAGSQIILGGNTYHMLCAPGMNVIEKAGGMHPFMGWHGPMLTDSGGFQVFSLSKNKEICTIDEEGAHFKLPGSQGLIHMTPEMSLETQKIIGADIIMAFDQCTPDSCTKDEVAHIMSRTHRWLKQSVNYHLEHPASRYGNQQALFGIVQGGIFEDLRRECADFVASMNTDGIAIGGETIGFDMNTTVEVIRWVRDFLPEHKPRYTMGVGMSPQDLLDVVAEGIDMFDCVAPTRNARHGALYCGELVQEGNWLRFSSEYENERIQIKKSCFADDLSPVMASCSCYTCLNYSRSYLHHLFKRKANLFTALASIHNIHVLHDVCAKMRALVINCS

SEQ ID NO: 56780 - protein, 386 aa, Legionella sp.
  REGION 1..386: note = tr|A0A1Q3TTH0|A0A1Q3TTH0_9GAMM Queuine tRNA-ribosyltransferase OS=Legionella sp. 39-23 OX=1895902; GN = BGO44_13465 PE=3 SV=1
MKTFSCNVLHKHSATQARVTRVTTAHGEFITPVFMPVGTRAGVNNMTPIELRDAHSQIILGGNTYHMLCAPGMDVIEKAGGMHPFMGWHGPMLTDSGGFQVFSLSKNEEICTIDEEGAHFKLPGSQRLIHMTPEMSLETQKIIGADIIMAFDQCTPDSCTKDEVSHIMERTHRWLKQSMHYHQQHPNSRYGYEQALFGIIQGGTFKDLRRESADFITSMNTDGIAIGGETIGFDMKTTVEVIRWVRDYLPENKPRYTMGVGMSPQDLLDVVAEGIDMFDCVAPTRNARHGSLYCGELIREGNWLRFASEYENERIQIKKSCFADDMSPIMAQCSCYTCQNYSRSYLHQLAKQKTNLFTALASIHNVHVMHDVCDKMRELIINESSN

SEQ ID NO: 56781 - protein, 390 aa, Legionella spiritensis
  REGION 1..390: note = tr|A0A0W0Z6A2|A0A0W0Z6A2_LEGSP Queuine tRNA-ribosyltransferase OS=Legionella spiritensis OX=452; GN = tgt PE=3 SV=1
MTAFQCEVLHHYPHNKARLTRVTTPHGVFTTPVFMPVGTRAGVNNMIPDELREAGSSIILGGNTYHMLCAPGMAIIEKAGGMHPFMGWQGPMLTDSGGFQVFSLSKNKEICTIDEEGAHFRLPDDKRLIHMTPEMSLETQKIIGADIIMAFDQCTPDQSSRDEVRHIMTRTHRWLKQSIDYHQNHPTSRYGCRQALFGIIQGGIYEDLRCESADFVAGMDTDGIAIGGETVGFNMKMTIDIIRWVRDHLPPEKPRYTMGVGMSPQDLLDVVAQGVDMFDCVAPTRNARHGALYCGEVVRTGDWLKFDSPYDNHRISIKKTCFARDESPIMPGCLCYTCKNHTRAFLHQLSKQKANLFTALASIHNIHVMNDVCAKMRDLIISSINTQETK

SEQ ID NO: 56782 - protein, 386 aa, unidentified; identical to SEQ ID NO: 56780
  source 1..386: note = Legionella steelei
  REGION 1..386: note = tr|A0A0W0ZH10|A0A0W0ZH10_9GAMM Queuine tRNA-ribosyltransferase OS=Legionella steelei OX=947033; GN = tgt PE=3 SV=1

SEQ ID NO: 56783 - protein, 274 aa, Legionella steigerwaltii
  REGION 1..274: note = tr|A0A378LA49|A0A378LA49_9GAMM Queuine tRNA-ribosyltransferase OS=Legionella steigerwaltii OX=460; GN = tgt_1 PE=4 SV=1
MLTAVQNFIPVLTSEAGLCLTTANWQEAEITAASYSLERLLYKPGQDGLKKITNLSHYLVWPGVLVLNAVSLVVNKEGIYTLKSPYDGSKIKFTLADLLGLIQHLKPNAVILPQKIVQDFPQIWDNWNDAIVPFMHVNDLEKHKVDKHHGIYFNVLHELDWEQLNRWSHVPRYIMGRFDPELIWRLRDKGIGFIETDEPAHAALQGKVYSRAGDVDLMDSKTQMQFELIDADCVCPTCSQQFTRAYLHHLLQHTPLLCQRFLIQHNVFYVQKRK

SEQ ID NO: 56784 - protein, 386 aa, Legionella steigerwaltii
  REGION 1..386: note = tr|A0A378LEW4|A0A378LEW4_9GAMM Queuine tRNA-ribosyltransferase OS=Legionella steigerwaltii OX=460; GN = tgt_2 PE=3 SV=1
MKTFSCNVLHKHAATQARVTRVTTAHGEFITPVFMPVGTRAGVNNMTPTELRDAHSQIILGGNTYHMLCAPGMEVIEKAGGMHPFMGWHGPMLTDSGGFQVFSLSKNKEICTIDEEGAHFKLPSSQRLIHMTPEMSLETQKIIGADIIMAFDQCTPDSCTKDEVSHIMTRTHRWLRQSMQYHLQHPNSRYGYEQALFGIIQGGTFKDLRRESADFISSMNTDGIAIGGETIGFDMKTTVEVIRWVRDYLPEDKPRYTMGVGMSPQDLLDVVAEGIDMFDCVAPTRNARHGSLYCGELIREGNWLRFASEYENERIQIKKSCFAEDMSPIMAQCSCYTCQNYSRSYLHQLAKQKTNLFTALASIHNVHIMHDVCDKMRELIINESSN

SEQ ID NO: 56785 - protein, 390 aa, Legionella taurinensis
  REGION 1..390: note = tr|A0A3A5L3L9|A0A3A5L3L9_9GAMM Queuine tRNA-ribosyltransferase OS=Legionella taurinensis OX=70611; GN = D6J04_08660 PE=3 SV=1
MSSFHCEVLHAYPHNKARVTRVKTAHGEFITPVFMPVGTRAGVNNMMPEELIQAGSQIILGGNTYHMLCAPGMTVIEKAGGMHPFMNWHGPMLTDSGGFQVFSLSRNKEICTIDEEGAHFKLPDGDRVIHMTPEMSLETQKIIGADIIMAFDQCTPDALSREEARQVMTRTHRWLEQSIAYHQAHPHSRYGYSQALFGIIQGGIYEELRRESAAFVSSVTTDGVAIGGETVGFDMEKTVEIIRWVHEFLSENKPRYTMGVGMSPQDLLDVVKEGIDMFDCVAPTRNARHGALYCGEVIKEGHWLKFDSPYENQRIQIKKSHYAKDDNPVMPGCQCYTCRHYSRAFLHHLFKQKATLFTALASIHNIHVMHDVCAKMRDLILSSSNDERHV

SEQ ID NO: 56786 - protein, 386 aa, Legionella tucsonensis
  REGION 1..386: note = tr|A0A0W0ZQH0|A0A0W0ZQH0_9GAMM Queuine tRNA-ribosyltransferase OS=Legionella tucsonensis OX=40335; GN = tgt PE=3 SV=1
MKTFSCDVLYKHSATQARVTRVATAHGEFITPVFMPVGTRAGVNNMTPVELHDAHSQIILGGNTYHMLCAPGMEVIEKAGGMHPFMGWHGPMLTDSGGFQVFSLSKNKKICTIDEDGAHFRLPGNERLIHMTPEMSLETQKIIGADIIMAFDQCTPDSCTKDEVNHIMTRTHRWLKQSIQYHQQYPNSRYGYEQALFGIIQGGTFKDLRCESADFVSSMNTEGIAIGGETIGFDMKTTVEVIRWVRDYLPENKPRYTMGVGMSPQDLLDVVAEGIDMFDCVAPTRNARHGSLYCGELIREGDWLRFTSEYENERIQIKKSCFADDLSPIMAQCSCYTCLNYSRSYLHQLAKQKTNLFTALASIHNVHVMHDVCDKMRELIMSECAN

SEQ ID NO: 56787 - protein, 386 aa, Legionella wadsworthii
  REGION 1..386: note = tr|A0A378LM51|A0A378LM51_9GAMM Queuine tRNA-ribosyltransferase OS=Legionella wadsworthii OX=28088; GN = tgt_1 PE=3 SV=1
MKTFSCDVLHRHTHTQARVTRITTAHGEFITPVFMPVGTRAGVNNMTPEELHQAHSQIILGGNTYHMLCAPGMDVIEKAGGMHPFMGWHGPMLTDSGGFQVFSLSKNKEICTIDEEGAHFKIPTNQRLIHMTPEMSLETQKIIGADIIMAFDQCTPDSCTKDEVSHIMDRTHRWLKQSIQYHQKYPNSQYGYQQALFGIIQGGTFKDLRRESADFVASMNTDGIAIGGETIGFDMKTTVEVVRWVRDYLPENKPRYTMGVGMSPQDLLDVVAEGIDMFDCVAPTRNARHGSLYCGELIREGNWLRFFSEYENERIQIKKSCFANDMSPIMAQCSCYTCMNYSRSYLHQLAKQKTNLFTALASIHNVHVMHDVCDKMRQLIINESSN

SEQ ID NO: 56788 - protein, 288 aa, Legionella wadsworthii
  REGION 1..288: note = tr|A0A378LP74|A0A378LP74_9GAMM Queuine tRNA-ribosyltransferase OS=Legionella wadsworthii OX=28088; GN = tgt_2 PE=4 SV=1
MLTAVHNFIPVLTSEAGLCLTKENWQEAKVTATSYSMEQLLYKPGREVLENIVALTEYLACPGELIINAMSLVSNKEKRYVLKSPFDGSKSTFTVEELVHLIHHLNPKAVLLPPNITRDFPRIWDNWNENIEPFIHVADVEKSGIPKHHGVYFNILKEVDWEQLDRWSHLNRYVVGNFDPQQILDFQNNGISLIETDAPSQEAMLGRVYSREGTLDLTEPKTEMQFATIDAECVCPTCSQQLTRAYLHHLFAHTPLLCQRFLIQHNVFYTQSFMTLGEIKEIRTLKSI

SEQ ID NO: 56789 - protein, 383 aa, Legionella waltersii
  REGION 1..383: note = tr|A0A0W1ADA9|A0A0W1ADA9_9GAMM Queuine tRNA-ribosyltransferase OS=Legionella waltersii OX=66969; GN = Lwal_1402 PE=3 SV=1
MNTFACEVLHQHTSNKARVTRVTTPHGQFTTPVFMPVGTRAGVNNMTPLELKAAGSQIILGGNTYHMLCEPGMEIIKKSGGMHQFMGWHGPMLTDSGGFQVFSLSKNKEICTIDEFGAHFKLPGNKDLIHMTPEMSLETQKIIGADIIMAFDQCTPDACPKDEVRQIMTRTHRWLGQSKIYHQQHPESCYGFKQALFGIIQGGIYEDLRKESADFVTSMQTDGVAIGGETIGFNMETTVNVIRWIYNYLPVNKPRYTMGVGMSPQDLLDVVAEGIDMFDCVAPTRNARHGALYCGELVKEGNWLKFSSDYPNERIQIKKACFAEDYSPIMESCTCYTCKNYSRSFLHHLSKQKANVFTALASIHNVHVLHDVCANIRQAVIHS

SEQ ID NO: 56790 - protein, 383 aa, Legionella worsleiensis
  REGION 1..383: note = tr|A0A0W1AK03|A0A0W1AK03_9GAMM Queuine tRNA-ribosyltransferase OS=Legionella worsleiensis; OX = 45076 GN=Lwor_0416 PE=3 SV=1
MNKFSCEVLYRHAGSKARVTRVTTPHGEFITPVFMPVGTRAGVNNMTPGELLDAGSQIILGGNTYHMLCAPGMSVIEKAGGMHPFMGWHGPMLTDSGGFQVFSLSKNKEICTIDEEGAHFKLPGNQRLIHMTPEMSLETQKIIGADIIMAFDQCTSDSCSKDDVAHIMSRTHRWLKQSVNYHLEHPMSRYGNQQALFGIVQGGIFEDLRRECADFVASMNTDGIAIGGETIGFDMKTTVEVIRWVRDFLPENKPRYTMGVGMSPQDLLDVVAEGIDMFDCVAPTRNARHGALYCGELVQEGNWLRFSSEYENERIQIKKSCFADDLAPVMASCSCYTCRNYSRSHLHHLFKRKANLFTALASIHNIHVLHDVCAKMRTLVINS

SEQ ID NO: 56791 - protein, 384 aa, unidentified
  source 1..384: note = Legionellaceae bacterium
  REGION 1..384: note = tr|A0A2E5YAL0|A0A2E5YAL0_9GAMM Queuine tRNA-ribosyltransferase OS=Legionellaceae bacterium; OX = 2026753 GN=CMF38_08205 PE=3 SV=1
MSSFSCKVVHRHRYSEARITQISTPHGLITTPVFMPVGTRAGVNNLTIAELLATKSQIILGGNTYHMLCSPGMKVIEAAGGMHPFMGWHGPMLTDSGGFQVFSLAKNQCTIDDKGAHFKLPAQDNLIHMTPEMSLQTQKIIGADIIMAFDQCTPDTADFNEAKLIMQRTHRWLRQSLEYHQRYPTSRYGHKQALFGIIQGGAHLDLRLESTKFVTSLDLDGIAIGGESVGFNMPVTIKIIQEVMNHLPVNKPRYTMGVGMSPQDLIDVVKEGIDMFDCVAPTRNARHGALYCGEIVVDNHWLRFESIYPNARIQIKKAVFAKDDTPIMAHCRCYTCLHHSRAYLHYLFKKQASAFTALASIHNIHVMHEVCNRMRELIMHQSLI

SEQ ID NO: 56792 - protein, 368 aa, unidentified
  source 1..368: note = Legionellaceae bacterium
  REGION 1..368: note = tr|A0A2E2WNY0|A0A2E2WNY0_9GAMM Queuine tRNA-ribosyltransferase OS=Legionellaceae bacterium; OX = 2026753 GN=tgt PE=3 SV=1
MKFTLIKQSGRARLGQMQFDRGVVDTPAFMPVGTYGAVKTLSPEEVKSIGAQIILGNTFHLMLRPGTEIIKKHGDLHDFMRWQGPILTDSGGFQVFSLTELRKLSEKGVEFRSPLNGDKVFLSPEKSMQVQRDLGSDIVMIFDECTPYPATLTQAAESMRLSLGWAKRSKDAHADNPNALFGIVQGSVYPELREESLAGLMSIEFDGYAIGGLAVGEPKDERDKILEFLDPRMPVDKPRYLMGVGKPEDLVEGVRRGVDMFDCVMPTRNARNGHLFTSTGVLRIRNSEHRESLLPLDEQCDCYTCQNYTRSYLYHLDKGHETLGARLNTIHNLRYYQRLMQQIREAIAADRFEAFADEFYLAFGSSSR

SEQ ID NO: 56793 - protein, 384 aa, unidentified
  source 1..384: note = Legionellales bacterium
  REGION 1..384: note = tr|A0A1G0X0H7|A0A1G0X0H7_9GAMM Queuine tRNA-ribosyltransferase OS=Legionellales bacterium RIFCSPHIGHO2_12_FULL_37_14 OX=1798568 GN=A3F18_07140 PE=3; SV = 1
MRVELIAEDNKTRARVIKFYTEHGAVTTPVFMPVGTRAGVNNLTIDELKACQSQIILGGNTYHMCCAPQMDIIKTAGGMHQFMGWDGPMLTDSGGFQIFSLSKNSKLCQIDEDGAHFTIPETATKFYMTPQVSMEVQKIIGADIIMAFDQCTPSDASHAKANEIMTRTHRWLEQSLDYHQANPNSCYAYKQALFGIVQGGIYEDLRHKSMEFIVNADLDGIALGGEMIGFDMEKTVATIRSVYANFPVLKPRYTMGVGMFPQDLLDVIKEGIDMFDCVAPTRNARHGALYAGKVIAQGDWLEFSSQYEQGRLQIKKAEFAEDNRPIMEECTCLTCKLHTRSYLHYLFKEKSPVFTAYACIHNVHVMHEVCAKAREKILTSRVVR

SEQ ID NO: 56794 - protein, 378 aa, unidentified
  source 1..378: note = Legionellales bacterium
  REGION 1..378: note = tr|A0A2E2TXW2|A0A2E2TXW2_9GAMM Queuine tRNA-ribosyltransferase OS=Legionellales bacterium; OX = 2026754 GN=tgt PE=3 SV=1
MKPPYFHYELIHQSTRSRARVGRVHTPHGIIDTPNFVAVGTNGTLKALDNAVVDTLGLQLMFCNTYHLLLQPGPEVVAKAGGLHQFIGRRQPIITDSGGFQVFSLAYGGVADEIKSRGTKKHEGAVSKITERGVIFRSYRDGRKILLTPESTVEVQKDLGADIIIPLDELPPYHIDDKALRASLARTHRWEARSLETHLANPKQQAMYAVIHGGTDPKLRARSCEVLTELPFDGFAIGGSMGRTRDEMIETVRVTTPNLPEDKPNHLLGIGDLYSIDRCVVHGIDTFDSAYPTRAARHGTLFTSHGPIKIKSGRWAECFEPIEKDCPCPTCEVHSLAFLHHLFKASEPSAAMLASYHNVAYMVKHMRQLREAILENKI

SEQ ID NO: 56795 - protein, 376 aa, unidentified
  source 1..376: note = Leisingera aquaemixtae
  REGION 1..376: note = tr|A0A0P1HE64|A0A0P1HE64_9RHOB Queuine tRNA-ribosyltransferase OS=Leisingera aquaemixtae; OX = 1396826 GN=tgt PE=3 SV=1
MATLFNFEMKATDGKARTGVIQTPRGEIRTPAFMPVGTAATVKAMMPESVRATGADILLGNTYHLMLRPTAERIDRLGGLHKFMNWERPILTDSGGFQVMSLAGLRKLTEKGVTFKSHIDGSRHELTPERSMEIQRLLGSDIVMCFDECPALPADRDRIAESMRLSMRWAERSRETFGDRPGHALFGIQQGGLERDFREESAEALKAIGFDGYAVGGLAVGEGQEAMFGCLDFAPDMLPEDKPRYLMGVGKPDDIVGAVARGIDMMDCVLPSRSGRTGQAFTRYGVVNIKNARHQDDPRPLDEQCSCPACSNYSRAYLHHVFRSNEMISGMLLTWHNLHYFQEIMGGMREAIAAGTFDAWQKDFHDTRAQGDIERL

SEQ ID NO: 56796 - protein, 376 aa, Leisingera methylohalidivorans
  REGION 1..376: note = tr|V9VWH9|V9VWH9_9RHOB Queuine tRNA-ribosyltransferase OS=Leisingera methylohalidivorans DSM 14336 OX=999552 GN=tgt PE=3 SV=1
MAELFNFELKATDGKARTGVINTPRGEIRTPAFMPVGTAATVKAMLPESVRATGADILLGNTYHLMLRPTAERIDRLGGLHKFMNWERPILTDSGGFQVMSLAGLRKLTEKGVTFKSHIDGSKHELTPERSMEIQRLLGSDIVMCFDECPALPADRKRIAESMQLSMRWAERSRDAFGDRPGHALFGIMQGGLEQDLREESAEALKKTGFEGYAVGGLAVGEGQEAMFDCLDYAPGFLPEDKPRYLMGVGKPDDIVGAVARGIDMMDCVLPSRSGRTGQAFTRHGVVNIKNARHQDDPRPLDEQCSCPACSSYSRAYLHHVFRSNEMISGMLLTWHNLHYFQDIMQGMRDAIAAGIFEAWQADFHETRAQGDIERL

SEQ ID NO: 56797 - protein, 376 aa, Leisingera sp.
  REGION 1..376: note = tr|A0A0C1GB40|A0A0C1GB40_9RHOB Queuine tRNA-ribosyltransferase OS=Leisingera sp. ANG-M7; OX = 1577902 GN=tgt PE=3 SV=1
MAELFNFELKATDGKARTGVINTPRGDIRTPAFMPVGTAATVKAMMPESVRATGADILLGNTYHLMLRPTAERIDRLGGLHKFMNWERPILTDSGGFQVMSLAGLRKLTEKGVTFKSHVDGSKHELTPERSMEIQRLLGSDIVMCFDECPALPADRDRIAESMRLSMRWAERSREAFGDRPGHALFGIMQGGLEQDLREESAEALKKIGFEGYAVGGLAVGEGQEAMFDCLDYAPGFLPEDKPRYLMGVGKPDDIVGAVARGIDMMDCVLPSRSGRTGQAFTRYGVVNIKNARHQDDPRPLDEHCSCPACSNYSRAYLHHVFRSNEMISGMLLTWHNLHYFQEIMGGMREAIAAGTFEAWQKDFHDTRAQGDIERL

SEQ ID NO: 56798 - protein, 376 aa, Leisingera sp.
  REGION 1..376: note = tr|A0A481PMM5|A0A481PMM5_9RHOB Queuine tRNA-ribosyltransferase OS=Leisingera sp. NJS204; OX = 2508307 GN=tgt PE=3 SV=1
MAELFNFELKATDGTARTGVINTPRGEIRTPAFMPVGTAATVKAMMPESVRATGADILLGNTYHLMLRPTAERIDRLGGLHKFMNWERPILTDSGGFQVMSLAGLRKLTEKGVTFKSHIDGSKHELTPERSMEIQRLLGSDIVMCFDECPALPADRDRIAESMRLSMRWAERSREAFGDRPGHALFGIMQGGLEQDLREESAEALKKIGFEGYAVGGLAVGEGQEAMFDCLDYAPGFLPEDKPRYLMGVGKPDDIVGAVARGIDMMDCVLPSRSGRTGQAFTRYGVVNIKNARHQDDPRPLDEQCSCPACSSYSRAYLHHVFRSNEMISGMLLTWHNLHYFQEIMQGMREAIAAGSFEAWQKDFHDTRAQGDIEPL

SEQ ID NO: 56799 - protein, 375 aa, unidentified; identical to SEQ ID NO: 54971
  source 1..375: note = Lelliottia amnigena
  REGION 1..375: note = tr|A0A3S5XXJ5|A0A3S5XXJ5_LELAM Queuine tRNA-ribosyltransferase OS=Lelliottia amnigena OX=61646; GN = tgt PE=3 SV=1

SEQ ID NO: 56800 - protein, 375 aa, unidentified
  source 1..375: note = Lelliottia amnigena
  REGION 1..375: note = tr|A0A1A9F8P4|A0A1A9F8P4_LELAM Queuine tRNA-ribosyltransferase OS=Lelliottia amnigena OX=61646; GN = tgt PE=3 SV=1
MKFELDTTDGRARRGRLVFDRGVVETPAFMPVGTYGTVKGMTPEEVEATGAQIILGNTFHLWLRPGQEVMKLHGDLHDFMQWKGPILTDSGGFQVFSLGDIRKITEKGVHFRNPINGDPIFLDPEKSMEIQYDLGSDIVMIFDECTPYPADWDYAKRSMEMSLRWAKRSRDRFDSLENKNALFGIIQGSVYEDLRDISVKGLVEIGFDGYAVGGLAVGEPKEDMHRILEHVCPQIPADKPRYLMGVGKPEDLVEGVRRGIDMFDCVMPTRNARNGHLFVTDGVVKIRNAKHKNDTSTLDAECDCYTCRHYSRAYLYHLDRCNEILGARLNTIHNLRYYQRLMAGLRKAIEEGKLESFVTDFYQRQGRDVPPLNVD

SEQ ID NO: 56801 - protein, 375 aa, unidentified; identical to SEQ ID NO: 54949
  source 1..375: note = Lelliottia nimipressuralis
  REGION 1..375: note = tr|A0A1J5VUM4|A0A1J5VUM4_9ENTR Queuine tRNA-ribosyltransferase OS=Lelliottia nimipressuralis; OX = 69220 GN=tgt PE=3 SV=1

SEQ ID NO: 56802 - protein, 375 aa, unidentified; identical to SEQ ID NO: 53611
  source 1..375: note = Lelliottia nimipressuralis
  REGION 1..375: note = tr|A0A4Q0WA97|A0A4Q0WA97_9ENTR Queuine tRNA-ribosyltransferase OS=Lelliottia nimipressuralis; OX = 69220 GN=tgt PE=3 SV=1

SEQ ID NO: 56803 - protein, 375 aa, unidentified
  source 1..375: note = Lelliottia sp.
  REGION 1..375: note = tr|A0A2S5C3U7|A0A2S5C3U7_9ENTR Queuine tRNA-ribosyltransferase OS=Lelliottia sp. 7254-16; OX = 2080842 GN=tgt PE=3 SV=1
MKFELDTTDGRARRGRLVFDRGVVETPAFMPVGTYGTVKGMTPEEVEATGAQIILGNTFHLWLRPGQEVMKLHGDLHDFMQWKGPILTDSGGFQVFSLGDIRKITEQGVHFRNPINGDPIFLDPEKSMEIQYDLGSDIVMIFDECTPYPADWDYAKRSMEMSLRWAKRSRDRFDGLENKNALFGIIQGSVYEDLRDISVKGLVEIGFDGYAVGGLAVGEPKEDMHRILEHVCPQIPEDKPRYLMGVGKPEDLVEGVRRGIDMFDCVMPTRNARNGHLFVTDGVVKIRNAKHKNDTSTLDAECDCYTCRHYSRAYLYHLDRCNEILGARLNTIHNLRYYQRLMAGLRKAIEEGKLESFVTDFYQRQGRDVPPLNVD

SEQ ID NO: 56804 - protein, 377 aa, Leminorella grimontii
  REGION 1..377: note = tr|A0A085HHL7|A0A085HHL7_9GAMM Queuine tRNA-ribosyltransferase OS=Leminorella grimontii ATCC 33999 = DSM 5078 OX=1005999 GN=tgt PE=3 SV=1
MKFELQKKDGRARRGRLVFDRGVVETPAFMPVGTYGTVKGMTPEEVKATGAQIILGNTFHLWLRPGQEIMRQHGDLHGFMNWDGPILTDSGGFQVFSLGDIRKITEEGVHFRNPINGDAIFLSPEKSMEIQYDLGSDIVMIFDECTPYPADWDYAKRSMEMSLRWAKRSRERFNSLDNKNALFGIIQGSVYEDLRDVSVKGLVDIGFDGYAVGGLAVGEPKEDMHRILEHVCPQIPEDKPRYLMGVGKPEDLVEGVRRGIDMFDCVMPTRNARNGHLFVTGGVVKIRNAKYKDDTSALDEHCDCYTCRHYSRAYLHHLDRCNEILGARLNTIHNLRYYQRLMAGLREAIEQGTLEHFVADFYGRREKPVPPLTHSSQ

SEQ ID NO: 56805 - protein, 377 aa, Leminorella grimontii; identical to SEQ ID NO: 56804
  REGION 1..377: note = tr|A0A485AVG6|A0A485AVG6_9GAMM Queuine tRNA-ribosyltransferase OS=Leminorella grimontii OX=82981; GN = tgt PE=3 SV=1

SEQ ID NO: 56806 - protein, 378 aa, Leminorella richardii
  REGION 1..378: note = tr|A0A2X4V129|A0A2X4V129_9GAMM Queuine tRNA-ribosyltransferase OS=Leminorella richardii OX=158841; GN = tgt PE=3 SV=1
MKFELQKKDGRARRGRLVFERGSVETPAFMPVGTYGTVKGMTPEEVKETGAQIILGNTFHLWLRPGQEIMRQHGDLHGFMNWHGPILTDSGGFQVFSLGDIRKITEEGVHFRNPINGDAIFLSPEKSMEIQYDLGSDIVMIFDECTPYPADWDYAKRSMEMSLRWAKRSRDRFDSLNNKNALFGIIQGSVYEDLRDVSVKGLVDIGFDGYAVGGLAVGEPKEDMHRILEHVCPQIPEDKPRYLMGVGKPEDLVEGVRRGIDMFDCVMPTRNARNGHLFVTDGVVKIRNAKYKDDTSALDAHCDCYTCRNYSRAYLHHLDRCNEILGARLNTIHNLRYYQRLMAGLREAIEQGTLEHFVTDFYGRMGKPVPPLLANSSQ

SEQ ID NO: 56807 - protein, 379 aa, unidentified
  source 1..379: note = Lentibacillus amyloliquefaciens
  REGION 1..379: note = tr|A0A0U3NN57|A0A0U3NN57_9BACI Queuine tRNA-ribosyltransferase OS=Lentibacillus amyloliquefaciens; OX = 1472767 GN=tgt PE=3 SV=1
MTAITYEHIKTCQQTGARLGKVHTPHGSFDTPAFMPVGTLATVKTMSPEELQEMNANIILSNTYHLWLRPGEDIIEEAGGLHRFMNWDGAILTDSGGFQVFSLSDMRDIKEEGVHFRNHLSGEKLFLSPEKAMSIQNSLGSDIMMAFDECPPYPASHDYMKASVERTSRWAERCLKAHERPSEQGLFGIVQGGEYDDLRKQSAKDLVSLDFPGYAIGGLSVGEPKDIMNRMLEFTTPILPADKPRYLMGVGSPDSLVDGAIRGIDMFDCVLPTRIARNGTCMTSGGRLVVRNAKYARDFSPIDENCDCHVCKNYTRAYIRHLVKCNETFGFRLTTYHNLYFLIELMKQVRTAISEDRLGDFKEAFFEQYGFNQENAKNF

SEQ ID NO: 56808 - protein, 379 aa, Lentibacillus halodurans
  REGION 1..379: note = tr|A0A1I0UYR9|A0A1I0UYR9_9BACI Queuine tRNA-ribosyltransferase OS=Lentibacillus halodurans; OX = 237679 GN=tgt PE=3 SV=1
MTAITYEHIKTCKQTGARLGKVHTPHGSFDTPAFMPVGTLATVKTMSPEELKEMGTNIILSNTYHLWLRPGEDIIKEAGGLHQFMNWDGVILTDSGGFQVFSLSDMRDIKEEGVHFRNHLSGEKLFLSPEKAMSIQNALGSDIMMAFDECPPYPASHDYMKASVERTSRWAERCINAHERASDQGLFGIIQGGEYEDLRKQSVRDLVSLDFPGYAIGGLSVGEPKDIMNQMLEFTTPLLPSDKPRYLMGVGSPDSLIDGAIRGIDMFDCVLPTRIARNGTCMTSVGRLVVRNAKFARDFSPIDENCDCHVCKNYTRAYIRHLVKCNETFGFRLTTYHNLYFLLKLMEQVRDSIAEDRLGDFKEAFFEQYGFNKQNAKNF

SEQ ID NO: 56809 - protein, 379 aa, Lentibacillus persicus
  REGION 1..379: note = tr|A0A1I1TGC8|A0A1I1TGC8_9BACI Queuine tRNA-ribosyltransferase OS=Lentibacillus persicus; OX = 640948 GN=tgt PE=3 SV=1
MTAITYEHIKTCKQTGARLGKVHTPHGSFDTPAFMPVGTLATVKTMSPEELKEMNANIILSNTYHLWLRPGEDIIEEAGGLHQFMNWDGAILTDSGGFQVFSLSDMRDIKEEGVHFRNHLSGEKLFLSPEKAMHIQNSLGSDIMMAFDECPPYPASHDYMKASVERTSRWAERCLKAHDRPSEQGLFGIIQGGEHEDLRKQSAEDLVSMDFPGYAIGGLSVGEPKDIMNRMLEYTTPLLPSGKPRYLMGVGSPDSLIEGAIRGIDMFDCVLPTRIARNGTCMTSNGRLVVRNAKYSRDFRPIDENCDCHVCRNYTRAYIRHLVKCNETFGFRLTTYHNLYFLLKLMEQVRTAIMDDRLGDFKEAFFEQYGFNKENAKNF

SEQ ID NO: 56810 - protein, 379 aa, Lentibacillus salicampi
  REGION 1..379: note = tr|A0A4Y9AFZ9|A0A4Y9AFZ9_9BACI Queuine tRNA-ribosyltransferase OS=Lentibacillus salicampi; OX = 175306 GN=tgt PE=3 SV=1
MTAVTYEHIKTCKQTGARLGKVHTPHGSFDTPAFMPVGTLATVKTMSPDELKEMNANMILSNTYHLWLRPGEDIIQEAGGLHQFMNWDGAILTDSGGFQVFSLSDMRNIKEEGVHFRNHLSGEKLFLSPEKAMTIQNALGSDIMMAFDECPPYPASHDYMKASVERTSRWAERCLNAHERPSEQGLFGIVQGGEYKDLRKQAAEELVSLDFPGYAIGGLSVGEPKDTMNRVLEFTTPLLPADKPRYLMGVGSPDSLIDGAIRGIDMFDCVLPTRIARNGTCMTSNGRLVVRNAKYARDFNPIDENCDCHVCQNYTRAYIRHLIKCNETFGFRLTTYHNLYFLLKLMEQVRAAIAEDRLADFREAFFEQYGFNKQNAKNF

SEQ ID NO: 56811 - protein, 379 aa, Lentibacillus sp.
  REGION 1..379: note = tr|A0A549YLQ0|A0A549YLQ0_9BACI Queuine tRNA-ribosyltransferase OS=Lentibacillus sp. NKC851-2; OX = 2584959 GN=tgt PE=3 SV=1
MTAITYEHIKTCRQTGARLGRVHTPHGSFDTPAFMPVGTLATVKTMSPEELREMNANIILSNTYHLWLRPGEDIIQEAGGLHQFMNWDGAILTDSGGFQVFSLSDMRDIKEEGVHFRNHLSGEKLFLSPEKAMRIQNALGSDIMMAFDECPPYPASHAYMKASVERTLRWAERCLRAHDRPTEQGLFGIVQGGEYEDLRRQSAKDLVSLDFPGYAIGGLSVGEPKDVMNRMLASTTPLLPFNKPRYLMGVGSPDSLIDGAIRGVDMFDCVLPTRIARNGTCMTSIGRLVVRNAKYARDFRPLDENCNCYTCRNYTRAYIRHLVKCNETFGFRLTTYHNLYFLLKLMEQVRTAISEDRLGDFKEAFFEQYGFNKENAQNF

SEQ ID NO: 56812 - protein, 379 aa, Lentibacillus sp.
  REGION 1..379: note = tr|A0A4Q3XBZ4|A0A4Q3XBZ4_9BACI Queuine tRNA-ribosyltransferase OS=Lentibacillus sp. SSKP1-9; OX = 2510307 GN=tgt PE=3 SV=1
MTAITYEHIKTCSQTGARLGRVHTPHGSFDTPAFMPVGTLATVKTMSPEELQEMNAGIILSNTYHLWLRPGEDIIREAGGLHQFMNWDGAILTDSGGFQVFSLSDMRDIKEEGVHFRNHLSGEKLFLSPEKAMTIQNALGSDIMMAFDECPPYPASHDYMKASVERTSRWAERCLQAHERPEEQGLFGIIQGGEYEDLRKQSAQDLVSLDFPGYAVGGLSVGEPKDVMNQMLESTTPLMPFHKPRYLMGVGSPDSLIDGAIRGIDMFDCVLPTRIARNGTCMTSNGRLVVRNAKYARDFSPLDENCDCYTCRNYSRAYIRHLVKCNETFGFRLTTYHNLHFLLKLMQQVRTAIAEDRLGDFKEAFFEQYGFNEKDAKNF

SEQ ID NO: 56813 - protein, 376 aa, Lentibacter algarum
  REGION 1..376: note = tr|A0A1H3GSM2|A0A1H3GSM2_9RHOB Queuine tRNA-ribosyltransferase OS=Lentibacter algarum OX=576131; GN = tgt PE=3 SV=1
MTQEFSFSLAATSGKARTGTISTPRGDIRTPAFMPVGTAATVKAMMPESVRATGADILLGNTYHLMLRPTAERIAALGGLHKFMNWDRPILTDSGGFQVMSLADLRKLTEEGVAFKSHIDGSKHMLSPERSMEIQRLLGSDIVMCFDECPALPATRDDIAKSMELSMRWAKRSRTAFGERPGYALFGIQQGGLEEDLRAQSAEALQDIGFEGYAVGGLAVGEGQEAMFNTLEFAPDQLPKDKPRYLMGVGKPDDIVGAVARGIDMMDCVLPSRSGRTGQVFTRLGVLNIKNARHQDDPRPLDENCGCPACKNYSRAYLHHVFRSQEIISSMLLTWHNLHYYQDLMAGMRAAITEDRFTEFERDFHSTRAQGDIDPL

SEQ ID NO: 56814 - protein, 376 aa, unidentified
  source 1..376: note = Lentimicrobiaceae bacterium
  REGION 1..376: note = tr|A0A2E2XXT5|A0A2E2XXT5_9BACT Queuine tRNA-ribosyltransferase OS=Lentimicrobiaceae bacterium; OX = 2026756 GN=tgt PE=3 SV=1
MQFKLEVTDIKSSARAGEISTDHGKIETPIFMPVGTAGTVKGVHIKDVRDDIKADIILGNTYHLYLRPGLDVIEQSGGLHKFNGWDRPMLTDSGGYQVYSLSDRRKLDENGVIFQSHIDGSRHNFTPENVMDIQRVIGADIIMAFDECTPYPCDYDYAKKSMGITHRWLDRCINRFSETSPKYDYDQTLFPIVQGSTFRDLRKESAEYIASKGAEGNAIGGLSVGEPHDMMYEMTELVCGILPEDKPRYLMGVGTPANILESIALGVDMFDCVMPTRNGRNGMLFTKNGIINIKNEKWKNDFTSIDEEGDSFVDLAYSKAYLRHLFIAKELLGGMIASQHNLSFYLWLVREARKHIMEGDFAVWKNSMSERVARRL

SEQ ID NO: 56815 - protein, 376 aa, unidentified
  source 1..376: note = Lentimicrobium saccharophilum
  REGION 1..376: note = tr|A0A0S7BPX4|A0A0S7BPX4_9BACT Queuine tRNA-ribosyltransferase OS=Lentimicrobium saccharophilum; OX = 1678841 GN=tgt PE=3 SV=1
MDFRLTHTDSRSNARAGLITTDHGEIATPVFMPVGTAGTVKAVHIRDVDEDVKARIILGNTYHLYLRPGLDILREAGGLHKFNGWKKPILTDSGGYQVYSLTDRRKMKEEGVVFQSHIDGSKHMFSPERVMDIQRIIGADIIMAFDECTPYPCDYNYAVKSMELTHRWLDRCIARFNETEDLYGYRQTLFPIVQGSVYKDLRIRSAEKIASCNAGGNAIGGLAVGEPVETMYEFTELVCSILPHDKPRYLMGVGTPVNILEGISQGVDMFDCVMPTRNGRNGMIFTSQGIINLKNEKWKADFSPLDPEGTSFVDSAYSRAYVRHLFVAGEILGPMIASQHNIAFYLWLVDEARRKIEAGTFSTWKDEMVKRLGQRI

SEQ ID NO: 56816 - protein, 403 aa, Lentisphaera araneosa
  REGION 1..403: note = tr|A6DS39|A6DS39_9BACT Queuine tRNA-ribosyltransferase OS=Lentisphaera araneosa HTCC2155; OX = 313628 GN=tgt PE=3 SV=1
MSFTLHKKDGEARLGTLKTSHGDVPTPIFMPVGTVGSVKTMDSEDMMELDAKIILGNTYHLYLRPGLRIIDEAGDLHKFINWDRPILTDSGGYQVFSLAKLRKLKYDGVEFRSHIDGEKIFIGPKESMEIQKSLGSDIVMIFDECTPYPATYEQAKESLEITQRWGDECAKQELHPHQMLFGIVQGSTYEDLRIESARYLADMDLPGYAIGGLSVGEPEEEMLKTLDWVLPELPEDKPRYLMGVGTPPQLVESVARGVDMFDCVLPTRVARHGTAYTSSGQVQIKASKWRNDFGPIDDECDCKVCKGYSRAYVRHLLSTNEFSGMRLMTYHNLHFYLRLMERIREAIAEDRFEEFRQDFHAKYQRGQGEREERQVKRNKALDKEILDEKRARKKMRTQPKKKD

SEQ ID NO: 56817 - protein, 366 aa, unidentified
  source 1..366: note = Lentisphaerae bacterium
  REGION 1..366: note = tr|A0A1G0W8N4|A0A1G0W8N4_9BACT Queuine tRNA-ribosyltransferase OS=Lentisphaerae bacterium GWF2_38_69 OX=1798570 GN=tgt PE=3 SV=1
MKLKYTLLKKDFASKARLGIIETAHGKINTPIFMPVGTRASVKAMSPDELKDLGAEIILGNTYHLFLKPGMEIIKMAGGLHKFMNWNRPILTDSGGFQVFSLANLRKMTQDGVEFASHIDGSRFFLGPKESMSIQRDLGSDIVMCFDECTPYPCSYEEAKKSLDITLRWEKIARDEKLQNHQNLFGIVQGSTYKDLREHSASELVKVDFEGYSIGGLSVGEPEETMLECIDYVTPVLPETKPRYLMGSGTPRQIVESVARGIDMFDCVMPTRMARHGSAFIGKGETLPVKAGRYSKDFSPIEEGCQCYACKNFTRAYIRHLMNVGEILGLRLLTIHNLYYFLNLMKNIRVSIENGTFSELRKSFSS

SEQ ID NO: 56818 - protein, 407 aa, unidentified
  source 1..407: note = Lentisphaerae bacterium
  REGION 1..407: note = tr|A0A1V6FLW4|A0A1V6FLW4_9BACT Queuine tRNA-ribosyltransferase OS=Lentisphaerae bacterium ADurb.Bin082 OX=1852899 GN=tgt PE=3 SV=1
MKRQASAPGSWNSTCATEPATLTAKEIPTRMAFTILQKDPGSLARRGMLTTAHGQVQTPVFMPVGTQATVKAMTPKELVDMGAEIILGNTYHLNLRPGMDIVTAAGGLHRFMGWNRAILTDSGGFQVFSLSRLGKKTQDGVFFQSHLDGSRLFMGPVESMAIQRQLGSDIAMVFDECTAWPATWDEANRSLDLTLRWAAVSREQPAAPGQLRFGIVQGSTFPDLREKATRAIIDLDFDGIALGGVSVGEPEREMVKVLKFCAPLLPPALPHYLMGVGTPRQLILGVLNGIDMFDCVLPTRMGRNGSAFTMTGTMPVKAAIYKEDFRPIQEDCQCYACRHFTRAYIRHLLNANEILGARLMTIHNLHFFLELMRQARQHLENGTFGPFAQNVLELYPEAQAGEKEQPE

SEQ ID NO: 56819 - protein, 374 aa, unidentified
  source 1..374: note = Lentisphaerales bacterium
  REGION 1..374: note = tr|A0A524MZF2|A0A524MZF2_9BACT Queuine tRNA-ribosyltransferase OS=Lentisphaerales bacterium; OX = 2448604 GN=tgt PE=3 SV=1
MNQPGQFEIIATDEGSSARLGRLQTAHGFIETPVFMPVGSKGAIKTMNPAELEGLGTSMLLGNTYHLMIRPGVEVVEKCGGLHSFMGWERGILTDSGGFQAFSLARLRKITDEGVEFNSHYDGARLFLGPVEAMEIQRRMASDIAMVLDECAPYPCDHNYACQAVERTLTWAFLCSRQPRAEGQLVFGIVQGGEYEDLRLSCANRLVEMNFDGYAVGGVSVGEPKDVLRRSVEFGVAGLPPEKPRYLMGVGIMSQIVDAVADGIDMFDCVIPTRFARNGTAFTRRGRFPVKAGEYRLDTGPIEAGCECYACRRFSRAYLRHLLNIDEVLGIHMLSLHNMHCYMQFMEEMRGSLRNGTFGDFRRKTKAERGEEER

SEQ ID NO: 56820 - protein, 245 aa, unidentified
  source 1..245: note = Lentisphaeria bacterium
  REGION 1..245: note = tr|A0A354UAI6|A0A354UAI6_9BACT Queuine tRNA-ribosyltransferase (Fragment) OS=Lentisphaeria bacterium OX=2053569 GN=tgt PE=3 SV=1
MNNFELLYQDPSSDARLGRLTTAHGVVNTPVFMPVGTRATVKAMSPRELEELNVQIILGNTYHLFLRPGPELIEKAGGLHQFEDWHHPILTDSGGFQVFSLSNLRKMKPDGVEFASHIDGTRFFLGPRESMAIQRALGSDIVMSFDECTPYPCKYEDAAKSLDVTLRWELMSREQKLKDHQQLFGIVQGSTYRDLRERSAKELVKIGYDGYSIGGLSVGESEEMMFECLEWVTPLLPKDKPRYLM

SEQ ID NO: 56821 - protein, 368 aa, unidentified
  source 1..368: note = Lentisphaeria bacterium
  REGION 1..368: note = tr|A0A3D3JWI5|A0A3D3JWI5_9BACT Queuine tRNA-ribosyltransferase OS=Lentisphaeria bacterium; OX = 2053569 GN=tgt PE=3 SV=1
MSFSLIATDSATGARLGRLETAHGGIDTPCFMPVGTQGTVKAMTPDELVALGAQVILGNAYHLNLRPGMEVIRAAGGLHAFSNWSRPILTDSGGYQVFSLAKLRKIRPDGVEFQSHIDGRALFLGPVEAMAIQRDLGSDIAMAFDECTPYPCEHDAARTSLELTIDWARTCRDQPRAAGQLVFGIVQGSMYEDLRLESIERLIEIGFDGYAIGGLSVGEPDTEMFKVVDWTVPAMPAAMPRYLMGVGTPPQIVDAVRHGIDMFDCVLPTRMGRHGCAYTATGVVQAKAGRLKDDFAPLEEGCPCYTCTNFTRAYIRHLLNVQEILGMRLVTIHNLDFYLRLMRQIREHLQAGTLAAFSERFIAGYSAT

SEQ ID NO: 56822 - protein, 371 aa, Leptolinea tardivitalis
  REGION 1..371: note = tr|A0A0P6X9I4|A0A0P6X9I4_9CHLR Queuine tRNA-ribosyltransferase OS=Leptolinea tardivitalis; OX = 229920 GN=tgt PE=3 SV=1
MSSQFSYTRIAVDGSARAGIYHTPHGDIPTPIFAPVGTQATVKSVTPAQLHELGASLVLSNTYHLYLRPGADLVAEMGGLHSFMQWPNPILTDSGGFQVFSLAGIRKIDADGATFKSHIDGSMHRLTPEKSIDIQQKLGADIIMAFDECAPPHDRAYNEQALERTTAWAQRCLQTKTRDDQALFGIVQGGVFDDLRIKSAEWTASQPFDGLAIGGLSVGESKTEMHAVMDKVVPLLPQDKPRYLMGVGSPEDLVNGILRGIDIFDCVLPTRLARHQSAMTLTGRINMLNAIHTHDPNPIDETCSCYTCQHFSRAYIRHLISAREMLSSTLISIHNLYTLLRLVRLCREAILEQRFTSFAQDFLSQYNHPVK

SEQ ID NO: 56823 - protein, 380 aa, unidentified
  source 1..380: note = Leptolyngbya antarctica
  REGION 1..380: note = tr|A0A2W4VQH9|A0A2W4VQH9_9CYAN Queuine tRNA-ribosyltransferase OS=Leptolyngbya antarctica; OX = 268115 GN=tgt PE=3 SV=1
MTQAFSFSCDARCSHTQARAGTFTTPHGPVHTPRFMPVGTLANVKTVTPAQLATTGAQMVLSNTYHLHLQPGEDIVAEAGGLHRFMGWDGPMLTDSGGFQVFSLSQMRTITEDGVTFKSPKDGRIINIRPETSIQIQNDLGADVIMAFDECPPYPCSREAVKASTDRTWRWLLRCVEAHQRPDQALFGIVQGGVYPDLRTEAAKQLATLDLPGYAIGGVSVGEPPALIETIVKATAPCLPEHKPRYLMGVGTYREMAQAIAAGVDLFDCVIPTRLARHGAALVAGERWNLKNKQFRRDYTPIDAACPCYTCQNFTRAYLCHLIHAKEMLAFTLISIHNITELVRFTQRIREAILGDRFTDEFAHWLAPNPAATPVDDPSP

SEQ ID NO: 56824 - protein, 368 aa, unidentified
  source 1..368: note = Leptolyngbya boryana
  REGION 1..368: note = tr|A0A1Z4JL88|A0A1Z4JL88_LEPBY Queuine tRNA-ribosyltransferase OS=Leptolyngbya boryana NIES-2135; OX = 1973484 GN=tgt PE=3 SV=1
MNQFSYQCQARCTHTHARAGVFHTPHGIVETPRFMPVGTLANVKTITPDQLEATGAQMVLSNTYHLHLQPGEDIVERAGGVHRFMGWSKPMLTDSGGFQVFSLSEMRSITDEGVTFRSPRDGQMIKITPEKSIQIQNALGADVIMAFDECPPPGVGREATEKATSRTYDWLKRCIEAHGRSDQALFGIVQGGEFLDLRAEAVRQLADLDLPGYAIGGVSVGEAPEIIDRVVQATTPLLPDNKPRYLMGVGTYREIARAIAAGMDLFDCVIPTRLARHGAALVQGDRWNLKNAKFREDFQPIDETCPCYTCQNFSRAYISHLLRSQELLAYTLISIHNITELIRFTTQIRAAIFNGTFHTEFAKWLTPL

SEQ ID NO: 56825 - protein, 366 aa, unidentified
  source 1..366: note = Leptolyngbya foveolarum
  REGION 1..366: note = tr|A0A2W4U6N9|A0A2W4U6N9_9CYAN Queuine tRNA-ribosyltransferase OS=Leptolyngbya foveolarum; OX = 47253 GN=tgt PE=3 SV=1
MSDFSYQLQAQCSCTQARAGIFHTPHGPVHTPRFMPVGTLANVKTVTPAQLKDCNAEMVLANTYHLHLQPGENLVAEAGGLHRFMNWNGPILTDSGGFQVFSLSEMRKVTDEGATFRSPRDGRIIEMPPERSIEIQNQLGADVIMAFDECPPYPATKEAVIAATDRTYRWLKRCISAHDRSDQALFGIIQGGVHLDLRSSAARAIAELDLPGYAIGGVSVGEPPELIEKIVKATTPLLPADKPRYLMGVGTYKEMAQAIASGIDLFDCVIPTRLARHGAALVQGERWNLKNARFRRDLTPVDETCTCYTCQNFTRAYLCHLLHAKELLAYTLISIHNITELIRFTTDIRTAILQDRFQQDYAHWLA

SEQ ID NO: 56826 - protein, 371 aa, unidentified
  source 1..371: note = Leptolyngbya frigida
  REGION 1..371: note = tr|A0A2T1E016|A0A2T1E016_9CYAN Queuine tRNA-ribosyltransferase OS=Leptolyngbya frigida ULC18; OX = 2107698 GN=tgt PE=3 SV=1
MTTGFSFTCQALCCKTKARAGIFATPHGLVETPRFMPVGTLANVKTVTPEQLRATGAQLVLANTYHLHLQPGEDIVARAGGLHRFMAWDGPILTDSGGFQVFSLSEMRTIAEEGVTFRSPRDGQMIHLTPERSIAIQNALGADVIMAFDECPPYPASYDNVMDSTERTYRWLKRCLAEHQRSDQALFGIVQGGVYPELRHNAAAQLAQLDLPGYAIGGVSVGEPAELIEAIVQATTPLLPPDKPRYLMGVGTYREMVQAIAAGVDLFDCVIPTRLARHGNALVQGDRWNLRNAKFREDFTALDASCACYTCQNFSRAYLSHLLRSQELLAYTLLSIHNITELVQFTQAIRRAIFNGSFTAEFGHWLSASTY

SEQ ID NO: 56827 - protein, 374 aa, Leptolyngbya sp.
  REGION 1..374: note = tr|K9F220|K9F220_9CYAN Queuine tRNA-ribosyltransferase OS=Leptolyngbya sp. PCC 7375; OX = 102129 GN=tgt PE=3 SV=1
MVTDHFSFEHQASCCHTKARAGIFHTPHGPVHTPRFMPVGTLANVKTITPAQLKDTGAQMVLSNTYHLHLQPGEDLVAEAGGLHKFMGWSGPMLTDSGGFQVFSLSKIRTISEEGVTFRSPRDGSVIHMPPEESIRIQNQLGADVIMAFDECPPYPATREAVEAATQRTYRWLTRCIEAHQRNDQALFGIVQGGVHLDLRQAAAEQLVKLDLPGYAIGGVSVGEPPELIEKIVQATTPLLPPDKPRYLMGVGTYREMAQAIAAGMDLFDCVIPTRLARHGAALVQGERWNLKNQKFRRDLTPLDSTCTCYTCENFTRAYLCHLIHAHELLAYTLLSIHNITELIRFTQAIRKAILQNQFVAKFQQWLEPSTSSS

SEQ ID NO: 56828 - protein, 369 aa, Leptolyngbya sp.
  REGION 1..369: note = tr|A0A0S3UDP8|A0A0S3UDP8_9CYAN Queuine tRNA-ribosyltransferase OS=Leptolyngbya sp. NIES-3755; OX = 1752064 GN=tgt PE=3 SV=1
MNQFSFQCQAHCKHTHARAGVFHTPHGIVETPRFMPVGTLANVKTITPAQLEETGAQMVLSNTYHLHLQPGEDIVEKAGGVHRFMNWSKPMLTDSGGFQVFSLSEMRSITDEGVTFRSPRDGQMIKITPEKSIEIQNALGADVIMAFDECPPSGVGRDATEKATSRTYEWLKRCVEAHKRPDQALFGIVQGGEFLDLRAEAVRQLADLNLPGYAIGGVSVGEAPEIIDRVVQATTPLLPEDKPRYLMGVGTYREMARAIAAGMDLFDCVIPTRLARHGAALVQGERWNLKNARFREDFTSIDETCPCYTCQNFSRAYVSHLLRSQELLAYTLISIHNITELIRFTQRIRAAIFNGTFHTEFAHWITPVE

SEQ ID NO: 56829 - protein, 368 aa, unidentified
  source 1..368: note = Leptolyngbya valderiana
  REGION 1..368: note = tr|A0A166TPR7|A0A166TPR7_9CYAN Queuine tRNA-ribosyltransferase OS=Leptolyngbya valderiana BDU 20041 OX=322866 GN=tgt PE=3 SV=1
MEFSLLHKDGAARRGRLTFERGTVETPAFMPVGTYGTVKAMTPEELRALGAEIILGNTFHLMLRPGTEVISAHGDLHDFMGWSGPILTDSGGFQVWSLAELRKMTEEGVTFASPVDGSRVFLGPEESMAVQRALGSDIVMIFDECTPWPASHEQAAESMRRSLRWAQRSKDAHGESEAALFGIVQGGMYADLRHESAEGLTGIGFDGYAIGGLSVGEPEDERNRVLDATCPHLPEDRPRYLMGVGRPEDLLAAVERGVDMFDCVMPTRNARNGHLFTSAGVLKIRNARYEKDTRPIDEHCDCYTCSHYSRAYVKHLQKCNEILGHRLATIHNLHYYQTLMRQIRDAIEDDRFADLAAECRSAWEAGIP

SEQ ID NO: 56830 - protein, 373 aa, Leptonema illini
  REGION 1..373: note = tr|H2CF09|H2CF09_9LEPT Queuine tRNA-ribosyltransferase OS=Leptonema illini DSM 21528; OX = 929563 GN=tgt PE=3 SV=1
MSFFEVTATDGQARTGLLRFANCTVPTPIFMPVGTRATVKSLWQEQLEEIGYELILGNTYHLYLRPGRLIERMGGLKRFMSWDHAVLTDSGGFQVFSLAQMTKFQEDGVLFQSHIDGSRHLFTPESVLETQLWLGSDIMMVLDDCPPGDADERRMADALNRTHCWAKQAMTEYERRADRGDFDPSVQRLFGIVQGGIHESLRLESLGVISELPFAGIALGGLSVGESREDMYRILQAIGPRMDATRPRYLMGVGTIPDFLEAIRNGIDMFDCVLPTRNARNGQALTSNGALNLRNATHAESSLPVDENCSCRVCRRYSRAYIRHLFQTGEMLGPELLTYHNLAFFYGFFAEARESIHNGTFPAFFEKWNRIPY

SEQ ID NO: 56831 - protein, 687 aa, Leptonema illini
  REGION 1..687: note = tr|H2CGY8|H2CGY8_9LEPT Queuine tRNA-ribosyltransferase OS=Leptonema illini DSM 21528; OX = 929563 GN=tgt PE=3 SV=1
MSRLDFQIQAKAGRARAATFRTLHGVIETPLFMPVGTNATVKGLRVEDLKTVGSQILLANTYHLLLRPGAEVFERMGGIHRMMNWSGSVLTDSGGFQIFSLPHSRNMTEEGALFRSYVDGATILLTPEMSIGMQKAIGSDIMMALDQCIPSTADYKTAEEAMHLTHRWAKRSLEARGDSEQALFGIIQGALFRDLRRQSAETLSALEFDGFAIGGLAVGETKDEREEFTSFTTDLMPENRPRYLMGVGTPIDLLEAVNAGVDMFDCIIPSALAQQSVAYTSRGRMRLERSVYKFADEPVDPDCDCYTCAHYGKAYIHHLHKADEILGWQLLSIHNLRFYHRLMASMRRHILAGSFESLYKEQREILANPDTDRPPGPPPVRTRNKREFIESIGAFCLHESRDGFVRIQHAPSGEVMHPGSEPDVEARRLYVEQSELIRRLGSSPLTVWDVGLGAAYNAMATIRAYEAGIHALSHSKTHNNARSESASAIDAATLPELRIISFENDLDALRLALTHVDRFPHLKHAGPHVLLRDGFWQSKHSPISWQLVQGDFLETMSEADRPDLIFYDPYSYKTNGPLWSLAAFRSMYRICGEHDAELFTYSAATRVRATLLAAGFFVAAGTGTGLKSDTTMALTEQAVQRRGTSALLDGRWLERWTRSDARFPDDVDEGERSHFAQLIEGHRQFAL

SEQ ID NO: 56832 - protein, 681 aa, unidentified
  source 1..681: note = Leptospira adleri
  REGION 1..681: note = tr|A0A5F2CQQ2|A0A5F2CQQ2_9LEPT Queuine tRNA-ribosyltransferase OS=Leptospira adleri OX=2023186; GN = tgt PE=3 SV=1
MPRLNFILEAEAPHTNARAATFTTLHGPVQTPIFMPVGTQATVRAQTVDSLKAMGSRVLLANTYHLLLRPGAEVFRKIGGIHKFMNWDSPVLTDSGGFQIFSLPNSRKMTEEGALFRSYVDGQMILLSPERSVDMQKAIGSDIMMVLDQCIPSTADYAKAKDAMEITHRWAKRSLDARGDSLQSMFGIVQGACFPDLRKESAKVLTQMHFDGFAIGGLAVGETKEERNDFCEISASLLPKNLPRYLMGVGTPVDLLEAVHRGVDMFDCTIPTELAQHGVAYTSAGKLQIHRTIYKFEDSKLDENCECPCCQNYSRSYLHHLIKTSEILGWHLIAMHNLNFYHRLMAEMRARIFEGNFASYYDHKKEELTRSDNVDPSLHKRRTPRAQRKRILGDYEIRENKEGKYWSVRQRSSGEVMHSVNDPSEEAKSLYVIQSGLSEKLSDRLRDSKESKAANPFVIWDVGLGAATNSMAAIRCYEEVDSPIPMNMISFECDLDPFRLAMRNIGCFPHLFHKAPRSILEKGNWTSVSGGLQWDLVEGDFEKTFSTQKIPDLVYYDPFSFKTDSKLWQPDFLKKLFLFLQGDPKNTMLITYSASTAVRSSLIFAGFWVGKGAGTGPKSETTVAYTKPPESKEEFSRLLGGEWLGRRQRSHARFRTDWNENENKIWEETILSHPQFETLPR

SEQ ID NO: 56833 - protein, 374 aa, unidentified
  source 1..374: note = Leptospira adleri
  REGION 1..374: note = tr|A0A2M9YKF2|A0A2M9YKF2_9LEPT Queuine tRNA-ribosyltransferase OS=Leptospira adleri OX=2023186; GN = tgt PE=3 SV=1
MIFKTTSEDPHTRARTGVLDLNGVKLNTPIFMPVGTRGVVKTLDTEDLEELEYSLILGNTYHLYLRPGTSVLDRFGGLKKFMTWKGALLTDSGGYQVFSLNSLFKYETDGVRFQSHIDGSRHYFTPGSVIDVQRSIGSDIMMVLDDCAPFDSSAERLRQSLDRTHRWAEMSVEHWEKNKNSQHLFGIFQGGIDLDSRLESLKAIASLPFDGIAIGGLSVGEPRKDFIRILDGISSHTDRSRPLYLMGVGTVPDILDGVKNGVDMFDCVLPTRNARNGQVFTSLGKVNLRNEKWKNSEAPMDPNCQCKVCKRYSIGYIRHLHHVGEITAFSLSTFHNLFFMKNFLSEIQKSIQAGEFLETYARWKNLYEKPEFSG

SEQ ID NO: 56834 - protein, 374 aa, Leptospira alexanderi
  REGION 1..374: note = tr|V6I905|V6I905_9LEPT Queuine tRNA-ribosyltransferase OS=Leptospira alexanderi serovar Manhao 3 str. L 60 OX=1049759 GN=tgt PE=3 SV=1
MIFQTTSEDLRTRARTGILNLNGVTLETPVFMPVGTRGVVKTLSTDDLEELEYSLILGNTYHLYLRPGTSVLERFGGLKKFSTWKRALLTDSGGYQVFSLNSLFKYEQDGVRFQSHIDGSRHYFTPNSVIDIQRSIGSDIMMVLDDCAPFDSSPERLRQSLDRTHRWAEMSVEYWEKNKNSSHLFGIFQGGIDLGLRLESLQKIVSLPFDGVAIGGLSVGEPRKDFIRILEGVSAYTDRNRPLYLMGVGTVPDILDGVKNGVDMFDCVLPTRNARNGQVFTSLGKINLRNEKWKSSDAPMDPHCGCKVCKRYSIGYIRHLHHVGEITAFSLSTYHNLYFMKNFLSEIQKSIQAGEFLKIYAKWKNLYEKPEFSG

SEQ ID NO: 56835 - protein, 374 aa, unidentified
  source 1..374: note = Leptospira alstonii
  REGION 1..374: note = tr|T0FYP2|T0FYP2_9LEPT Queuine tRNA-ribosyltransferase OS=Leptospira alstonii serovar Pingchang str. 80-412 OX=1218564 GN=tgt PE=3 SV=1
MIFQTVSEDPHTRARTGILNLNGVKLETPVFMPVGTRGVVKTLSADDLEELEYSLILGNTYHLYLRPGTSVLDRFGGLKNFSTWKKALLTDSGGYQVFSLNSLFKYEQDGVRFQSHIDGSRHYFTPGSVIDIQRSIGSDIMMVLDDCAPFDSSPERLRQSLERTSRWAEMSVEYWEKDKNSQHLFGIFQGGVDLDLRLESLNTITSLPFDGIAIGGLSVGEPRKDFIRILNGISTYTDRNRPLYLMGVGTVPDILDGVKNGVDMFDCVLPTRNARNGQVFTSLGKINLRNEKWKNSDAPMDPNCGCKVCKRYSIGYIRHLHHVGEITAFSLSTYHNLYFMKSFLSEIQKSIQAGRFLEIYAKWKNLYEKPEFSG

SEQ ID NO: 56836 - protein, 374 aa, unidentified; identical to SEQ ID NO: 56835
  source 1..374: note = Leptospira alstonii
  REGION 1..374: note = tr|M6CXM6|M6CXM6_9LEPT Queuine tRNA-ribosyltransferase OS=Leptospira alstonii serovar Sichuan str. 79601 OX=1218565 GN=tgt PE=3 SV=1

SEQ ID NO: 56837 - protein, 379 aa, unidentified
  source 1..379: note = Leptospira andrefontaineae
  REGION 1..379: note = tr|A0A4R9H820|A0A4R9H820_9LEPT Queuine tRNA-ribosyltransferase OS=Leptospira andrefontaineae; OX = 2484976 GN=tgt PE=3 SV=1
MSEQKMIYRSRVSDTHSFARTGVLSLNGIEIPTPVFMPVGTRGAVKSLDSDDIDELGYELILGNTYHLYLRPGTEVLEKFGGLKNFVSYKKALLTDSGGFQVFSLNSLVKFKQEGVEFRSHIDGSPHFFTPQKVIDIQRAIGSDIMMVLDDCPPGDGTVSRIKDALDRTHRWAEEAVNYWEKDKRNQFLFGIFQGGTNLDLRLESLDKIRSLPFSGIAIGGLSVGEPRPDFIRTMEGISSYTDRTRPLYLMGVGTVPDILEGVRNGVDMFDCVLPTRNARNGQVFTSQGKVNLRNEKWKLLDQPMDPECECKVCKRYSIGYIRHLHHVKELSAFSLSTYHNLHFMKKFMKELRHSIEVGNFSEFFVKWKNLYETPEISR

SEQ ID NO: 56838 - protein, 371 aa, unidentified
  source 1..371: note = Leptospira bandrabouensis
  REGION 1..371: note = tr|A0A4Z1B279|A0A4Z1B279_9LEPT Queuine tRNA-ribosyltransferase OS=Leptospira bandrabouensis; OX = 2484903 GN=tgt PE=3 SV=1
MSSIFKEKSKDPGSYARTGTLILNGVQIETPIFMPVGTRGSIKSLSSSDIDELGYNLILANTYHLYLKPGKEVLDHFHGLKNFMSYKRALLTDSGGFQVFSLASLFKFEDDGVRFQSHIDGSHHKFTPSSVIDMQRSIGSDIMMVLDDCAPYGSDLKRLELALERTHRWALESYHYWMEKPNGQNVFPIVQGGVNESLRKRSLDTLQNIDFPGIAIGGLSVGEPRPEYIRILECMAPFFDNARPRYLMGVGTVVDILEGVKNGIDMFDCVLPTRNARNGQVFTSQGKINLRNESHRLSESPIDPECGCKVCKTYSLGYIRHLHKVKELTAFSLSTYHNLYFMQSFMEKMRKSIEIGNFQGFYDHWKNLFGS

SEQ ID NO: 56839 - protein, 374 aa, unidentified
  source 1..374: note = Leptospira barantonii
  REGION 1..374: note = tr|A0A5F2B658|A0A5F2B658_9LEPT Queuine tRNA-ribosyltransferase OS=Leptospira barantonii; OX = 2023184 GN=tgt PE=3 SV=1
MIFQTTSEDSRTRARTGILELNGVKLETPVFMPVGTRGVVKTLSMDDLEELEYSLILGNTYHLYLRPGTSVLDSFGGLKKFSTWKKALLTDSGGYQVFSLNSLFKYEQDGVRFQSHIDGSRHYFTPSSVIDIQRSIHSDIMMVLDDCAPFDSSPERLRQSLDRTHRWAEMSVEYWEKNKNSQHLFGIFQGGIDLDSRLESLKAITSLPFDGIAIGGLSVGEPRKDFIRILDGISTHTDRTRPLYLMGVGTVPDILDGVKNGVDMFDCVLPTRNARNGQVFTSLGKINLRNEKWKNSDAPMDPNCGCKVCKRYSIGYIRHLHHVGEITAFSLSTYHNLFFMKSFIAEIQKSIQAGEFLETYARWKNLYEKPEFSG

SEQ ID NO: 56840 - protein, 374 aa, unidentified
  source 1..374: note = Leptospira barantonii
  REGION 1..374: note = tr|A0A2M9YVF1|A0A2M9YVF1_9LEPT Queuine tRNA-ribosyltransferase OS=Leptospira barantonii; OX = 2023184 GN=tgt PE=3 SV=1
MIFQTTSEDSRTRARTGILELNGVKLETPVFMPVGTRGVVKTLSMDDLEELEYSLILGNTYHLYLRPGTSVLDSFGGLKKFSTWKKALLTDSGGYQVFSLNSLFKYEQDGVRFQSHIDGSRHYFTPSSVIDIQRSIRSDIMMVLDDCAPFDSSPERLRQSLDRTHRWAEMSVEYWEKNKNSQHLFGIFQGGIDLDSRLESLKAIASLPFDGIAIGGLSVGEPRKDFIRILDGISTHTDRTRPLYLMGVGTVPDILDGVKNGVDMFDCVLPTRNARNGQVFTSLGKINLRNEKWKNSDAPMDPNCGCKVCKRYSIGYIRHLHHVGEITAFSLSTYHNLYFMKSFIAEIQKSIQAGEFLETYARWKNLYEKPEFSG

SEQ ID NO: 56841 - protein, 371 aa, Leptospira biflexa
  REGION 1..371: note = sp|B0SKS9|TGT_LEPBP Queuine tRNA-ribosyltransferase; OS = Leptospira biflexa serovar Patoc (strain Patoc 1 / ATCC 23582 / Paris) OX=456481 GN=tgt PE=3 SV=1
MSSIFKEGIYDTGSYARTGTLDLNGIQIQTPIFMPVGTRGSIKSLTSEDIDELGYNLILANTYHLYLKPGKEVFDHFQGLKNFMSYKKALLTDSGGFQVFSLASLFKFEDDGVRFQSHIDGSHHKFTPASVIDMQRSIGSDIMMVLDDCAPYGSDTKRLELALDRTHRWAKESFAYWMENPGGQNVFPIVQGGVNETLRLRSLETLQKIDFPGIAIGGLSVGEPRPEYIRILECMAPHLDKSRPRYLMGVGTVVDILEGVKNGIDMFDCVLPTRNARNGQVFTSKGKINLRNESHRLSDSPIDPQCECKVCKTYSLGYIRHLHKVKELTAFSLSTYHNLFFMQSFMEKMRKSIEIGNFQGFYDHWKNLFGS

SEQ ID NO: 56842 - protein, 371 aa, Leptospira biflexa; identical to SEQ ID NO: 56841
  REGION 1..371: note = sp|B0SCA8|TGT_LEPBA Queuine tRNA-ribosyltransferase; OS = Leptospira biflexa serovar Patoc (strain Patoc 1 / Ames) OX=355278 GN=tgt PE=3 SV=1

SEQ ID NO: 56843 - protein, 374 aa, Leptospira borgpetersenii
  REGION 1..374: note = tr|M6BUY1|M6BUY1_LEPBO Queuine tRNA-ribosyltransferase OS=Leptospira borgpetersenii serovar Hardjo-bovis str. Sponselee OX=1303729 GN=tgt PE=3; SV = 1
MIFQTTSEDLRTRARTGILNLNGVKLETPVFMPVGTRGVVKTISADDLEELEYSLILGNTYHLYLRPGTAVLERFGGLKKFSTWKRALLTDSGGYQVFSLNSLFKYEQDGVRFQSHIDGSRHYFTPNSVIDIQRTIGSDIMMVLDDCAPFDSSQERLRQSLDRTHRWAEMSVEYWEKNKNSSHLFGIFQGGIDLGLRLESLQKIVSLPFDGIAIGGLSVGEPRKDFIRILEGVSAYTDRSRPLYLMGVGTVPDILDGVKNGVDMFDCVLPTRNARNGQVFTSLGKINLRNEKWKSSDVPIDPHCGCKVCKRYSIGYIRHLHHVGELTAFSLSTYHNLYFMKNFLSEIRKSIQAGEFLKIYAKWKNLYEKPEFSG

SEQ ID NO: 56844 - protein, 374 aa, Leptospira borgpetersenii; identical to SEQ ID NO: 56843
  REGION 1..374: note = sp|Q04UC6|TGT_LEPBJ Queuine tRNA-ribosyltransferase; OS = Leptospira borgpetersenii serovar Hardjo-bovis (strain JB197) OX=355277 GN=tgt PE=3 SV=1

SEQ ID NO: 56845 - protein, 371 aa, unidentified
  source 1..371: note = Leptospira bourretii
  REGION 1..371: note = tr|A0A4R9IIX3|A0A4R9IIX3_9LEPT Queuine tRNA-ribosyltransferase OS=Leptospira bourretii OX=2484962; GN = tgt PE=3 SV=1
MSSIFKEKSKDPGSYARTGTLHLNGIQIETPIFMPVGTRGSIKSLSSSDIDELGYNLILANTYHLYLRPGKEVLDHFHGLKNFMSYKRALLTDSGGFQVFSLASLFKFEEDGVRFQSHIDGSHHKFTPSSVIDMQRSIGSDIMMVLDDCAPYGSDLGRLELALDRTHRWAKESYNYWMENPGGQNVFPIVQGGVNESLRKRSLDTLQNINFPGIAIGGLSVGEPRPEYIRILECMAPFFDAARPRYLMGVGTVVDILEGVKNGIDMFDCVLPTRNARNGQVFTSLGKINLRNESHRLSDGPIDPECGCKVCVTYSLGYIRHLHKVKELTAFSLSTYHNLFFMQSFMEKMRKSIEIGNFQGFYDHWKNLFGS

SEQ ID NO: 56846 - protein, 371 aa, unidentified
  source 1..371: note = Leptospira bouyouniensis
  REGION 1..371: note = tr|A0A4R9HRR6|A0A4R9HRR6_9LEPT Queuine tRNA-ribosyltransferase OS=Leptospira bouyouniensis; OX = 2484911 GN=tgt PE=3 SV=1
MSPIFKEGIYDTGSYARTGTLDLGGIQIQTPIFMPVGTRGSIKSLTSEDIDELGYKLILANTYHLYLKPGKEVFDHFQGLKNFMSYKKALLTDSGGFQVFSLASLFKFEDDGVRFQSHIDGSYHKFTPASVIDMQRSIGSDIMMVLDDCAPYGSDTKRLELALDRTHRWAKESYEYWMENPNGQNVFPIVQGGVNETLRLRSLETLQKIDFPGIAIGGLSVGEPRPEYIRILECMAPHLDKSRPRYLMGVGTVVDILEGVKNGIDMFDCVLPTRNARNGQVFTSNGKINLRNESHRLSESPIDPDCECKVCKTYSLGYIRHLHKVKELTAFSLSTYHNLFFMQSFMEKMRKSIEIGNFQGFYDHWKNLFGS

SEQ ID NO: 56847 - protein, 371 aa, unidentified
  source 1..371: note = Leptospira brenneri
  REGION 1..371: note = tr|A0A2M9Y0J3|A0A2M9Y0J3_9LEPT Queuine tRNA-ribosyltransferase OS=Leptospira brenneri OX=2023182; GN = tgt PE=3 SV=1
MPSIFKEKSKDPGSYARTGTLELNGIQIETPIFMPVGTRGSIKSLSSSDIDELGYNLILANTYHLYLKPGKEVLDHFHGLKNFMSYKRALLTDSGGFQVFSLASLFKFEEDGVRFQSHIDGSYHKFTPASVIEMQRSIGSDIMMVLDDCAPYGSDLKRLELALERTHRWAKESYEYWMERPGGQNVFPIVQGGVNESLRKRSLDTLQNIDFPGIAIGGLSVGEPRPEYIRILECMAPFFDQARPRYLMGVGTVVDILEGVKNGIDMFDCVLPTRNARNGQVFTSLGKINLRNESHRLAEGPIDPECGCKVCTTYSLGYIRHLHKVKELTAFSLSTYHNLYFMQSFMEKMRKSIEIGNFQGFYDHWKNLFGS

SEQ ID NO: 56848 - protein, 374 aa, Leptospira broomii
  REGION 1..374: note = tr|T0GIU4|T0GIU4_9LEPT Queuine tRNA-ribosyltransferase OS=Leptospira broomii serovar Hurstbridge str. 5399 OX=1049789 GN=tgt PE=3 SV=1
MIFREETRDPQSFARTGTLALNGIEIPTPVFMPVGTRGAIKSLDSDDIDELGFELILGNTYHLYLRPGTEVLQSFGGLKNFISYKKALLTDSGGFQVFSLNSLFKFETDGVAFRSHIDGSSHFFTPEKVVDIQRTIGSDIMMVLDDCPPGEASVARIKESLDRTHRWAETAVRYWEKDKNGQHLFGIVQGGTNVELRLESLSYLNGLPFSGIALGGLSVGEPRPDFIRTLEGIAPHVDRNRPLYLMGVGTVPDILDGVRNGVDMFDCVLPTRNARNGQVFTSKGKINLRNEKWKFSDEPLDSECECRVCKRYSVGYLRHLHHVKELTAFSLSTFHNLSFMKKFMFELRRSIKEGKFDRFSAKWKNLYERPEISR

SEQ ID NO: 56849 - protein, 371 aa, unidentified
  source 1..371: note = Leptospira congkakensis
  REGION 1..371: note = tr|A0A4Z1A4V2|A0A4Z1A4V2_9LEPT Queuine tRNA-ribosyltransferase OS=Leptospira congkakensis; OX = 2484932 GN=tgt PE=3 SV=1
MSSIFKERSKDPGSYARTGTLHLNGIQVETPIFMPVGTRGSIKSLSSSDIDELGYNLILANTYHLYLKPGKEVMDHFHGLKNFMSYKRALLTDSGGFQVFSLASLFKFEEDGVRFQSHIDGSHHKFTPASVIDMQRSIGSDIMMVLDDCAPYGSDLKRLELALDRTHRWAKESYEYWMENPNGQNVFPIVQGGVNESLRKRSLDTLQNINFPGIAIGGLSVGEPRPEYIRILECMAPFFDSVRPRYLMGVGTVVDILEGVKNGIDMFDCVLPTRNARNGQVFTSLGKINLRNESHRLAEGPIDPECGCKVCKTYSLGYIRHLHKVKELTAFSLSTYHNLYFMQSFMEKMRKSIEIGNFQGFYDHWKNLFGS

SEQ ID NO: 56850 - protein, 374 aa, unidentified
  source 1..374: note = Leptospira dzianensis
  REGION 1..374: note = tr|A0A5F2E276|A0A5F2E276_9LEPT Queuine tRNA-ribosyltransferase OS=Leptospira dzianensis; OX = 2484905 GN=tgt PE=3 SV=1
MIFKTLSEDSKTRARTGILNLNGVELETPVFMPVGTRGVVKTLTMDDLEELEYSLILGNTYHLYLRPGTDVLDKFGGLKKFSTWKKALLTDSGGYQVFSLNSLFKYEQDGVRFQSHIDGSRHYFTPSSVIDVQRSIGSDIMMVLDDCAPFDSTPERLRQSLDRTHRWAEMSVEYWEKRKNSQHLFGIFQGGIDLDFRLESLQAITSLPFDGVAIGGLSVGEPRKDFIRILEGISKYTDRNRPLYLMGVGTVPDILDGVKNGVDMFDCVLPTRNARNGQVFTSLGKINLRNEKWKNSDAPMDPNCGCKVCKRYSIGYIRHLHHVGEITAFSLSTYHNLYFMKSFLAEIRKSIQAGEFLETYARWKNLYEKPEFSG

SEQ ID NO: 56851 - protein, 374 aa, unidentified
  source 1..374: note = Leptospira dzianensis
  REGION 1..374: note = tr|A0A5F2ANH0|A0A5F2ANH0_9LEPT Queuine tRNA-ribosyltransferase OS=Leptospira dzianensis; OX = 2484905 GN=tgt PE=3 SV=1
MIFKTLSEDSKTRARTGILNLNGVELETPVFMPVGTRGVVKTLAMDDLEELEYSLILGNTYHLYLRPGTDVLDKFGGLKKFSTWKKALLTDSGGYQVFSLNSLFKYEQDGVRFQSHIDGSRHYFTPGSVIDIQRSIGSDIMMVLDDCAPFDSTPERLRQSLDRTHRWAEMSVEYWEKRKNSQHLFGIFQGGIDLDFRLESLQAITSLPFDGVAIGGLSVGEPRKDFIRILEGISKYTDRNRPLYLMGVGTVPDILDGVKNGVDMFDCVLPTRNARNGQVFTSLGKINLRNEKWKNSDAPMDPNCGCKVCKRYSIGYIRHLHHVGEITAFSLSTYHNLYFMKSFLAEIRKSIQAGEFLETYARWKNLYEKPEFSG

SEQ ID NO: 56852 - protein, 379 aa, unidentified
  source 1..379: note = Leptospira dzoumogneensis
  REGION 1..379: note = tr|A0A4Z1AJQ7|A0A4Z1AJQ7_9LEPT Queuine tRNA-ribosyltransferase OS=Leptospira dzoumogneensis; OX = 2484904 GN=tgt PE=3 SV=1
MSEQKMIYRSRVSDPNSFARTGTLSLNGIEIPTPVFMPVGTRGAVKSLDSDDIDELGYELILGNTYHLYLRPGTEVLEKFGGLKNFVSYKKALLTDSGGFQVFSLNSLVKFKQEGVEFRSHIDGSPHFFTPQKVIDIQRAIGSDIMMVLDDCPPGDGTVSRIKDALDRTHRWAEEAVNYWMKDKRNQFLFGIFQGGTNLDLRLESLDKIRSLPFSGIAIGGLSVGEPRPDFIRTMEGISSYTDRTRPLYLMGVGTVPDILEGVRNGVDMFDCVLPTRNARNGQVFTSQGKVNLRNEKWKLLDEPMDPECECKVCKRYSIGYIRHLHHVKELSAFSLSTYHNLHFMKKFMKELRHSIEVGNFSEFFVKWKNLYERPEISR

SEQ ID NO: 56853 - protein, 371 aa, unidentified
  source 1..371: note = Leptospira ellinghausenii
  REGION 1..371: note = tr|A0A2P2DAD8|A0A2P2DAD8_9LEPT Queuine tRNA-ribosyltransferase OS=Leptospira ellinghausenii; OX = 1917822 GN=tgt PE=3 SV=1
MTSIFKEGVYDPGSYARTGTLTLGGIQIPTPIFMPVGTRGSIKSLTSEDINELGYELILANTYHLYLKPGKEVLDHFAGLKNFMSYKKALLTDSGGFQVFSLASLFKFEDDGVRFQSHIDGSYHKFTPASVIDVQRSIGSDIMMVLDDCAPYGSDTKRLELALERTHRWAKESYQYWMENPNGQNVFPIVQGGVNESLRLKSLETLQNIAFPGIAIGGLSVGEPRPEYIRILECMASYLDKQRPHYLMGVGTVVDILEGVKNGIDMFDCVLPTRNARNGQVFTSRGKINLRNESHRLSELPIDPECECKVCKTYSLGYIRHLHKVKELTAFSLSTYHNLFFMQSFMEKMRKSIETGNFRPFYDHWKNLFGS

SEQ ID NO: 56854 - protein, 374 aa, unidentified
  source 1..374: note = Leptospira elllisii
  REGION 1..374: note = tr|A0A2N0B6F7|A0A2N0B6F7_9LEPT Queuine tRNA-ribosyltransferase OS=Leptospira elllisii OX=2023197; GN = tgt PE=3 SV=1
MIFQTTFEDPNTRARTGILELNGTKLETPVFMPVGTRGVVKTLRSEDLEELEYSLILGNTYHLYLRPGTSVLDRFGGLKKFMTWKKALLTDSGGYQVFSLNSLFKYEHDGVKFQSHIDGSRHYFTPSSVIDIQRSIGSDVMMVLDDCAPFDSSPERLRQSLERTHRWAEMSVDHWEKNKNSQHLFGIFQGGIDLEARMESLKAITSLPFDGIAIGGLSVGEPRKDFIRILEGIGPHTDRNRPLYLMGVGTVSDILDGVRNGVDMFDCVLPTRNARNGQVFTSNGKINLRNEKWKNSDEPMDPNCGCRVCKRYSLGYIRHLHHVGEITAFSLSTFHNLFFMKTFLAEIRKSIQEGEFMKTYAKWKNLYEKPEFSG

SEQ ID NO: 56855 - protein, 374 aa, Leptospira fainei
  REGION 1..374: note = tr|S3V6H5|S3V6H5_9LEPT Queuine tRNA-ribosyltransferase OS=Leptospira fainei serovar Hurstbridge str. BUT 6 OX=1193011 GN=tgt PE=3 SV=1
MIFREETRDPQSFARTGTLALNGVEIPTPVFMPVGTRGAIKSLDSDDIDELGFELILGNTYHLYLRPGEEVLKRFGGLKNFISYKKALLTDSGGFQVFSLNSLFKFEADGVAFRSHIDGSAHFFTPEKVVDIQRTIGSDIMMVLDDCPPGDASVARIKESLDRTHRWAETAVEHWEKDKNGQHLFGIVQGGTNVELRLESLSYLNGLPFSGIALGGLSVGEPRPDFIRTLEGIAPYSDRNRPLYLMGVGTVPDILDGVRNGVDMFDCVLPTRNARNGQVFTSKGKINLRNEKWKFSDEPLDSECECRVCKRYSVGYLRHLHHVKELTAFSLSTFHNLSFMKKFMFELRRSIQEGKFDQFSAKWKNLYERPEISR

SEQ ID NO: 56856 - protein, 374 aa, unidentified
  source 1..374: note = Leptospira fletcheri
  REGION 1..374: note = tr|A0A4R9GEE9|A0A4R9GEE9_9LEPT Queuine tRNA-ribosyltransferase OS=Leptospira fletcheri OX=2484981; GN = tgt PE=3 SV=1
MIFREKTRDPHSQARTGTLILNGMEIETPVFMPVGTRGAVKSLDSGDIDELGFDLILGNTYHLYLRPGTEVLERFGGLKNFISYNRALLTDSGGFQVFSLNSLFKFEKDGVQFRSHIDGSPHTFTPEKVIDIQRVIGSDIMMVLDDCPPGDASPIRIRESLERTHRWAEMAVNHWQKRTNGQHLFGIVQGGTNLDLRLESLGVLNSLPFSGIAIGGLSVGEPRPDFIRTLEGISRFTDRNRPLYLMGVGTVPDILEGVRNGVDMFDCVLPTRNARNGQVFTSKGKINLRNEKWKFSDEPLDLECKCKVCKRYSIGYLRHLHHVKELTAFSLSTFHNLSFMKKFMFELRSSIQVGKFDEFFSKWKILYERPEISR

SEQ ID NO: 56857 - protein, 374 aa, unidentified
  source 1..374: note = Leptospira fluminis
  REGION 1..374: note = tr|A0A4R9GQ05|A0A4R9GQ05_9LEPT Queuine tRNA-ribosyltransferase OS=Leptospira fluminis OX=2484979; GN = tgt PE=3 SV=1
MIFREKTRDPHSQARTGTLLLNGIEIETPVFMPVGTRGAVKSLDSGDIDELGFDLILGNTYHLYLRPGMEVLERFGGLKNFISYRRALLTDSGGFQVFSLNSLFKFERDGVQFRSHIDGSPHTFTPEKVIDIQRVIGSDIMMVLDDCPPGDASLVRIRESLDRTHRWAEVAVNHWQKRTNGQHLFGIVQGGTNLDLRLESLGVLNSLPFSGIAIGGLSVGEPRPDFIRTLEGISRFTDRNRPLYLMGVGTVPDILEGVRNGVDMFDCVLPTRNARNGQVFTSKGKINLRNEKWKFSDEPLDTECECKVCKRYSIGYLRHLHHVKELTAFSLSTFHNLSFMKKFMSELRSSIQVGKFDEFFTKWKILYERPEISR

SEQ ID NO: 56858 - protein, 374 aa, unidentified
  source 1..374: note = Leptospira gomenensis
  REGION 1..374: note = tr|A0A5F1YAV8|A0A5F1YAV8_9LEPT Queuine tRNA-ribosyltransferase OS=Leptospira gomenensis; OX = 2484974 GN=tgt PE=3 SV=1
MIFQTTFEDPNTLARTGILELNGTKLETPVFMPVGTRGVVKTLRSEDLEELEYSLILGNTYHLYLRPGTSVLDRFGGLKKFMTWKKALLTDSGGYQVFSLNSLFKYEQDGVKFQSHIDGSRHYFTPGSVIDIQRSIGSDIMMVLDDCAPFDSSPERLRQSLERTHRWAEMSVDHWQKNKNSQHLFGIFQGGIDLEARMESLNAITSLPFDGIAIGGLSVGEPRRDFIRILEGIGPHTDRNRPLYLMGVGTVPDILDGVRNGVDMFDCVLPTRNARNGQVFTSKGKINLRNEKWKNSDEPMDPNCGCRVCERYSIGYIRHLHHVGEITAFSLSTFHNLFFMKSFLSEIRKSIQSGEFMKTYAKWKNLYEKPEFSG

SEQ ID NO: 56859 - protein, 379 aa, unidentified
  source 1..379: note = Leptospira haakeii
  REGION 1..379: note = tr|A0A2N0BXS9|A0A2N0BXS9_9LEPT Queuine tRNA-ribosyltransferase OS=Leptospira haakeii OX=2023198; GN = tgt PE=3 SV=1
MSEQKMIYRSRVSDPNSFARTGTLSLNGIEIPTPVFMPVGTRGAIKSLDSDDIDELGYELILGNTYHLYLRPGTEVLEKFGGLKNFVSYKKALLTDSGGFQVFSLNSLVKFKKEGVEFRSHIDGSPHFFTPEKVIDIQRAIGSDIMMVLDDCPPGDGTVARIKDALDRTHRWAEEAVNYWAKDKRNQFLFGIFQGGTNLDLRLESLDKIRSLPFSGIAIGGLSVGEPRPDFIRTMEGISSYTDRTRPLYLMGVGTVPDILEGVRNGVDMFDCVLPTRNARNGQVFTSQGKVNLRNEKWKFRDEPMDPECECKVCKRYSIGYIRHLHHVKELSAFSLSTYHNLHFMKKFMKELRHSIEVGNFSEFFVKWKNLYETPEISR

SEQ ID NO: 56860 - protein, 371 aa, unidentified
  source 1..371: note = Leptospira harrisiae
  REGION 1..371: note = tr|A0A2N0AIH6|A0A2N0AIH6_9LEPT Queuine tRNA-ribosyltransferase OS=Leptospira harrisiae OX=2023189; GN = tgt PE=3 SV=1
MSSIFKERSKDPGSYARTGNLNLNGIQIETPIFMPVGTRGSIKSLSSSDIDELGYNLILANTYHLYLRPGKEVLDHFQGLKNFMAYKRALLTDSGGFQVFSLASLFKFEEDGVRFQSHIDGSHHKFTPASVIDMQRSIGSDIMMVLDDCAPYGSDLGRLELALDRTHRWALESYNYWMEKPNGQNVFPIVQGGVNESLRKRSLDTLQNINFPGIAIGGLSVGEPRPEYIRILECMAPYFDQARPRYLMGVGTVVDILEGVKNGIDMFDCVLPTRNARNGQVFTSRGKINLRNESHRLSDTPIDPECGCKVCVTYSLGYIRHLHKVKELTAFSLSTYHNLFFMQSFMEKMRKSIEIGNFQGFYDHWKNLFGS

SEQ ID NO: 56861 - protein, 379 aa, unidentified
  source 1..379: note = Leptospira hartskeerlii
  REGION 1..379: note = tr|A0A2M9XCX2|A0A2M9XCX2_9LEPT Queuine tRNA-ribosyltransferase OS=Leptospira hartskeerlii; OX = 2023177 GN=tgt PE=3 SV=1
MSEQKMIYRSRVEDPHSFARTGTLSLNGIEIPTPVFMPVGTRGAVKSLDSDDIDELGYELILGNTYHLYLRPGTEVLEKFGGLKNFVSYKKALLTDSGGFQVFSLNSLVKFKKEGVEFRSHIDGSPHFFTPEKVIDIQRSIGSDIMMVLDDCPPGDGTVSRIKEALDRTHRWAEEAVNYWEKDKRNQFLFGIFQGGTNLDLRLESLEKIRSLPFSGIAIGGLSVGEPRPDFIRTMEGISSYTDRTRPLYLMGVGTVPDILEGVRNGVDMFDCVLPTRNARNGQVFTSRGKVNLRNEKWKLVDEPMDPECECKVCKRYSIGYIRHLHHVKELSAFSLSTYHNLHFMKKFMRELRHSIEVGNFSEFFVKWKNLYERPEISR

SEQ ID NO: 56862 - protein, 371 aa, unidentified
  source 1..371: note = Leptospira idonii
  REGION 1..371: note = tr|A0A4R9LX95|A0A4R9LX95_9LEPT Queuine tRNA-ribosyltransferase OS=Leptospira idonii OX=1193500; GN = tgt PE=3 SV=1
MPLRFQSVASDKQSFARSGKLRLGEIEVNTPVFMPVGTRGSVKSLSSEDILELGYQLILGNTYHLYLKPGKEVLDHFGGLKKFMAYPNALLTDSGGFQVFSLSGLFKFEEDGVRFQSHIDGSHHKFTPESVIDMQRSIGSDIMMVLDDCAPYGSSVERLKQALDRTHRWAKQSVEYWQKNENGQNLFCIVQGGVNEALRAESLHYLQSLPFPGIALGGLSVGEPREEYVRILESLAPSLDPARPRYLMGVGTVLDILEGVRNGIDMFDCVLPTRNARNGQVFTSKGKVNLRNESHRLSTGPIDPECSCKVCKTYSLGYIRHLHKVKELSAFSLSTYHNLYFMKQFMDSLRISIENQEFGTFYTHWKKLYAS

SEQ ID NO: 56863 - protein, 672 aa, unidentified
  source 1..672: note = Leptospira idonii
  REGION 1..672: note = tr|A0A4R9LWW0|A0A4R9LWW0_9LEPT Queuine tRNA-ribosyltransferase OS=Leptospira idonii OX=1193500; GN = tgt PE=3 SV=1
MSRLDFILEKEASGSKARAARFTTLHGEVKTPIFMPVGTQATVKSQTVETLKAAGSNVLLANTYHLLLRPGPEVFQKLGGIHKFMNWDRPVLTDSGGFQIFSLPNARKMTEEGAVFRSYVNGQNVLLSPEISIGMQKAIGSDIMMVLDECVPSTVEYSKAKSAMEVTHRWAKRSLDARGDSPQSMFGIVQGACFPDLRKRSAEVLTQLPFDGFAIGGLAVGETKEERNDFCELSASLLPRNLPRYLMGVGTPLDLLEAVHRGVDMFDCTIPTELAQRGVAFTSKGKLQIHRTVYKFEDQILDPDCDCPCCCSYSRAYLHHLTKTEEVLGWHLLGIHNLYFYHKLMKDMREEILSDTFASFYERKKEELDRTDNVNPSFHRLKPSKANRKKSLGDYELIENPAGEYWSVRQKSSGEVMHSVNDPYLESKQLYIEQSGLSEILRSSSDTAPLVIWDVGLGAATNAMMAVRCFEEIEVPRTLKIISFESDLDPLRLALKNNGKFPHLFHKAPWELLKYNVWKSDSKNLIWELVEGDFAVHFVQKEIPDLIFYDPFSFKTDSSLWTHTFFEQLFDRLRNSSRLVRLYTYSASTAVRSSLLHSGFWVGRGLGSGPKSETTVAYSGKPNTESELSGLLGKEWLSRWEKSDARYPKNLDPAQRKEWVERILSHPQFVSK

SEQ ID NO: 56864 - protein, 687 aa, unidentified
  source 1..687: note = Leptospira ilyithenensis
  REGION 1..687: note = tr|A0A4R9LN87|A0A4R9LN87_9LEPT Queuine tRNA-ribosyltransferase OS=Leptospira ilyithenensis; OX = 2484901 GN=tgt PE=3 SV=1
MSRLNFILEAEAPGTKARAGRFTTLHGEVSTPIFMPVGTQATVKAQNVETLKSVGSRVLLANTYHLLLRPGAEVFRKLGGIHRFMNWDGPVLTDSGGFQIFSLPNARKMTEEGAVFRSYVDGQNVMLSPEISIEMQKAIGSDIMMVLDECVPSTVEHWEAKRAMEVTHRWAKRSLNARGDSLQSMFGIVQGACFEDLRKQSAEVLTQLPFDGFAIGGLAVGETKEERNDFCELSASFLPKNLPRYLMGVGTPLDLLEAVHRGVDMFDCTIPTELAQRGVAFTSIGKLQLHRAVYKFEDSVLDENCDCICCKDYSKAYLHHLIKSDEVLGWQLLAIHNLYFYHRLMSEMRSSIFNGKFLSYYTEKKDSLSQSDNVNPSHHILKPSKAVRKRSLGDYEIIENEEKGYWSVRQKSSGEVMHSVNSPVEEAKKLYIDQSNLRQRISSDSSDPEKSAFLYNDETDPIVIWDVGLGAATNAMAALGCFEELANPKPMRLISFESDLDPLRLALKNNGRFPHLFHKAPKEVLEKSFWKSDSENFTWKLVLGDFATTFSREESPDVVFYDPFSFKTDSILWKPEFFSMLFSYFQTREKTVSLYTYSAATGVRAALLSVGFWVGRGVGSGPKSETTIAYSKCPEGIEEKEGLLGKEWLGRWERSDARYPAELSNENKADWDNRILIHPQFHKDLYL

SEQ ID NO: 56865 - protein, 371 aa, unidentified
  source 1..371: note = Leptospira ilyithenensis
  REGION 1..371: note = tr|A0A4R9LQB4|A0A4R9LQB4_9LEPT Queuine tRNA-ribosyltransferase OS=Leptospira ilyithenensis; OX = 2484901 GN=tgt PE=3 SV=1
MPLSFIQTSKDPNSFARGGILSLGDIEVETPVFMPVGTRGSVKALSSEDILELGYKLILGNTYHLYLKPGKEVMETFGGLKNFMAYPNALLTDSGGFQVFSLSGLFKFEEDGVRFQSHIDGSHHKFTPESVIDMQRAIGSDIMMVLDDCAPYGSSTERLKESLERTHRWAKQSVAYWQNNPNNQNLFCIVQGGVNEALRLESLQTLQNMDFPGIALGGLSVGEPREEYVRILEALSPHLDTKRPRYLMGVGTVVDILDGVKNGIDMFDCVLPTRNARNGQVFTSKGKINLRNESHRLSTEPIDPLCECKVCKTYSLGYLRHLHKVKEILAFTLSTYHNLYFMKQFMDNLRKSIEKGEFQTYYDHWKKLFTP

SEQ ID NO: 56866 - protein, 374 aa, Leptospira inadai
  REGION 1..374: note = tr|V6HE43|V6HE43_9LEPT Queuine tRNA-ribosyltransferase OS=Leptospira inadai serovar Lyme str. 10 OX=1049790 GN=tgt PE=3 SV=1
MIFREETRDPHSFARTGTLALNGVEIPTPVFMPVGTRGAIKSLDSDDIDELGFELILGNTYHLYLRPGTEVLQSFGGLKNFISYKKALLTDSGGFQVFSLNSLFKFQADGVGFRSHIDGSSHFFTPEKVVDIQRMIGSDIMMVLDDCPPGDASAARIKESLDRTHRWAEMAVRYWEKDKNGQHLFGIVQGGTNVELRLESLSYVNGLPFSGIALGGLSVGEPRPDFIRTLEAVAPHSDRNRPLYLMGVGTVPDILDGVRNGVDMFDCVLPTRNARNGQVFTSKGKINLRNEKWKFSDEPLDSECECRVCKRYSVGYLRHLHHVKELTAFSLSTFHNLSFMKKFMFELRRSIKEGKFDQFSAKWKNLYERPEISR

SEQ ID NO: 56867 - protein, 374 aa, Leptospira interrogans
  REGION 1..374: note = sp|Q8CXS3|TGT_LEPIN Queuine tRNA-ribosyltransferase; OS = Leptospira interrogans serogroup Icterohaemorrhagiae serovar Lai (strain 56601) OX=189518 GN=tgt PE=3 SV=1
MIFQTTSEDTLTKARTGILNLNGIELKTPVFMPVGTRGVVKTLSADDLEELEYSLILGNTYHLYLRPGTSVLDRFGGLKKFSTWKKALLTDSGGYQVFSLNSLFKYEQDGVRFQSHIDGSRHYFTPNSVIDIQRSIGSDIMMVLDDCAPFDSGPERLKQSLDRTHRWAEMSVQYWEKNKNSQHLFGIFQGGIDLDFRLESLNTITSLPFDGIAIGGLSVGEPRKDFIRILDGISAHTDRNRPLYLMGVGTVPDILDGVKNGVDMFDCVLPTRNARNGQVFTTLGKINLRNEKWKSSDTPMDPNCTCKVCKRYSIGYIRHLHHVGEITAFSLSTYHNLHFMKNFLTEIQNSIQKGEFLEIYAKWKNLYEKPEFSG

SEQ ID NO: 56868 - protein, 374 aa, Leptospira interrogans; identical to SEQ ID NO: 56867
  REGION 1..374: note = sp|Q72TL3|TGT_LEPIC Queuine tRNA-ribosyltransferase; OS = Leptospira interrogans serogroup Icterohaemorrhagiae serovar copenhageni (strain Fiocruz L1-130) OX=267671 GN= tgt PE=3 SV=1

SEQ ID NO: 56869 - protein, 371 aa, unidentified
  source 1..371: note = Leptospira jelokensis
  REGION 1..371: note = tr|A0A5F2BH86|A0A5F2BH86_9LEPT Queuine tRNA-ribosyltransferase OS=Leptospira jelokensis; OX = 2484931 GN=tgt PE=3 SV=1
MPSIFKEGTYDSGSYARTGTLSLNGIQIETPIFMPVGTRGSIKSLTSEDINELGYNLILANTYHLYLKPGKEVFDHFHGLKNFMSYKKALLTDSGGFQVFSLASLFKFEDDGVRFQSHIDGSYHKFTPSSVIDMQRSIGSDIMMVLDDCAPYGSDTKRLELALDRTHRWAKESYEYWMQNPKGQNVFPIVQGGVNEALRLKSLESLQKIDFPGIAIGGLSVGEPRPEYIRILECMAPHLDKARPRYLMGVGTVVDILEGVKNGIDMFDCVLPTRNARNGQVFTSKGKLNLRNESHRLSESPIDSECSCKVCQTYSLGYIRHLHKVKELTAFSLSTYHNLFFMQSFMEKMRKSIEIGNFRAFYEHWKNLFGS

SEQ ID NO: 56870 - protein, 371 aa, unidentified
  source 1..371: note = Leptospira jelokensis
  REGION 1..371: note = tr|A0A4Z1A6Q5|A0A4Z1A6Q5_9LEPT Queuine tRNA-ribosyltransferase OS=Leptospira jelokensis; OX = 2484931 GN=tgt PE=3 SV=1
MPSIFKEGTYDSGSYARTGTLSLNGIQIETPIFMPVGTRGSIKSLTSEDINELGYNLILANTYHLYLKPGKEVFDHFHGLKNFMSYKKALLTDSGGFQVFSLASLFKFEDDGVRFQSHIDGSYHKFTPSSVIDMQRSIGSDIMMVLDDCAPYGSDTKRLELALDRTHRWAKESYEYWMENPNGQNVFPIVQGGVNEALRLKSLETLQKIDFPGIAIGGLSVGEPRPEYIRILECMAPHLDKARPRYLMGVGTVVDILEGVKNGIDMFDCVLPTRNARNGQVFTSKGKINLRNESHRLSESPIDSECSCKVCQTYSLGYIRHLHKVKELTAFSLSTYHNLFFMQSFMEKMRKSIEIGNFRAFYEHWKNLFGS

SEQ ID NO: 56871 - protein, 374 aa, unidentified
  source 1..374: note = Leptospira johnsonii
  REGION 1..374: note = tr|A0A2P2D0J4|A0A2P2D0J4_9LEPT Queuine tRNA-ribosyltransferase OS=Leptospira johnsonii OX=1917820; GN = tgt PE=3 SV=1
MIFRSRVSDPNSFARTGTLNLNGIEIPTPVFMPVGTRGAVKSLDSDDLDELGYELILGNTYHLYLRPGTEVLEKFGGLKNFVSYKKALLTDSGGFQVFSLNSLVKFKQEGVEFRSHIDGSPHFFTPEKVIDIQRAIGSDIMMVLDDCPPGDGTVSRIKDALDRTHRWAEEAVNYWEKDKRNQFLFGIFQGGTNLDLRLESLEKIRSLPFSGIAIGGLSVGEPRPDFIRTMEGISSFTDRTRPLYLMGVGTVPDILEGVRNGVDMFDCVLPTRNARNGQVFTSRGKVNLRNEKWKFSDEPMDPECECKVCKRYSIGYIRHLHHVKELSAFSLSTYHNLYFMKKFMKELRHSIEVGNFSEFFVKWKNLYERAEISR

SEQ ID NO: 56872 - protein, 371 aa, unidentified
  source 1..371: note = Leptospira kanakyensis
  REGION 1..371: note = tr|A0A4R9HLJ9|A0A4R9HLJ9_9LEPT Queuine tRNA-ribosyltransferase OS=Leptospira kanakyensis; OX = 2484968 GN=tgt PE=3 SV=1
MSSIFKEKSKDSGSYARTGTLHLNGIQIETPIFMPVGTRGSIKSLSSSDIDELGYNLILANTYHLYLRPGKEVLDHFHGLKNFMSYKRALLTDSGGFQVFSLASLFKFEEDGVRFQSHIDGSHHKFTPASVIEMQRSIGSDIMMVLDDCAPFGSDLGRLELALDRTHRWAKESYDYWMENPGGQNVFPIVQGGVNESLRKRSLDTLQNINFPGIAIGGLSVGEPRPDYIRILECMAPFFDQARPRYLMGVGTVVDILEGVKNGIDMFDCVLPTRNARNGQVFTSLGKINLRNESHRLAEGPIDPECGCKVCSTYSLGYIRHLHKVKELSAFSLSTYHNLYFMQSFMEKMRKSIEIGNFQSFYDHWKNLFGS

SEQ ID NO: 56873 - protein, 371 aa, unidentified
  source 1..371: note = Leptospira kemamanensis
  REGION 1..371: note = tr|A0A4R9JQW7|A0A4R9JQW7_9LEPT Queuine tRNA-ribosyltransferase OS=Leptospira kemamanensis; OX = 2484942 GN=tgt PE=3 SV=1
MTSIFKEGTHDTGSYARTGTLILNGIEIQTPIFMPVGTRGSIKSLTSEDIDELGYNLILANTYHLYLKPGKEVFDHFHGLKNFMSYKKALLTDSGGFQVFSLASLFKFEEDGVRFQSHIDGSYHKFTPTSVIDMQRSIGSDIMMVLDDCAPYGSDTKRLELALDRTHRWAKESYAYWMENPNGQNVFPIVQGGVNETLRLRSLETLQKINFPGIAIGGLSVGEPRPEYIRILECMAPHLDKARPRYLMGVGTVVDILEGVKNGIDMFDCVLPTRNARNGQVFTSNGKLNLRNESHRLSDAPIDPECGCKVCKTYSLGYIRHLHKVKELTAFSLSTYHNLFFMQSFMEKMRKSIEIGNFRDFYAHWKNLFGS

SEQ ID NO: 56874 - protein, 374 aa, Leptospira kirschneri
  REGION 1..374: note = tr|M6IJG6|M6IJG6_9LEPT Queuine tRNA-ribosyltransferase OS=Leptospira kirschneri serovar Bim str. 1051 OX=1049941 GN=tgt PE=3 SV=1
MIFQTTSEDTLTRARTGILNLNGIELKTPVFMPVGTRGVVKTLSADDLEELEYSLILGNTYHLYLRPGTSVLDRFGGLKKFSTWKKALLTDSGGYQVFSLNSLFKYEQDGVRFQSHIDGSRHYFTPNSVIDIQRSIGSDIMMVLDDCAPFDSGPERLKQSLDRTHRWAEMSVQYWEKNKNSQHLFGIFQGGIDLDFRLESLNAITSLPFDGIAIGGLSVGEPRKDFIRILNGIATYTDRNRPLYLMGVGTVPDILDGVKNGVDMFDCVLPTRNARNGQVFTTLGKINLRNEKWKNSDFPIDSNCTCKVCKRYSIGYIRHLHHVGEITAFSLSTYHNLHFMKNFLTEIQNSIQKGEFLEIYAKWKNLYEKPEFSG

SEQ ID NO: 56875 - protein, 374 aa, Leptospira kirschneri; identical to SEQ ID NO: 56874
  REGION 1..374: note = tr|M6XBD5|M6XBD5_9LEPT Queuine tRNA-ribosyltransferase OS=Leptospira kirschneri str. 200801925 OX=1193046 GN=tgt PE=3 SV=1

SEQ ID NO: 56876 - protein, 374 aa, Leptospira kmetyi
  REGION 1..374: note = tr|A0A5F1XUZ0|A0A5F1XUZ0_9LEPT Queuine tRNA-ribosyltransferase OS=Leptospira kmetyi OX=408139; GN = tgt PE=3 SV=1
MIFKTTSEDSQTRARTGILELNGVKLETPVFMPVGTRGVVKTLSMDDLEELEYSLILGNTYHLYLRPGTDVLDQFGGLKKFSTWKKALLTDSGGYQVFSLNSLFKYEQDGVRFQSHIDGSRHYFTPGSVIDIQRSIGSDIMMVLDDCAPFDSSPERLRQSLDRTHRWAEMSVEYWEKNKNSQHLFGIFQGGIDLDSRLESLKAIASLPFDGIAIGGLSVGEPRKDFIRILDGISTHTDRTRPLYLMGVGTVPDILDGVKNGVDMFDCVLPTRNARNGQVFTTLGKINLRNEKWKNSDAPMDPNCGCKVCKRYSIGYIRHLHHVGEITAFSLSTYHNLYFMKSFLSEIQKSIQAGEFLETYTRWKNLYEKPEFSG

SEQ ID NO: 56877 - protein, 374 aa, Leptospira kmetyi
  REGION 1..374: note = tr|A0A2M9XKQ6|A0A2M9XKQ6_9LEPT Queuine tRNA-ribosyltransferase OS=Leptospira kmetyi OX=408139; GN = tgt PE=3 SV=1
MIFKTTSEDSQTRARTGILELNGVKLETPVFMPVGTRGVVKTLSMDDLEELEYSLILGNTYHLYLRPGTDVLDQFGGLKKFSTWKKALLTDSGGYQVFSLNSLFKYEQDGVRFQSHIDGSRHYFTPGSVIDIQRSIGSDIMMVLDDCAPFDSSPERLRQSLDRTHRWAEMSVEYWEKNKNSQHLFGIFQGGIDLDSRLESLKAIASLPFDGIAIGGLSVGEPRKDFIRILDGISTHTDRTRPLYLMGVGTVPDILDGVKNGVDMFDCVLPTRNARNGQVFTTLGKINLRNEKWKNSDAPMDPNCGCKVCKRYSIGYIRHLHHVGEITAFSLSTYHNLYFMKSFLSEIQKSIQAGEFLETYARWKNLYEKPEFSG

SEQ ID NO: 56878 - protein, 371 aa, unidentified
  source 1..371: note = Leptospira kobayashii
  REGION 1..371: note = tr|A0A2P2DLG9|A0A2P2DLG9_9LEPT Queuine tRNA-ribosyltransferase OS=Leptospira kobayashii; OX = 1917830 GN=tgt PE=3 SV=1
MPLSFIQTSKDPNSFARGGILTLGGVEVETPVFMPVGTRGSVKALSSEDILELGYKLILGNTYHLYLKPGKEVMETFGGLKKFMAYPNALLTDSGGFQVFSLSGLFKFEEDGVRFQSHIDGSHHKFTPESVIDMQRAIGSDIMMVLDDCAPYGSSTERLKESLERTHRWAKQSVEYWQKNPNDQNLFCIVQGGVNEALRLESLQTLQNMDFPGIALGGLSVGEPREEYVRILECLSPHLDPKRPRYLMGVGTVVDILDGVKNGIDMFDCVLPTRNARNGQVFTSKGKINLRNESHRLSTEPIDPLCQCKVCKTYSLGYLRHLHKVKEILAFSLSTYHNLYFMKQFMDNLRKSIEKGEFQTYYDHWKKLYAP

SEQ ID NO: 56879 - protein, 685 aa, unidentified
  source 1..685: note = Leptospira kobayashii
  REGION 1..685: note = tr|A0A2P2DME1|A0A2P2DME1_9LEPT Queuine tRNA-ribosyltransferase OS=Leptospira kobayashii; OX = 1917830 GN=tgt PE=3 SV=1
MSRLNFILEAEAPGTKARAGRFTTLHGEVSTPIFMPVGTQATVKAQNVETLKSVGSRVLLANTYHLLLRPGAEVFRKLGGIHKFMNWDGPVLTDSGGFQIFSLPNARKITEDGAVFRSYVDGQNVVLSPEVSIEMQKAIGSDIMMVLDECVPSTVEHKEAKRAMEVTHRWAKRSLNARGESLQSMFGIVQGACFEDLRKQSAEVLTQLPFDGFAIGGLAVGETKEERNDFCELSASFLPKNLPRYLMGVGTPLDLLEAVHRGVDMFDCTIPTELAQRGVAFTSIGKLQLHRTLYKFEDSVLDENCDCICCKNYSKAYLHHLTKSNEVLGWQLLAIHNLYFYHRLMSEMRSSIFQGNFLSYYTEKKDSLSQSDNVYPSHHILKPSKAIRKRSLGDYEIIENEAKGYWSVRQKSSGEVMHSVNSPMEEANRLYIDQSNLKKRISFSDNTFEKYTPSSHEEMNPIIIWDVGLGAATNAMSAIHSFEEIVNPNAMHLISFESDLDPLRLALKNNGRFPHLFHKAPKEVLEKSVWASDSGNLTWKLVLGDFAATFSGEEIPDIVFYDPFSFKTDSILWKPEFFRLLFSYFQTQEKTVSLYTYSAATAVRAALLSVGFWVGRGVGSGPKSETTIAYSRSPEGIGEKEGLLGKEWIGRWERSDARYPVDLGEGNKADWDKRILTHPQFQKNL

SEQ ID NO: 56880 - protein, 379 aa, unidentified
  source 1..379: note = Leptospira koniamboensis
  REGION 1..379: note = tr|A0A4R9J471|A0A4R9J471_9LEPT Queuine tRNA-ribosyltransferase OS=Leptospira koniamboensis; OX = 2484950 GN=tgt PE=3 SV=1
MSEQKMIYRSRVEDPNSFARTGTLSLNGIEIPTPVFMPVGTRGAIKSLDSDDIDELGYELILGNTYHLYLRPGTEVLEKFGGLKNFVSYKKALLTDSGGFQVFSLNSLVKFKKEGVEFRSHIDGSPHFFTPEKVIDIQRAIGSDIMMVLDDCPPGDGTVSRIKDALDRTHRWAEEAVNYWEKDKRNQFLFGIFQGGTNLDLRLESLEKIRSLPFSGIAIGGLSVGEPRPDFIRTMEGISSYTDRTRPLYLMGVGTVPDILEGVRNGVDMFDCVLPTRNARNGQVFTSQGKVNLRNEKWKFRDEPMDPECECKVCKRYSIGYIRHLHHVKELSAFSLSTYHNLHFMKKFMKELRHSIEVGNFSEFFVKWKNLYETPEISR

SEQ ID NO: 56881 - protein, 379 aa, unidentified
  source 1..379: note = Leptospira langatensis
  REGION 1..379: note = tr|A0A5F1ZY08|A0A5F1ZY08_9LEPT Queuine tRNA-ribosyltransferase OS=Leptospira langatensis; OX = 2484983 GN=tgt PE=3 SV=1
MSQQEMIFRSGISDPNSHARTGTLHLNGIEIPTPVFMPVGTRGAVKSLDSDDLDELGFELILGNTYHLYLRPGMDVLQKFGGLKNFISYKKALLTDSGGFQVFSLNSLVKFKKEGVEFRSHIDGSPHFFTPEKVIDIQRTIGSDIMMVLDDCPPGDADTARIKESLDRTHRWAEAAVSYWEKEKGKQNLFGIFQGGTNLDLRLESLSKIAALPFSGIAIGGLSVGEPRPDFIRTMEGIAPHTDKSRPLYLMGVGTVPDILEGVRNGVDMFDCVLPTRNARNGQVFTSKGKMNLRNEKWKFSEEPMDPECDCKVCKRYSVGYIRHLHHVKELSAFSLSTYHNLHFMKKFMKELRLSIEVGKFSEFFVKWKNLYERPEISR

SEQ ID NO: 56882 - protein, 371 aa, unidentified
  source 1..371: note = Leptospira levettii
  REGION 1..371: note = tr|A0A5F2DC10|A0A5F2DC10_9LEPT Queuine tRNA-ribosyltransferase OS=Leptospira levettii OX=2023178; GN = tgt PE=3 SV=1
MTSIFKEGVYDTGSYARTGTLTLGGIQIPTPIFMPVGTRGSIKSLTSEDISELGYELILANTYHLYLKPGKEVLDHFAGLKNFMSYKKALLTDSGGFQVFSLASLFKFEDDGVRFQSHIDGSYHKFTPASVIDVQRSIGSDIMMVLDDCAPYGSDTKRLELALERTHRWAKESYQYWMENPNGQNVFPIVQGGVNESLRLRSLETLQNIAFPGIAIGGLSVGEPRPEYIRILECMAPYLDKQRPHYLMGVGTVVDILEGVKNGIDMFDCVLPTRNARNGQVFTSRGKINLRNESHRLSELPIDPECECKVCKTYSLGYIRHLHKVKELTAFSLSTYHNLFFMQSFMEKLRKSIEIGNFRPFYDHWKNLFGS

SEQ ID NO: 56883 - protein, 371 aa, unidentified
  source 1..371: note = Leptospira levettii
  REGION 1..371: note = tr|A0A2N0B1H3|A0A2N0B1H3_9LEPT Queuine tRNA-ribosyltransferase OS=Leptospira levettii OX=2023178; GN = tgt PE=3 SV=1
MTSIFKEGVYDTGSYARTGTLTLGGIQIPTPIFMPVGTRGSIKSLTSEDISELGYELILANTYHLYLKPGKEVLDHFAGLKNFMSYKKALLTDSGGFQVFSLASLFKFEDDGVRFQSHIDGSYHKFTPASVIDVQRSIGSDIMMVLDDCAPYGSDTKRLELALERTHRWAKESYQYWMENPNGQNVFPIVQGGVNESLRLRSLETLQNIAFPGIAIGGLSVGEPRPEYIRILECMAPYLDKQRPHYLMGVGTVVDILEGVKNGIDMFDCVLPTRNARNGQVFTSRGKINLRNESHRLSELPIDPECECKVCKTYSLGYIRHLHKVKELTAFSLSTYHNLFFMQSFMEKLRKSIEIGNFRPFYEHWKNLFGS

SEQ ID NO: 56884 - protein, 379 aa, Leptospira licerasiae
  REGION 1..379: note = tr|A0A5F2DU82|A0A5F2DU82_9LEPT Queuine tRNA-ribosyltransferase OS=Leptospira licerasiae OX=447106; GN = tgt PE=3 SV=1
MSEQKMIYRSRVSDPHSFARTGTLSLNGIEIPTPVFMPVGTRGAVKSLDSDDIDELGYELILGNTYHLYLRPGTEVLEKFGGLKNFVSYKKALLTDSGGFQVFSLNSLVKFKQEGVEFRSHIDGSPHFFTPQKVIDIQRAIGSDIMMVLDDCPPGDGTVSRIKDALDRTHRWAEEAVNYWEKDKRNQFLFGIFQGGTNLDLRLESLEKIRSLPFSGIAIGGLSVGEPRPDFIRTMEGISSFTDRTRPLYLMGVGTVPDILEGVRNGVDMFDCVLPTRNARNGQVFTSRGKVNLRNEKWKLSDEPMDPECECKVCKRYSIGYIRHLHHVKELSAFSLSTYHNLYFMKKFMKELRHSIEVGNFSEFFVKWKNLYERPEISR

SEQ ID NO: 56885 - protein, 379 aa, Leptospira licerasiae; identical to SEQ ID NO: 56884
  REGION 1..379: note = tr|I0XPP8|I0XPP8_9LEPT Queuine tRNA-ribosyltransferase OS=Leptospira licerasiae serovar Varillal str. VAR 010 OX=1049972 GN=tgt PE=3 SV=1

SEQ ID NO: 56886 - protein, 371 aa, unidentified
  source 1..371: note = Leptospira macculloughii
  REGION 1..371: note = tr|A0A2N0C383|A0A2N0C383_9LEPT Queuine tRNA-ribosyltransferase OS=Leptospira macculloughii; OX = 2023202 GN=tgt PE=3 SV=1
MSSIFKENSKDPGSYARTGTLELNGIQIETPIFMPVGTRGSIKSLSSSDIDELGYNLILANTYHLYLKPGKEVLDHFHGLKNFMSYKRALLTDSGGFQVFSLASLFKFEEDGVRFQSHIDGSHHKFTPSSVIDMQRSIGSDIMMVLDDCAPYGSDLGRLELALDRTHRWAKESYNYWMENPNGQNVFPIVQGGVNESLRKRSLDTLQNINFPGIAIGGLSVGEPRPEYIRILECLAPFFDEARPRYLMGVGTVVDILEGVKNGIDMFDCVLPTRNARNGQVFTSQGKINLRNEAHRLSDGPIDPECGCKVCVTYSLGYIRHLHKVKELTAFSLSTYHNLFFMQSFMEKMRKSIEIGNFQGFYDHWKNLFGS

SEQ ID NO: 56887 - protein, 374 aa, unidentified
  source 1..374: note = Leptospira mayottensis
  REGION 1..374: note = tr|A0A3Q9DVC1|A0A3Q9DVC1_9LEPT Queuine tRNA-ribosyltransferase OS=Leptospira mayottensis 200901116 OX=1192864 GN=tgt PE=3 SV=1
MIFQTTSEDLQTRARTGILNLNGVKLETPVFMPVGTRGVVKTLSTDDLEELEYSLILGNTYHLYLRPGTSVLESFGGLKKFSTWKRALLTDSGGYQVFSLNSLFKYEQDGVRFQSHIDGSRHYFTPNSVIDIQRSIGSDIMMVLDDCAPFDSSPERLRQSLDRTHRWAEMSVEYWEKNKNSSHLFGIFQGGIDLGLRLESLQKVASLPFDGIAIGGLSVGEPRKDFIRILEGVSTDTDRSRPLYLMGVGTVPDILDGVKNGVDMFDCVLPTRNARNGQVFTSLGKINLRNEKWKSSDLPMDPHCGCKVCKRYSIGYIRHLHHVGEITAFSLSTYHNLYFMKNFLSEIQRSIQAGEFLKIYAKWKNLYEKPEFSG

SEQ ID NO: 56888 - protein, 374 aa, unidentified; identical to SEQ ID NO: 56887
  source 1..374: note = Leptospira mayottensis
  REGION 1..374: note = tr|A0A5F2EKI5|A0A5F2EKI5_9LEPT Queuine tRNA-ribosyltransferase OS=Leptospira mayottensis; OX = 1137606 GN=tgt PE=3 SV=1

SEQ ID NO: 56889 - protein, 371 aa, Leptospira meyeri
  REGION 1..371: note = tr|A0A5F2CPM3|A0A5F2CPM3_LEPME Queuine tRNA-ribosyltransferase OS=Leptospira meyeri OX=29508; GN = tgt PE=3 SV=1
MSSIFKENSKDPGSYARTGTLELNGIQIETPIFMPVGTRGSIKSLSSSDIDELGYNLILANTYHLYLKPGKEVLDHFHGLKNFMSYKRALLTDSGGFQVFSLASLFKFEEDGVRFQSHIDGSHHKFTPSSVIDMQRSIGSDIMMVLDDCAPYGSDLRRLELALDRTHRWAKESYNYWMENPNGQNVFPIVQGGVNESLRKRSLDTLQNINFPGIAIGGLSVGEPRPEYIRILECLAPFFDEARPRYLMGVGTVVDILEGVKNGIDMFDCVLPTRNARNGQVFTSQGKINLRNEAHRLSDGPIDPECGCKVCVTYSLGYIRHLHKVKELTAFSLSTYHNLFFMQSFMEKMRKSIEIGNFQGFYDHWKNLFGS

SEQ ID NO: 56890 - protein, 371 aa, Leptospira meyeri; identical to SEQ ID NO: 56886
  REGION 1..371: note = tr|A0A5F1ZGV3|A0A5F1ZGV3_LEPME Queuine tRNA-ribosyltransferase OS=Leptospira meyeri OX=29508; GN = tgt PE=3 SV=1

SEQ ID NO: 56891 - protein, 371 aa, unidentified
  source 1..371: note = Leptospira montravelensis
  REGION 1..371: note = tr|A0A4Z0ZF86|A0A4Z0ZF86_9LEPT Queuine tRNA-ribosyltransferase OS=Leptospira montravelensis; OX = 2484961 GN=tgt PE=3 SV=1
MSSIFKEKSKDPGSYARTGTLILNGVQIETPIFMPVGTRGSIKSLSSSDIDELGYNLILANTYHLYLKPGKEVLDHFHGLKNFMSYKRALLTDSGGFQVFSLASLFKFEEDGVRFQSHIDGSHHKFTPASVIDMQRSIGSDIMMVLDDCAPYGSDLKRLELALDRTHRWALESYQYWMEKPNGQNVFPIVQGGVNESLRKRSLDTLQNIDFPGIAIGGLSVGEPRPEYIRILECMAPFFDKARPRYLMGVGTVVDILEGVKNGVDMFDCVLPTRNARNGQVFTSLGKINLRNESHRLSDSPIDPECGCKVCQTYSLGYIRHLHKVKELTAFSLSTYHNLFFMQSFMEKMRKSIEIGNFQGFYDHWKNLFGS

SEQ ID NO: 56892 - protein, 371 aa, unidentified
  source 1..371: note = Leptospira mtsangambouensis
  REGION 1..371: note = tr|A0A5F2DHU5|A0A5F2DHU5_9LEPT Queuine tRNA-ribosyltransferase OS=Leptospira mtsangambouensis; OX = 2484912 GN=tgt PE=3 SV=1
MSSIFKEKSKDPGSYARTGTLNLNGIQIETPIFMPVGTRGSIKSLSSSDIDELGYNLILANTYHLYLRPGKEVLDHFHGLKNFMSYKRALLTDSGGFQVFSLASLFKFEEDGVRFQSHIDGSHHKFTPSSVIDMQRSIGSDIMMVLDDCAPYGSDLGRLELALDRTHRWAKESYNYWMENPGGQNVFPIVQGGVNESLRKRSLDTLQNINFPGIAIGGLSVGEPRPEYIRILECMAPFFDAARPRYLMGVGTVVDILEGVKNGIDMFDCVLPTRNARNGQVFTSLGKINLRNESHRLSDGPIDPECGCKVCVTYSLGYIRHLHKVKELTAFSLSTYHNLFFMQSFMEKMRKSIEIGNFQGFYDHWKNLFGS

SEQ ID NO: 56893 - protein, 379 aa, unidentified
  source 1..379: note = Leptospira neocaledonica
  REGION 1..379: note = tr|A0A2M9ZYX7|A0A2M9ZYX7_9LEPT Queuine tRNA-ribosyltransferase OS=Leptospira neocaledonica; OX = 2023192 GN=tgt PE=3 SV=1
MSEQKMIFRSRASDPNSFARTGTLSLNGIEIPTPVFMPVGTRGAIKSLDSDDIDELGYELILGNTYHLYLRPGTEVLEKFGGLKNFVSYKKALLTDSGGFQVFSLNSLVKFKREGVEFRSHIDGSPHFFTPEKVIDIQRAIGSDIMMVLDDCPPGDGTVSRIKDALDRTHRWAEEAVNYWEKDKRNQFLFGIFQGGTNLDLRLESLEKIRSLPFSGIAIGGLSVGEPRPDFIRTMEGISSYTDRNRPLYLMGVGTVPDILEGVRNGVDMFDCVLPTRNARNGQVFTSQGKVNLRNEKWKFSDAPMDPECECKVCKRYSIGYIRHLHHVKELSAFSLSTYHNLYFMKKFMKELRHSIEVGNFSEFFVKWKNLYERAEISR

SEQ ID NO: 56894 - protein, 374 aa, Leptospira noguchii
  REGION 1..374: note = tr|A0A540UGL6|A0A540UGL6_9LEPT Queuine tRNA-ribosyltransferase OS=Leptospira noguchii OX=28182; GN = tgt PE=3 SV=1
MIFQTTSEDSLTRARTGILNLNGIKLETPVFMPVGTRGVVKTLSADDLEELEYSLILGNTYHLYLRPGTSVLDSFGGLKKFSTWKKALLTDSGGYQVFSLNSLFKYEQDGVRFQSHIDGSRHYFTPNSVIDIQRSIGSDIMMVLDDCAPFDSGPERLKQSLDRTHRWAEMSVQYWEKNKNSQHLFGIFQGGIDLDFRLESLNAITSLPFDGIAIGGLSVGEPRKDFIRILNGIATYTDRNRPLYLMGVGTVPDILDGVKNGVDMFDCVLPTRNARNGQVFTTLGKINLRNERWKNSDSPMDPNCTCKVCKRYSIGYIRHLHHVGEITAFSLSTYHNLHFMKNFLTEIQNSIQKGEFLEIYAKWKNLYEKPEFSG

SEQ ID NO: 56895 - protein, 374 aa, Leptospira noguchii
  REGION 1..374: note = tr|T0FPU6|T0FPU6_9LEPT Queuine tRNA-ribosyltransferase OS=Leptospira noguchii serovar Panama str. CZ214 OX=1001595 GN=tgt PE=3 SV=1
MIFQTTSEDSLTKARTGILNLNGIKLETPVFMPVGTRGVVKTLSADDLEELEYSLILGNTYHLYLRPGTSVLNSFGGLKKFSTWKKALLTDSGGYQVFSLNSLFKYEQDGVRFQSHIDGSRHYFTPNSVIDIQRSIGSDIMMVLDDCAPFDSGPERLKQSLDRTHRWAEMSVQYWEKNKNSQHLFGIFQGGIDLDFRLESLNAITSLPFDGIAIGGLSVGEPRKDFIRILNGIATYTDRNRPLYLMGVGTVPDILDGVKNGVDMFDCVLPTRNARNGQVFTTLGKINLRNERWKNSDSPMDPNCTCKVCKRYSIGYIRHLHHVGEITAFSLSTYHNLHFMKNFLTEIQNSIQKGEFLEIYAKWKNLYEKPEFSG

SEQ ID NO: 56896 - protein, 371 aa, unidentified
  source 1..371: note = Leptospira noumeaensis
  REGION 1..371: note = tr|A0A4V3JKU2|A0A4V3JKU2_9LEPT Queuine tRNA-ribosyltransferase OS=Leptospira noumeaensis; OX = 2484964 GN=tgt PE=3 SV=1
MSSIFKEKTKDSGSYARTGTLHLNGIQIETPIFMPVGTRGSIKSLSSSDIDELGYNLILANTYHLYLKPGKEVLDHFHGLKNFMSYKRALLTDSGGFQVFSLASLFKFEEDGVRFQSHIDGSHHKFTPASVIEMQRSIGSDIMMVLDDCAPFGSDLKRLELALDRTHRWAKESYDYWMENPGGQNVFPIVQGGVNESLRKRSLDTLQNIDFPGIAIGGLSVGEPRPDYIRILECMAPFFDQARPRYLMGVGTVVDILEGVKNGIDMFDCVLPTRNARNGQVFTSLGKINLRNESHRLAEGPIDPECGCKVCTTYSLGYIRHLHKVKELTAFSLSTYHNLYFMQSFMEKMRKSIEIGNFQGFYEHWKNLFGS

SEQ ID NO: 56897 - protein, 675 aa, unidentified
  source 1..675: note = Leptospira ognonensis
  REGION 1..675: note = tr|A0A4R9JZG3|A0A4R9JZG3_9LEPT Queuine tRNA-ribosyltransferase OS=Leptospira ognonensis; OX = 2484945 GN=tgt PE=3 SV=1
MSRLNFKLEKVASHSHARASTFTTLHGDVQTPIFMPVGTQATVRTLNVDTLETVGSNVLLANTYHLLLRPGAEVFRKLGGIHKFMNWDRPVLTDSGGFQIFSLPNARKMTEDGAIFRSYVDGENILLSPEISIEMQKAIGSDIMMVLDECVPSTVDFSRAKSAMEITHRWAKRSLKARGESSQSMFGIVQGACFPELRKESAKALTDMPFDGYAIGGLAVGETKAERNDFCELSASLLPQNLPRYLMGVGTPLDLLEAVHRGVDMFDCTIPVELAQRGVAFTSEGKFQIHRSIYKFLDEALDQKCDCRCCKHYSKAYLHHLIKAGEILGWQLIAEHNLTYYHKLMNDMRLSILDDTFFRFYSEKKTELLKSDNVNPPFTLKSAKKDRRRSLGDYEVVESKTGNYYSIRQKSSGEVMHSVNSPIEEADTLYIKQSHLGMLLEKSDTIPLVVWDVGLGAATNAMAAISAHERSSSSRKLTLISFENDLTPLKLALRNHGRFPHLFHKAPMALLKNGHWISDEKGIEWKLMEGDFQKVYKNAEAPDLIYFDPFSYETDSELWSYDFFCDFYSHLKEFQNQISLYTYSASTRVRSAMLGAGFLVARGAGSGPKSETTIAFTKENFSEEIQKQLLDRRWLERWMRSDAKYPENLLMDREKWTSLILSHPQFQPSILLDNL

SEQ ID NO: 56898 - protein, 371 aa, unidentified
  source 1..371: note = Leptospira ognonensis
  REGION 1..371: note = tr|A0A4R9K083|A0A4R9K083_9LEPT Queuine tRNA-ribosyltransferase OS=Leptospira ognonensis; OX = 2484945 GN=tgt PE=3 SV=1
MPFHFAVNTEDKTSFARSGTLEINGNVVQTPVFMPVGTRGSVKSLTSEDLYEIGYNLILGNTYHLYLKPGTDVLDHFGGLKNFMSYQRALLTDSGGFQVFSLSGLFKFEDDGVRFQSHIDGSRHKFTPESVIDVQRSIGSDIMMVLDDCAPYGSSVERLKESLERTHRWAKISVDYWLERPGDQSLFGIVQGGTKADLRLESLQYLQSLPFPGIALGGLSVGEPRPEYVRILEAVAPHLDPARPHYLMGVGTVVDILDGVKNGIDMFDCVLPTRNARNGQVFTSYGKVNLRNESHRLSTQPIDPECQCKVCNNYSLGYLRHLHKVKELSAFSLSTYHNLYFMKKFMSELRESIENKEFSSFSEHWKKLYAS

SEQ ID NO: 56899 - protein, 371 aa, unidentified
  source 1..371: note = Leptospira perdikensis
  REGION 1..371: note = tr|A0A4R9JG62|A0A4R9JG62_9LEPT Queuine tRNA-ribosyltransferase OS=Leptospira perdikensis; OX = 2484948 GN=tgt PE=3 SV=1
MSSIFKESSKDPGSYARTGTLHLNGIQIETPIFMPVGTRGSIKSLSSSDIDELGYHLILANTYHLYLKPGKEVLDHFHGLKNFMSYKRALLTDSGGFQVFSLASLFKFEEDGVRFQSHIDGSHHKFTPASVIDMQRSIGSDIMMVLDDCAPYGSDLRRLELALDRTHRWAKESYEYWMERPNGQNVFPIVQGGVNESLRKRSLDTLQNINFPGIAIGGLSVGEPRPEYIRILECMAPYFDQARPRYLMGVGTVVDILEGVKNGVDMFDCVLPTRNARNGQVFTSFGKLNLRNESHRLADGPIDPECGCKVCTTYSLGYIRHLHKVKELTAFSLSTYHNLYFMQSFMEKMRKSIKIGNFQGFYDHWKNLFGS

SEQ ID NO: 56900 - protein, 374 aa, unidentified
  source 1..374: note = Leptospira perolatii
  REGION 1..374: note = tr|A0A2M9ZN89|A0A2M9ZN89_9LEPT Queuine tRNA-ribosyltransferase OS=Leptospira perolatii OX=2023191; GN = tgt PE=3 SV=1
MIFQEECKDSSTFARTGTLNLNGIQIPTPVFMPVGTRGTIKALDSEDIDELEFDLILANTYHLYLRPGEEVLNQFGGLKKFSSYNRALLTDSGGFQVFSLGSLFKFERDGVTFKSHIDGSSHFFSPEKVIDLQRMIGSDVMMVLDDCPPGNADTKRIKESLERTHRWAEASVNYWEKRKNSQNLFGIFQGGINLELRLESLSFLNSLPFSGIAIGGLSVGEPRPDFVRIMEGIAPNTDKKRPLYLMGVGTVPDILDGVRNGVDMFDCVLPTRNARNGQVFTSTGKLNLRNEKWKLSDAPLDSECSCKVCKRYSVGYLRHLHHVGELTAFSLSTYHNLHFMKNFMKELRLSIQDGKFAEFSSKWKNLYERSEISR

SEQ ID NO: 56901 - protein, 679 aa, unidentified
  source 1..679: note = Leptospira putramalaysiae
  REGION 1..679: note = tr|A0A4R9L177|A0A4R9L177_9LEPT Queuine tRNA-ribosyltransferase OS=Leptospira putramalaysiae; OX = 2484984 GN=tgt PE=3 SV=1
MSRLNFVLEAEAPQTSARATTFTTLHGQVQTPIFMPVGTQATVRAQTVDSLKAMGSRVLLANTYHLLLRPGAEVFRKIGGIHKFMNWDFPVLTDSGGFQIFSLPNSRKMTEEGAHFRSYVDGKMILLSPELSIDMQRAIGSDIMMVLDQCIPSTADYAKAKDAMEITHRWAKRSLDARGDSPQSIFGIVQGACFSDLRKESAKVLTQMPFDGFAIGGLAVGETKEERNDFCELSASLLPKNLPRYLMGVGTPIDLLEAVHRGVDMFDCTIPTELAQHGVAYTSAGKLQIHRTIYKFADSKLDENCDCPCCQNYSRSYLHHLIKTSEILGWHLIAQHNLNFYHRLMAEMRAKIFEGSFASYYARKKEELIRSDNVDPSLNKKRTPKAQRKRILGDYEIRENKEGKYWSVRQRSSGETMHSVNNPSEEAKSLYVVQTKLSEKLSGCNDSAEPESTNPFVIWDVGLGAATNSMAAIRCYEEIDSPVPMNMISFECDLDPFRLAMRNIGRFPHLFHTAPRSILEKGNWTSPSGTLGWDLVIGDFENTFLSQKIPDLVFYDPFSFKTDSKLWQPEFLKRLFLFFQDHSKNTMFVTYSASTAVRSSLLFAGFWVGKGKGSGPKSETTIAFTKRPENVEESTQLLGSDWLGRRERSHARFREEWDETKNRTWEETILCHPQFLFSP

SEQ ID NO: 56902 - protein, 374 aa, unidentified
  source 1..374: note = Leptospira putramalaysiae
  REGION 1..374: note = tr|A0A4R9L1N0|A0A4R9L1N0_9LEPT Queuine tRNA-ribosyltransferase OS=Leptospira putramalaysiae; OX = 2484984 GN=tgt PE=3 SV=1
MIFKTTSEDPNTRARTGILDLNGVKLNTPVFMPVGTRGVVKTLDTEDLEELEYSLILGNTYHLYLRPGTSVLDQFGGLKKFMTWKGALLTDSGGYQVFSLNSLFKYETDGVRFQSHIDGSRHYFTPGSVIDVQRSIGSDIMMVLDDCAPFDSSPERLRQSLERTHRWAEMSVEHWEKKKNSQHLFGIFQGGIDLDSRLESLKAIASLPFDGIAIGGLSVGEPRKDFIRILNGISSHTDRSRPLYLMGVGTVPDILDGVKNGVDMFDCVLPTRNARNGQVFTSLGKVNLRNEKWKNSDAPMDPNCQCKVCKRYSIGYIRHLHHVGEITAFSLSTFHNLFFMKNFLSEIQNSIQAGEFLETYARWKNLYEKPEFSG

SEQ ID NO: 56903 - protein, 371 aa, unidentified
  source 1..371: note = Leptospira ryugenii
  REGION 1..371: note = tr|A0A2P2DYM3|A0A2P2DYM3_9LEPT Queuine tRNA-ribosyltransferase OS=Leptospira ryugenii OX=1917863; GN = tgt PE=3 SV=1
MSLRFQVLGNDPTSFARLGKLSLGNVEVETPVFMPVGTRGSIKSLDSDDIREIGYKLILGNTYHLYLKPGTEVLDHFGGLKPFMSYSEALLTDSGGFQVFSLASLFRFEEDGVRFQSHVDGSYHKFTPESVIDIQRSIRSDIMMVLDDCAPYGSSTERLELALDRTHRWAKNSIEYWQKDPQNQNLFCIVQGGTEESLRLKSLTELQAMDFPGIAIGGLSVGEPRKEFQKTIQFLAPHMAVNKPHYLMGVGTVPDILESVKQGIDMFDCVLPTRNARNGQVFTSRGKINLRNESHRLSTAPIDPNCKCKVCQTYSLGYIRHLHKVKELTAFSLSTYHNLYFMYQFMAELRASLSANEFPQFYAHWKKLYGV

SEQ ID NO: 56904 - protein, 663 aa, unidentified
  source 1..663: note = Leptospira ryugenii
  REGION 1..663: note = tr|A0A2P2DYG3|A0A2P2DYG3_9LEPT Queuine tRNA-ribosyltransferase OS=Leptospira ryugenii OX=1917863; GN = tgt PE=3 SV=1
MRISNFTLEKIATGSRARATSFETMHGKVQTPIFMPVGTQATVKTLNVETLKNVGSNVLLANTYHLFIRPGKEVFDHCGGIHSFMNWDRPVLTDSGGFQIFSLPNARKITEEGARFRSYLDGKEILLSPEVSIQMQRSIGSDIMMVLDECVPSTVSHSEAKRAMELTHRWAKRSLKAREDSKQALFAIVQGACFEDLRKESAKVLLDMSFDGYAIGGLAVGETREEREHFAEFVADLLPREKPRYLMGVGTPLDLLEAVHRGVDLFDCTIPVELAQRGVAFTSQGKIQIHRSRYRFANESLDVECACRTCKHYSKAYLHHLIKASEVLGWQLLAEHNLVYYHNLMSDMRSAILNGTFLSYYANKKEEVLQSDNTNASFSRIIGKKEKKLSLGNYFLLENVEKHIFSIQHTVSGEVMHSIHSPDEEANALYIRHSQLENRLREGKEREIVVWDVGLGAAHNAMAALLLSKQEDLGKLSVESFENDLDPLRLALRHQGRFPHLFHKAPKQLLESGIFIGENVEWKLHLGNIQDTFQKAKLPDVIFYDPFSYKTNAELWDFSWFLQLNRYLKGANKQIQLLTYSQSTLVRSALLAAGFYVCKAETLGENRECTIAYTRKEPMISGQILGEEWLGRWKRSDAKYPNSYQNRKEEWERLVLSHPQFTE

SEQ ID NO: 56905 - protein, 379 aa, unidentified
  source 1..379: note = Leptospira saintgironsiae
  REGION 1..379: note = tr|A0A2M9YC24|A0A2M9YC24_9LEPT Queuine tRNA-ribosyltransferase OS=Leptospira saintgironsiae; OX = 2023183 GN=tgt PE=3 SV=1
MSEQKMIYRSRVSDTHSFARTGTLSLNGIEIPTPVFMPVGTRGAVKSLDSDDIDELGYELILGNTYHLYLRPGTEVLEKFGGLKNFVSYKKALLTDSGGFQVFSLNSLVKFKQEGVEFRSHIDGSPHFFTPQKVIDIQRAIGSDIMMVLDDCPPGDGTVSRIKDALDRTHRWAEEAVNYWEKDKRNQFLFGIFQGGTNLDLRLESLDKIRSLPFSGIAIGGLSVGEPRPDFIRTMEGISSYTDRTRPLYLMGVGTVPDILEGVRNGVDMFDCVLPTRNARNGQVFTSQGKVNLRNEKWKLREEPMDPECECKVCKRYSIGYIRHLHHVKELSAFSLSTYHNLHFMKKFMKELRHSIEVGNFSEFFVKWKNLYERPEISR

SEQ ID NO: 56906 - protein, 374 aa, Leptospira santarosai
  REGION 1..374: note = tr|A0A0E2BKN5|A0A0E2BKN5_9LEPT Queuine tRNA-ribosyltransferase OS=Leptospira santarosai str. MOR084 OX=1049984 GN=tgt PE=3 SV=1
MIFQTTSEDPRTKARTGILNLNGTELETPVFMPVGTRGVVKTLSTEDLEELEYSLILGNTYHLYLRPGTSVLERFGGLKKFSTWKRALLTDSGGYQVFSLNSLFKYEQDGVRFQSHIDGSRHYFTPNSVIDIQRSIGSDIMMVLDDCAPFDSGPERLRQSLDRTHLWAEMSVEYWEKNKNSQHLFGIFQGGVDLGFRLESLQKIVSLPFDGIAIGGLSVGEPRQDFIRILEGISAYTDRSRPLYLMGVGTVPDILDGVKNGVDMFDCVLPTRNARNGQVFTSLGKINLRNEKWKSSDAPIDPHCGCKVCKRYSIGYIRHLHHVGEITAFSLSTYHNLYFMKNFLSEIQKSIQAGEFLKIYAKWKNLYEKPEFSG

SEQ ID NO: 56907 - protein, 374 aa, Leptospira santarosai
  REGION 1..374: note = tr|A0A2P1QQH6|A0A2P1QQH6_9LEPT Queuine tRNA-ribosyltransferase OS=Leptospira santarosai OX=28183; GN = tgt PE=3 SV=1
MIFQTTSEDPRTKARTGILNLNGTELETPVFMPVGTRGVVKTLSTEDLEELEYSLILGNTYHLYLRPGTSVLERFGGLKKFSTWKRALLTDSGGYQVFSLNSLFKYEQDGVRFQSHIDGSRHYFTPNSVIDIQRSIGSDIMMVLDDCAPFDSGPERLRQSLDRTHLWAEMSVEYWEKNKNSQHLFGIFQGGIDLGFRLESLQKIVSLPFDGIAIGGLSVGEPRQDFIRILEGISAYTDRSRPLYLMGVGTVPDILDGVKNGVDMFDCVLPTRNARNGQVFTSLGKINLRNEKWKSSDAPIDPHCGCKVCKRYSIGYIRHLHHIGEITAFSLSTYHNLYFMKNFLSEIQKSIRAGEFLKIYAKWKNLYEKPEFSG

SEQ ID NO: 56908 - protein, 379 aa, unidentified
  source 1..379: note = Leptospira sarikeiensis
  REGION 1..379: note = tr|A0A4R9KC81|A0A4R9KC81_9LEPT Queuine tRNA-ribosyltransferase OS=Leptospira sarikeiensis; OX = 2484943 GN=tgt PE=3 SV=1
MFEQKMIFRSKVEDPNSFARTGTLNLNGIEIPTPVFMPVGTRGAVKSLDSDDLDELGYELILGNTYHLYLRPGVEVLEKFGGLKNFVSYKKSLLTDSGGFQVFSLNSLVKFKKEGVEFRSHIDGSPHFFTPKKVVDIQRTIGSDIMMVLDDCPPGDASSARIKEALDRTHRWAEEAVDYWEKDKRSQHLFGIFQGGTNLELRLESLEKIRSLPFSGIAIGGLSVGEPRPDFIRTMEGISSYTDRTRPLYLMGVGTVPDILEGVRNGVDMFDCVLPTRNARNGQVFTSRGKVNLRNEKWKLSDEPMDPECKCKVCKRYSVGYIRHLHHVKELSAFSLSTYHNLHFMKKFMKQLRHSIEVGNFSEFFVKWKNLYERAEISR

SEQ ID NO: 56909 - protein, 379 aa, unidentified
  source 1..379: note = Leptospira selangorensis
  REGION 1..379: note = tr|A0A5F2BX00|A0A5F2BX00_9LEPT Queuine tRNA-ribosyltransferase OS=Leptospira selangorensis; OX = 2484982 GN=tgt PE=3 SV=1
MSEQKMIYRSRVEDPNSFARTGTLSLNGIEIPTPVFMPVGTRGAVKSLDSDDIDELGYELILGNTYHLYLRPGTEVLEKFGGLKNFVSYKKALLTDSGGFQVFSLNSLVKFKKEGVEFRSHIDGSPHFFTPQKVIDIQRAIGSDIMMVLDDCPPGDGTVSRIKDALDRTHRWAEEAVNYWVKDKRNQFLFGIFQGGTNLDLRLESLEKIRSLPFSGIAIGGLSVGEPRPDFIRTMEGISSYTDRTRPLYLMGVGTVPDILEGVRNGVDMFDCVLPTRNARNGQVFTSQGKVNLRNEKWKLLDAPMDPECECKVCKRYSIGYIRHLHHVKELSAFSLSTYHNLYFMKKFMKELRHSIEVGNFSEFFVKWKNLYERPEISR

SEQ ID NO: 56910 - protein, 379 aa, unidentified
  source 1..379: note = Leptospira selangorensis
  REGION 1..379: note = tr|A0A4R9G2W5|A0A4R9G2W5_9LEPT Queuine tRNA-ribosyltransferase OS=Leptospira selangorensis; OX = 2484982 GN=tgt PE=3 SV=1
MSEQKMIYRSRVEDPNSFARTGTLSLNGIEIPTPVFMPVGTRGAVKSLDSDDIDELGYELILGNTYHLYLRPGTEVLEKFGGLKNFVSYKKALLTDSGGFQVFSLNSLVKFKKEGVEFRSHIDGSPHFFTPQKVIDIQRAIGSDIMMVLDDCPPGDGTVSRIKDALDRTHRWAEEAVNYWAKDKRNQFLFGIFQGGTNLDLRLESLEKIRSLPFSGIAIGGLSVGEPRPDFIRTMEGISSYTDRTRPLYLMGVGTVPDILEGVRNGVDMFDCVLPTRNARNGQVFTSQGKVNLRNEKWKLLDAPMDPECECKVCKRYSIGYIRHLHHVKELSAFSLSTYHNLYFMKKFMKELRHSIEVGNFSEFFVKWKNLYERPEISR

SEQ ID NO: 56911 - protein, 379 aa, unidentified
  source 1..379: note = Leptospira semungkisensis
  REGION 1..379: note = tr|A0A4R9G1W6|A0A4R9G1W6_9LEPT Queuine tRNA-ribosyltransferase OS=Leptospira semungkisensis; OX = 2484985 GN=tgt PE=3 SV=1
MSQQKMIFRPGISDPNSHARTGSLDLNGIEIPTPVFMPVGTRGAVKSLDSDDLDELGFELILGNTYHLYLRPGMDVLQKFGGLKNFVSYNKALLTDSGGFQVFSLNSLVKFKKEGVEFRSHIDGSPHFFTPEKVIDIQRAIGSDIMMVLDDCPPGDADTARIKESLDRTHRWAEAAVSYWEKDKGKQNLFGIFQGGTNLDLRLESLSKIASLPFSGIAIGGLSVGEPRPDFIRTMEGIAPHTDKSRPLYLMGVGTVPDILEGVRNGVDMFDCVLPTRNARNGQVFTSRGKMNLRNEKWKFSDEPMDPECECRVCKRYSVGYIRHLHHVKELSAFSLSTYHNLSFMKKFMKELRLSIEVGKFSEFFFKWKNLYERPEISR

SEQ ID NO: 56912 - protein, 374 aa, Leptospira sp.; identical to SEQ ID NO: 56906
  REGION 1..374: note = tr|M5UR04|M5UR04_9LEPT Queuine tRNA-ribosyltransferase OS=Leptospira sp. Fiocruz LV4135; OX = 1193013 GN=tgt PE=3 SV=1

SEQ ID NO: 56913 - protein, 371 aa, Leptospira sp.
  REGION 1..371: note = tr|A0A2M8HL27|A0A2M8HL27_9LEPT Queuine tRNA-ribosyltransferase OS=Leptospira sp. OX=178 GN=tgt; PE = 3 SV=1
MIFKEKNRISSGYARTGTLEVAGQTIETPIFMPVGTQGTIKALSTEDISELGYQLILSNTYHLYLRPGTEVLDHFGGIKKMMGYPKAMLTDSGGYQVFSLASLFKFFHDGVKFQSHIDGSHHTFTPAKVLDIQNSIGSDIWMVLDDCAPFDSNSKRIKESLDRTHRWAEDSVKHWQEKEYSSKLFGISQGAFDLDSRKFSLEKIQSLPFSGIAIGGLSVGEPREWFIKVIESLAPFMDPLRPHYLMGVGTVPDILDGVRNGIDMFDCVLPTRNARNAQVFTRKGKLNLRNEKFKFSDAKIDEHCTCKVCQNYSLGYLRHLHKAKEILALQLSTFHNLQFMKDFMEMIRNSINTGEFLEFSTEWKNLYNSSN

SEQ ID NO: 56914 - protein, 374 aa, unidentified
  source 1..374: note = Leptospira stimsonii
  REGION 1..374: note = tr|A0A5E8TIC0|A0A5E8TIC0_9LEPT Queuine tRNA-ribosyltransferase OS=Leptospira stimsonii OX=2202203; GN = tgt PE=3 SV=1
MIFKTTSEDPNTRARTGILDLNGVKLNTPVFMPVGTRGVVKTLDTEDLEELEYSLILGNTYHLYLRPGTSVLDQFGGLKKFMTWKGALLTDSGGYQVFSLNSLFKYETDGVRFQSHIDGSRHYFTPGSVIDVQRSIGSDIMMVLDDCAPFDSSPERLRQSLERTHRWAEMSVEHWEKKKNSQHLFGIFQGGIDLDSRLESLKAIVSLPFDGIAIGGLSVGEPRKDFIRILNGISSHTDRSRPLYLMGVGTVPDILDGVKNGVDMFDCVLPTRNARNGQVFTSLGKVNLRNEKWKNSDAPMDPNCQCKVCKRYSIGYIRHLHHVGEITAFSLSTFHNLFFMKNFLSEIQNSIQAGEFLETYARWKNLYEKPEFSG

SEQ ID NO: 56915 - protein, 679 aa, unidentified
  source 1..679: note = Leptospira stimsonii
  REGION 1..679: note = tr|A0A396Z4R1|A0A396Z4R1_9LEPT Queuine tRNA-ribosyltransferase OS=Leptospira stimsonii OX=2202203; GN = tgt PE=3 SV=1
MSRLNFVLEAEAPQTSARATTFTTLHGQVQTPIFMPVGTQATVRAQTVDSLKAMGSRVLLANTYHLLLRPGAEVFRKIGGIHKFMNWDFPVLTDSGGFQIFSLPNSRKMTEEGALFRSYVDGKMILLSPELSIDMQKAIGSDIMMVLDQCIPSTADYAKAKDAMEITHRWAKRSLDARGDSPQSLFGIVQGACFSDLRKESAKVLTQMPFDGFAIGGLAVGETKEERNDFCELSASLLPKNLPRYLMGVGTPIDLLEAVHRGVDMFDCTIPTELAQHGVAYTSAGKLQIHRTIYKFADSKLDENCDCPCCQNYSRSYLHHLIKTSEILGWHLIAQHNLNFYHRLMAEMRARIFEGSFASYYARKKEELTRSDNVDPSLNKKRTPKAQRKRILGDYEIRENKEGKYWSVRLRSSGETMHSVNNPSEEAKSLYVVQTKLSEKLSGRTDSVKQESTNPFVIWDVGLGAATNSMAAIRCYEEIDSPVPMNMISFECDLDPFRLAMRNIGCFPHLFHTAPRSILEKGNWTSPSGTLGWDLVIGNFENTFLSQKIPDLVFYDPFSFKTDSKLWQPEFLKRLFLFFQDHSKNTMFVTYSASTAVRSSLLFAGFWVGKGKGSGPKSETTIAFTKRPENVEESTQLLGADWLGRRERSHARFREEWDETKNRIWEETILSHPQFLFSP

SEQ ID NO: 56916 - protein, 371 aa, unidentified
  source 1..371: note = Leptospira terpstrae
  REGION 1..371: note = tr|N1VXY0|N1VXY0_9LEPT Queuine tRNA-ribosyltransferase OS=Leptospira terpstrae serovar Hualin str. LT 11-33 = ATCC 700639 OX=1257025 GN=tgt PE=3; SV = 1
MPSIFKERSKDAGSFARTGTLHLNGIQIETPIFMPVGTRGSIKSLSSADIDELGYNLILANTYHLYLKPGKEVLDHFHGLKKFMSYKRALLTDSGGFQVFSLASLFKFEEDGVRFQSHIDGSHHKFTPASVIDMQRSIGSDIMMVLDDCAPYGSDLGRLELALDRTHRWAKESYEYWMEKPNGQNVFPIVQGGVNESLRKRSLDTLQNIDFPGIAIGGLSVGEPRPEYIRILECMAPYFDQARPRYLMGVGTVVDILEGVKNGVDMFDCVLPTRNARNGQVFTSFGKLNLRNEIHRLADGPIDPECGCKVCTTYSLGYIRHLHKVKELTAFSLSTYHNLYFMQSFMEKMRKSIEIGNFQGFYDHWKNLFGS

SEQ ID NO: 56917 - protein, 374 aa, unidentified
  source 1..374: note = Leptospira tipperaryensis
  REGION 1..374: note = tr|A0A1D7UYU8|A0A1D7UYU8_9LEPT Queuine tRNA-ribosyltransferase OS=Leptospira tipperaryensis; OX = 2564040 GN=tgt PE=3 SV=1
MIFRTTSEDSKTRARTGILDLNGVKLNTPVFMPVGTRGVVKTLNTEDLEELEYSLILGNTYHLYLRPGTSVLDQFGGLKKFMTWKGALLTDSGGYQVFSLNSLFKYETDGVRFQSHIDGSRHYFTPGSVIDVQRSIGSDIMMVLDDCAPFDSSPERLRQSLDRTHRWAEMSVEHWEKNKNSQHLFGIFQGGIDLDSRLESLKAIASLPFDGIAIGGLSVGEPRKDFIRILDGISSHTDRSRPLYLMGVGTVPDILDGVKNGVDMFDCVLPTRNARNGQVFTSLGKVNLRNEKWKNSDAPMDPNCQCKVCKRYSIGYIRHLHHVGEITAFSLSTFHNLFFMKNFLSEIQKSIQAGEFLETYARWKNLYEKPEFSG

SEQ ID NO: 56918 - protein, 675 aa, unidentified
  source 1..675: note = Leptospira tipperaryensis
  REGION 1..675: note = tr|A0A1D7UX00|A0A1D7UX00_9LEPT Queuine tRNA-ribosyltransferase OS=Leptospira tipperaryensis; OX = 2564040 GN=tgt PE=3 SV=1
MSRLNFLLEAEAPHSNARAATFTTLHGKVQTPIFMPVGTQATVRAQTVDSLKAMGSRVLLANTYHLLLRPGAEVFRKMGGIHKFMNWDFPVLTDSGGFQIFSLPNSRKMTEEGALFRSYVDGKMILLSPELSIDMQRAIGSDIMMVLDQCIPSTADYAKAKDAMEITHRWAKRSLDARGDSSQSMFGIVQGACFPDLRKESAKALTQMSFDGFAIGGLAVGETKEERNDFCELSASLLPKHLPRYLMGVGTPIDLLEAVHRGVDMFDCTIPTELAQHGVAYTSAGKLQLHRTIYKFEESKLDENCECPCCQNYSRSYLHHLIKTSEILGWHLIAMHNLNFYHRLMAEMRARIFEGNFASYYSQKKEELTRSDNVDPSLHKKRTPKAQRKRILGDYEIRENKEGKYWSVRQRSSGETMHSVNNPSQEAKSLYIVQSKLSEKLSVDSSLSKNSRPFVIWDVGLGAATNSMAAIQCYEEVDSPVPMNMISFECDLDPFRLAMRNIGCFPHLFHKAPRSILDKGNWTSPFGGLTWNLVLGDFAETFREEQTPDLIFYDPFSFKTDSKLWEPEFLKELFTFFQNDSKNTMLVTYSASTAVRSSLLYAGFWVGRGKGTGPKSETTVAYTKRPQNPDEFSQLLGAEWLGRRERSHARYRIEWNEEENKIWEESILSHSQFQI

SEQ ID NO: 56919 - protein, 371 aa, unidentified
  source 1..371: note = Leptospira vanthielii
  REGION 1..371: note = tr|N1WEV5|N1WEV5_9LEPT Queuine tRNA-ribosyltransferase OS=Leptospira vanthielii serovar Holland str. Waz Holland = ATCC 700522 OX=1218591 GN=tgt; PE = 3 SV=1
MFSIFKERSKDSGSYARTGTLLLNGVQIETPIFMPVGTRGSIKSLSSSDIDELGYNLILANTYHLYLKPGKEVLDHFHGLKNFMSYKRALLTDSGGFQVFSLASLFKFEEDGVRFQSHIDGSHHKFTPASVIDMQRSIGSDIMMVLDDCAPYGSDLKRLELALDRTHRWAKESYEYWMERPNGQNVFPIVQGGVNESLRKRSLDTLQNINFPGIAIGGLSVGEPRPEYIRILECMAPYFDQARPRYLMGVGTVVDILEGVKNGVDMFDCVLPTRNARNGQVFTSFGKLNLRNEVHRLADGPIDPECGCKVCKTYSLGYIRHLHKVKELTAFSLSTYHNLYFMQSFMERMRKAIEIGNFKGFYDHWKNLFGS

SEQ ID NO: 56920 - protein, 371 aa, unidentified
  source 1..371: note = Leptospira vanthielii
  REGION 1..371: note = tr|A0A4R9LJR8|A0A4R9LJR8_9LEPT Queuine tRNA-ribosyltransferase OS=Leptospira vanthielii OX=293085; GN = tgt PE=3 SV=1
MFSIFKERSKDSGSYARTGTLLLNGVQIETPIFMPVGTRGSIKSLSSSDIDELGYNLILANTYHLYLKPGKEVLDHFHGLKNFMSYKRALLTDSGGFQVFSLASLFKFEEDGVRFQSHIDGSHHKFTPASVIDMQRSIGSDIMMVLDDCAPYGSDLKRLELALDRTHRWAKESYEYWMERPNGQNVFPIVQGGVNESLRKRSLDTLQNINFPGIAIGGLSVGEPRPEYIRILECMAPYFDQARPRYLMGVGTVVDILEGVKNGVDMFDCVLPTRNARNGQVFTSFGKLNLRNEVHRLADGPIDPECGCKVCTTYSLGYIRHLHKVKELTAFSLSTYHNLYFMQSFMERMRKAIEIGNFKGFYDHWKNLFGS

SEQ ID NO: 56921 - protein, 374 aa, Leptospira weilii
  REGION 1..374: note = tr|M6G512|M6G512_9LEPT Queuine tRNA-ribosyltransferase OS=Leptospira weilii str. 2006001855 OX=996804 GN=tgt PE=3 SV=1
MIFQTTSEDPRTRARTGILNLNGVTLETPVFMPVGTRGVVKTLSTDDLEELEYSLILGNTYHLYLRPGTSVLESFGGLKKFSTWKRALLTDSGGYQVFSLNSLFKYEQDGVRFQSHIDGSRHYFTPNSVIDIQRSIGSDIMMVLDDCAPFDSSPERLRQSLDRTHRWAEMSVEYWEKNKNSSHLFGIFQGGIDLGLRLESLRKIASLPFDGIAIGGLSVGEPRKDFIRILEGVSDSTDRNRPLYLMGVGTVPDILDGVKNGVDMFDCVLPTRNARNGQVFTSLGKINLRNEKWKSSDAPMDPHCGCKVCKRYSIGYIRHLHHVGEITAFSLSTYHNLYFMKNFLSEIQKSIRAGEFLKIYAKWKNLYEKPEFSG

SEQ ID NO: 56922 - protein, 374 aa, Leptospira weilii
  REGION 1..374: note = tr|M3GE42|M3GE42_9LEPT Queuine tRNA-ribosyltransferase OS=Leptospira weilii serovar Topaz str. LT2116 OX=1088540 GN=tgt PE=3 SV=1
MIFQTTSEDLRTRARTGILNLNGVTLETPVFMPVGTRGVVKTLSTDDLEELEYSLILGNTYHLYLRPGTSVLESFGGLKKFSTWKRALLTDSGGYQVFSLNSLFKYEQDGVRFQSHIDGSRHYFTPNSVIDIQRSIGSDIMMVLDDCAPFDSSPERLRQSLDRTHQWAEMSVEYWEKNKNSSHLFGIFQGGIDLGLRLESLQKIVSLPFDGIAIGGLSVGEPRKDFIRILEGISDYTDRNRPLYLMGVGTVPDILDGVKNGVDMFDCVLPTRNARNGQVFTSLGKINLRNEKWKSSDAPMDPHCGCKVCKRYSIGYIRHLHHVGEITAFSLSTYHNLYFMKNFLSEIQKSIQAGEFLKIYAKWKNLYEKPEFSG

SEQ ID NO: 56923 - protein, 371 aa, Leptospira wolbachii
  REGION 1..371: note = tr|R9A5T1|R9A5T1_9LEPT Queuine tRNA-ribosyltransferase OS=Leptospira wolbachii serovar Codice str. CDC OX=1218599 GN=tgt PE=3 SV=1
MSSIFKERSKDPGSFARTGTLLLNGIQIETPIFMPVGTRGSVKSLSSADIDELGYNLILANTYHLYLKPGKEVLDHFHGLKNFMSYKRALLTDSGGFQVFSLASLFKFEEDGVRFQSHIDGSHHKFTPASVIEMQRSIGSDIMMVLDDCAPYGSDLGRLELALDRTHRWAKESFEYWMEKPNGQNVFPIVQGGVNESLRKRSLDTLQNINFPGIAIGGLSVGEPRPEYIRILECMAPYFDQARPRYLMGVGTVVDILEGVKNGVDMFDCVLPTRNARNGQVFTSFGKLNLRNEIHRLADGPIDPECGCKVCKTYSLGYIRHLHKVKELTAFSLSTYHNLYFMQSFMERMRKSIEIGNFKGFYDHWKNLFGS

SEQ ID NO: 56924 - protein, 374 aa, Leptospira wolffii
  REGION 1..374: note = tr|A0A2M9Z854|A0A2M9Z854_9LEPT Queuine tRNA-ribosyltransferase OS=Leptospira wolffii OX=409998; GN = tgt PE=3 SV=1
MIFRSGVQDPGSYARTGTLYLNGIEIPTPVFMPVGTRGAIKSLDSDDIDELGFELILGNTYHLYLRPGVEVLRKFGGLKNFVSYKKALLTDSGGFQVFSLNSLVKFRQEGVEFRSHIDGSPHFFTPEKVIDIQREIGSDIMMVLDDCPPGDGDIARVKQALDRTHRWAEIAVDYWQKDTRGQNLFGIFQGGTNLELRLESLEKIRSLPFSGIAIGGLSVGEPRPDFVRTMEGIAPHTDRSRPLYLMGVGTVPDILDGVRNGVDMFDCVLPTRNARNGQVFTSRGKVNLRNEKWKFSDEPMDPECDCRVCKRYSIGYIRHLHHVKELSAFSLSTYHNLSFMKKFMTDLRESISAGTFSEFFAKWKNLYETAEISR

SEQ ID NO: 56925 - protein, 374 aa, Leptospira wolffii
  REGION 1..374: note = tr|A0A5F1YJQ5|A0A5F1YJQ5_9LEPT Queuine tRNA-ribosyltransferase OS=Leptospira wolffii OX=409998; GN = tgt PE=3 SV=1
MIFRSGVQDPGSYARTGTLYLNGIEIPTPVFMPVGTRGAIKSLDSDDIDELGFELILGNTYHLYLRPGVEVLRKFGGLKNFVSYKKALLTDSGGFQVFSLNSLVKFRREGVEFRSHIDGSPHFFTPEKVIDIQREIGSDIMMVLDDCPPGDGDIARVKQALDRTHRWAEIAVDYWQKDTRGQNLFGIFQGGTNLELRLESLEKIRSLPFSGIAIGGLSVGEPRPDFVRTMEGIAPHTDRSRPLYLMGVGTVPDILDGVRNGVDMFDCVLPTRNARNGQVFTSRGKVNLRNEKWKFSDEPMDPECDCRVCKRYSIGYIRHLHHVKELSAFSLSTYHNLSFMKKFMTDLRESISAGTFSEFFAKWKNLYETAEISR

SEQ ID NO: 56926 - protein, 371 aa, unidentified
  source 1..371: note = Leptospira yanagawae
  REGION 1..371: note = tr|A0A5E8H8S2|A0A5E8H8S2_9LEPT Queuine tRNA-ribosyltransferase OS=Leptospira yanagawae serovar Saopaulo str. Sao Paulo = ATCC 700523 OX=1249483 GN=tgt; PE = 3 SV=1
MPSIFKEGTYDQGSYARTGTLSLNGIQIETPIFMPVGTRGSVKSLTSEDINELGYNLILANTYHLYLKPGKEVFDHFHGLKNFMSYKKALLTDSGGFQVFSLASLFKFEDDGVRFQSHIDGSYHKFTPSSVIDMQRSIGSDIMMVLDDCAPYGSDTKRLELALDRTHRWAKESYEYWMENPNGQNVFPIVQGGVNEALRLRSLETLQKIDFPGIAIGGLSVGEPRPEYIRILECMAPHLDKSRPRYLMGVGTVVDILEGVKNGIDMFDCVLPTRNARNGQVFTSKGKINLRNESHRLSESPIDSECSCKVCQTYSLGYIRHLHKVKELTAFSLSTYHNLFFMQSFMEKMRKSIEIGNFQAFYEHWKNLFGS

SEQ ID NO: 56927 - protein, 371 aa, unidentified; identical to SEQ ID NO: 56926
  source 1..371: note = Leptospira yanagawae
  REGION 1..371: note = tr|A0A4R9IZA1|A0A4R9IZA1_9LEPT Queuine tRNA-ribosyltransferase OS=Leptospira yanagawae OX=293069; GN = tgt PE=3 SV=1

SEQ ID NO: 56928 - protein, 374 aa, unidentified
  source 1..374: note = Leptospira yasudae
  REGION 1..374: note = tr|A0A418A3T1|A0A418A3T1_9LEPT Queuine tRNA-ribosyltransferase OS=Leptospira yasudae OX=2202201; GN = tgt PE=3 SV=1
MIFKTLSEDSKTRARTGILNLNGVELETPVFMPVGTRGVVKTLTMDDLEELEYSLILGNTYHLYLRPGTDVLDKFGGLKKFSTWKKALLTDSGGYQVFSLNSLFKYEQDGVRFQSHIDGSRHYFTPSSVIDIQRSIGSDIMMVLDDCAPFDSSPERLRQSLDRTHRWAEMSVEYWEKRKNSQHLFGIFQGGIDLDFRLESLQAITSLPFDGVAIGGLSVGEPRKDFIRILEGISKYTDRNRPLYLMGVGTVPDILDGVKNGVDMFDCVLPTRNARNGQVFTSLGKINLRNEKWKNSDAPMDPNCGCKVCKRYSIGYIRHLHHVGEITAFSLSTYHNLYFMKSFLAEIRKSIQAGEFLETYARWKNLYEKPEFSG

SEQ ID NO: 56929 - protein, 374 aa, unidentified
  source 1..374: note = Leptospiraceae bacterium
  REGION 1..374: note = tr|A0A2E5S6F9|A0A2E5S6F9_9LEPT Queuine tRNA-ribosyltransferase OS=Leptospiraceae bacterium; OX = 2026757 GN=tgt PE=3 SV=1
MSLEFQELDRDPQSLARTGEMKLAGIKVQTPMFMPVGTQAAVKTLDSYDLEDMGYELILANTYHLYLRPGEVIRSFGGVKRFMDWKGALLTDSGGFQVFSLAAMRKFVTGGVEFQSHIDGSKHLFTPERVLDIQGMLGSDIMMVLDDCPPGDADSTRLEDSLDRTHRWARQSVEYYRQGQEQGRFQNQNLFGIAQGGIDEKLRSESLSMIQALPFAGVAIGGLSVGESREDFYRVLHHLGPELDEKRPRYLMGVGTIPDFLEAIRCGVDLFDCVLPTRNARHGIAYTRQGKLNLRNAIHTESQEPLDTECQCRACRRFSRGYVRHLLRAGEITALRLLSIHNLQFFFDFFVMARQSIQKGQFMSFYEGWKKIGF

SEQ ID NO: 56930 - protein, 374 aa, unidentified
  source 1..374: note = Leptospiraceae bacterium
  REGION 1..374: note = tr|A0A357IW73|A0A357IW73_9LEPT Queuine tRNA-ribosyltransferase OS=Leptospiraceae bacterium; OX = 2026757 GN=tgt PE=3 SV=1
MSLTFEQLDRDPECLARTGKMNLAGIQVQTPMFMPVGTQAAVKTLDSYDLEDMGYELILANTYHLYLRPGEIIRSFGGVKRFMDWKGAILTDSGGFQVFSLAAMRKFVTGGVEFQSHIDGSRHLFTPERVLDIQGMLGSDIMMVLDDCPPGDADGHRLAESLNRTHRWAEQSIEYFHAGLEQGRFQNQNLFGIAQGGTSESLRSESVATIQSLPFAGIAIGGLSVGETREDFYRVLHHIGPELDQNRPRYLMGVGTIPDFLEAIRCGVDLFDCVLPTRNARHGIAYTRQGKLNLRNAIHSESQEPLDTECQCRACRRFSRGYIRHLLRAGEITALRLLTIHNLQFFFDFFVMARHAIQKGQFMSFYEGWKKIGF

SEQ ID NO: 56931 - protein, 378 aa, Leptospirillum ferriphilum
  REGION 1..378: note = tr|A0A094WB29|A0A094WB29_9BACT Queuine tRNA-ribosyltransferase OS=Leptospirillum ferriphilum; OX = 178606 GN=tgt PE=3 SV=1
MKFHLETADPFSKARTGCVDTRNGFFETPAFMPVATRGTIRGLTAGQVREAGAGILLVNLFHLWLRPGEKIVREAGGISSFMGWKGPVLADSGGYQIYSLSGSVKIREEGAFFQSPYDGRKVFLSPEDVVSVGSGMGIDLIMVLDHLVSPDSSPEVLREARDRTLRWAKRSLDVAPLDGALFGIVQGGCDIDARKWSAETLSSMTGPEGQTFSGFGIGGLGIGEPFEVRNRVVGETLGALPPEKPRYLMGIGYPEDLLTGIIQGVDLFDCVLPTRNGRNGMAFTSKGRLLIRNARFQKEDTPLDEECSCAACKSYSRSYIHHLFRNGEMLGPILNTIHNLTYYLDLMHQSRTRIREGTFNAWARQKIDSLQQTEREQS

SEQ ID NO: 56932 - protein, 378 aa, Leptospirillum ferriphilum
  REGION 1..378: note = tr|A0A1V3SU99|A0A1V3SU99_9BACT Queuine tRNA-ribosyltransferase OS=Leptospirillum ferriphilum; OX = 178606 GN=tgt PE=3 SV=1
MKFHLEKANPSSKARTGCIDTNNGSFETPAFMPVATRGTIRGLTAGQVREAGAGILLVNLFHLWLRPGEKIIREAGGISSFMGWNGPVLADSGGYQIYSLSGSVKIREEGAFFQSPYDGRKVFLSPEDVVSVGSGMGIDLIMVLDHLVSPDSPPDVLREARDRTLRWARRSLDVAPPDGALFGIVQGGCDTDARKWSAETLSFMTGREGQTFSGFGIGGLGIGESFEVRNRIVGETLDVLPREKPRYLMGIGYPEDLLAGIAQGVDLFDCVLPTRNGRNGMVFTSKGRLLIRNARFQEEDSPLDDGCSCAACKSYSRAYIHHLFRNGEMLGPILNTIHNLTYYLDLMQQSRIEIRQGTFNAWAQQKMDSLQQTEREQS

SEQ ID NO: 56933 - protein, 383 aa, unidentified
  source 1..383: note = Leptospirillum ferrodiazotrophum
  REGION 1..383: note = tr|C6HWB8|C6HWB8_9BACT Queuine tRNA-ribosyltransferase OS=Leptospirillum ferrodiazotrophum OX=412449 GN=tgt PE=3 SV=1
MTSFPFFQHISSDRSSLAREGVIRTRHGVVPTPAFMPVGTRGTVKGLTPDTLSACGAEIVLVNAFHLWLRPGTERVREAGGIGRMMGVDCPVLSDSGGYQIHSLETRRTVTEEGVSFLSPYDGAKVFLSPEISVAHSEALGVDIRMVLDDLAGAAAPPARIREAMERTHRWALRALNAWDPGTTAPLFGIIQGGVDRALREESARGLVSLVGSRGQSFSGFGIGGLGVGETVDERLSVLDATVPILPENRPRYLMGVGYPGDILEAVRRGVDLFDCVLPTRNARNGSYFTREGAIAIRNARFREDDRPIDSSCGCATCRRHSRAYLHHLVKNDEMTGAILGTIHNVSFYLEIMREIRARIRSGTLSGLDWPCFTTRHAIGGDS

SEQ ID NO: 56934 - protein, 380 aa, Leptospirillum ferrooxidans
  REGION 1..380: note = tr|I0INR0|I0INR0_LEPFC Queuine tRNA-ribosyltransferase OS=Leptospirillum ferrooxidans (strain C2-3) OX=1162668 GN=tgt PE=3 SV=1
MKWIESHPQTEGKPRTGSLHTEAGIVETPNFMPVGTRGSVRGLSSDVLSRAGTEILLVNLFHLWLRPGERILKGAGGIRPFMGWKGPVLSDSGGFQILSLKERRKVSEEGVHFQSPYDGSSVFLSPEEVVRFSEEIGVTIAMVLDHLVSPEEGTGKNREALERTLRWAKRSLDARESVEGEMALFGIVQGGLDPELRQFCARELSGMTGLSGTIFDGYGIGGLGIGETPEERVSLVAAAIEPLPRNKPRYLMGVGYPEDLIQAVGEGVDLFDCVLPTRNARNGMLFTRSGRLIIRNAKYGEDFGPIDETCSCQTCQSYSRAYLHHLFRTGEMLGPVLNTIHNVTFYLSLMKEMREQLVMGTFSRWKNHMLTHMNSRGNNE

SEQ ID NO: 56935 - protein, 378 aa, Leptospirillum sp.
  REGION 1..378: note = tr|A0A0K0WMK3|A0A0K0WMK3_9BACT Queuine tRNA-ribosyltransferase OS=Leptospirillum sp. Group II 'CF-1' OX=1660083 GN=tgt PE=3 SV=1
MKFHLEKANPSSKARTGCIDTNNGSFETPAFMPVATRGTIRGLTTNQVREAGAGILLVNLFHLWLRPGEKIIREAGGISSFMGWNGPVLADSGGYQIYSLSGSVKIREEGAFFQSPYDGRKVFLSPEDVVSVGSGMGIDLIMVLDHLVSPDSPPDVLREARDRTLRWARRSLDVAPPDGALFGIVQGGCDTDARKWSAETLSFMTGREGQMFSGFGIGGLGIGESFEVRNRIVGETLDVLSPEKPRYLMGIGYPEDLLAGIAQGVDLFDCVLPTRNGRNGMVFTSKGRLLIRNARFQEEDSPLDDGCSCAACKSYSRAYIHHLFRNGEMLGPILNTIHNLTYYLDLMQQSRIEIRQGTFNAWARQKMDSLQQTEREQS

SEQ ID NO: 56936 - protein, 378 aa, Leptospirillum sp.; identical to SEQ ID NO: 56931
  REGION 1..378: note = tr|B6ANM1|B6ANM1_9BACT Queuine tRNA-ribosyltransferase OS=Leptospirillum sp. Group II '5-way CG' OX=419541 GN=tgt PE=3 SV=1

SEQ ID NO: 56937 - protein, 390 aa, Leptothrix cholodnii
  REGION 1..390: note = sp|B1XWG6|TGT_LEPCP Queuine tRNA-ribosyltransferase; OS = Leptothrix cholodnii (strain ATCC 51168 / LMG 8142 / SP-6) OX=395495 GN=tgt PE=3 SV=1
MLNFDLLTTEGHARRGRLTLNHGVVETPIFMPVGTYGTVKGVMPRDLETMGAQIILGNTFHLWMRPGQDVMAQFGGLHRFENWTRPILTDSGGFQVWSLGEMRKISEEGVRFASPVNGDKLFLTPEVSMQIQTVLNSDIVMQFDECTPYWQGAKNVGHITTEKEARVSMELSLRWAARSKAEFARLGNPNALFGIVQGGMFESLREESLNALVELDFPGYAVGGVSVGEPKDEMLRIMNHTPHLLPADKPRYLMGVGTPEDLVDGVACGVDMFDCVMPTRNARNGHLFTRYGDLKIRNARHKADERPLDETCSCQACKGSTLPDGRVTGGFSRAYLHHLDRCGEMLGPMLASIHNLHYYLNLMREVREALDAGRFEAFRAQFKADRARGV

SEQ ID NO: 56938 - protein, 390 aa, Leptothrix mobilis
  REGION 1..390: note = tr|A0A4V2EX69|A0A4V2EX69_9BURK Queuine tRNA-ribosyltransferase OS=Leptothrix mobilis OX=47994; GN = tgt PE=3 SV=1
MLNFELLGTEGHARRGRLTLNHGVVETPIFMPVGTYGTVKGVMPRDLEAMGAQIILGNTFHLWMRPGLDVMAQFGGLHRFETWERPILTDSGGFQVWSLGDMRKISEEGVRFASPVNGDKLFLTPEVSMQIQTVLNSDIVMQFDECTPYWQGAKGVGHITTEKEARESMELSLRWAGRSQAEFARLANPNALFGIVQGGMFESLREASLAALVDLDLPGYAIGGVSVGEPKDEMLRIMGHTPHRLPAHKPRYLMGVGTPEDLVDGVACGVDMFDCVMPTRNARNGHLFTRYGDLKIRNARHKTDERPIDETCACHACAGSTDASGKTTGGFSRAYLHHLDRCGEMLGPMLASIHNLHYYLNLMREVRAALDEGRFEAFRAQFKADRARGV

SEQ ID NO: 56939 - protein, 393 aa, Leptotrichia buccalis
  REGION 1..393: note = tr|C7NBV1|C7NBV1_LEPBD Queuine tRNA-ribosyltransferase OS=Leptotrichia buccalis (strain ATCC 14201 / DSM 1135 / JCM 12969 / NCTC 10249 / C-1013-b); OX = 523794 GN=tgt P E=3 SV=1
MCIEKENKDFKNPIEYKLEKKDGNARAGVIKTPHGEIKTPVFMPVGTQATVKAMTREELEEINSQIILGNTYHLYLRPGDDLVNDFGGLHKFMRWDKPILTDSGGFQVFSLGDLRKIKEEGVHFRSHLDGSKHFLSPEKSISIQNNLGSDIMMVLDECPPGLSTREYLIPSIERTTRWAKRCIEANRNKDKQGLFAIVQGGIYEDLRDKSLEELYESDYGFAGYALGGLAVGEPREDMYRILKYITPKLPENKPRYLMGVGEPVDMLEAVEHGIDMMDCVQPTRIGRHGTVFTKYGRLVIKNAIYSRDDRPLDEGCDCYACKNYTRAYIRHLFKAGEILGQRLATYHNLHFLLKLMDNAREAIIDGKFKEYKEEVLRNYAMGKESEWIKPKSI

SEQ ID NO: 56940 - protein, 386 aa, Leptotrichia goodfellowii
  REGION 1..386: note = tr|D0GIQ0|D0GIQ0_9FUSO Queuine tRNA-ribosyltransferase OS=Leptotrichia goodfellowii F0264; OX = 596323 GN=tgt PE=3 SV=1
MSKFDNPVKYRLETTDGNARAGVIETPHGLIKTPVFMPVGTQATVKAMTREELEEINSQIILGNTYHLYLRPGDELINDFGGLHKFMNWDRPILTDSGGFQVFSLGDLRKIKEEGVHFSSHIDGSKHFLSPEKSISIQNNLSSDIMMVLDECPPGLSTREYMIPSVERTTRWAKRCIEANRNKDRQGLFAIVQGGIYEDLRDKSLNELTEMDEHFAGYAIGGLAVGEPREDMYRILKYITPKAPDNKPRYLMGVGEPLDMLEAVEHGIDMMDCVQPTRIGRHGTVFTKYGRLVIKNAAYSRDNRPLDECDCYVCKNYTRAYIRHLFKADEILGQRLATYHNLYFLLKLMEDARNAILEKRFKEFKEEFIKNYTMGKDSDWIKPFSI

SEQ ID NO: 56941 - protein, 386 aa, Leptotrichia goodfellowii
  REGION 1..386: note = tr|A0A510JAV9|A0A510JAV9_9FUSO Queuine tRNA-ribosyltransferase OS=Leptotrichia goodfellowii; OX = 157692 GN=tgt PE=3 SV=1
MSKFDNPVKYRLETTDGNARAGVIETPHGLIKTPVFMPVGTQATVKAMTREELEEINSQIILGNTYHLYLRPGDELINDFGGLHKFMNWDRPILTDSGGFQVFSLGDLRKIKEEGVHFSSHIDGSKHFLSPEKSISIQNNLGSDIMMVLDECPPGLSTREYMIPSVERTTRWAKRCIEANRNKDRQGLFAIVQGGIYEDLRDKSLNELTEMDEHFAGYAIGGLAVGEPREDMYRILKYITPKAPDNKPRYLMGVGEPLDMLEAVEHGIDMMDCVQPTRIGRHGTVFTKYGRLVIKNAAYSRDNRPLDECDCYVCKNYTRAYIRHLFKADEILGQRLATYHNLYFLLKLMEDARNAILEKRFKEFKEEFIKNYTMGKDSDWIKPFSI

SEQ ID NO: 56942 - protein, 393 aa, Leptotrichia hofstadii
  REGION 1..393: note = tr|A0A510JJW0|A0A510JJW0_9FUSO Queuine tRNA-ribosyltransferase OS=Leptotrichia hofstadii; OX = 157688 GN=tgt PE=3 SV=1
MCIEKENKDFKNPIEYKLEKKDGNARAGVIQTPHGEIKTPVFMPVGTQATVKAMTREELEEINSQIILGNTYHLYLRPGDDLVNDFGGLHKFMRWDKPILTDSGGFQVFSLGDLRKIKEEGVHFRSHLDGSKHFLSPEKSISIQNNLGSDIMMVLDECPPGLSTREYLIPSIERTTRWAKRCIEANRNKDKQGLFAIVQGGIYEDLRDKSFEELYEHDYGFAGYALGGLAVGEPREDMYRILKYSTPKLPENKPRYLMGVGEPVDMLEAVEHGIDMMDCVQPTRIGRHGTVFTKYGRLVIKNAIYSRDDRPLDEGCDCYACKNYTRAYIRHLFKAGEILGQRLATYHNLYFLLKLMDNAREAIIDGRFKEYKEEVLKNYAMGKESEWIKPKSI

SEQ ID NO: 56943 - protein, 351 aa, Leptotrichia hofstadii
  REGION 1..351: note = tr|C9MY25|C9MY25_9FUSO Queuine tRNA-ribosyltransferase OS=Leptotrichia hofstadii F0254; OX = 634994 GN=tgt PE=3 SV=1
MPVGTQATVKAMTREELEEINSQIILGNTYHLYLRPGDDLVNDFGGLHKFMRWDKPILTDSGGFQVFSLGDLRKIKEEGVHFRSHLDGSKHFLSPEKSISIQNNLGSDIMMVLDECPPGLSTREYLIPSIERTTRWAKRCIEANRNKDKQGLFAIVQGGIYEDLRDKSFEELYEYDYGFAGYALGGLAVGEPREDMYRILKYSTPKLPENKPRYLMGVGEPVDMLEAVEHGIDMMDCVQPTRIGRHGTVFTKYGRLVIKNAIYSRDDRPLDEGCDCYACKNYTRAYIRHLFKAGEILGQRLATYHNLHFLLKLMDNAREAIIDGRFKEYKEEVLKNYTMGKESEWIKPKSI

SEQ ID NO: 56944 - protein, 393 aa, Leptotrichia hongkongensis
  REGION 1..393: note = tr|A0A510LCB0|A0A510LCB0_9FUSO Queuine tRNA-ribosyltransferase OS=Leptotrichia hongkongensis; OX = 554406 GN=tgt PE=3 SV=1
MCIEKENKDFKNPIEYKLEKKDGNARAGVIKTPHGEIKTPVFMPVGTQATVKAMTREELEEINSQIILGNTYHLYLRPGDELVNDFGGLHKFMRWDKPILTDSGGFQVFSLGDLRKIKEEGVHFRSHLDGSKHFLSPEKSISIQNNLGSDIMMVLDECPPGLSTREYLIPSIERTTRWAKRCIEANRNKDRQGLFAIVQGGIYEDLRDKSFEELYEYDYGFAGYALGGLAVGEPREDMYRILKYSTPKLPENKPRYLMGVGEPVDMLEAVEHGIDMMDCVQPTRIGRHGTVFTKYGRLVIKNAIYSRDDRPLDEDCDCYACKNYTRAYIRHLFKAGEILGQRLATYHNLHFLLKLMDNAREAIIDGRFKEYKEEVLKNYAIGKESEWIKPKSI

SEQ ID NO: 56945 - protein, 393 aa, Leptotrichia shahii
  REGION 1..393: note = tr|A0A510JQP2|A0A510JQP2_9FUSO Queuine tRNA-ribosyltransferase OS=Leptotrichia shahii OX=157691; GN = tgt PE=3 SV=1
MSIEKENQDFNNPIKYKLEKSDGNARAGVITTPHGEIKTPVFMPVGTQATVKAMTKEELEEINSQIILGNTYHLYLRPGDELVNDFGGLHGFMKWDRPILTDSGGFQVFSLGDLRKIKEEGVYFRSHLDGSKHFLSPEKSISIQNNLGSDIMMVLDECPPGLSTREYLIPSIERTSRWAKRCIEANRNKDRQGLFAIVQGGIYEDLRDKSLEELHEADYGFAGYALGGLAVGEPREDMYRILKYITPKLPENKPRYLMGVGEPADMLEAVEHGIDMMDCVQPTRIGRHGTVFTKYGRLVIKNAIYSRDDRPLDEDCDCYACKNYTRAYIRHLFKAGEILGQRLATYHNLHFLLKLMDNAREAIIDGRFKEYKEEVLRNYAMGKESDWIKPKSI

SEQ ID NO: 56946 - protein, 391 aa, Leptotrichia sp.
  REGION 1..391: note = tr|U2RAB7|U2RAB7_9FUSO Queuine tRNA-ribosyltransferase OS=Leptotrichia sp. oral taxon 215 str. W9775 OX=1321779 GN=tgt PE=3 SV=1
MCNKNIEMTENPVKYRIEVKDGNARAGEIETPHGKIKTPVFMPVGTQATVKAMTREELEEINSQIILGNTYHLYLRPGDELVNDFGGLHKFMNWERPILTDSGGFQVFSLGDLRKIKEEGVYFRSHLDGSKHFLSPEKSIEIQNNLGSDIMMVLDECPPGLSTREYLLPSIERTTRWAKRCIEANRNKDRQGLFAIVQGGIYEDLRDKSMNELVEMDEGFAGYAVGGLAVGEPREDMYRILEYITPKLPENKPRYLMGVGEPLDMLEAVEDGIDMMDCVQPTRIGRHGTVFTKYGRLVIKNASYSRDDRPLDECDCYVCKNYTRAYIRHLFKAEEILGQRLATYHNLHFLLKLMNDARQAIIEQRFKEFKEEFEKNYNMGKESEWIKPKSI

SEQ ID NO: 56947 - protein, 403 aa, Leptotrichia sp.
  REGION 1..403: note = tr|U2Q789|U2Q789_9FUSO Queuine tRNA-ribosyltransferase OS=Leptotrichia sp. oral taxon 879 str. F0557 OX=1227268 GN=tgt PE=3 SV=1
MEFRNKIGDKMCIEKENKDFKNPIEYKLEKKDGNARAGVIKTPHGEIKTPIFMPVGTQATVKAMTREELEEINSQIILGNTYHLYLRPGDELVNDFGGLHKFMRWDKPILTDSGGFQVFSLGDLRKIKEEGVHFRSHLDGSKHFLSPEKSISIQNNLGSDIMMVLDECPPGLSTREYLIPSIERTTRWAKRCIEANRNKDRQGLFAIVQGGIYEDLRDKSFEELYEYDYGFAGYALGGLAVGEPREDMYRILKYSTPKLPENKPRYLMGVGEPVDMLEAVEHGIDMMDCVQPTRIGRHGTVFTKYGRLVIKNAIYSRDDRPLDEGCDCYACKNYTRAYIRHLFKAGEILGQRLATYHNLHFLLKLMDNAREAIIDGRFKEYKEEVLKNYAMGKESEWIKSKSI

SEQ ID NO: 56948 - protein, 393 aa, Leptotrichia trevisanii
  REGION 1..393: note = tr|A0A510KM77|A0A510KM77_9FUSO Queuine tRNA-ribosyltransferase OS=Leptotrichia trevisanii; OX = 109328 GN=tgt PE=3 SV=1
MCIEKENKDFKNPIEYKLEKKDGNARAGVIKTPHGEIKTPVFMPVGTQATVKAMTREELEEINSQIILGNTYHLYLRPGDDLVNDFGGLHKFMRWDKPILTDSGGFQVFSLGDLRKIKEEGVHFRSHIDGSKHFLSPEKSISIQNNLGSDIMMVLDECPPGLSTREYLIPSIERTTRWAKRCIEANRNKDKQGLFAIVQGGIYEDLRDKSFEELYEYDYGFAGYALGGLAVGEPREDMYRILKYSTPKLPENKPRYLMGVGEPADMLEAVEHGIDMMDCVQPTRIGRHGTVFTKYGRLVIKNASYSRDDRPLDEGCDCYACKHYTRAYIRHLFKAGEILGQRLATYHNLHFLLKLMDNAREAIIDGRFKEYKEEVLKNYAMGKESEWIKPKSI

SEQ ID NO: 56949 - protein, 393 aa, Leptotrichia wadei
  REGION 1..393: note = tr|A0A510KLM6|A0A510KLM6_9FUSO Queuine tRNA-ribosyltransferase OS=Leptotrichia wadei OX=157687; GN = tgt PE=3 SV=1
MSIENKNQDFNNPIKYKLEKSDGNARAGVITTPHGEIKTPVFMPVGTQATVKAMTKEELEEINSQIILGNTYHLYLRPGDELVNDFGGLHGFMRWDRPILTDSGGFQVFSLGDLRKIKEEGVYFRSHLDGSKHFLSPEKSISIQNNLGSDIMMVLDECPPGLSTREYLIPSIERTSRWAKRCIEANRNKDRQGLFAIVQGGIYEDLRDKSLEELYEADYGFAGYALGGLAVGEPREDMYRILKYITPKLPGNKPRYLMGVGEPADMLEAVEHGIDMMDCVQPTRIGRHGTVFTKYGRLVIKNAIYSRDDRPLDEDCDCYACKNYTRAYIRHLFKAGEILGQRLATYHNLHFLLKLMDNAREAIIDGRFKEYKEEVLKNYAMGKESEWIKPKSI

SEQ ID NO: 56950 - protein, 393 aa, Leptotrichia wadei
  REGION 1..393: note = tr|A0A510KZW7|A0A510KZW7_9FUSO Queuine tRNA-ribosyltransferase OS=Leptotrichia wadei OX=157687; GN = tgt PE=3 SV=1
MSIEKENQDFNNPIKYKLEKSDGNARAGVITTPHGEIKTPVFMPVGTQATVKAMTKEELEEINSQIILGNTYHLYLRPGDELVNDFGGLHGFMRWDRPILTDSGGFQVFSLGDLRKIKEEGVYFCSHLDGSKHFLSPEKSISIQNNLGSDIMMVLDECPPGLSTREYLIPSIERTSRWAKRCIEANRNKDRQGLFAIVQGGIYEDLRDKSLEELYEADYGFAGYALGGLAVGEPREDMYRILKYITPKLPENKPRYLMGVGEPADMLEAVEHGIDMMDCVQPTRIGRHGTVFTKYGRLVIKNAVYSRDDRPLDEDCDCYACRNYTRAYIRHLFKAGEILGQRLATYHNLHFLLKLMDNAREAIIDGRFKEYKEEVLKNYAMGKESDWIKPKSI

SEQ ID NO: 56951 - protein, 448 aa, Leucobacter chromiiresistens
  REGION 1..448: note = tr|A0A147EMF0|A0A147EMF0_9MICO Queuine tRNA-ribosyltransferase OS=Leucobacter chromiiresistens; OX = 1079994 GN=tgt PE=3 SV=1
MNDPAAPSSPPSPADFGFRVEHRLSSGGSAGSSGDPLGRTGTIRTPHGDIQTPAFIPVGTKATVKSLLPATVRELGGQAVLANAYHLFLQPGSDLVDEAGGLGAFMNWDGPTFTDSGGFQVMSLGVGFKKVISMAESAHSGSEVIAKNKERLAHVDEDGVTFKSFLNGDKHRFTPEVSMRIQHELGADIMFAFDECTTLLNTRAYQEDSVARTERWAVRCLDEHARQTTSRSHRPYQALFGVVQGAQYEDLRRSAAAGLAGLRGAEAADQEFDGFGIGGALEKRDLGTIVGWVSDELPDAKPRHLLGISEPDDLFAAIAAGADTFDCVAPSRQARGGSMYSPTGRINAKAATQRRRFEPLDAECDCFTCENYTAAYLHHLFKAKEMLASTLATIHNERYIVRLVDRIRASIVDGTFAELREEVLGRQYGAEFAREAAERAITPTASRQ

SEQ ID NO: 56952 - protein, 448 aa, Leucobacter chromiiresistens
  REGION 1..448: note = tr|A0A1H0ZM06|A0A1H0ZM06_9MICO Queuine tRNA-ribosyltransferase OS=Leucobacter chromiiresistens; OX = 1079994 GN=tgt PE=3 SV=1
MNDPAAPSTPPSPADFGFQVEHRLSSGGFTGSNGEPLGRTGTISTPHGDIQTPAFIPVGTKATVKSLLPATVRELGGQAVLANAYHLFLQPGSDLIDEAGGLGAFMNWDGPTFTDSGGFQVMSLGVGFKKVISMAESAHSGSEVIAKTKERLAHVDEDGVTFKSFLNGDKHRFTPEVSMRIQHELGADIVFAFDECTTLLNTREYQEDSVARTERWAVRCLDEHARQTAARTHRPYQALFGVVQGAQYEDLRRSAAAGLAGLRGAEATGQEFDGFGIGGALEKRDLGTIVGWVSDELPDAKPRHLLGISEPDDLFAAIAAGADTFDCVAPSRQARGGSMYSPTGRINAKAATQRRRFEPLDAECDCFTCENYTAAYLHHLFKAKEMLASTLATIHNERYIVRLVDRIRASIVDGTFAELREEVLGRQYGAEFAREAAQSAIAPAGDRS

SEQ ID NO: 56953 - protein, 442 aa, Leucobacter komagatae
  REGION 1..442: note = tr|A0A0D0IU84|A0A0D0IU84_9MICO Queuine tRNA-ribosyltransferase OS=Leucobacter komagatae OX=55969; GN = tgt PE=3 SV=1
MTETQATHGSPSPADFSFDVEHRLETGGARGTDGRMLGRAGTIHTPHGDIQTPAFIPVGTKATVKSILPETVSQFGGQAVLANAYHLFLQPGSDIVDEAGGFGKFMNWHGPTFTDSGGFQVMSLGVGFKKVISMREGAHEQAEVIAKNKERLAHVDEDGVTFKSFINGDKHRFTPEISMQIQHQLGADIIFAFDECTTLLNTRAYQEDSVARTERWAVRCLDEHARQTAERQHRPYQALFGVVQGAQYEDLRRQAAGGLERLRGAEATEQEFDGYGIGGALEKSELGTIVGWVSEELPEHKPRHLLGISEPDDLFAAIAAGADTFDCVAPSRQARGGTMYSSSGRINAKAATQRRRFEPLDPECDCYTCENYTAAYLHHLFKAKEMLGSTLATIHNERFIVRLVERIRESIINDTFAELRDEVLTRQYGAEFARDAAAKVAS

SEQ ID NO: 56954 - protein, 442 aa, Leucobacter komagatae
  REGION 1..442: note = tr|A0A542Y2D0|A0A542Y2D0_9MICO Queuine tRNA-ribosyltransferase OS=Leucobacter komagatae OX=55969; GN = tgt PE=3 SV=1
MTDTPTSPGSPSPADFSFDVEHHLESGGATGSDGRPLGRAGTIHTPHGDIQTPAFIPVGTKATVKAVLPETVTQFGGQAVLANAYHLFLQPGSDIVDEAGGFGKFMNWHGPTFTDSGGFQVMSLGVGFKKVISMSEKSHAEAEVIAKTKERLAHVDEDGVTFKSFINGDKHRFTPEVSMQIQHQLGADIMFAFDELTTLLDSRAYQEDSVERTERWAVRCLDEHARQTAERQHRPYQALFGVVQGAQYEDLRRRAASGLAGLRGATATQQEFDGFGIGGAIEKTELGEIVGWVCDELPENKPRHLLGISEPDDLFFGIAAGADTFDCVAPSRQARGGTMYSSSGRINAKAATQRRRFEALDPECDCYTCENYTAAYLHHLFKAKEMLGSTLATIHNERFIVRLVDQIRQSIIDGTFVEFREEILTKQYGADFARDAAARYAA

SEQ ID NO: 56955 - protein, 441 aa, Leucobacter luti
  REGION 1..441: note = tr|A0A4Q7U9P0|A0A4Q7U9P0_9MICO Queuine tRNA-ribosyltransferase OS=Leucobacter luti OX=340320; GN = tgt PE=3 SV=1
MNERIPLTPPPTPSDFGFTVDDRLAAGGVSGSDGAPLGRAGTIRTPHGEIQTPAFIPVGTKATVKAVLPESVTQLGGQAVLANAYHLFLQPGSDLVDEAGGLGRFMNWDGPTFTDSGGFQVMSLGVGFKKVISMTESAHSDAEVIAKNKERLAHVDEDGVTFKSFINGDRHRFTPEVSMEIQHQLGADIIFAFDECTTLLNTRAYQEDSVARTARWAVRCLDEHARQTSDRTHRPYQALFGVVQGAQYEDLRRSAARGLAEMTGAEAGDQRFDGFGIGGALEKSELGTIVSWVSDELPENKPRHLLGISEPDDLFAAVAAGADTFDCVAPSRQARGGSMYSAGGRINAKSAGQRRRFEAIDAECDCYTCENYTAAYLHHLFKAKEMLGSTLATIHNERFIVRLVERIRASIIDDTFAELRDEVLGRFYSPEFAREAAAKQA

SEQ ID NO: 56956 - protein, 448 aa, Leucobacter luti
  REGION 1..448: note = tr|A0A4R6RR39|A0A4R6RR39_9MICO Queuine tRNA-ribosyltransferase OS=Leucobacter luti OX=340320; GN = tgt PE=3 SV=1
MPQCLDRRVNERIPLTPPPSPTDFGFTVDHQLASGVPGSDGAPLGRAGTIRTPHGEIQTPAFIPVGTKATVKALLPETVGQLGGQAVLANAYHLFLQPGSDLVDEAGGLGRFMNWSGPTFTDSGGFQVMSLGVGFKKVISMTETAHSDAEVIAKNKERLAHVDEEGVTFKSFINGDKHRFTPEVSMEIQHQLGADIIFAFDECTTLLNTRAYQEDSVARTARWAVRCLDEHARQTDDRSHRPYQALFGVVQGAQYEDLRRSAARGLADMTGAQATDQQFDGFGIGGALEKSELGTIVSWVSDELPDSKPRHLLGISEPDDLFAAIAAGADTFDCVAPSRQARGGSMYSATGRINAKAARQRRRFEALDPECDCYTCENYTAAYLHHLFKAKEMLASTLATIHNERYIVRLVERIRASIIDGTFTELREEVLGRFYSPEFARAAAAKHA

SEQ ID NO: 56957 - protein, 436 aa, unidentified
  source 1..436: note = Leucobacter massiliensis
  REGION 1..436: note = tr|A0A2S9QQH0|A0A2S9QQH0_9MICO Queuine tRNA-ribosyltransferase OS=Leucobacter massiliensis; OX = 1686285 GN=tgt PE=3 SV=1
MNERPASEQPTPSPADFGFTVEHRLDRGGAEGSDGRPLGRVGTIRTPHGEIQTPAFIPVGTKATVKSLLPAAVRELGGQAVLANAYHLFLQPGSDIVDEAGGLGRFMNWDGPTFTDSGGFQVMSLGVGFKKVISMAENAHRSDEVIAENKERLAHVDEDGVTFKSFLNGDRHRFTPEVSMRIQHQLGADIIFAFDECTTLLNTRSYQEDSVDRTARWAVRCLDEHARQTAERAHRPYQALFGVVQGAQYEDLRRTAARGLAEMSGDAAPEQRFDGFGIGGALEKSELGTIVGWVNDELPENKPRHLLGISEPDDLFVAIAAGADTFDCVAPSRQARGGTLYSSTGRINAKAATQRRRFEAIDPECDCYTCENTTAAYLHHLFKAKEMLASTLATIHNERFIVRLVDRIRQSIIDGTFAELREETLGRLGRARSSRG

SEQ ID NO: 56958 - protein, 441 aa, Leucobacter sp.
  REGION 1..441: note = tr|A0A0M2M0R5|A0A0M2M0R5_9MICO Queuine tRNA-ribosyltransferase OS=Leucobacter sp. Ag1 OX=1642040; GN = tgt PE=3 SV=1
MNERPAQTPPPSPADFGFTVDHRLETGGASGSDGRPLGRAGTISTPHGEIQTPAFIPVGTKATVKALLPATVSELGGQAVLANAYHLFLQPGSDLVDEAGGLGRFMNWDGPTFTDSGGFQVMSLGVGFRKVISMAEADHASAEVIAETKDRLAHVDEDGVTFKSFINGDTHRFTPEVSMRIQHQLGADIIFAFDECTTLLNTRPYQEDSVARTERWAVRCLDEHARQTADRTHRPYQALFGVVQGAQYEDLRRQAAGGLARLTGAEATGQRFDGYGIGGALEKSQLGTIVSWVSDELPEDKPRHLLGISEPDDLFAGVAAGADTFDCVAPSRQARGGTMYSSSGRINAKAAAQRRRFEPLDPECDCYTCENYTAAYLHHLFKAKEMLASTLATIHNERYIVRMVERIRQSIIDGDFAELRDETLGRLYGPEFARTAAAAWN

SEQ ID NO: 56959 - protein, 431 aa, Leucobacter sp.
  REGION 1..431: note = tr|A0A373DIK7|A0A373DIK7_9MICO Queuine tRNA-ribosyltransferase OS=Leucobacter sp. wl10 OX=2304677; GN = tgt PE=3 SV=1
MNESPAPAQHLPSPADFGFEIVGRLERGGARGTGDKPLGRAGTIRTPHGDIQTPAFIPVGTKATVKALLPATVHELGGQAVLANAYHLFLQPGSDLVDEAGGLGAFMNWDGPTFTDSGGFQVMSLGVGFKKVISMDENAHQSDEVIAENKERLAHVDEDGVTFKSFLNGDRHRFTPEVSMRIQHQLGADIIFAFDECTTLMNTRRYQEDSVDRTARWAVRCLDEHARQTTARGHRPYQALFGIVQGAQYEDLRRRAARGIAEMTGAEAEDLRFDGFGIGGALEKRELGTIVGWVGDELPEDKPRHLLGISEPDDLFAAIAAGADTFDCVAPSRQARGGTLYSSTGRINAKAAAQRRRFEPLDPECDCYTCENYTAAYLHHLFKAKEMLASTLATIHNERFIVRLVDRIRQSIIDDAFAEFREETLGRLSGR

SEQ ID NO: 56960 - protein, 443 aa, unidentified
  source 1..443: note = Leucobacter triazinivorans
  REGION 1..443: note = tr|A0A4P6KHW0|A0A4P6KHW0_9MICO Queuine tRNA-ribosyltransferase OS=Leucobacter triazinivorans; OX = 1784719 GN=tgt PE=3 SV=1
MNESPAPTRPLPSPADFGFDIAHRLERGGVRGTGDQPLGRAGTIRTPHGDIQTPAFVPVGTKATVKALLPATVRELGGQAVLANAYHLFLQPGSDLVDEAGGLGRFMNWDGPTFTDSGGFQVMSLGVGFKKVISMDENLHQSDEVIAENKERLAHVDEDGVTFKSFLNGDRHRFTPEVSMRIQHQLGADIIFAFDECTTLFNTRRYQEDSVDRTARWAVRCLDEHARQTAERAHRPYQALFGVVQGAQYEDLRRAAARGLAEMTGAEADGQRFDGFGIGGALDKSELGTIVGWVNDELPENKPRHLLGISEPDDLFVAIAAGADTFDCVAPSRQARGGTMYSSTGRINAKSAAQRRRFEPLDPECDCYTCENYTAAYLHHLFKAKEMLASTLATIHNERFIVRLVDRIRQSIIDDSFAELRDEVLGRQYGPDFARKTAAQSPR

SEQ ID NO: 56961 - protein, 405 aa, Leuconostoc carnosum
  REGION 1..405: note = tr|K0DEQ0|K0DEQ0_LEUCJ Queuine tRNA-ribosyltransferase OS=Leuconostoc carnosum (strain JB16) OX=1229758 GN=tgt PE=3 SV=1
MTDKKPAVWYEHLHTEKYTGARRGRIHTPHGTFETPMFMPVGTQGAVKGVGTRELKDIGSQFILSNTYHLWVRPGDELIAEAGGLHKYMGWDQAILTDSGGFQVFSLSDARKLKEEGVTFQNHVNGDKMFLSPEVAMRIQNNLGSDVMMQLDEAIPYFESYDYIKESMQRSLRWADRAQIAHKKADSQALFGIVQGAGFKALRSESANGLVGMDLPGYAIGGLSVGESKKEMNRVLDFTMPLLPEDKPRYLMGVAAPDSLIDSVIRGIDMFDSVLPTRIARKGTLMTRFGRVVIKNSKYKNDFTPLDPDLSYYSSNPIRTEQFGNQAQFDNPDYNPFQNLTRSYLHHLFNANEILGAQLASQHNLRYLLQFMEDMRTAIENDELLQFRETVMEEYGYNKPNARLF

SEQ ID NO: 56962 - protein, 405 aa, Leuconostoc carnosum
  REGION 1..405: note = tr|A0A2U3MQS5|A0A2U3MQS5_LEUCA Queuine tRNA-ribosyltransferase OS=Leuconostoc carnosum OX=1252; GN = tgt PE=3 SV=1
MTDKKPAVWYEHLHTEKYTGARRGRIHTPHGTFETPMFMPVGTQGAVKGVGTRELKDIGSQFILSNTYHLWVRPGDELIAEAGGLHKYMGWDQAILTDSGGFQVFSLSDARKLKEEGVTFQNHVNGDKMFLSPEVAMRIQNNLGSDVMMQLDEAIPYFESYDYIKESMQRSLRWADRAQIAHKKADSQALFGIVQGAGFKALRSESANGLVGMDLPGYAIGGLSVGESKKEMNRVLDFTMPLLPEDKPRYLMGVAAPDSLIDSVIRGIDMFDSVLPTRIARKGTLMTRFGRVVIKNSKYKNDFTPLDPDLSYYSSNPIRTEQFGNQAQFDNLDYNPFQNLTRSYLHHLFNANEILGAQLASQHNLRYLLQFMEDMRTAIENDELLQFRETVMEEYGYNKPNARLF

SEQ ID NO: 56963 - protein, 405 aa, Leuconostoc citreum
  REGION 1..405: note = tr|B1MXF1|B1MXF1_LEUCK Queuine tRNA-ribosyltransferase OS=Leuconostoc citreum (strain KM20) OX=349519 GN=tgt PE=3 SV=1
MGQEHPAVWYEHLHTEKHTGARRGRIHTPHGTFETPMFMPVGTQGAVKGVGTRALKEIGSQFILSNTYHLWVRPGDELIAEAGGLHKYMGWDQAILTDSGGFQVFSLSDARKLKEEGVTFQNHVNGDKMFLSPEVAMRIQNNLGSDVMMQLDEAIPYFESFDYIKESMQRSLRWADRAQVAHRNPEKQALFGIVQGAGFKALRTESANGLVGMDLPGYAVGGLSVGESKLEMNRVLDFTMPLLPENKPRYLMGVAAPDSLIDGVIRGVDMFDSVLPTRIARKGTLMTRYGRVVIKNSKYKNDFSPLDPDLSYYSPNHIRQAQFGNQAQFDNPDYNPFQNLTRSYLHHLFNANEILGAQLASQHNLRFLLQFMEDMRTAIENDELLEFRARVMEEYGYNKPNARLF

SEQ ID NO: 56964 - protein, 405 aa, Leuconostoc fallax
  REGION 1..405: note = tr|A0A4V3A2P0|A0A4V3A2P0_9LACT Queuine tRNA-ribosyltransferase OS=Leuconostoc fallax OX=1251; GN = tgt PE=3 SV=1
MTNQKSAVWYEHLHTEKHTGARRGRIHTPHGTFETPMFMPVGTQGAVKGVSARELKEIGAQFILSNTYHLWVRPGDELIAQAGGLHKYMGWDQAILTDSGGFQVFSLSDARKLKEEGVTFQNHVNGDKMFLSPEVAMRIQNNLGSDIMMQLDEAIPYFETYDYIKESMQRSVRWAERAQKAHKNPDSQALFGIVQGAGFKALRTESANDLVSMDLPGYAVGGLSVGESKKEMNRVLDFTMPLLPEEKPRYLMGVAAPDSLIDSVMRGVDMFDCVLPTRIARKGTLMTRFGRVVIKNAKYKNDFTPLDPDLSYYSPNPIRQEQFGNMAQFDVPGYNPFKTLTRSYLHHLFNANEMLGAQLASQHNLRFLLQFMEDMRTAIERDELLEFRETVMEEYGYNKPNARLF

SEQ ID NO: 56965 - protein, 405 aa, Leuconostoc gelidum
  REGION 1..405: note = tr|J9YKX9|J9YKX9_LEUGJ Queuine tRNA-ribosyltransferase OS=Leuconostoc gelidum (strain JB7) OX=1229756 GN=tgt PE=3 SV=1
MTNKKPAVWYEHLHTEKHTGARRGRIHTPHGTFETPMFMPVGTQGAVKGVGTRELKDIGSQFILSNTYHLWVRPGDELIAQAGGLHQYMGWDQAILTDSGGFQVFSLSDARKLQEEGVTFQNHVNGDKMFLSPEVAMRIQNNLGSDVMMQLDEAIPYFESYDYIKESMQRSLRWAERAQVAHKKTDSQGLFGIVQGAGFKALRTESANGLVGMDLPGYAVGGLSVGESKLEMNRVLDFTMPLLPEDKPRYLMGVAAPDSLIDGVIRGVDMFDSVLPTRIARKGTLMTRRGRVVIKNSKYKNDFTPLDPDLSYYSANPIRTNQFGNQRQFDNPNYNPFQNLTRSYLHHLFNANELLGAQLASQHNLRYLLQFMEDMRTAIENDELLAFRATVMEEYGYNKPNARLF

SEQ ID NO: 56966 - protein, 405 aa, Leuconostoc gelidum
  REGION 1..405: note = tr|A0A175CHH4|A0A175CHH4_LEUGE Queuine tRNA-ribosyltransferase OS=Leuconostoc gelidum subsp. gasicomitatum OX=115778 GN=tgt PE=3 SV=1
MTNKKPAVWYEHLHTEKHTGARRGRIHTPHGTFETPMFMPVGTQGAVKGVGTRELKDMGSQFILSNTYHLWVRPGDELIAQAGGLHQYMGWDQAILTDSGGFQVFSLSDARKLQEEGVTFQNHVNGDKMFLSPEVAMRIQNNLGSDVMMQLDEAIPYFESYDYIKESMQRSLRWAERAQVAHKKTDSQGLFGIVQGAGFKALRTESANGLVGMDLPGYAVGGLSVGESKLEMNRVLDFTMPLLPEDKPRYLMGVAAPDSLIDGVIRGVDMFDSVLPTRIARKGTLMTRRGRVVIKNSKYKNDFTPLDPDLSYYSANPIRTNQFGNQRQFDNPNYNPFQNLTRSYLHHLFNANEILGAQLASQHNLRYLLQFMEDMRTAIEHDELLAFRATVMEEYGYNKPNARLF

SEQ ID NO: 56967 - protein, 405 aa, Leuconostoc kimchii
  REGION 1..405: note = tr|D5T304|D5T304_LEUKI Queuine tRNA-ribosyltransferase OS=Leuconostoc kimchii (strain IMSNU 11154 / KCTC 2386 / IH25) OX=762051 GN=tgt PE=3 SV=1
MTDKKPAVWYEHLHTEKHTGARRGRIHTPHGTFETPMFMPVGTQGAVKGVGTRELKEIGSQFILSNTYHLWVRPGDELIAQAGGLHKYMGWDQAILTDSGGFQVFSLSDARKLQEEGVTFQNHVNGDKMFLSPEVAMRIQNNLGSDVMMQLDEAIPYFETYDYIKNSMQRSLRWAERAQVAHKNPDSQGLFGIVQGAGFKALRTESANGLVGMDLPGYAVGGLSVGESKLEMNRVLDFTMPLLPEDKPRYLMGVAAPDSLIDGVIRGVDMFDSVLPTRIARKGTLMTRRGRVVIKNSKYKNDFTPLDPDLSYYSPNQIRTTQFGNQAQFDNPSYNPFGNLTRSYLHHLFNANEILGAQLASQHNLRFLLQFMEDMRTAIENDELLEFRETVMEEYGYNKPNARLF

SEQ ID NO: 56968 - protein, 93 aa, Leuconostoc kimchii
  REGION 1..93: note = tr|D5T302|D5T302_LEUKI Queuine tRNA-ribosyltransferase OS=Leuconostoc kimchii (strain IMSNU 11154 / KCTC 2386 / IH25) OX=762051 GN=LKI_05550; PE = 4 SV=1
MTISILIFLYATLTSLALFSARKQLPAWLTFLNILAITMLYLSLVYPLWLAISLILAILTAINNGLILNGKVSTYHLIIRIVFSLLIFFLAMA

SEQ ID NO: 56969 - protein, 405 aa, Leuconostoc lactis
  REGION 1..405: note = tr|A0A0Q0TQJ4|A0A0Q0TQJ4_LEULA Queuine tRNA-ribosyltransferase OS=Leuconostoc lactis OX=1246; GN = tgt PE=3 SV=1
MTTEKPAVWYEHLHTEKYTGARRGRIHTPHGTFETPMFMPVGTQGAVKGVGTRELKDIGAQFILSNTYHLWVRPGDELIAEAGGLHKYMGWDQAILTDSGGFQVFSLSDARKLQEEGVTFQNHVNGDKMFLSPEVAMRIQNNLGSDVMMQLDEAIPYFESYDYIKESMQRSLRWAERAQIAHKNPDTQALFGIVQGAGFKALRTESANGLVSLDLPGYAVGGLSVGESKAEMNRVLDFTMPLLPEDKPRYLMGVAAPDSLIDGVIRGIDMFDSVLPTRIARKGTLMTRYGRVVIKNSKYKHDFTPLDPDLSYYSPNPIRREQFGNKAQFDDPTYNPFQNLTRSYLHHLFNANEILGAQLASQHNLRFLLQFMEDMRTAIENDELLAFRETVMEEYGYNKPNARLF

SEQ ID NO: 56970 - protein, 406 aa, Leuconostoc mesenteroides
  REGION 1..406: note = tr|C2KLQ1|C2KLQ1_LEUMC Queuine tRNA-ribosyltransferase OS=Leuconostoc mesenteroides subsp. cremoris ATCC 19254 OX=586220 GN=tgt PE=3 SV=1
MANEKHPAVWYEHLHTEKYTGARRGRIHTPHGTFETPMFMPVGTQGAVKGVGTRELKDIGSQFILSNTYHLWVRPGDELIAEAGGLHKYMGWDQAILTDSGGFQVFSLSDARKLKEEGVTFQNHVNGDRMFLSPEVAMRIQNNLGSDVMMQLDEAIPYFETYDYIKNSMQRSLRWAERAKVAHKKTDTQALFGIVQGAGFKALRTESANNLVDMDLPGYAVGGLSVGESKAEMNRVLGFTMPLLPEDKPRYLMGVAAPDSLIDGVMRGVDMFDCVLPTRIGRKGTLMTRYGRVVIRNSKYKNDFTPLDPDLSYYSPNPIRKEQFGNLAQYDIPGYNPFKTLTRSYLHHLFNANELLGAQLASEHNLRFLLQFMEDMRTAIENDELLAFRETVMEEYGYNKPNARLF

SEQ ID NO: 56971 - protein, 406 aa, Leuconostoc mesenteroides
  REGION 1..406: note = tr|Q03Z74|Q03Z74_LEUMM Queuine tRNA-ribosyltransferase OS=Leuconostoc mesenteroides subsp. mesenteroides (strain ATCC 8293 / NCDO 523); OX = 203120 GN=tgt PE=3 SV=1
MANEKHPAVWYEHLHTEKYTGARRGRIHTPHGTFETPMFMPVGTQGAVKGVGTRELKDIGSQFILSNTYHLWVRPGDELIAEAGGLHKYMGWDQAILTDSGGFQVFSLSDARKLKEEGVTFQNHVNGDRMFLSPEVAMRIQNNLGSDVMMQLDEAIPYFETYDYIKNSMQRSLRWAERAKVAHKKTDTQALFGIVQGAGFKALRTESANNLVDMDLPGYAVGGLSVGESKAEMNRVLDFTMPLLPEDKPRYLMGVAAPDSLIDGVMRGVDMFDCVLPTRIGRKGTLMTRYGRVVIRNSKYKNDFTPLDPDLSYYSPNPIRKEQFGNLAQYDIPGYNPFKTLTRSYLHHLFNANELLGAQLASEHNLRFLLQFMEDMRTAIENDELLAFRETVMEEYGYNKPNARLF

SEQ ID NO: 56972 - protein, 406 aa, Leuconostoc pseudomesenteroides
  REGION 1..406: note = tr|A0A062XNA3|A0A062XNA3_LEUPS Queuine tRNA-ribosyltransferase OS=Leuconostoc pseudomesenteroides PS12 OX=1339247 GN=tgt PE=3 SV=1
MAKSEHPAVWYEHLHTEKYTGARRGRIHTPHGTFETPMFMPVGTQGAVKGVGTRELKDIGAQFILSNTYHLWVRPGDELIAQAGGLHKYMGWDQAILTDSGGFQVFSLADARKLKEEGVTFQNHVNGDKMFLSPEVAMRIQNNLGSDVMMQLDEAIPYFETYEYIKESMQRSLRWAERAQVAHKNPDTQALFGIVQGAGFKALRTESANGLVGMDLPGYAVGGLSVGESKKEMNRVLDFTMPLLPEDKPRYLMGVAAPDSLIDGVIRGVDMFDSVLPTRIGRKGTLMTRFGRVVIKNSKYKNDFTPLDPDLSYYSPNPIRREQFGNLAQYDLPDYNPFQNLTRSYLHHLFNANELLGAQLASEHNLRFLLQFMEDMRTAIENDELLAFRETVMEEYGYNKPNARLF

SEQ ID NO: 56973 - protein, 406 aa, Leuconostoc pseudomesenteroides; identical to SEQ ID NO: 56972
  REGION 1..406: note = tr|A0A1X0VDS1|A0A1X0VDS1_LEUPS Queuine tRNA-ribosyltransferase OS=Leuconostoc pseudomesenteroides; OX = 33968 GN=tgt PE=3 SV=1

SEQ ID NO: 56974 - protein, 406 aa, unidentified; identical to SEQ ID NO: 56971
  source 1..406: note = Leuconostoc suionicum
  REGION 1..406: note = tr|A0A2N9KAS7|A0A2N9KAS7_9LACT Queuine tRNA-ribosyltransferase OS=Leuconostoc suionicum; OX = 1511761 GN=tgt PE=3 SV=1

SEQ ID NO: 56975 - protein, 405 aa, unidentified; identical to SEQ ID NO: 54145
  source 1..405: note = Leuconostocaceae bacterium
  REGION 1..405: note = tr|A0A1G6HW25|A0A1G6HW25_9LACT Queuine tRNA-ribosyltransferase OS=Leuconostocaceae bacterium R-53105 OX=1855370 GN=tgt PE=3 SV=1

SEQ ID NO: 56976 - protein, 372 aa, unidentified
  source 1..372: note = Leucothrix pacifica
  REGION 1..372: note = tr|A0A317CLA4|A0A317CLA4_9GAMM Queuine tRNA-ribosyltransferase OS=Leucothrix pacifica OX=1247513; GN = tgt PE=3 SV=1
MSHLQFDLLKSKDQSRRGRLTFPRGTIETPAFMPVGTYGTVKAMTPEQLEGIGAEIILGNTFHLMLRPGTEVIKTHGDLHDFMNWQKPILTDSGGFQVFSLAQMRKITEEGAHFQSPVNGDKVLLTPEYSMQIQRDLGSDIVMIFDECTPYPATIDQARDSMSLSLRWAKRSKKAHEENPSALFGIVQGGMYGDLRKTSAEGLKEIGFDGYAIGGLSVGEPMDERNEVLEATTPHLPTDKPRYLMGVGKPEDIVESVKRGVDMFDCVIPTRNARNGFLFTRYGTLKIRNQKHQFDTSPIDDKCGCYTCQNYSRSYLRHLDKCKEILGAHLNTIHNLYYYQELMRGIREALDDDRFDEFYTEFYALREQGDNL

SEQ ID NO: 56977 - protein, 371 aa, Leucothrix sp.
  REGION 1..371: note = tr|A0A317C9E9|A0A317C9E9_9GAMM Queuine tRNA-ribosyltransferase OS=Leucothrix sp. IMCC9719; OX = 1481894 GN=tgt PE=3 SV=1
MQFDLLKTSHDSRRGRLTFPRGTIETPAFMPVGTYGTVKAMTPEQLAGIGAEIILGNTFHLMLRPGTEVIKAHGDLHDFMHWQKPILTDSGGFQVFSLAQMRKITEEGAHFQSPINGDKVLLTPEYSMQIQKDLGSDIVMIFDECTPYPATYEQADESMSLSLRWAKRSKAAHEGNNAALFGIVQGGMYDELRKVSANGLQEIGFDGYAIGGLSVGEPMDERNQVLEATTPNLPTDKPRYLMGVGKPEDIIESVKRGVDMFDCVIPTRNARNGFLFTRYGTLKIRNQKHQFDTGPIDERCGCYTCQNYSRSYLRHLDKCKEILGAHLNTIHNLYYYQELMQGIRKALDEDRFDTFCDEFYALRENLEPEKL

SEQ ID NO: 56978 - protein, 378 aa, Levilinea saccharolytica
  REGION 1..378: note = tr|A0A0N8GS22|A0A0N8GS22_9CHLR Queuine tRNA-ribosyltransferase OS=Levilinea saccharolytica; OX = 229921 GN=tgt PE=3 SV=1
MDSNPFTFECHATDGQARAGVFHTPHGPIPTPIFAPVGTQATVKAVTPAQLEELGAHLVLSNTYHLFLRPGPDIVAEMGGLHRFMNWPHPILTDSGGFQVFSLTSMRKLDEDGVTFKSHIDGSMQRLTPEISVDVQQKLGADIIMCFDECASPYDRDYVERAMHRTHRWAERCQQAKTRPDQALFGIVQGGVFPDLRQQSAEWIAAQGFPGHAIGGLSVGETKAEMNHMIEVVNAVLPPEKPRYLMGVGSPEDLIHGIWRGVDIFDCVLPTRLARHHAAMTFSGRLNLMNAVNARDPRPIDENCGCYACRHYTRAYLRHLITAKEILAATLISIHNLYTLEELVRQARQAILEGRYQAFAENFLANYRPQPENKSRPA

SEQ ID NO: 56979 - protein, 377 aa, Lewinella agarilytica
  REGION 1..377: note = tr|A0A1H9F4L7|A0A1H9F4L7_9BACT Queuine tRNA-ribosyltransferase OS=Lewinella agarilytica OX=478744; GN = tgt PE=3 SV=1
MKFTLHQTDTSTAARAGTLTTDHGEIPTPIFMPVGTIGTVKGVHQSELKEQVKAKIILGNTYHLYLRPGMETMEAAGGLHQFMNWSGPILTDSGGYQVFSLAHRRKIKEEGVTFASHIDGSKHLFSPESSLGIQRSIGADIVMAFDECPPYPSERKYAENSMHLTHRWLERCVAFMKESQPKYGHSQALFPIVQGSSYDDLRRQSCEFIASQDQPGNAIGGLSVGEPIEDMYRIAALCCEVLPKDKPRYLMGVGTPANILECISRGVDMFDCVLPSRNARHGVIYTRQGIINIKNARWRNDFSAIDDSATAAPTSQAHTKAYLHHLFRVNELLGPQIATLHNLAFYLALVTEARERILDGSFSSWKEGAMAGLERKL

SEQ ID NO: 56980 - protein, 377 aa, Lewinella marina
  REGION 1..377: note = tr|A0A2G0CDV4|A0A2G0CDV4_9BACT Queuine tRNA-ribosyltransferase OS=Lewinella marina OX=438751; GN = tgt PE=3 SV=1
MQFDLQHTDPATDARAGQISTDHGTIQTPIFMPVGTLGTVKGVHQRELKEQVRAQIILGNTYHLYLRPGTEVLEAAGGLHRFMQWDGPILTDSGGYQVFSLAHRRKITEEGATFASHIDGSKHLFSPESSLAIQRSIGADIVMAFDECPPYPSTRKYAENSMHLTHRWLERCVAYMRDSEPRYGHSQALFPIVQGGSYDDLRRQSCEFIASQNQPGNAIGGLSVGEPIPDMYRITQLCCDILPKDKPRYLMGVGTPANILECISRGVDMFDCVLPSRNARHGMLYTRQGIINIRNARWKNDHSPIDDHPEAAPTSQLHSKAYLCHLIRCNELLAGQLATLHNLAFYLSLVREARQRILDGSFREWKEELVPQLERKL

SEQ ID NO: 56981 - protein, 377 aa, Lewinella nigricans
  REGION 1..377: note = tr|A0A2D0NB81|A0A2D0NB81_9BACT Queuine tRNA-ribosyltransferase OS=Lewinella nigricans DSM 23189 = NBRC 102662 OX=1122177 GN=tgt PE=3 SV=1
MFTFDLQHTDPASSARAGLIQTDHGPIETPIFMPVGTAGTVKGVHQYELKNDIGAQIILGNTYHLYLRPGMEVMAKAGGLHGFNGWQGPILTDSGGYQVYSLSDRRKITEEGVTFRSHIDGSKHTFSPERSMEIQRVIGADIIMAFDECPPFPCDYKYAKDSMDLTHRWLARCCEYVDNTEGHYGHGQTLFPIVQGSTYDDLRRASAEAIASFDRAGNAIGGLSVGEPAEEMYRVTDMVCAILPKDKPRYLMGVGTPVNLLECIALGIDMFDCVLPTRNARHGMLYTAEGIINIKNAKWKDDFSPVDPDSSCPSSRFYTRGYLRHLIHSGELLGAQIASLHNLAFFLWLVGEARKHIIAGDFASWKNDMVPRLERRL

SEQ ID NO: 56982 - protein, 377 aa, Lewinella sp.
  REGION 1..377: note = tr|A0A4S4NE55|A0A4S4NE55_9BACT Queuine tRNA-ribosyltransferase OS=Lewinella sp. HSMS-39; OX = 2562452 GN=tgt PE=3 SV=1
MQFTLEHTDPTTSARAGQVTTDHGTIQTPIFMPVGTLGTVKGVHQRELREDVRAQIILGNTYHLYLRPGTEVLEAAGGLHRFMQWDGPILTDSGGYQVFSLAHRRKITEEGATFASHIDGSKHLFSPESSLAIQRSIGADIVMAFDECPPYPSTRQYAENSMHLTHRWLERCVAYMRDSEPRYGHSQALFPIVQGGSYDDLRRQSCEFIAGQDQPGNAIGGLSVGEPIPDMYRITQLCCDILPEDKPRYLMGVGTPANILECISRGVDMFDCVLPSRNARHGMLYTRHGIINIRNARWKNDHSPIDDHPEAAPTSQVHSKAYLCHLLRCGELLAGQLATLHNLAFYLSLVREARQRILDGSFREWKDALVPQLERKL

SEQ ID NO: 56983 - protein, 377 aa, Lewinella sp.
  REGION 1..377: note = tr|A0A180ERT8|A0A180ERT8_9BACT Queuine tRNA-ribosyltransferase OS=Lewinella sp. 4G2 OX=1803372; GN = tgt PE=3 SV=1
MTFKLQHTDTATDARAGELTTDHGTIQTPIFMPVGTIGTVKGVHQRELREQVQAQIILGNTYHLFLRPGMETMSAAGGLHRFMNWDGPILTDSGGYQVFSLAHRRKITEEGATFANHIDGSKHLFSPESSLGIQRDIGADIVMAFDECPPYPSEKVYAEKSMHLTHRWLERCVQFMRDSAPKYGHDQALFPIVQGSSYDDLRRKSCEFIAAQDQPGNAIGGLSVGEPIADMYRIAKLCCDILPKAKPRYLMGVGTPANLLECISRGVDMFDCVLPSRNARHGMLYTRRGIINIKNARWRNDFSVVDDHPAGAPTSRAHTKAYVHHLFRVNELLGPQLATLHNLRFYLALVEEARERILDGSFAAWKAELVPLLETKL

SEQ ID NO: 56984 - protein, 377 aa, unidentified
  source 1..377: note = Lewinella xylanilytica
  REGION 1..377: note = tr|A0A2S6I1F8|A0A2S6I1F8_9BACT Queuine tRNA-ribosyltransferase OS=Lewinella xylanilytica; OX = 1514080 GN=tgt PE=3 SV=1
MQFSLLHTDQETGARAGVVTTDHGTLQTPIFMPVGTLGTVKGVHQRELKEQVKAQIILGNTYHLYLRPGTEVLEAAGGLHRFMQWDGPILTDSGGYQVFSLAHRRKITEEGATFASHIDGSRHLFSPESSLGIQRSIGADIVMAFDECPPYPSTRQYTEDSMHLTHRWLERCVRFMQDSQPKYGHSQALFPIVQGGSFDDLRKQSCEFIASQDQPGNAIGGLSVGEPIPDMYRITQLCCDILPKQKPRYLMGVGTPANILECIARGVDMFDCVLPSRNARHGMLYTRDGIINIKNAKWKNDHSAIDARPDAAPTSQVHSKAYLCHLIRCGELLAGQLATLHNLAFYLSLVREARTRILDGSFLSWKNELVPQLERRL

SEQ ID NO: 56985 - protein, 377 aa, unidentified
  source 1..377: note = Lewinellaceae bacterium
  REGION 1..377: note = tr|A0A2C6C439|A0A2C6C439_9BACT Queuine tRNA-ribosyltransferase OS=Lewinellaceae bacterium SD302; OX = 2014804 GN=tgt PE=3 SV=1
MHFELEHTDPKSSARAGTVTTDHGEIKTPIFMPVGTAGTVKGVHQAELKNEVKAQIILGNTYHLYLRPGTEVLEGAGGLHKFNKWDGPILTDSGGYQVYSLSHRRKIKEEGVTFQSHIDGSKHLFSPETSLEIQRSIGGDIIMAFDECPPYPSTRKYAEDSMHLTHRWLDRCVEYLKEKEGKYGYSQAMFPIVQGSSYDDLRRKSCEYIAAADQPGNAIGGLSVGEPIEDMYRITALCCEILPKDKPRYLMGVGTPANLLECIERGVDMFDCVLPSRNARHGMIYTAEGIINIKNAKWKNDFSPIEDRPGTASTSLTHSKAYLHHLVRCDEMLGRQIASIHNLSFYLWLVGQARERILDGSFSDWKKVMVDKVSRRI

SEQ ID NO: 56986 - protein, 378 aa, unidentified
  source 1..378: note = Liberibacter asiaticus
  REGION 1..378: note = tr|C6XHA8|C6XHA8_LIBAP Queuine tRNA-ribosyltransferase OS=Liberibacter asiaticus (strain psy62) OX=537021 GN=tgt PE=3 SV=1
MDKNFHFNLKAVSGSARLGEIITPRGVIKTPAFMPVGTAGTVKAMYFDQVRDLGADVILGNAYHLMLRPGAERIARLGGLHKFIRWFKPILTDSGGFQVMSLSKLCSIDEQGVRFRSHIDGSLYRVSPEESVHIQNLLGSDIQMQLDECLALPAEDKELKRAMELSLRWAERSLVAFGNQPGKALFGIVQGGDNINLRSFSAERLKELDLKGYAIGGLAVGEPQEVMLHILSNVLPILPVERPHYLMGVGTPDDILKSVSYGVDMFDCVMPTRAGRHGLAFTRFGKINLRNARHIDDMRPLDAESHCSALRDYSRAYLHHLLRVNESLAGMILSWANLAYYQDLMKEIRSAIAEDCFVDFAMQTQENWKKGDIPPIFT

SEQ ID NO: 56987 - protein, 373 aa, unidentified
  source 1..373: note = Liberibacter crescens
  REGION 1..373: note = tr|L0ETP7|L0ETP7_LIBCB Queuine tRNA-ribosyltransferase OS=Liberibacter crescens (strain BT-1) OX=1215343 GN=tgt PE=3 SV=1
MFYFEIKATSGHARLGEISMPRGIIKTPAFMPVGTAGTVKAMYLDQVRFTGADVILANTYHLMLQPGAERIARLGGLHEFIRWPHPILTDSGGFQVMSLSKLCSVDEHGVTFRSHIDGSLHHMSPERAIELQKLLGSDIQMQLDECISLPAEDKEIKRAMELSLRWAERCSLAFGHQPGKAMFGIVQGGNKINLRLISAEALKKLDLKGYAIGGLAVGEPQEVMLEMLMNTLPVLPVEKPRYLMGVGTPEDILKSVACGVDMFDCVMPTRAGRHGLAFTRNGRINLRNAKHAYDIRPLDEESSCPALRDYSRAYLHHLIRMKEPLGGMLLSWANLSYYQDLMKGIRKAIADDSFPDFMMETQEHWLKNKLSFV

SEQ ID NO: 56988 - protein, 377 aa, unidentified
  source 1..377: note = Liberibacter solanacearum
  REGION 1..377: note = tr|E4UDV0|E4UDV0_LIBSC Queuine tRNA-ribosyltransferase OS=Liberibacter solanacearum (strain CLso-ZC1) OX=658172 GN=tgt PE=3 SV=1
MDKNFCFNIKAKSGNARLGEIITPRGIIKTPAFMPVGTSGAVKAMYFDQVRDLGADVILGNAYHLMLQPGADRIARLGGLHQFIRWFKPILTDSGGFQVMSLSKLCSIDEQGVSFRSHIDGSLHRVSPEDSIEIQNLLGSDIQMQLDECLALPADEKELKRAMELSLRWAERSLVAFGNQPGKALFGIVQGGDNISLRSFSAARLKELDLKGYAIGGLAVGEPQEVMLHILSNILPILPVEKPHYLMGVGTPDDILKSVSCGVDMFDCVMPTRAGRHGLSFTRFGKINLRNARHTDDMRPLDAESNCPALRDYSRAYLHHLLHVNESLAGMILSWANLFYYQDLMREIRNAIAQDCFADFMMQTQENWRKGDIPPLV

SEQ ID NO: 56989 - protein, 378 aa, unidentified
  source 1..378: note = Lihuaxuella thermophila
  REGION 1..378: note = tr|A0A1H8FVN2|A0A1H8FVN2_9BACL Queuine tRNA-ribosyltransferase OS=Lihuaxuella thermophila; OX = 1173111 GN=tgt PE=3 SV=1
MPVRYELIKECKQSGARLGRLHTPHGTIDTPIFMPVGTQATVKAMSPEELKEMGSQIILSNTYHLFLRPGHEIVKEAGGLHTFMNWDRAILTDSGGFQVFSLSQLRNITEEGVSFRSHLSGEKLFISPEKAMEIQNALGADIIMAFDECPPYPAERDYVKASAERTYRWLKRCISAHQRPGDQALFGIVQGGMYRDLREESARQLVDLDLPGYAVGGLSVGEPKEIMYEVLSYTTPLLPKDKPRYLMGVGSPDALIQGAILGIDMFDCVLPTRIARNGTTMTSQGRVVVRNAKYARDFSPLDPNCDCYTCRNYSRAYLRHLIKADEIFGLRLTSYHNLYFLLRLMEKVRQAIMEDRLLTFRDEFMSQYYGSTHPQTAF

SEQ ID NO: 56990 - protein, 458 aa, unidentified
  source 1..458: note = Limimaricola cinnabarinus
  REGION 1..458: note = tr|U2YIB3|U2YIB3_9RHOB Queuine tRNA-ribosyltransferase OS=Limimaricola cinnabarinus LL-001 OX=1337093 GN=tgt PE=3 SV=1
MQHRQVRRHGVLPRTERRGDLTRGHAIGAGLDQKAEGVEPRRLGEGGEGRDGAGLFHESRNIDEMAARQACRLRGGAARAIAQSMNFSFALNATDGAARTGVISTPRGEIRTPAFMPVGTAATVKAMRPESVRATGADILLGNTYHLMLRPSAERIDRLGGLHKFMNWDRPILTDSGGFQVMSLASLRKLTEKGVTFKSHIDGSKHEITPERSMEIQKLLGSDIVMTFDECPALPADRTRIAESMRLSMRWAQRSRDAFGDRPGHALFGIQQGGLERDLREESAEALRVVGFDGYAVGGLAVGEGQEAMFGCLDYAPAQLPEDKPRYLMGVGKPDDIVGAVKRGIDMMDCVLPSRSGRTGQAWTRRGQVNLRNARHADDPRPLDETCTCPACANYSRAYLHHVVRSQEMIAGMLLTWHNLHYYQELMGGMRDAIAAQDFADFETRFHAMRAEGDIDRL

SEQ ID NO: 56991 - protein, 374 aa, unidentified
  source 1..374: note = Limimaricola cinnabarinus
  REGION 1..374: note = tr|A0A2G1MF43|A0A2G1MF43_9RHOB Queuine tRNA-ribosyltransferase OS=Limimaricola cinnabarinus; OX = 1125964 GN=tgt PE=3 SV=1
MSFSFSLNATDGAARTGVISTPRGEIRTPAFMPVGTAATVKAMMPESVRQTGADILLGNTYHLMLRPSAERIDRFGGLHKFMNWERPILTDSGGFQVMSLASLRKLTEKGVTFKSHIDGSKHEITPERSMEIQKLLGSDIVMAFDECPALPADRERIAESMRLSMRWAQRSRDAFGDRPGHALFGIQQGGLERDLREESAEKLREIGFEGYAVGGLAVGEGQEAMFGCLDYAPGQLPQDKPRYLMGVGKPDDIVGAVKRGIDMMDCVLPSRSGRTGQAWTRRGQVNLRNARHADDPRPLDEACSCPACARYSRAYLHHVVRSQEMIAGMLLTWHNLHYYQELMGGMRAAIAAQDFAGFEARFHAQRAEGDIERL

SEQ ID NO: 56992 - protein, 374 aa, unidentified
  source 1..374: note = Limimaricola hongkongensis
  REGION 1..374: note = tr|A0A017HDJ4|A0A017HDJ4_9RHOB Queuine tRNA-ribosyltransferase OS=Limimaricola hongkongensis DSM 17492 OX=1122180 GN=tgt PE=3 SV=1
MSFSFSLNATDGAARTGVISTPRGEIRTPAFMPVGTAATVKAMMPDSVRQTGADILLGNTYHLMLRPTAERIDRLGGLHRFMNWDRPILTDSGGFQVMSLASLRKLTERGVTFKSHIDGSKHEITPERSMEIQKLLGSDIVMAFDECPALPADRERIAESMRLSMRWAQRSRDAFGDRPGHALFGIQQGGLEPDLREESAEKLREIGFEGYAVGGLAVGEGQEAMFGCLDYAPGQLPEDKPRYLMGVGKPDDIVGAVKRGIDMMDCVLPSRSGRTGQAWTRRGQVNLRNARHADDPRPLDEDCTCPACRNYSRAYLHHVVRSQEMIAGMLLTWHNLHYYQELMGGMRDAIADHDFEGFEARFHARRAEGDIERL

SEQ ID NO: 56993 - protein, 374 aa, unidentified
  source 1..374: note = Limimaricola pyoseonensis
  REGION 1..374: note = tr|A0A1G7H1P0|A0A1G7H1P0_9RHOB Queuine tRNA-ribosyltransferase OS=Limimaricola pyoseonensis; OX = 521013 GN=tgt PE=3 SV=1
MSFSFALNATDGAARTGVISTPRGEIRTPAFMPVGTAATVKAMMPESVRQTGADILLGNTYHLMLRPTAERIDRLGGLHKFMNWERPILTDSGGFQVMSLASLRKLTERGVTFKSHIDGSKHEITPERSMEIQRLLGSDIVMAFDECPALPADRARIAESMRLSMRWARRSRDAFGDRPGHALFGIQQGGLERDLREESAEALKEIGFEGYAVGGLAVGEGQQAMFGVLDYAPAQLPVDKPRYLMGVGKPDDIVGAVKRGIDMMDCVLPSRSGRTGQAWTRRGQVNLRNARHADDPRPLDEDCSCPACRNYSRAYLHHVTRSQEMIAGMLLTWHNLHYYQELMAGMREAIAAGRFAAWEAEFHARREEGDIERL

SEQ ID NO: 56994 - protein, 374 aa, unidentified
  source 1..374: note = Limimaricola soesokkakensis
  REGION 1..374: note = tr|A0A1X6YX80|A0A1X6YX80_9RHOB Queuine tRNA-ribosyltransferase OS=Limimaricola soesokkakensis; OX = 1343159 GN=tgt PE=3 SV=1
MSFSFSLNATDGAARTGVISTPRGEIRTPAFMPVGTAATVKAMMPESVRQTGADILLGNTYHLMLRPSAERIDRLGGLHKFMNWDRPILTDSGGFQVMSLASLRKLTERGVTFKSHIDGSKHEITPERSMEIQKLLGSDIVMAFDECPALPADRTRIAESMRLSMRWAQRSRDAFGDRPGHALFGIQQGGLERDLREESAEALKEIGFEGYAVGGLAVGEGQEAMFGCLDYAPAQLPEDKPRYLMGVGKPDDIVGAVKRGIDMMDCVLPSRSGRTGQAWTRRGQVNMRNARHADDPRPLDEACGCPACRNYSRAYLHHVVRSQEMIAGMLLTWHNLHYYQELMGDMRAAIAAGDFASFETRFHALRAEGDIEPL

SEQ ID NO: 56995 - protein, 378 aa, unidentified
  source 1..378: note = Limimonas halophila
  REGION 1..378: note = tr|A0A1G7SHV8|A0A1G7SHV8_9PROT Queuine tRNA-ribosyltransferase OS=Limimonas halophila OX=1082479; GN = tgt PE=3 SV=1
MSIGFQLQARDGAARRGVVETAHGRVDTPAFMPVGTAATVKAMRPQDVAATGAQMVLGNTYHLMLRPGAETVAELGGLHRFMAWPGPILTDSGGYQVMSLAKLRKIDERGVRFRSHIDGSKHELTPEGAVEIQDLLDADIAMQLDECPAAGRPRDEVADSMQLSLRWAERCRAAFRERAGYGLFAIVQGGMHDDLRRESAHALTGMDFPGYAVGGLAVGEGQAEMFRVLDVTVPELPEAKPRYLMGVGRPLDIVGAVERGIDLFDCVLPTRSGRTAQAFTHGGAVNIRNARHRRDPRPLDPACGCGVCSTFSRAYLHHLIRAGEMLGPMLLTEHNVFFYQTLMHRLRDAIAAGALADEAARIRAEQAAGDIAPMEAKA

SEQ ID NO: 56996 - protein, 379 aa, Limnobacter sp.
  REGION 1..379: note = tr|A0A151QK93|A0A151QK93_9BURK Queuine tRNA-ribosyltransferase OS=Limnobacter sp. CACIAM 66H1; OX = 1813033 GN=tgt PE=3 SV=1
MSALSFKLKTTSGKARRGEITTAHGVIQTPIFMPVGTYGTVKGMTPRDLTEIQAQIILGNTFHLWMRPGLDIMEKFGGLHQFMGWKGPILTDSGGFQVFSLGAMRKIKEEGVHFRSPVNGDKLFLTPEESMRIQTVLNSDIVMIFDECTPYPATHTEARLSMEMSMRWARRSRDAFDAMGNHNGLFGIVQGGMYEDLRDISLQGLEEIGFDGYAIGGLSVGEPKDDMQRILAHTAPKLPQHKPRYLMGVGTPEDLVNAVGQGVDMFDCVMPTRNARNGWLFTRTGDIRIRNAKFRNDENPLDATCTCYTCKNFSRAYLHHLDRSKEILGAQLNTMHNLHYYLDLMREMREAIEQDRFDEFVKEFTALRAQNAQAQSREL

SEQ ID NO: 56997 - protein, 386 aa, Limnobacter sp.
  REGION 1..386: note = tr|A0A520TC07|A0A520TC07_9BURK Queuine tRNA-ribosyltransferase OS=Limnobacter sp. OX=2003368; GN = tgt PE=3 SV=1
MSALSFKLKTTSGKARRGEITTAHGVIQTPIFMPVGTYGTVKGMTPRDLTEIQAQIILGNTFHLWMRPGLDIMEKFGGLHQFMGWKGPILTDSGGFQVFSLGAMRKIKEEGVHFRSPVNGDKLFLTPEESMRIQTVLNSDIVMIFDECTPYPATHTEARLSMEMSMRWARRSRDSFDALGNNNGLFGIVQGGMYEDLRDISLQGLEEIGFDGYAIGGLSVGEPKDDMQRILAHTAPKLPQHKPRYLMGVGTPEDLVNAVGQGIDMFDCVMPTRNARNGWLFTRTGDIRIRNAKFRNDESPLDATCSCYTCKNFSRAYLHHLDRSKEILGAQLNTMHNLHYYLELMREMREAIEQDRFDEFVKEFNALRAENALAGQQQVQQQPQSQ

SEQ ID NO: 56998 - protein, 374 aa, unidentified
  source 1..374: note = Limnobaculum parvum
  REGION 1..374: note = tr|A0A2Y9U0Z0|A0A2Y9U0Z0_9ENTR Queuine tRNA-ribosyltransferase OS=Limnobaculum parvum OX=2172103; GN = tgt PE=3 SV=1
MKFELQTKDGRARRGRLVFERGTVETPAFMPVGTYGTVKGMTPEEVKDTGAQIILGNTFHLWLRPGQEIMRKHGDLHDFMQWHGPILTDSGGFQVFSLGDIRKITEEGVNFRNPINGDSIFLSPEKSMEIQYDLGSDIVMIFDECTPYPADWDYAKRSMEMSLRWAKRSRQRFDELQNKNALFGIIQGSVYEDLRDVSVKGLVEIGFDGYAVGGLAVGEPKEDMHRILEHVCPQIPEDKPRYLMGVGKPEDLVEGVRRGIDMFDCVMPTRNARNGHLFVTDGVVKIRNAQHKDDTSTLDEHCDCYTCRHYSRAYLHHLDRCNEILGARLNTIHNLRYYQRLMAGLREAIEQGTLEHFVTDFYGRIGKAVPPLAK

SEQ ID NO: 56999 - protein, 387 aa, unidentified
  source 1..387: note = Limnochorda pilosa
  REGION 1..387: note = tr|A0A0K2SMX8|A0A0K2SMX8_9FIRM Queuine tRNA-ribosyltransferase OS=Limnochorda pilosa OX=1555112; GN = tgt PE=3 SV=1
MDGAFEVLARDPASGARAGRLHTAHGVVETPAFMPVGTQASVKTLSSEELEELGASMILGNTYHLYLRPGAGRVAELGGLHRFMAWSGSILTDSGGFQVLSLTALRRVDEEGVTFRSHLDGSTHRLTPEGVVHLQELLGSDVAMVLDECPPYPSPPEEVEASLRRTERWAEIALASHRRDDQLLFGIVQGGMEAGVRRRAARALGKLEFDGYGIGGLSIGEPKETMYRMLEASVPELPPARPRYLMGVGSPDALVEGVARGIDLFDSVLPTRVARHGTVLTRRGPVTVRNARYASDERPLDPSCDCRVCRRYSRAYVRHLLNAGEILGLRLCSYHNLHVLLRLMEEVRAAIRQGTFAEVRRAAAALFPRRQEPAAGPRPAPTTEVTG

SEQ ID NO: 57000 - protein, 388 aa, Limnohabitans curvus
  REGION 1..388: note = tr|A0A315ES02|A0A315ES02_9BURK Queuine tRNA-ribosyltransferase OS=Limnohabitans curvus OX=323423; GN = tgt PE=3 SV=1
MLKFDVLAKDTSSHARRGTLTLNHGVVQTPIFMPVGTYGTVKGVMPRSLEEMGAQIILGNTFHLWMRPGLDVMQSFGGLHDFERWNKPILTDSGGFQVWSLGAMRKITEEGVTFASPVNGDKLFMSPEVSMQIQTTLNSDIVMQLDECTPYETKGHLTTEAEARKSMEMSRRWAVRSKDEFARLENPNALFGIVQGGMFTNLRQESLDALVEMNFPGYAVGGVSVGEPKDQMLEIMAHTPHRLPEHKPRYLMGVGTPEDLVQGVADGVDMFDCVMPTRNARNGTLFTRFGDLKIRNARHKADHGPLDSTCTCYTCAGHTRPDGTSSGGFSRAYLHHLDRCGEMLGPMLTTVHNLHYYLNLMREVREALEVGQFGAFRAKFKEDRARGV

SEQ ID NO: 57001 - protein, 390 aa, Limnohabitans parvus
  REGION 1..390: note = tr|A0A315EAI4|A0A315EAI4_9BURK Queuine tRNA-ribosyltransferase OS=Limnohabitans parvus II-B4; OX = 1293052 GN=tgt PE=3 SV=1
MLQFDLLKTDPSSHARRGTLTLNHGVVQTPIFMPVGTYGTVKGVMPRSLHEMGAQIILGNTFHLWMRPGLDIMKGFGGLHQFEKWDKPILTDSGGFQVWSLGDMRKITEEGVTFASPVNGDKLFMSPEVSMQIQTILNSDIVMQLDECTPYETKGHLTTEAEARKSMEMSRRWAVRSKDEFARLENPNALFGIVQGGMFENLRQESLDALVEMDFPGYAIGGVSVGEPKDLMLQIMAHTPHRLPANKPRYLMGVGTPEDLVQGVADGVDMFDCVMPTRNARNGTVFTRFGDLKLRNARHKNDPQPLDTSCTCHACAGASGVSWDNGGRDGFSRAYMHHLDRCGEMLGPMLTTIHNLHYYLNLMREVRESLDVGQFAQFRAQFKTDRARGV

SEQ ID NO: 57002 - protein, 390 aa, Limnohabitans planktonicus
  REGION 1..390: note = tr|A0A2T7U8I0|A0A2T7U8I0_9BURK Queuine tRNA-ribosyltransferase OS=Limnohabitans planktonicus II-D5 OX=1293045 GN=tgt PE=3 SV=1
MLQFDLLKTDPSSHARRGKLTLNHGVVQTPIFMPVGTYGTVKGVMPRSLHEMGAQIILGNTFHLWMRPGLDIMKGFGGLHQFEKWDKPILTDSGGFQVWSLGDMRKITEEGVTFASPVNGDKLFMSPEVSMQIQTILNSDIVMQLDECTPYETKGHLTTEAEARKSMEMSRRWAVRSKDEFARLENPNALFGIVQGGMFENLRQESLDALVEMDFPGYAIGGVSVGEPKEQMLQIMAHTPHRLPAHKPRYLMGVGTPEDLVQGVADGVDMFDCVMPTRNARNGTVFTRFGDLKLRNARHKNDPQPLDTSCTCHACAGTSGVSWDQGGREGFSRAYMHHLDRCGEMLGPMLTTIHNLHYYLNLMREVRESLDAGEFSQFRAQFKSDRARGV

SEQ ID NO: 57003 - protein, 390 aa, Limnohabitans sp.
  REGION 1..390: note = tr|A0A315BP87|A0A315BP87_9BURK Queuine tRNA-ribosyltransferase OS=Limnohabitans sp. MMS-10A-160; OX = 1835766 GN=tgt PE=3 SV=1
MLKFDLLKTDPSSHARRGTLTLNHGVVQTPIFMPVGTYGTVKGVMPRSLHEMGAQIILGNTFHLWMRPGLDIMKGFGGLHPFEKWDKPILTDSGGFQVWSLGDMRKITEEGVTFASPVNGDKLFMSPEVSMQIQTILNSDIVMQLDECTPYETKGHLTTEAEARKSMEMSRRWAVRSKDEFARLENPNALFGIVQGGMFENLRQESLDALVEMDFPGYAVGGVSVGEPKDLMLQIMAHTPHRLPANKPRYLMGVGTPEDLVQGVADGVDMFDCVMPTRNARNGTVFTRFGDLKLRNARHKNDPQPLDTSCTCHACAGTSGVSWDQGGREGFSRAYMHHLDRCGEMLGPMLTTIHNLHYYLNLMREVRESLDAGQFSQFRAQFKSDRARGV

SEQ ID NO: 57004 - protein, 390 aa, Limnohabitans sp.
  REGION 1..390: note = tr|A0A2M6V135|A0A2M6V135_9BURK Queuine tRNA-ribosyltransferase OS=Limnohabitans sp. G3-2; OX = 1100711 GN=tgt PE=3 SV=1
MLQFDLLKTDPSSHARRGTLTLNHGVVQTPIFMPVGTYGTVKGVMPRSLHEMGAQIILGNTFHLWMRPGLDIMKGFGGLHQFEKWDKPILTDSGGFQVWSLGDMRKITEEGVTFASPVNGDKLFMSPEVSMQIQTILNSDIVMQLDECTPYETKGHLTTEAEARKSMEMSRRWAVRSKDEFARLENPNALFGIVQGGMFENLRQESLDALVEMDFPGYAIGGVSVGEPKDLMLQIMAHTPHRLPANKPRYLMGVGTPEDLVQGVADGVDMFDCVMPTRNARNGTVFTRFGDLKLRNARHKNDPQPLDTSCTCHACAGASGVSWDQGGRDGFSRAYMHHLDRCGEMLGPMLTTIHNLHYYLNLMREVRESLDAGEFSTFRARFNSERARGV

SEQ ID NO: 57005 - protein, 387 aa, unidentified
  source 1..387: note = Limnoraphis robusta
  REGION 1..387: note = tr|A0A0F5YGK4|A0A0F5YGK4_9CYAN Queuine tRNA-ribosyltransferase OS=Limnoraphis robusta CS-951; OX = 1637645 GN=tgt PE=3 SV=1
MSEPFSFQIQARCSQTQARAGVFSTPHGLVETPRFMPVGTLANVKTLTPAHLEAAGAQMVLSNTYHLHLQPGEKIVANAGGLHRFMAWNGPILTDSGGFQVFSLSEIRTINEEGVIFRSPHDGLMINFTPERSIHIQNELGADVIMAFDECPPYPASREQVLNATERTYRWLERCITAHQRSDQALFGIVQGGVYPDLRQNAAKQLVKLDLPGYAIGGVSVGEPSELIEKIVQVTTPFLPPDKPRYLMGVGTYREMAQAIASGVDLFDCVIPTRLARHGAALVQGERWNLKNAQFREDFQPLDETCPCYTCQNFSRAYLSHLVRAKELLAYTLLSIHNVTELIRFTQRIRDAIFRDRFSEEFAEWIKPSESSTHTLEEVGFSRQDDP

SEQ ID NO: 57006 - protein, 370 aa, unidentified
  source 1..370: note = Limnospira indica
  REGION 1..370: note = tr|H1WD59|H1WD59_9CYAN Queuine tRNA-ribosyltransferase OS=Limnospira indica PCC 8005; OX = 376219 GN=tgt PE=3 SV=1
MPQSFSFQIQTRCTHTHARAGVFVTPHGIVETPRFMPVGTLANVKTLTPAQLLDTGAQMVLSNTYHLHLQPGEKIVAAAGGIHKFMGWNGPILTDSGGFQVFSLSEMRTVTEAGVRFRSPHDGAIIELSPERSIEIQNQLGADVIMAFDECPPYPASREDVVAATNRTVRWLERCIAAHDRPEAALFGIVQGGVYPDLRVAAAKKLVEFDLPGYAIGGVSVGEPTDLMEMVVRVTTPILPDHKPRYLMGIGTYREMAQAIASGIDLFDCVIPTRLARHGAALVAGERWNLKNAQFREDFRPLDPSCPCYTCQNFSRAYISHLVRAKELLAYTLLSIHNVTELIRFTTRIRDAILGDRFTDEFAQYLQVQS

SEQ ID NO: 57007 - protein, 371 aa, unidentified
  source 1..371: note = Limnothrix rosea
  REGION 1..371: note = tr|A0A1Q4R0U6|A0A1Q4R0U6_9CYAN Queuine tRNA-ribosyltransferase OS=Limnothrix rosea IAM M-220; OX = 454133 GN=tgt PE=3 SV=1
MSHFHFELQKECRDTKARVGVFHTPHGIVETPRFMPVGTLANVKGITPDHLEQAQAHMVLSNTYHLHLQPGEDIVKKAGGLHRFMAWEQPILTDSGGFQVFSLSEMRKIREEGVVFRSPKDGRLIDMTPERSIQIQNDLGADVIMAFDECPPGDAGREVVEAATARTYRWLKRCITAHQRDDQALFGIVQGGIFLDLRSQAAAELMALDLPGYAIGGVSVGEAPENIRKVVQHTAPLLPKEKIRYLMGVGTYREMAQAIASGIDVFDCVIPTRLGRHGAALVQGDRWNLKNAQFKEDFQPLDETCPCYTCQNFTRAYLHHLIKAKEMLAYMLLSLHNVTELIQFTVKIRESILSDRFVADFGDWLEPTASE

SEQ ID NO: 57008 - protein, 380 aa, unidentified
  source 1..380: note = Limnothrix sp.
  REGION 1..380: note = tr|A0A372DEY8|A0A372DEY8_9CYAN Queuine tRNA-ribosyltransferase OS=Limnothrix sp. CACIAM 69d; OX = 1890733 GN=tgt PE=3 SV=1
MAPDFRFELVAECSQTSARVGVFHTPHGIVETPRFMPVGTLANVKTLSPDQVAATGAQMILSNTYHLHLQPGEGIVQAAGGLHKFMNWQGPILTDSGGFQVFSLSEMRQISDRGVTFRSPHDGSIIDFTPEKSIQIQNALGSDVIMAFDECPPYPATREQVEKATDRTYQWLLRCIEAHQRSDQALFGIVQGGTYADLRAKAAADLAALDLPGYAIGGVSVGEPPELIEHIVKATTPLLPPHKLRYLMGVGTYREMAQAIAAGIDVFDCVIPTRLARHGAALVQGERWNLKNAQFREDFRPLDETCPCYTCQNFSRAYISHLIRAKEILGYTLLAIHNVTELIRFTQRIRSAILAGNFADEFAHWLRPADDLAAAARLDD

SEQ ID NO: 57009 - protein, 383 aa, unidentified
  source 1..383: note = Limnothrix sp.
  REGION 1..383: note = tr|A0A1C0VDM5|A0A1C0VDM5_9CYAN Queuine tRNA-ribosyltransferase OS=Limnothrix sp. P13C2 OX=1880902; GN = tgt PE=3 SV=1
MSAIAPDFRFELVAECSQTSARVGVFHTPHGIVETPRFMPVGTLANVKTLSPDQVAATGAQMILSNTYHLHLQPGEGIVQAAGGLHKFMNWQGPILTDSGGFQVFSLSEMRQISDRGVTFRSPHDGSIIDFTPEKSIQIQNALGSDVIMAFDECPPYPATREQVEKATDRTYQWLLRCIEAHQRSDQALFGIVQGGTYADLRAKAAADLAALDLPGYAIGGVSVGEPPELIEHIVKATTPLLPPHKLRYLMGVGTYREMAQAIAAGIDVFDCVIPTRLARHGAALVQGERWNLKNAQFREDFRPLDETCPCYTCQNFSRAYIGHLIRAKEILGYTLLAIHNVTELIRFTQRIRSAILAGNFADEFAHWLRPADDLAAAARLDD

SEQ ID NO: 57010 - protein, 376 aa, Lishizhenia tianjinensis
  REGION 1..376: note = tr|A0A1I7BK44|A0A1I7BK44_9FLAO Queuine tRNA-ribosyltransferase OS=Lishizhenia tianjinensis; OX = 477690 GN=tgt PE=3 SV=1
MHFTLQKKDEKTKARAGELKTDHGTIQTPIFMPVGTAGTVKGVHQHELDKEINAQIILGNTYHLYLKPGLEVIEGAGGLHKFNGWNKPILTDSGGYQVYSLSGQRKIKEAGVKFQSHHDGSYHFFTPERAIDIQRTIGADIIMAFDECTPYPCDYAYAKKSMHMTHRWLKRCFDQMDRTAPKYGYEQALFPIVQGSVYEDLRERSAEKIASFDAVGNAIGGLSVGEPDEELYKATDLVCGILPEEKPRYLMGVGTPVNILECIALGVDMFDCVMPTRNARHGMLFTSEGIINIKNKKWEMDFSPLDPNGTATVDQVYSKSYVRHLIRSNEFLGFQIASIHNLAFYLALVTEARTRILDGTFSEWKDKMVVKLANRL

SEQ ID NO: 57011 - protein, 379 aa, unidentified
  source 1..379: note = Listeria aquatica
  REGION 1..379: note = tr|W7AVC0|W7AVC0_9LIST Queuine tRNA-ribosyltransferase OS=Listeria aquatica FSL S10-1188; OX = 1265818 GN=tgt PE=3 SV=1
MAAISYELIKTDKKTGARLGKLHTPHGTFETPMFMPVGTQATVKTMSPEELKQMGAGVILSNTYHLWLRPGEKLVEEAGGLHRFMNWDQPILTDSGGFQVFSLSDMRDIKEEGVHFRNHLNGDKLFLSPEKAIQIQNSLGADIMMSFDECPPYPATHDYMKRSVERTSRWAERGLKAHMKPETQGLFGIVQGGAYEDLRTQSAKELVSLDFPGYSIGGLSVGEPKDVMNQVLEYTTPLLPSGKPRYLMGVGSPDSLIDGVIRGIDMFDCVLPTRIARNGTCMTSNGRLVIKNAKFAHDFGPLDENCDCYTCRHYSRAYIRHLIRCDETFGIRLTTYHNLYFLLNLMEKVRNAIREDALLEFREEFFEQYGFNGPNAKNF

SEQ ID NO: 57012 - protein, 379 aa, unidentified
  source 1..379: note = Listeria booriae
  REGION 1..379: note = tr|A0A099W347|A0A099W347_9LIST Queuine tRNA-ribosyltransferase OS=Listeria booriae OX=1552123; GN = tgt PE=3 SV=1
MAAITYELIKTDKQTGARLGKIHTPHGSFDTPMFMPVGTLATVKTMSPEELKAMGSGIILSNTYHLWLRPGEDLIEEAGGLHKFMNWDQAILTDSGGYQVFSLSDMRDIKEEGVHFRNHLNGDKLFLSPEKAIQVQNSLGSDIMMSFDECPPYPATHEYMKKSIERTSRWAERGLKAHARPHDQGLFGIVQGGSYKDLREQSARDLVSMDFPGYSIGGLSVGEPKDIMNEVLEYTTPLLPSNKPRYLMGVGSPDALIDGVIRGVDMFDCVLPTRIARNGTCMTSQGRLVVRNAKFARDFRPLDEACDCYTCKNYSRAYIRHLLRCDETFGIRLTTYHNLHFLLHLMEQVRGAIMNDRLADFREEFFEQYGLNGPNAKNF

SEQ ID NO: 57013 - protein, 379 aa, unidentified
  source 1..379: note = Listeria cornellensis
  REGION 1..379: note = tr|W7C1A2|W7C1A2_9LIST Queuine tRNA-ribosyltransferase OS=Listeria cornellensis FSL F6-0969 OX=1265820 GN=tgt PE=3 SV=1
MAAITYELIKTDKQTGARLGKIHTPHGSFDTPMFMPVGTLATVKTMSPEELKAMGSGIILSNTYHLWLRPGEDLIEEAGGLHKFMNWDQAILTDSGGYQVFSLSDMRDIKEEGVHFRNHLNGDKLFLSPEKAIQIQNSLGSDIMMSFDECPPYPATHDYMKKSIERTSRWAERGLKAHARPHDQGLFGIVQGGSYKDLREQSARDLVSMDFPGYSIGGLSVGEPKDIMNEVLEYTTPLLPANKPRYLMGVGSPDALIDGVIRGIDMFDCVLPTRIARNGTCMTSKGRLVVRNAKFARDFRPIDEVCDCYTCKNYSRAYIRHLIRCDETFGIRLTTYHNLHFLLNLMEQVRGAIMNDRLADFREEFFEQYGLNGPNAKNF

SEQ ID NO: 57014 - protein, 382 aa, unidentified
  source 1..382: note = Listeria fleischmannii
  REGION 1..382: note = tr|W7DTA3|W7DTA3_9LIST Queuine tRNA-ribosyltransferase OS=Listeria fleischmannii FSL S10-1203 OX=1265822 GN=tgt PE=3 SV=1
MTAIRYELIKTDKKTGARLGKLHTPHGTFDTPMFMPVGTQATVKTMSPEELKKMGAGVILSNTYHLWLRPGEQLIEQAGGLHKFMNWDQPILTDSGGFQVFSLSDMRDIKEEGVHFRNHLNGDKLFLSPEKAIQIQNALGSDIMMSFDECPPYPATHDYMKRSVERTSRWAERGLKAHMKPDIQGLFGIVQGGAYEDLRRQSAEDLVSLDFPGYSIGGLSVGEPKDVMNEVLEFTTPFLPSGKPRYLMGVGSPDSLIDGVIRGIDMFDCVLPTRIARNGTCMTSNGRLVIKNAKFANDFGPLDENCSCYTCQNYSRAYIRHLIRCDETFGIRLTTYHNLHFLLNLMEQVRDAIRHDRLLEFREEFFEQYGFNGPNAKNFLIK

SEQ ID NO: 57015 - protein, 379 aa, unidentified
  source 1..379: note = Listeria fleischmannii
  REGION 1..379: note = tr|A0A2X3HEZ9|A0A2X3HEZ9_9LIST Queuine tRNA-ribosyltransferase OS=Listeria fleischmannii subsp. fleischmannii OX=1671902 GN=tgt PE=3 SV=1
MTAIRYELIKTDKKTGARLGKLHTPHGTFDTPMFMPVGTQATVKTMSPEELKKMGAGVILSNTYHLWLRPGEQLIEQAGGLHKFMNWDQPILTDSGGFQVFSLSDMRDIKEEGVHFRNHLNGDKLFLSPEKAIQIQNALGSDIMMSFDECPPYPATHDYMKRSVERTSRWAERGLKAHMKPDIQGLFGIVQGGAYEDLRRQSAEDLVSLDFPGYSIGGLSVGEPKDVMNEVLEFTTPFLPSGKPRYLMGVGSPDSLIDGVIRGIDMFDCVLPTRIARNGTCMTSNGRLVIKNAKFANDFGPLDENCSCYTCQNYSRAYIRHLIRCDETFGIRLTTYHNLHFLLNLMKQVRDAIRHDRLLEFREEFFEQYGFNGPNAKNF

SEQ ID NO: 57016 - protein, 393 aa, unidentified
  source 1..393: note = Listeria floridensis
  REGION 1..393: note = tr|W7CG36|W7CG36_9LIST Queuine tRNA-ribosyltransferase OS=Listeria floridensis FSL S10-1187 OX=1265817 GN=tgt PE=3 SV=1
MTAISYELIKTDKKNGARLGKLHTPHGTFDTPMFMPVGTQATVKTMSPEELKQMGAGVILSNTYHLWLRPGEKLIEEAGGLHKFMNWDQPILTDSGGFQVFSLSDMRDIKEEGVHFRNHLNGDKLFLSPEKAIAIQNSLGSDIMMSFDECPPYPATHEYMKRSVERTSRWAERGLKAHARPHDQGLFGIVQGGAYEDLRAQSAKDLVSLDFPGYSIGGLSVGEPKDVMNQVLEHTTPLLPSGKPRYLMGVGSPDSLIDGVIRGIDMFDCVLPTRIARNGTCMTSAGRLVIKNAKFANDFRPLDENCDCYTCRNYSRAYIRHLIRCDETFGIRLTTYHNLHFLLHLMEEIRDAIRNDSLLEFREEFFEQYGFNGPNAKNFLINLLDNLRGAESF

SEQ ID NO: 57017 - protein, 379 aa, unidentified
  source 1..379: note = Listeria grandensis
  REGION 1..379: note = tr|W7BE52|W7BE52_9LIST Queuine tRNA-ribosyltransferase OS=Listeria grandensis FSL F6-0971; OX = 1265819 GN=tgt PE=3 SV=1
MAAITYELIKTDKQTGARLGKIHTPHGSFDTPMFMPVGTLATVKTMSPEELKAMGSGIILSNTYHLWLRPGEDLIEEAGGLHKFMNWDQAILTDSGGYQVFSLSDMRDIKEEGVHFRNHLNGDKLFLSPEKAIQIQNSLGSDIMMSFDECPPYPATHDYMKKSIERTSRWAERGLKAHARPHDQGLFGIVQGGSYKDLREQSARDLVSMDFPGYSIGGLSVGEPKDIMNEVLEYTTPLLPANKPRYLMGVGSPDALIDGVIRGIDMFDCVLPTRIARNGTCMTSQGRLVVRNAKFARDFRPIDEACDCYTCKNYSRAYIRHLIRCDETFGIRLTTYHNLHFLLNLMEQVRESIMNDRLADFREEFFEQYGLNGPNAKNF

SEQ ID NO: 57018 - protein, 379 aa, Listeria grayi
  REGION 1..379: note = tr|D7UZ09|D7UZ09_LISGR Queuine tRNA-ribosyltransferase OS=Listeria grayi DSM 20601; OX = 525367 GN=tgt PE=3 SV=1
MTAIRYELIKTDKQTGARLGKIHTPHGTFDTPMFMPVGTLATVKTMSPEELKAMGAGIILSNTYHLWLRPGEELIREAGGLHRFMNWDQPILTDSGGFQVFSLSDIRDIKEEGVHFRNHLNGDKLFLSPEKAIQIQNALGSDIMMSFDECPPYPATHDYMKKSVERTSRWAERGLRAHERPEDQGLFGIVQGGAYQELRELSAKDLVSLDFPGYSIGGLSVGEPKSVMNEVLEYTTPLLPTNKPRYLMGVGSPDSLIDGVIRGIDMFDCVLPTRIARNGTCMTSQGRLVIKNAKFARDFRPIDEDCDCYTCRNYSRAYVRHLIKCDETFGIRLTTYHNLHFLLNLMKQVRTAIQADRLGDFREEFFEQYGLNRPDAKNF

SEQ ID NO: 57019 - protein, 342 aa, Listeria grayi
  REGION 1..342: note = tr|A0A378MAD9|A0A378MAD9_LISGR Queuine tRNA-ribosyltransferase OS=Listeria grayi OX=1641 GN=tgt; PE = 3 SV=1
MTAIRYELIKTDKQTGARLGKIHTPHGTFDTPMFMPVGTLATVKTMSPEELKAMGAGIILSNTYHLWLRPGEELIREAGGLHRFMNWDQPILTDSGGFQVFSLSDIRDIKEEGVHFRNHLNGDKLFLSPEKAIQIQNALGSDIMMSFDECPPYPATHDYMKKSVERTSRWAERGLRAHERPEDQGLFGIVQGGAYQELRELSAKDLVSLDFPGYSIGGLSVGEPKSVMNEVLEYTTPLLPTNKPRYLMGVGSPDSLIDGVIRGIDMFDCVLPTRIARNGTCMTSQGRLVIKNAKFARDFRPIDEDCDCYTCRNYSRAYVRHLIKCDETFGIRLTTYHNLHFC

SEQ ID NO: 57020 - protein, 379 aa, Listeria innocua
  REGION 1..379: note = sp|Q92BI4|TGT_LISIN Queuine tRNA-ribosyltransferase; OS = Listeria innocua serovar 6a (strain ATCC BAA-680 / CLIP 11262) OX=272626 GN=tgt PE=3 SV=1
MSAIRYELIKTDKQTGARLGKIHTPHGTFDTPMFMPVGTLATVKTMSPEELKAMGAGIILSNTYHLWLRPGEELIREAGGLHKFMNWDQPILTDSGGFQVFSLSKMRDIKEEGVHFRNHLNGDKLFLSPEKAIQIQNALGSDIMMSFDECPPYPASHEYMKKSVERTSRWAERGLKAHERPEDQGLFGIVQGGAYEDLRAQSAKDLVSLDFPGYSIGGLSVGEPKDVMNRVLEHTTPLLPANKPRYLMGVGSPDSLIDGVIRGVDMFDCVLPTRIARNGTCMTSSGRLVIKNAKFTHDFRPIDENCDCYTCKNYSRAYIRHLIRCEETFGIRLTTYHNLHFLLNLMKQVRSAIMEDRLADFREEFFEQYGFNRPDAKNF

SEQ ID NO: 57021 - protein, 379 aa, Listeria innocua; identical to SEQ ID NO: 57020
  REGION 1..379: note = tr|A0A5H5AT68|A0A5H5AT68_LISIO tRNA guanosine(34) transglycosylase Tgt OS=Listeria innocua OX=1642 GN=tgt; PE = 4 SV=1

SEQ ID NO: 57022 - protein, 379 aa, Listeria ivanovii
  REGION 1..379: note = tr|A0A097B5I5|A0A097B5I5_LISIV Queuine tRNA-ribosyltransferase OS=Listeria ivanovii subsp. londoniensis OX=202752 GN=tgt PE=3 SV=1
MSAIRYELIKTDKQTGARLGKIHTPHGTFDTPMFMPVGTLATVKTMSPEELKAMGAGIILSNTYHLWLRPGEELIREAGGLHKFMNWDQPILTDSGGFQVFSLSKMRDIKEEGVHFRNHLNGDKLFLSPEKAIQIQNALGSDIMMSFDECPPYPASHEYMKKSVERTSRWAERGLKAHARPDDQGLFGIVQGGAYEDLRAQSAKDLVSLDFPGYSIGGLSVGEPKDVMNQVLEHTTPLLPTNKPRYLMGVGSPDSLIDGVIRGIDMFDCVLPTRIARNGTCMTSNGRLVIKNAKFTHDFRPIDENCDCYTCKNYSRAYIRHLIRCEETFGIRLTTYHNLHFLLNLMKQVRSAIMEDRLADFREEFFEQYGFNRPDAKNF

SEQ ID NO: 57023 - protein, 379 aa, Listeria ivanovii
  REGION 1..379: note = tr|G2Z9M9|G2Z9M9_LISIP Queuine tRNA-ribosyltransferase OS=Listeria ivanovii (strain ATCC BAA-678 / PAM 55) OX=881621 GN=tgt PE=3 SV=1
MSAIRYELIKTDKQTGARLGKIHTPHGTFDTPMFMPVGTLATVKTMSPEELKAMGAGIILSNTYHLWLRPGEELIREAGGLHKFMNWDQPILTDSGGFQVFSLSEMRDIKEEGVHFRNHLNGDKLFLSPEKAIQIQNALGSDIMMSFDECPPYPASHEYMKKSVERTSRWAERGLKAHARPGDQGLFGIVQGGAYEDLRAQSAKDLVSLDFPGYSIGGLSVGEPKDVMNQVLEHTTPLLPTNKPRYLMGVGSPDSLIDGVIRGIDMFDCVLPTRIARNGTCMTSNGRLVIKNAKFTHDFRPIDENCDCYTCKNYSRAYIRHLIRCEETFGIRLTTYHNLHFLLNLMKQVRSAIMEDRLADFREEFFEQYGFNRPDAKNF

SEQ ID NO: 57024 - protein, 379 aa, unidentified
  source 1..379: note = Listeria kieliensis
  REGION 1..379: note = tr|A0A3D8TVY8|A0A3D8TVY8_9LIST Queuine tRNA-ribosyltransferase OS=Listeria kieliensis OX=1621700; GN = tgt PE=3 SV=1
MAAISYELIKTDKKTGARLGKLHTPHGTFETPMFMPVGTQATVKTMSPEELKQMGAGVILSNTYHLWLRPGEKLVEEAGGLHRFMNWDQPILTDSGGFQVFSLSDMRDIKEEGVHFRNHLNGDKLFLSPEKAIQIQNSLGADIMMSFDECPPYPATHEYMKRSVERTSRWAERGLKAHMKPDVQGLFGIVQGGAYEDLRTQSAKDLVSLDFPGYSIGGLSVGEPKDVMNQVLEYTTPLLPSGKPRYLMGVGSPDSLIDGVIRGIDMFDCVLPTRIARNGTCMTSNGRLVIKNAKFAHDFGPLDENCDCYTCRNYSRAYIRHLIRCDETFGIRLTTYHNLYFLLNLMEKVRNAIREDALLEFREEFFEQYGFNGPNAKNF

SEQ ID NO: 57025 - protein, 379 aa, Listeria marthii
  REGION 1..379: note = tr|E3YQH8|E3YQH8_9LIST Queuine tRNA-ribosyltransferase OS=Listeria marthii FSL S4-120; OX = 702457 GN=tgt PE=3 SV=1
MSAIRYELIKTDKQTGARLGKIHTPHGTFDTPMFMPVGTLATVKTMSPEELKAMGAGIILSNTYHLWLRPGEELIREAGGLHKFMNWDQPILTDSGGFQVFSLSKMRDIKEEGVHFRNHLNGDKLFLSPEKAIQIQNALGSDIMMSFDECPPYPASHEYMKKSVERTSRWAERGLKAHERPEDQGLFGIVQGGAYEDLRAQSAKDLVSLDFPGYSIGGLSVGEPKDVMNRVLEHTTPLLPANKPRYLMGVGSPDSLIDGVIRGVDMFDCVLPTRIARNGTCMTSSGRLVIKNAKFTHDFRPIDENCDCYTCKNYSRAYIRHLIRCEETFGIRLTTYHNLHFLLNLMKQVRGAIMEDRLADFREEFFEQYGFNRPDAKNF

SEQ ID NO: 57026 - protein, 379 aa, Listeria monocytogenes
  REGION 1..379: note = sp|Q8Y700|TGT_LISMO Queuine tRNA-ribosyltransferase; OS = Listeria monocytogenes serovar 1/2a (strain ATCC BAA-679 / EGD-e) OX=169963 GN=tgt PE=3 SV=1
MSAIRYELIKTDKQTGARLGKIHTPHGTFDTPMFMPVGTLATVKTMSPEELKAMGAGIILSNTYHLWLRPGEELIREAGGLHKFMNWDQPILTDSGGFQVFSLSKMRDIKEEGVHFRNHLNGDKLFLSPEKAIQIQNALGSDIMMSFDECPPYPASHEYMKKSVERTSRWAERGLKAHVRPEDQGLFGIVQGGAYEDLRAQSAKDLVSLDFPGYSIGGLSVGEPKDVMNRVLEHTTPLLPANKPRYLMGVGSPDSLIDGVIRGVDMFDCVLPTRIARNGTCMTSSGRLVIKNAKFTHDFRPIDENCDCYTCKNYSRAYIRHLIRCEETFGIRLTTYHNLHFLLNLMKQVRGAIMEDRLADFREEFFEQYGFNRPDAKNF

SEQ ID NO: 57027 - protein, 379 aa, Listeria monocytogenes; identical to SEQ ID NO: 57025
  REGION 1..379: note = sp|B8DHL8|TGT_LISMH Queuine tRNA-ribosyltransferase; OS = Listeria monocytogenes serotype 4a (strain HCC23); OX = 552536 GN=tgt PE=3 SV=1

SEQ ID NO: 57028 - protein, 379 aa, unidentified
  source 1..379: note = Listeria riparia
  REGION 1..379: note = tr|W7D9F6|W7D9F6_9LIST Queuine tRNA-ribosyltransferase OS=Listeria riparia FSL S10-1204; OX = 1265816 GN=tgt PE=3 SV=1
MAAITYELIKTDKQTGARLGKIHTPHGSFDTPMFMPVGTLATVKTMSPEELKAMGSGIILSNTYHLWLRPGEDLIEEAGGLHKFMNWDQAILTDSGGYQVFSLSDMRDIKEEGVHFRNHLNGDKLFLSPEKAIQVQNSLGADIMMSFDECPPYPATHEYMKKSIERTSRWAERGLKAHTRPHDQGLFGIVQGGSYKDLREQSARDLVSMDFPGYSIGGLSVGEPKDIMNEVLEYTTPLLPSNKPRYLMGVGSPDALIDGVIRGVDMFDCVLPTRIARNGTCMTSQGRLVVRNAKFARDFRPLDEACDCYTCKNYSRAYIRHLIRCDETFGIRLTTYHNLHFLLHLMEQVRGAIMNDRLADFREEFFEQYGLNGPNAKNF

SEQ ID NO: 57029 - protein, 379 aa, Listeria rocourtiae
  REGION 1..379: note = tr|A0A4R6ZMA4|A0A4R6ZMA4_9LIST Queuine tRNA-ribosyltransferase OS=Listeria rocourtiae OX=647910; GN = tgt PE=3 SV=1
MAAITYELIKTDKQTGARLGKIHTPHGSFDTPMFMPVGTLATVKTMSPEELKAMGSGIILSNTYHLWLRPGEDLIEEAGGLHKFMNWNQAILTDSGGYQVFSLSDMRDIKEEGVHFRNHLNGDKLFLSPEKAIQVQNSLGADIMMSFDECPPYPATHDYMKKSIERTSRWAERGLKAHARPHDQGLFGIVQGGSYKDLREQSARDLVSMDFPGYSIGGLSVGEPKDIMNEVLEYTTPLLPSDKPRYLMGVGSPDALIDGVIRGVDMFDCVLPTRIARNGTCMTSKGRLVVRNAKFARDFRPIDENCDCYTCQNYSRAYIRHLIRCDETFGIRLTTYHNLHFLLHLMEQVRGAIMNDRLADFREEFFEQYGLNGPNAKNF

SEQ ID NO: 57030 - protein, 379 aa, Listeria seeligeri
  REGION 1..379: note = tr|E3ZQR6|E3ZQR6_LISSE Queuine tRNA-ribosyltransferase OS=Listeria seeligeri FSL N1-067; OX = 702453 GN=tgt PE=3 SV=1
MSAIRYELIKTDKQTGARLGKIHTPHGTFDTPMFMPVGTLATVKTMSPEELKAMGAGIILSNTYHLWLRPGEELIREAGGLHKFMNWDQPILTDSGGFQVFSLSKMRDIKEEGVHFRNHLNGDKLFLSPEKAIQIQNALGSDIMMSFDECPPYPASHEYMKKSVERTSRWAERGLKAHARPGDQGLFGIVQGGAYEDLRAQSAKDLVSLDFPGYSIGGLSVGEPKDVMNQVLEHTTPLLPANKPRYLMGVGSPDSLIDGVIRGIDMFDCVLPTRIARNGTCMTSSGRLVIKNAKFTHDFRPIDENCDCYTCKNYSRAYIRHLIRCEETFGIRLTTYHNLHFLLNLMKQVRSAIMEDRLADFREEFFEQYGFNRPDAKNF

SEQ ID NO: 57031 - protein, 379 aa, Listeria seeligeri; identical to SEQ ID NO: 57030
  REGION 1..379: note = tr|A0A5B8AAP8|A0A5B8AAP8_LISSE Queuine tRNA-ribosyltransferase OS=Listeria seeligeri OX=1640; GN = tgt PE=3 SV=1

SEQ ID NO: 57032 - protein, 379 aa, Listeria sp.
  REGION 1..379: note = tr|A0A3N9TTX7|A0A3N9TTX7_9LIST Queuine tRNA-ribosyltransferase OS=Listeria sp. SHR_NRA_18; OX = 2269046 GN=tgt PE=3 SV=1
MAAITYELIKTDKQTGARLGKIHTPHGSFDTPMFMPVGTLATVKTMSPEELKAMGSGIILSNTYHLWLRPGEDLIEEAGGLHKFMNWDQAILTDSGGYQVFSLSDMRDIKEEGVHFRNHLNGDKLFLSPEKAIQIQNSLGSDIMMSFDECPPYPATHDYMKKSIERTSRWAERGLKAHARPHDQGLFGIVQGGSYKDLREQSARDLVSMDFPGYSIGGLSVGEPKDIMNEVLEYTTPLLPANKPRYLMGVGSPDALIDGVIRGIDMFDCVLPTRIARNGTCMTSKGRLVVRNAKFARDFRPIDEACDCYTCKNYSRAYIRHLIRCDETFGIRLTTYHNLHFLLNLMEQVRGAIMNDRLADFREEFFEQYGLNGPNAKNF

SEQ ID NO: 57033 - protein, 379 aa, unidentified
  source 1..379: note = Listeria weihenstephanensis
  REGION 1..379: note = tr|A0A1S7FV61|A0A1S7FV61_9LIST Queuine tRNA-ribosyltransferase OS=Listeria weihenstephanensis; OX = 1006155 GN=tgt PE=3 SV=1
MAAITYELIKTDKQTGARLGKIHTPHGSFDTPMFMPVGTLATVKTMSPEELKAMGSGIILSNTYHLWLRPGEDLIEEAGGLHKFMNWDQAILTDSGGYQVFSLSDMRDIKEEGVHFRNHLNGDKLFLSPEKAIQIQNSLGSDIMMSFDECPPYPATHDYMKKSIERTSRWAERGLKAHARPHDQGLFGIVQGGSFKDLREQSARDLVSMDFPGYSIGGLSVGEPKDIMNEVLEYTTPLLPANKPRYLMGVGSPDALIDGVIRGIDMFDCVLPTRIARNGTCMTSQGRLVVRNAKFARDFRPIDEACDCYTCKNYSRAYIRHLIRCDETFGIRLTTYHNLHFLLNLMGQVRGAIMNDRLADFREEFFEQYGLNGPNAKNF

SEQ ID NO: 57034 - protein, 379 aa, unidentified; identical to SEQ ID NO: 57033
  source 1..379: note = Listeria weihenstephanensis
  REGION 1..379: note = tr|W7CIM4|W7CIM4_9LIST Queuine tRNA-ribosyltransferase OS=Listeria weihenstephanensis FSL R9-0317 OX=1265845 GN=tgt PE=3 SV=1

SEQ ID NO: 57035 - protein, 379 aa, Listeria welshimeri
  REGION 1..379: note = sp|A0AIX9|TGT_LISW6 Queuine tRNA-ribosyltransferase; OS = Listeria welshimeri serovar 6b (strain ATCC 35897 / DSM 20650 / SLCC5334) OX=386043 GN=tgt PE=3 SV=1
MSAIRYELIKTDKQTGARLGKIHTPHGTFDTPMFMPVGTLATVKTMSPEELKAMGAGIILSNTYHLWLRPGEELIREAGGLHKFMNWDQPILTDSGGFQVFSLSKMRDIKEEGVHFRNHLNGDKLFLSPEKAIQIQNALGSDIMMSFDECPPYPASHEYMKKSVERTSRWAERGLQAHARPEDQGLFGIVQGGAYEDLRAQSAKDLVSLDFPGYSIGGLSVGEPKDVMNRVLEHTTPLLPANKPRYLMGVGSPDSLIDGVIRGVDMFDCVLPTRIARNGTCMTSSGRLVIKNAKFTHDFRPIDENCDCYTCKNYSRAYIRHLIRCEETFGIRLTTYHNLHFLLNLMKQVRSAIMEDRLADFREEFFEQYGFNRPDAKNF

SEQ ID NO: 57036 - protein, 379 aa, unidentified; identical to SEQ ID NO: 57032
  source 1..379: note = Listeriaceae bacterium
  REGION 1..379: note = tr|A0A099W373|A0A099W373_9LIST Queuine tRNA-ribosyltransferase OS=Listeriaceae bacterium FSL A5-0209 OX=1497679 GN=tgt PE=3 SV=1

SEQ ID NO: 57037 - protein, 376 aa, Litoreibacter albidus
  REGION 1..376: note = tr|A0A1H2S385|A0A1H2S385_9RHOB Queuine tRNA-ribosyltransferase OS=Litoreibacter albidus OX=670155; GN = tgt PE=3 SV=1
MTQRFQFDLHATDGKARTGVISTPRGEIRTPAFMPVGTAATVKAMMPESVRATGADILLGNTYHLMLRPTAERIARLGGLHKFMNWDRPILTDSGGFQVMSLAELRKLTEEGVTFKSHIDGSKHVLTPERSMEIQKLLGSDIVMCFDECPALPADRARIEESMQLSMRWAARSREAFGDRPGHALFGIQQGGLEQDFREESAKALTDIGFEGYAVGGLAVGEGQESMFACLDYAPDQLPTDKPRYLMGVGKPDDIVGAVERGIDMFDCVLPSRSGRTGQAFTRRGVVNIKNARHTDDPRPLDEACTCPCCAQYSRAYLHHVFKSHEMISSMLVTWHNLHYYQELMAGLRGAIARADLAGFVKTFHETRALGDIEPV

SEQ ID NO: 57038 - protein, 376 aa, unidentified
  source 1..376: note = Litoreibacter arenae
  REGION 1..376: note = tr|S9QJH6|S9QJH6_9RHOB Queuine tRNA-ribosyltransferase OS=Litoreibacter arenae DSM 19593; OX = 1123360 GN=tgt PE=3 SV=1
MTQRFQFDIRATDGKARTGLISTPRGDIRTPAFMPVGTAATVKAMMPESVRATGADILLGNTYHLMLRPTAERIANLGGLHKFMNWDRPILTDSGGFQVMSLAELRKLTEEGVTFKSHIDGSKHMLSPERSMEIQKLLGSDIVMCFDECPALPADRDRIKQSMDLSMRWAGRSREAFGDRPGHALFGIQQGGLEQDFREESAKALSKIGFDGYAVGGLAVGEGQEAMFGCLDYAPDQLPQDKPRYLMGVGKPDDIVGAVERGIDMFDCVLPSRSGRTGQAFTRRGVVNIKNARHMDDPRPLDADCTCPCCSQYSRAYLHHVFKAQEIISSMLVTWHNLHYYQELMSGLREAISEGNLSGFVKQFHATRAQGDIEPV

SEQ ID NO: 57039 - protein, 376 aa, unidentified
  source 1..376: note = Litoreibacter ascidiaceicola
  REGION 1..376: note = tr|A0A1M4TKS2|A0A1M4TKS2_9RHOB Queuine tRNA-ribosyltransferase OS=Litoreibacter ascidiaceicola; OX = 1486859 GN=tgt PE=3 SV=1
MTQRFQFDIHATDGKARTGIISTPRGDIRTPAFMPVGTAATVKAMMPESVRATGADILLGNTYHLMLRPTAERIAKLGGLHKFMNWDRPILTDSGGFQVMSLAELRKLTEEGVTFKSHIDGSKHMLSPERSMEIQKLLGSDIVMCFDECPALPADRARINESMQLSMRWAARSREAFGDRPGHALFGIQQGGLEQDMRAESAAALTKIGFDGYAVGGLAVGEGQEAMFGCLDYAPEQLPQDKPRYLMGVGKPDDIVGAVERGIDMFDCVLPSRSGRTGQAFTRRGVVNVKNARHMDDPRPLDEDCTCPCCSQYSRAYLSHVFRAQEMISSMLVTWHNLHYYQELMAGLRAAIAAGDLAGFVKTFHEARALGDIEPL

SEQ ID NO: 57040 - protein, 376 aa, unidentified
  source 1..376: note = Litoreibacter halocynthiae
  REGION 1..376: note = tr|A0A4R7LI23|A0A4R7LI23_9RHOB Queuine tRNA-ribosyltransferase OS=Litoreibacter halocynthiae; OX = 1242689 GN=tgt PE=3 SV=1
MTQRFQFDIHATDGKARTGIISTPRGDIRTPAFMPVGTAATVKAMMPESVRATGADILLGNTYHLMLRPTAERIAKLGGLHKFMNWDRPILTDSGGFQVMSLAELRKLTEEGVTFKSHIDGSKHMLSPERSMEIQKLLGSDIVMCFDECPALPADRARINESMQLSMRWAARSREAFGDRPGHALFGIQQGGLEQDMRAESSAALTKIGFDGYAVGGLAVGEGQEAMFGCLDYAPEQLPQDKPRYLMGVGKPDDIVGAVERGIDMFDCVLPSRSGRTGQAFTRRGVVNVKNARHMDDPRPLDEDCTCPCCTQYSRAYLSHVFRAQEMISSMLVTWHNLHYYQELMAGLRAAIAAGDLAGFVKTFHETRALGDIEPL

SEQ ID NO: 57041 - protein, 384 aa, Litoreibacter janthinus
  REGION 1..384: note = tr|A0A1I6HHJ5|A0A1I6HHJ5_9RHOB Queuine tRNA-ribosyltransferase OS=Litoreibacter janthinus; OX = 670154 GN=tgt PE=3 SV=1
MFTPKAAGMTQRFRFDLHAKDGKARTGIISTPRGEIRTPAFMPVGTAATVKAMMPESVRATGADILLGNTYHLMLRPTAERIANLGGLHKFMNWERPILTDSGGFQVMSLADLRKLTEEGVTFKSHIDGSKHMLSPERSMEIQKLLGSDIVMCFDECPALPADRARINESMQLSMRWAARSREAFGDRPGYALFGIQQGGLEQDMRAESAAALTEIGFDGYAVGGLAVGEGQEAMFGCLDYAPDQLPQDKPRYLMGVGKPDDIVGAVERGIDMFDCVLPSRSGRTGQAFTRRGVVNIKNARHMDDPRPLDEACTCPCCSQYSRAYLHHVFKSQEIISSMLVTWHNLHYYQELMGGLRGAIAAGDLAGFVKSFHETRAMGDIEPV

SEQ ID NO: 57042 - protein, 376 aa, unidentified
  source 1..376: note = Litoreibacter meonggei
  REGION 1..376: note = tr|A0A497X5K8|A0A497X5K8_9RHOB Queuine tRNA-ribosyltransferase OS=Litoreibacter meonggei; OX = 1049199 GN=tgt PE=3 SV=1
MTQRFQFDIHAVDGKARTGTISTPRGDIRTPAFMPVGTAATVKAMMPESVRATGADILLGNTYHLMLRPTAERIAKLGGLHKFMNWDRPILTDSGGFQVMSLAELRKLTEEGVTFKSHIDGSKHMLSPERSMEIQKLLGSDIVMCFDECPALPADRERINESMQLSMRWAARSREAFGDRPGHALFGIQQGGLEQDMRAESAAALTKIGFDGYAVGGLAVGEGQEAMFGCLDYAPEQLPQDKPRYLMGVGKPDDIVGAVERGIDMFDCVLPSRSGRTGQAFTRRGVVNVKNARHMDDPRPLDEDCTCPCCSHYSRAYLSHVFRAQEMISSMLVTWHNLHYYQELLAGLRGAIAEGNLADFVKTFHETRALGDIEPV

SEQ ID NO: 57043 - protein, 376 aa, unidentified
  source 1..376: note = Litoreibacter ponti
  REGION 1..376: note = tr|A0A2T6BKE3|A0A2T6BKE3_9RHOB Queuine tRNA-ribosyltransferase OS=Litoreibacter ponti OX=1510457; GN = tgt PE=3 SV=1
MTQRFEFELHGTDDRARTGTIKTPRGDIRTPAFMPVGTAATVKAMMPESVRATGADILLGNTYHLMLRPTAERIAKLGGLHKFMNWERPILTDSGGFQVMSLADLRKLTEEGVTFRSHIDGSKHMLSPERSMEIQRLLGSDIVMCFDECPALPADRARIKESMELSMRWAARSREAFGDRPGHALFGIQQGGLEQDFREESAEALRAIGFEGYAVGGLAVGEGQEAMFGCLDYAPEQLPVDRPRYLMGVGKPDDIVGAVERGIDMFDCVLPSRSGRTGQAFTRRGVVNIKNARHQEDPRPLDEACSCPCCSNYSRAYLHHVFKAQEMISGMLLTWHNLHYYQELMAGLHGAIAAGDLAAFVRGFHATRADGDIEPV

SEQ ID NO: 57044 - protein, 376 aa, Litoreibacter sp.
  REGION 1..376: note = tr|A0A5B8IX63|A0A5B8IX63_9RHOB Queuine tRNA-ribosyltransferase OS=Litoreibacter sp. LN3S51; OX = 2599296 GN=tgt PE=3 SV=1
MARQFQFDLQATDGKARTGVISTTRGDIRTPAFMPVGTAATVKAMLPENVRATGADILLGNTYHLMLRPTAERIDNLGGLHNFMNWERPILTDSGGFQVMSLTSLRKLTEKGVTFKSHVDGSQHHLTPERSMEIQRLLGADIVMCFDECTPFPAEEDVALESMRLSMRWAQRSRDAFGDRPGHALFGIQQGSVFREQREESAENLKSIGFDGYAVGGLAVGEGQEAMFEVLDYAPDMLPADKPRYLMGVGKPDDIVGAVARGIDMMDCVLPSRSGRTGQVFTRRGALNIKNARHQDDPRPIDEHCTCPACRNYSRAYLHHVFRTGEIISSMLLTWHNLHYYQELMTRMRDAISEGRFDQFQRDFHTERAKGDLPPL

SEQ ID NO: 57045 - protein, 372 aa, unidentified
  source 1..372: note = Litoricolaceae bacterium
  REGION 1..372: note = tr|A0A520S3H5|A0A520S3H5_9GAMM Queuine tRNA-ribosyltransferase OS=Litoricolaceae bacterium; OX = 2510333 GN=tgt PE=3 SV=1
MTFEVKATDGLARRGEIVFPRGTIQTPTFMPVGTYGTVKGVTTDQVKESGAEILLGNTFHLMLRPGAEQVVALGGLHQMIHWDRPILTDSGGFQVFSLGKMRKITEEGVKFRSPVDGSGVWLDPERSMAVQRQLGSDVVMIFDECTPYPVSREDSSKSMELSRRWAKRSLIAHGDSPSALFGIVQGSMYLDQRDRSLDALVEMGFDGYAIGGLSVGEPKDDIFRVMRHTAPRLPETQPRYVMGVGKPEDLVEGVRRGVDMFDCVMPTRNARNGHLFTDRGVLKLRNAANRTYEGAIDDSCDCYTCQNYSRAYLHHLDKCGEILGATLNTIHNLRHYQRLMEGLRAAIESRQVDRFVLEFYAKRGLEAPDWES

SEQ ID NO: 57046 - protein, 371 aa, unidentified
  source 1..371: note = Litoricolaceae bacterium
  REGION 1..371: note = tr|A0A520S792|A0A520S792_9GAMM Queuine tRNA-ribosyltransferase OS=Litoricolaceae bacterium; OX = 2510333 GN=tgt PE=3 SV=1
MTFQVKATDGLARRGEITFPRGSIQTPAFMPVGTYGTVKGVTTDQVIESGAEILLGNTFHLMLRPGADQVAALGGLHSMIHWDRPILTDSGGFQVFSLGNMRKITEEGVKFRSPVDGSEVWLDPERSMAVQRQLGSDIVMIFDECTPYPVTVEESQQSMELSLRWAKRSLEAHADSPSALFGIVQGSMFLDQRDQSLEALVAMGFDGYAIGGLSVGEPKDEMFKVMRHTAPRLPKDQPRYVMGVGKPEDLVEGVRRGVDMFDCVMPTRNARNSHLFIDAGVLKLRNAANRTHEGPIDEACDCYTCKHYSRAYLHHLDKCGEILGATLNTIHNLRHYQRVMQGLRDAIATQTLDQFVQQFYERQGRSVPSFD

SEQ ID NO: 57047 - protein, 383 aa, unidentified
  source 1..383: note = Litorilinea aerophila
  REGION 1..383: note = tr|A0A540VLP0|A0A540VLP0_9CHLR Queuine tRNA-ribosyltransferase OS=Litorilinea aerophila; OX = 1204385 GN=tgt PE=3 SV=1
MPASVPASSAGGPPAAQLALPHGALQLPAFLPDATLGVVRAVDSVDLCHCGVQALVMNTFHLMQHPGSSTVQALGGLHQMCAWPRPIVTDSGGFQAYSLIRQNARYGSLTDNGILFRPEGSRRKLQLTPEKCVQLQLSYGADVVMCLDDCTHVDDPLESQEESVRRTILWARRCKAEFQRLLDQKQPAQRPLLFAVIQGGGSRELRRRCAEALLEMGFDGYGYGGWPLDSQGNLLEELLAYTRSLIPADYPMHALGVGHPRSIAACVRMGYSLFDSALPTRDARHGRLYVWEGDGDDSDGHGAAGGDRFRFLYINDARHIKDGRPLSATCDCLTCTHYARGYLHHLFKQGDTTYVRLATIHNLRFMARLMAHLRESHQSPAAP

SEQ ID NO: 57048 - protein, 404 aa, unidentified
  source 1..404: note = Litorilinea aerophila
  REGION 1..404: note = tr|A0A540VBS7|A0A540VBS7_9CHLR Queuine tRNA-ribosyltransferase OS=Litorilinea aerophila; OX = 1204385 GN=tgt PE=3 SV=1
MVQTPSHPESGPPRSANSGAPFSFVLHRTDGAARLATYHTPHGAIQMPAFAPVGTQANVKTLEPRDLHELGCQIILANTYHLYLRPGHRLIQKLGGLHRFMAWDGPILTDSGGYQVFSLADQRQLDDDGVTFRSHIDGSLHRFTPEMVMEIEQALGPDIAMVLDECPDPLDRAYNRQALDRTHRWAERCKASHTRPDQALFGIVQGGIFPDLRQESAAFLTQLDFHGYAIGGLAVGETKEQMYATLDETCPALPQEKPRYLMGVGAPEDIVEAVARGVDLFDCVLPTRIARNGSLLTPEGRINLRNARFAEDPRPVQEDCGCYTCRTFSRAYLRHLYKAGEISALRLGTIHNVYFLMELMRQIRAAIAAGTFADFRAAFLERYQISNQQVRHEQRQRRIQAMRG

SEQ ID NO: 57049 - protein, 385 aa, unidentified
  source 1..385: note = Litorilituus sediminis
  REGION 1..385: note = tr|A0A4P6P3N9|A0A4P6P3N9_9GAMM Queuine tRNA-ribosyltransferase OS=Litorilituus sediminis; OX = 718192 GN=tgt PE=3 SV=1
MTETVKNRMKYELIKKDGKARRGRLIFDRGVVETPAFMPVGTYGTVKGMKTDEVEATGADIILGNTFHLMLRPGTDIIEQHGGLHGFMNWDKPILTDSGGFQVFSLGEMRKITEEGVLFSSPVNGEKIMLTPERSMEVQRSLNSDIVMIFDECTPYPATHEESKESMELSLRWAQRSKDAHGDSMNALFGIVQGGMYEDLREISIKGLKDIEFDGYAIGGLSVGEPKEDMIRILDHTAPLIPENKPRYLMGVGKPEDLVEGVRRGIDMFDCVMPTRNARNGHLFVNDGVIKIRNASHKTDTGPLDPTCDCYTCKNYSRAYLHHLDKCKEILGSQLNTLHNLHFYQRVMQGLRDAIEQGKLDDFVEEFYALRGLPVPPLAEGSKQV

SEQ ID NO: 57050 - protein, 385 aa, unidentified
  source 1..385: note = Litorilituus sp.
  REGION 1..385: note = tr|A0A502L885|A0A502L885_9GAMM Queuine tRNA-ribosyltransferase OS=Litorilituus sp. RZ04; OX = 2491017 GN=tgt PE=3 SV=1
MTVTVKNRMKYELITKDGKARRGRLIFDRGVVETPAFMPVGTYGTVKGMKTDEVEATGADIILGNTFHLMLRPGTDIIEQHGGLHGFMNWDKPILTDSGGFQVFSLGEMRKITEEGVRFSSPVNGEKIMLTPERSMEVQRSLNSDIVMIFDECTPYPATHKEAKDSMELSLRWAQRSKDAHGDSLNALFGIIQGGMYEDLREVSVKGLKAIEFDGYAIGGLSVGEPKEDMIRILDHTAPLIPENKPRYLMGVGKPEDLVEGVRRGIDMFDCVMPTRNARNGHLFVNNGVIKIRNASHKTDTGPLDPTCDCYTCKNYSRAYLHHLDKCKEILGSQLNTLHNLHFYQRVMQGLRDAIEQGKLDDFVEEFYALRGLPVPPLAEGSEQV

SEQ ID NO: 57051 - protein, 376 aa, Litorimicrobium taeanense
  REGION 1..376: note = tr|A0A1H9KSZ0|A0A1H9KSZ0_9RHOB Queuine tRNA-ribosyltransferase OS=Litorimicrobium taeanense; OX = 657014 GN=tgt PE=3 SV=1
MTARIEFRLNATDGKARTGVIATPRGDIRTPAFMPVGTAATVKAMLPESVAATGADILLGNTYHLMLRPTAERIDALGGLHKFMNWQKPILTDSGGFQVMSLSGLRKMNEEGVTFKSHIDGSRHTLTPERSMEIQRLLGSDIVMCFDECTPFPAEEKVALESMRMSMRWAQRSRDAFGDRPGHALFGIQQGSIFRDQRAESAEKLSDIGFDGYAVGGLAVGEGQEMMFDVLDYAPDMLPQDKPRYLMGVGKPDDIVGAVARGIDMMDCVLPSRSGRTGQVFTRHGVVNIKNARHQDDPRPLDEACTCPACRSYSRAYLHHVFRAQEMISGMLLTWHNLHYYQELMQGMRDAITAGTFEAFQAAFHAQRAEGDIEPM

SEQ ID NO: 57052 - protein, 374 aa, Litorimonas taeanensis
  REGION 1..374: note = tr|A0A420WKU0|A0A420WKU0_9RHOB Queuine tRNA-ribosyltransferase OS=Litorimonas taeanensis; OX = 568099 GN=tgt PE=3 SV=1
MAVFPFDIHAREGKARTGVLRTPRGDIRTPAFMPVGTAGTVKGVYMDQVKGTGADIILGNTYHLMLRPGAERVKKLGGLHKFGGWSGPILTDSGGFQVWSLSKLRKMSEAGVEFQSHLDGSRHMLSPERSIEIQADLLGADISMQLDECTAFPSTHEQAKSSMELSLRWGRRSLEAFGERESQTLFAIVQGSTFPDLREKSAISSRTEGAAGGYGGYAIGGLAVGEGHEMMCEVLDFTTLHLPEDRPRYLMGVGKPIDLVEAVARGVDMFDCVIPTRSGRHGQVWTDTGPYNIKRAEFSEDESPLDETISCEASNAYSKAYVHHLVRSKEMLGGMILSWHNIAYFEDLMARIRSAIFEQRFEAFVEEFRKNWRG

SEQ ID NO: 57053 - protein, 376 aa, Loktanella atrilutea
  REGION 1..376: note = tr|A0A1M4UV90|A0A1M4UV90_9RHOB Queuine tRNA-ribosyltransferase OS=Loktanella atrilutea OX=366533; GN = tgt PE=3 SV=1
MTARFTFDLTATDGMARTGVIHTPRGDIRTPAFMPVGTAATVKAMMPESVAATGADILLGNTYHLMLRPTAERIARLGGLHRFMNWDKPILTDSGGFQVMSLADLRKLTEAGVTFKSHIDGSKHVLSPERSMEIQKLLGSDIVMCFDECPALPADRDRIAESMRLSMRWAQRSRDAFGDRPGHALFGIQQGGLERDFREESAKALTRIGFDGYAVGGLAVGEGQAAMFGCLDFATDMLPRDKPRYLMGVGKPDDIVGAVKRGIDMMDCVLPSRSGRTGQGFTRHGVVNIKNARHADDPRPLDEACTCPACRNYSRAYLHHVFRAQEMISGMLLTWHNLHYFQQIMGEMRDAIAQNRFAAWESGFHAMRAEGDIAPL

SEQ ID NO: 57054 - protein, 380 aa, Loktanella fryxellensis
  REGION 1..380: note = tr|A0A1H7YXM9|A0A1H7YXM9_9RHOB Queuine tRNA-ribosyltransferase OS=Loktanella fryxellensis; OX = 245187 GN=tgt PE=3 SV=1
MTATPTDRFAFDLHATDGMARTGVIHTPRGDIRTPAFMPVGTAATVKAMLPESVAATGADILLGNTYHLMLRPTAERIAHLGGLHRFMNWSGPILTDSGGFQVMSLADLRKLTEAGVSFKSHIDGSKHMLSPERSMEIQKLLGSDIVMCFDECPALPADRDRIATSMQLSMRWAQRSRDAFGDRPGHALFGIQQGGLEQDFRAESAQALTDIGFDGYAVGGLAVGEGQEAMFGCLDHATGVLPVDKPRYLMGVGKPDDIVGAVKRGIDMMDCVLPSRSGRTGQAFTRRGVVNLKNARHADDPRPLDEGCTCPACSNYSRAYLHHVFRAQEMILGMLLTWHNLHYYQTLMQGMRDAIAAGRFVAWEADFHAVRAQGDIEPV

SEQ ID NO: 57055 - protein, 376 aa, Loktanella salsilacus
  REGION 1..376: note = tr|A0A1I4BQP5|A0A1I4BQP5_9RHOB Queuine tRNA-ribosyltransferase OS=Loktanella salsilacus OX=195913; GN = tgt PE=3 SV=1
MTTRFSFDLNATDGAARTGVMHTPRGDIRTPAFMPVGTAATVKAMMPESVAATGADILLGNTYHLMLRPTAERIANLGGLHKFMNWDKPILTDSGGFQVMSLADLRKLTENGVTFKSHIDGSKHMLSPERSMEIQKLLGSDIVMCFDECPALPADRDRIAESMRLSMRWAQRSRDAFGDRPGHALFGIQQGGLEQDFREESAKALINVGFDGYAVGGLAVGEGQEAMFGCLDFATDMLPTDKPRYLMGVGKPDDIVGAVKRGIDMMDCVLPSRSGRTGQGFTRHGVVNMKNARHADDPRPLDEACTCPACRNYSRAYLHHVFKSQEMISGMLLTWHNLHYFQQIMGEMRDAIAAGTFAAWEAGFHAGRAQGDIDPL

SEQ ID NO: 57056 - protein, 375 aa, Loktanella sp.
  REGION 1..375: note = tr|A0A4Q3Y8R1|A0A4Q3Y8R1_9RHOB Queuine tRNA-ribosyltransferase OS=Loktanella sp. IMCC34160; OX = 2510646 GN=tgt PE=3 SV=1
MTKFSFDLKATDGKARTGVIHTPRGDIRTPAFMPVGTAATVKAMMPESVAATGADILLGNTYHLMLRPTAERIDRLGGLHRFMNWNKPILTDSGGFQVMSLAELRKLTEKGVTFRSHIDGSRHEITPERSMEIQKLLGSDIVMAFDECPALPADRDRIASSMRLSMRWAQRSRDAFGDRPGHALFGIQQGGLEEDLRAESAEALTRIGFDGYAIGGLAVGEGQDAMFAALDYAPDQLPVDKPRYLMGVGKPGDIVGAVKRGVDMMDCVLPSRSGRTGQAWTRRGQVNIKNARHADDPRPLDEHCTCPACTNYSRAYLHHVYRSQEMISGMLLTWHNLHYFQEIMQDMREAIAEGRFAAWEAAFHAQRAEGDIDPV

SEQ ID NO: 57057 - protein, 376 aa, Loktanella sp.
  REGION 1..376: note = tr|A0A0F4RMG4|A0A0F4RMG4_9RHOB Queuine tRNA-ribosyltransferase OS=Loktanella sp. S4079 OX=579483; GN = tgt PE=3 SV=1
MTKRFSFTLSATDGKARTGVISTPRGDIRTPAFMPVGTAATVKAMMPESVAATGADILLGNTYHLMLRPTAERIDRLGGLHKFMNWDKPILTDSGGFQVMSLAELRKLTEKGVTFKSHIDGSRHELTPERSMEIQRLLGSDIVMCFDECPALPADRDRIAESMRLSMRWAQRSRDAFGDRPGHALFGIQQGGLEEDLRAESAQALRDIEFDGYAVGGLAVGEGQEAMFSVLDFAPDQLPVDKPRYLMGVGKPDDIVGAVKRGIDMMDCVLPSRSGRTGQVFTRRGTINIKNARHADDPRPLDENCTCPACSKYSRAYLHHVFRAQEMISGMLLTWHNLHYFQEIMQGMRDAIAANTFDAWEADFQAVRAQGDIEPL

SEQ ID NO: 57058 - protein, 384 aa, Lonepinella koalarum
  REGION 1..384: note = tr|A0A4R1KTD7|A0A4R1KTD7_9PAST Queuine tRNA-ribosyltransferase OS=Lonepinella koalarum OX=53417; GN = tgt PE=3 SV=1
MKFNLKKTNGTARRGEMIFTRPQGDFTVQTPAFMPVGTYGTVKGMTPEEVRATGAEILLGNTFHLWLRPGQEVMRKHGDLHDFMQWHRPILTDSGGFQVFSLGKLRKIKEEGVHFQNPISGEKIFLSPEKSMEIQYDLGSDIVMIFDECTPYPATFDYAKNSMEMSLRWAKRSRQRFDELENQNALFGIVQGGTFEELRKISIEGLVNIGFDGYAVGGLAVGEPKQEMHRILEFVNPLLPQDKPRYLMGVGKPEDLVEGVRRGIDMFDCVMPTRNARNGHLFVSDGIVKIRNAKYRDDTSTLDPECDCYTCKHYTKSYLYHLDKCGEILGARLNTIHNLRYYQRLMEQIRTAIEQDRFEDFVIEFYAKIGKPVPPLQQKEEKHD

SEQ ID NO: 57059 - protein, 376 aa, unidentified
  source 1..376: note = Longibacter salinarum
  REGION 1..376: note = tr|A0A2A8CVN7|A0A2A8CVN7_9BACT Queuine tRNA-ribosyltransferase OS=Longibacter salinarum; OX = 1850348 GN=tgt PE=3 SV=1
MQFHLDYTDAATDARVGRIVTDHGVIETPTFMPVGTLGSVKAVEPRELSRDIDADIILGNTYHLFLRPGTDVLETAGGLHQFMNWDGPILTDSGGFQVFSLGHRATLSEEGVEFQNHIDGDKHLFTPETVIDIQRSIGSDIMMVLDECPAADVTKQYARTSNELTLRWAERCKKHFDATDPLYGHEQALFAIVQGVVYPEVRRESARALVDMDFPGYAIGGLSVGETHEEMYDMVEVVAPLLPTDKPRYLMGVGTPENLLENVARGIDTFDCVMPTRNARNGTIFTTQGRINIKNAQFTQDHTPIDPGLENPVSQNFTKSYLRHLQKTGEILGLQLASIQNLAFYLWLMKTAREKIASGDFKSWKDDIIPQITHRW

SEQ ID NO: 57060 - protein, 377 aa, unidentified
  source 1..377: note = Longibaculum muris
  REGION 1..377: note = tr|A0A4R3YZ31|A0A4R3YZ31_9FIRM Queuine tRNA-ribosyltransferase OS=Longibaculum muris OX=1796628; GN = tgt PE=3 SV=1
MEGFWYELKHVCKQSGARYGILHTPHGDVETPMFMPVGTLATVKGISPEQLKEMNSQVILANTYHLWLRPGEDVVKQAGGLHKFMNYDGPILTDSGGFQVFSLGKTRKIEEEGVTFKSIVDGKKLFLSPEKAIQIQNDLGADIIMSFDECAPYPCTHDYMKQSVERTLRWAKRGKDAHQRDDQALFGIVQGGEYEDLRELSAKELVKMDFPGYSIGGTSVGEPKDVMYKMIDDAIKWLPEDKPRYLMGVGNPIDLIEGAIRGIDMFDCVLPTRVARHGALMTHSGRMNINNEKYKYDFTPVDDKCHCYTCRNYTRAYLRHLHKCDEIFGKSLLSIHNVAFLLQLSEDIRTAIKEDRLLDFKEEFLNSYGRDVYERAF

SEQ ID NO: 57061 - protein, 403 aa, unidentified
  source 1..403: note = Longicatena caecimuris
  REGION 1..403: note = tr|A0A4V2VK23|A0A4V2VK23_9FIRM Queuine tRNA-ribosyltransferase OS=Longicatena caecimuris; OX = 1796635 GN=EDD61_11427 PE=3 SV=1
MTEYKNNNTFSFEIVKKIPGKLGRAGIIHTPHGDIKTPAFMCVGTKGEVRFLSMQDLHAIQAQAMLSNGYHLRNVSEEIQAQKGLAAWSGWNGPTLTDSGGFQVMSLGSGLGKVVSMDREKEVINTDPKDRLAIVSEDGVQFHDPFTDQDDFIGPEESMQIQCRIGADIHMAYDELTSLADSYEYNVEALARTERWALRSLAEHKKHRDDLGYRQSLYGVLQGGRWEDLRRSTAQKFAKMDFDGYGLGGAFLKESLGEILTWCCEELPENKPRHLLGLSHPDDILIGVEMGADTFDCVAPTREARHGRIYTTHGYYSLSKFADSEELLEQGCDCPVCKAGWTRGQLRALMKSEKQEDKHTYYNLASMHNLRFIIRLTEQARQAILDGTYAEFKENFLKNYYHR

SEQ ID NO: 57062 - protein, 384 aa, Longilinea arvoryzae
  REGION 1..384: note = tr|A0A0S7BI06|A0A0S7BI06_9CHLR Queuine tRNA-ribosyltransferase OS=Longilinea arvoryzae OX=360412; GN = tgt PE=3 SV=1
MSETQSFQFDLLARDGNARAGVFHTPHGDIQTPIFAPVGTQATVKAVTPAQLEEIGANLVLSNTYHLYLRPGADLVAEMGGLHEFMQWPHPMLTDSGGFQVFSLADMRKIDADGVTFKSHIDGSTHRFTPESSIAVQEKLGADIIMSFDECAPPYDRKYNESAMARTHAWAERCLRAKTRPDQALFGIVQGGIFPDLRTQSAEFISSLGFPGHAIGGLSVGETKEEMNTTLQLLNDVLPKDKPRYLMGVGSPEDLINGIRRGVDIFDCVLPTRLARHTAAMTFTGRINLMNATNAHDHRPIDEGCGCYTCQHFTRAYLRHLVVSKEMLAATLISIHNLYTLLELVRRSRKAILNGTFDQFADDFLEHYQSTNAVSTPTTNGANA

SEQ ID NO: 57063 - protein, 369 aa, Longilinea arvoryzae
  REGION 1..369: note = tr|A0A0S7BCP6|A0A0S7BCP6_9CHLR Queuine tRNA-ribosyltransferase OS=Longilinea arvoryzae OX=360412; GN = LARV_03317 PE=3 SV=1
MSTPEFSKSLKLNHGTLEFPVYMPDATFGVVRTVDSNDLHSAGIQALVMNTFHLMQRPGSSTIQSLGGLHRMSAWDRPIITDSGGFQAYSLIRQNPRFGRMDEKGITFQPEGSDRKFQLSPEKCIQLQVAYGSDVVICLDDCTHVDASEEEQHKSVDRTISWAKRCKDEFKRLMRQKKLDEDKRPLIFGVIQGGGIPALRKQCADALLEIGFDGFGFGGWPLDGDGNLLTDILAYTRSLVPPELPMHALGIGHPYNVVTCWDLGYGIFDCAMPTRDARHGRLYTFANPSGADGGLNGDWLRYLYINDERHIRSDQPISPYCTCPVCRNYSAGYLHHLFKLNDSLFLRLSTLHNLSFMAQLTDRIRLRPQ

SEQ ID NO: 57064 - protein, 376 aa, unidentified
  source 1..376: note = Longimonas halophila
  REGION 1..376: note = tr|A0A2H3P887|A0A2H3P887_9BACT Queuine tRNA-ribosyltransferase OS=Longimonas halophila OX=1469170; GN = tgt PE=3 SV=1
MTFTLAHTDATSDARAASFETAHGTVRTPAFMPVGTLGSVKAVPPRALHEDVQADIILGNTYHLYLRPGTDVIEAAGGLQRFSQWNGPILTDSGGYQVFSLADRCTLTEEGAEFRSHIDGSKHLFTPESVVDTQRALGSDIMMVLDECPAADVSKAYARESNELTLRWAERARLHYEKTTSPHGHEQALFGIVQGVTYPEVRRESARALVDLDFPGYAIGGLSVGESHEDMYDMVEVVTPLLPAHKPRYLMGVGTPENLLENVARGVDMFDCVMPTRNGRNGTLFTTQGRMNIKNAQFTNDHTPIDPGLEAYVSQTFTKAYLRHLQKSNEILGLQIASQQNLAFYCWLMREARQAILDDRFMAWKDAILPQITRRW

SEQ ID NO: 57065 - protein, 376 aa, unidentified
  source 1..376: note = Lonsdalea britannica
  REGION 1..376: note = tr|A0A1X3RYY3|A0A1X3RYY3_9GAMM Queuine tRNA-ribosyltransferase OS=Lonsdalea britannica OX=1082704; GN = tgt PE=3 SV=1
MKYELFTTDGRARRGRLVFERGVVETPAFMPVGTYGTVKGMTPEEVKETGAQIILGNTFHLWLRPGQEIMKLHGDLHDFMQWQGPILTDSGGFQVFSLGDIRKITEEGVHFRNPINGDAIFLSPEKSMEIQNDLGSDVVMIFDECTPYPADWDYAKRSMEMSLRWAKRCRQRFDELGNGNALFGIIQGSVYEDLRDVSVKGLVDIGFDGYAVGGLAVGEPKADMHRILEHVCPQLPEDKPRYLMGVGKPEDLVEGVRRGVDMFDCVMPTRNARNGHLFVTDGVVKIRNAKHKDDTAPLDAECDCYTCRHYSRAYLHHLDRCNEILGARLNTIHNLRYYQRLMAGLRQAIEDGKLDDFVAAFYQRLGKPVPPAIDAV

SEQ ID NO: 57066 - protein, 376 aa, unidentified
  source 1..376: note = Lonsdalea iberica
  REGION 1..376: note = tr|A0A1X3RX45|A0A1X3RX45_9GAMM Queuine tRNA-ribosyltransferase OS=Lonsdalea iberica OX=1082703; GN = tgt PE=3 SV=1
MKYELFTTDGRARRGRLVFERGVVETPAFMPVGTYGTVKGMTPEEVKETGAQIILGNTFHLWLRPGQEIMKLHGDLHDFMQWQGPILTDSGGFQVFSLGDIRKITEEGVHFRNPINGDAIFLSPEKSMEIQHDLGSDVVMIFDECTPYPADWDYAKRSMEMSLRWAKRCRQRFDELGNGNALFGIVQGSVYEDLRDVSVKGLVDIGFDGYAVGGLAVGEPKADMHRILEHVCPQLPEDKPRYLMGVGKPEDLVEGVRRGVDMFDCVMPTRNARNGHLFVTDGVVKIRNAKHKDDTAPLDAECDCYTCRHYSRAYLHHLDRCNEILGARLNTIHNLRYYQRLMAGLRQAIEDGELDDFVAEFYQRLGKPVPPAIDAV

SEQ ID NO: 57067 - protein, 376 aa, unidentified
  source 1..376: note = Lonsdalea populi
  REGION 1..376: note = tr|A0A3N0UHX0|A0A3N0UHX0_9GAMM Queuine tRNA-ribosyltransferase OS=Lonsdalea populi OX=1172565; GN = tgt PE=3 SV=1
MKYELFTTDGRARRGRLVFERGVVETPAFMPVGTYGTVKGMTPEEVKETGAQIILGNTFHLWLRPGQEIMKLHGDLHDFMQWQGPILTDSGGFQVFSLGDIRKITEEGVHFRNPINGDAIFLSPEKSMEIQHDLGSDVVMIFDECTPYPADWDYAKRSMEMSLRWAKRCRRRFDELGNGNALFGIVQGSVYEDLRDVSVKGLVDIGFDGYAVGGLAVGEPKADMHRILEHVCPQLPEDKPRYLMGVGKPEDLVEGVRRGVDMFDCVMPTRNARNGHLFVTDGVVKIRNAKHKDDTAPLDAECDCYTCRHYSRAYLHHLDRCNEILGARLNTIHNLRYYQRLMAGLRQAIEDGKLDDFVAAFYQRLGKPVPPAIDAV

SEQ ID NO: 57068 - protein, 376 aa, unidentified
  source 1..376: note = Lonsdalea quercina
  REGION 1..376: note = tr|A0A1H3WBD3|A0A1H3WBD3_9GAMM Queuine tRNA-ribosyltransferase OS=Lonsdalea quercina OX=71657; GN = tgt PE=3 SV=1
MKYELFTTDGRARRGRLVFERGVVETPAFMPVGTYGTVKGMTPEEVKETGAQIILGNTFHLWLRPGQEIMKLHGDLHDFMHWQGPILTDSGGFQVFSLGDIRKITEEGVHFRNPINGDAIFLSPEKSMEIQHDLGSDVVMIFDECTPYPADWDYAKRSMEMSLRWAKRCRQRFDELGNGNALFGIVQGSVYEDLRDVSVKGLVDIGFDGYAVGGLAVGEPKADMHRILEHVCPQLPEDKPRYLMGVGKPEDLVEGVRRGIDMFDCVMPTRNARNGHLFVTDGVVKIRNAKHKDDTAPLDAECDCYTCRHYSRAYLHHLDRCNEILGARLNTIHNLRYYQRLMAGLRQAIEDGKLDDFVTAFYQRLGKPVPPAIDAA

SEQ ID NO: 57069 - protein, 370 aa, unidentified
  source 1..370: note = Lucifera butyrica
  REGION 1..370: note = tr|A0A498R4K4|A0A498R4K4_9FIRM Queuine tRNA-ribosyltransferase OS=Lucifera butyrica OX=1351585; GN = tgt PE=3 SV=1
MAVSFELIKQCSKTGARAGKLYTPHGVFETPIFMPVGTQATVKAMTPDELKAMGAGIILSNTYHLFLRPGHELVAEAGGLHGFMHWDRGILTDSGGFQVFSLGSLRKISEEGVAFRSHIDGSKQFLSPEKATEVQMALGADIIMAFDECVPYPAEYDYARQSTERTTRWAERCKRAHARKDQALFGIIQGGMYKELRTASVRDLVSLDFPGYAIGGLSVGEPKPLMYEMLEHTVPQLPARKPRYLMGVGTPDCLVEGVMYGIDMFDCVFPTRVARNGTAMTASGRLVVKNAEFARDFRPLDMDCDCYTCRNFSRAYIRHLLKSEEILGLRLTTIHNLHFLLRFMGKMRQAIMEDRFPAFRQEFWDKYQGH

SEQ ID NO: 57070 - protein, 383 aa, unidentified
  source 1..383: note = Lujinxingia litoralis
  REGION 1..383: note = tr|A0A328CBY2|A0A328CBY2_9DELT Queuine tRNA-ribosyltransferase OS=Lujinxingia litoralis; OX = 2211119 GN=tgt PE=3 SV=1
MMTTIQNDVRCDTFAFKEVARDGAARAGELTLTHGTVQTPIFMPVGTVGTVKAMRPDELVDEVKAQIILGNTYHLYLRPGLEVIKLHGGLHKMMGWNLPILTDSGGYQVFSLKELRKIREEGVEFQDHISGARHLFTPEKVIEIQETLGSDIMMAFDECPPAGAEERYMQESMARTTRWEKRCLEARTRRDCALFGIGQGGTSERLRRQHLEELGDLPFEGMAIGGLSVGEETQAMYDTVEFTTPMMPDHKPKYLMGVGKPQDLVECIARGVDMFDCVIPTRNARNGHCFTSRGDVVVRNAVHRDDLRPLDPDCDCYTCQNFSRSYLRHLLKSREMLGPQLCTLHNLRYFLRLVGQAREAILEGRFEAFRKRFHQLQAEGGSR

SEQ ID NO: 57071 - protein, 339 aa, unidentified
  source 1..339: note = Luminiphilus syltensis
  REGION 1..339: note = tr|B8KXC4|B8KXC4_9GAMM Queuine tRNA-ribosyltransferase OS=Luminiphilus syltensis NOR5-1B; OX = 565045 GN=tgt PE=3 SV=1
MPVGTYGTVKGMLPRDITAIGAQIILGNTFHLWLRPGTDIIAQHGDLHDFMAWQGPILTDSGGFQVFSLGAMRKVAEAGVTFKSPVNGDTVFLDPETSMQIQAKLGSDIVMIFDECTPYPATFEQARESMALSLRWAERSRIGHGDNPAALFGIVQGGMYDDLRRESLAGLVDIGFDGYAIGGLSVGEPKEAMMGVLDGIADDLPVDKPRYLMGVGTPADLLESVRRGIDMFDCVMPTRNARNGHLFTSRGVIKLRNARHKTDPEPLDPACDCYTCNNFSRAYLHHLDRCNEILGSQLCTLHNLRFYQNHMAAIRAAIDAGQFDAFADNFYKSQDNELP

SEQ ID NO: 57072 - protein, 376 aa, unidentified
  source 1..376: note = Lunatimonas lonarensis
  REGION 1..376: note = tr|R7ZT76|R7ZT76_9BACT Queuine tRNA-ribosyltransferase OS=Lunatimonas lonarensis; OX = 1232681 GN=tgt PE=3 SV=1
MNFTLHHKDSQTKARVGSLETEHGVIQTPIFMPVGTAGSVKAVHQRELKEDVKAQIILGNTYHLFLRPGLSIIEQAGGLHKFNGWDRPILTDSGGYQVFSLAENRKITEEGVVFKSHIDGSKQQFTPENVMDIQRTIGADIIMAFDECTPYPCEWPYAKKSMDLTHRWLKRCIKRFDETSGRYGYEQHLFPIVQGSVYKDLRTESAEFVAEQGRVGNAIGGLSVGEPAELMYEMTEWVTAILPEDRPRYLMGVGTPANVLECIALGVDMFDCVMPTRNARNGMLFTTEGIINIRNEKWKDDFSAIDLGFENEVSNFYTKAYLRHLTIAKEMLAAQIASIHNLSFYLWLVGQAREHIQSGDFPQWKRHMVEKVSRRR

SEQ ID NO: 57073 - protein, 377 aa, unidentified
  source 1..377: note = Luteibacter pinisoli
  REGION 1..377: note = tr|A0A4Y5Z5J7|A0A4Y5Z5J7_9GAMM Queuine tRNA-ribosyltransferase OS=Luteibacter pinisoli OX=2589080; GN = tgt PE=3 SV=1
MSNLPFELLATDGAARRGRLRFGRGTVETPAFMPVGTYGSVKAMTPRDVLDTGAEIILGNTFHLFLRPGLDIVGKFGGLHKFIGWNKPILTDSGGFQVFSLAHKRKITEEGVTFASPVDGSKVFLSPEVSMEIQTVLDSDVAMIFDECTPYPATEKVASDSMELSLRWAERSRRAFNDLKNPNNLFGIVQGSTFENLRRRSVEQLVDIGFDGYAVGGLAVGEPEAERNHTLDFTLPLLPKDRPRYLMGVGRPEDIVEAVRRGIDMFDCVMPTRNARNGFLFTDEGTLRIRNAKFATDTRVIEEGCDCYACANGFSRAYLRHLDRCNEILGSQLATMHNLRHYQRLMSGLRGAIEAGTLDDFVAAFYAARRKAEVDGQ

SEQ ID NO: 57074 - protein, 376 aa, Luteibacter rhizovicinus
  REGION 1..376: note = tr|A0A0G9H0I8|A0A0G9H0I8_9GAMM Queuine tRNA-ribosyltransferase OS=Luteibacter rhizovicinus DSM 16549 OX=1440763 GN=tgt PE=3 SV=1
MTQLPFDLLATDGAARRGRLRFGRGTVETPAFMPVGTYGSVKAMTPRDVLDTGAEIILGNTFHLFLRPGLEIVGEFGGLHKFIGWDKPILTDSGGFQVFSLAHKRKITEEGVTFASPVDGSKVFLSPEESMRIQKVLDSDVAMIFDECTPYPATEKVASDSMELSLRWAERSRQAFDDLKNPNALFGIVQGSTYENLRHRSAERLIEIGFDGYAVGGLAVGEPEAERNHTLDLTLHVLPKDRPRYLMGVGRPEDIVEAVRRGIDMFDCVMPTRNARNGFLFTREGTLRIRNAKFSMDTRVIEEDCDCYACANGFSRAYLRHLDRCNEILGSQLATMHNLRHYQRLMAGLRGAIETGTLDDFVADFYAARRKAEVDG

SEQ ID NO: 57075 - protein, 376 aa, Luteibacter rhizovicinus
  REGION 1..376: note = tr|A0A4R3YNX3|A0A4R3YNX3_9GAMM Queuine tRNA-ribosyltransferase OS=Luteibacter rhizovicinus; OX = 242606 GN=tgt PE=3 SV=1
MTQLAFDLLATDGAARRGRVRFERGTVETPAFMPVGTYGSVKAMTPRDINDIGAEIILGNTFHLFLRPGLDIVGEFGGLHKFIGWEKPILTDSGGFQVFSLAHKRKITEEGVTFASPVDGSKVFLSPEESMRIQKVLDSDIAMIFDECTPYPATEKVAGDSMELSLRWAERSRQAFDDLKNPNSLFGIVQGSTYEKLRHRSAERLVEIGFDGYAIGGLAVGEPEAERNHTLDLTLPMLPKDRPRYLMGVGRPEDIVEAVRRGIDMFDCVMPTRNARNGFLFTASGTLRIRNAKFAMDTRVIEEGCDCYTCASGFSRAYLRHLDRCNEILGAQLNTMHNLRHYQRLMAGLRDAIERGVLEDFVAAFYAARHKAEVDG

SEQ ID NO: 57076 - protein, 376 aa, Luteibacter sp.
  REGION 1..376: note = tr|A0A1K1QFA5|A0A1K1QFA5_9GAMM Queuine tRNA-ribosyltransferase OS=Luteibacter sp. UNCMF366Tsu5.1; OX = 1502758 GN=tgt PE=3 SV=1
MTQLPFELLATDGAARRGRLRFGRGTVETPAFMPVGTYGSVKAMTPRDVLETGAEIILGNTFHLFLRPGLDIVGEFGGLHRFIGWDKPILTDSGGFQVFSLAHKRKITEEGVTFASPVDGSKVFLSPEESMRIQKVLDSDIAMIFDECTPYPATDKVASDSMELSLRWAERSRRAFDDLRNPNALFGIVQGSTFEHLRRRSAERLIDIGFDGYAVGGLAVGEPEAERNHTLDFTLPMLPKDRPRYLMGVGRPEDIVEAVRRGIDMFDCVMPTRNARNGFLFTAEGTLRIRNAKFAADTRVIEEGCDCYACANGFSRAYLRHLDRCNEILGSQLATMHNLRHYQRLMAGLRGAIEAGGLEDFVAAFYAARRKAEVDG

SEQ ID NO: 57077 - protein, 376 aa, Luteibacter sp.
  REGION 1..376: note = tr|A0A1I0PTH2|A0A1I0PTH2_9GAMM Queuine tRNA-ribosyltransferase OS=Luteibacter sp. 329MFSha; OX = 1798239 GN=tgt PE=3 SV=1
MTQLPFDLLATDGAARRGRLRFGRGTVETPAFMPVGTYGSVKAMTPRDVLDTGAEIILGNTFHLFLRPGLEIVGEFGGLHKFIGWDKPILTDSGGFQVFSLAHKRKITEEGVTFASPVDGSKVFLSPEESMRIQKVLDSDVAMIFDECTPYPATERVASDSMELSLRWAERSRRAFDDLKNPNALFGIVQGSTFENLRRRSAERLIEIGFDGYAVGGLAVGEPEAERNHTLDFTLPMLPKDRPRYLMGVGRPEDIVEAVRRGIDMFDCVMPTRNARNGFLFTAAGTLRIRNAKFATDTRVIEEGCDCYACANGFSRAYLRHLDRCNEILGSQLATMHNLRHYQRLMAGLRGAIEAGGLEDFVAAFYEARRKGATDG

SEQ ID NO: 57078 - protein, 376 aa, Luteibacter yeojuensis
  REGION 1..376: note = tr|A0A0F3KHS9|A0A0F3KHS9_9GAMM Queuine tRNA-ribosyltransferase OS=Luteibacter yeojuensis; OX = 345309 GN=tgt PE=3 SV=1
MSTLPFELLATDGAARRGRLRFGRGTVETPAFMPVGTYGSVKAMTPRDVRDTGAEIILGNTFHLFLRPGLDIVGAFGGLHKFIGWDRPILTDSGGFQVFSLAHKRKITEEGVTFASPVDGSKVFLSPEVSMQIQTVLDSDVAMIFDECTPYPATEKVASDSMELSLRWAERSRRAFDDLKNPNNLFGIVQGSTFENLRRRSAAQLIDIGFDGYAVGGLAVGEPEAERNHTLDFTLPLLPPDRPRYLMGVGRPEDIVEAVRRGIDMFDCVMPTRNARNGFLFTAEGTLRIRNAKFATDTRVIEEGCDCYACANGFSRAYLRHLDRCNEILGSQLATMHNLRHYQRLMAGLRGAIEAGTLDDFVAAFYEAREKGKREA

SEQ ID NO: 57079 - protein, 376 aa, Luteibacter yeojuensis
  REGION 1..376: note = tr|A0A561H135|A0A561H135_9GAMM Queuine tRNA-ribosyltransferase OS=Luteibacter yeojuensis; OX = 345309 GN=tgt PE=3 SV=1
MTQLPFDLLATDGAARRGRLRFGRGTVETPAFMPVGTYGSVKAMTPRDVLDIGAEIILGNTFHLFLRPGLEIVGEFGGLHKFIGWNKPILTDSGGFQVFSLAHKRKITEEGVTFASPVDGSKVFLSPEESMRIQKVLDSDIAMIFDECTPYPATEKVASDSMELSLRWAERSRRAFDDLKNPNALFGIVQGSTFENLRHRSAERLVEIGFDGYAVGGLAVGEPEAERNHTLDVTLPMLPADRPRYLMGVGRPEDIVEAVRRGIDMFDCVMPTRNARNGFLFTDKGTLRIRNAKFATDTRVIEEGCDCYACANGFSRAYLRHLDRCNEILGSQLATMHNLRHYQRLMAGLRGAIETGTLDDFVAGFYEARARGTVDG

SEQ ID NO: 57080 - protein, 376 aa, unidentified
  source 1..376: note = Luteibaculum oceani
  REGION 1..376: note = tr|A0A5C6VAY2|A0A5C6VAY2_9FLAO Queuine tRNA-ribosyltransferase OS=Luteibaculum oceani OX=1294296; GN = tgt PE=3 SV=1
MSFTLSTTASDSKARAGVLKLAHGEIETPIFMPVGTVGTVKGVHNKELEDEIAAQIILGNTYHLYLRPGTSILEEAGGLHKFMGWNKPILTDSGGYQVYSLAANRKINEEGVKFSSHIDGSKHFFTPEKAMEIQRSIGADIIMAFDECTPYPCEKSYARASMEMTHRWLRRCFDHLEKIPELYGYPQHLFPIVQGSVYPDLRQKSAEFIASQNAVGNAIGGLSVGEPHEDLYEMTDLVCNILPTEKPRYLMGVGTPDNILECIDLGVDMFDCVMPTRNGRNGMLFTSEGIINIKNKKWERDFSPIDPNSPVSTDTFHSKAYLRHLFIARERLGPQLASIHNLGFYLWLVKEARKRIIDGTFKTWKTQMIPKLKNRL

SEQ ID NO: 57081 - protein, 374 aa, Luteimonas aestuarii
  REGION 1..374: note = tr|A0A4R5TY48|A0A4R5TY48_9GAMM Queuine tRNA-ribosyltransferase OS=Luteimonas aestuarii OX=453837; GN = tgt PE=3 SV=1
MSRMQFQLLTTDGIARRGRLSFPRGTVETPAFMPVGTYGTVKGVLPDQIRALGAQIILGNTFHLYLRPGLEIIEAHGGLHGFARWNGPILTDSGGFQVFSLAHKRKITEQGVTFAAPTDGSKVFLGPEESMHIQKVLGSDIVMIFDECPPVHVDGQPVDKRVIERSMELSLRWAERSRRAHEGNDAALFGIVQGGVHHDLRSRSAEGLRQVGFDGYAVGGLAVGETEAERNAMLDHTCPQLPDDRPRYLMGVGRPEDLVEAVARGIDMFDCVMPTRNARNGHYFTSTGTVRVRNARYEKDLRPIEEGCGCPACAGGYSRAYLRHLDRCNEMLGPILGTLHNLWYYQALMAEMRAAIDAGTFAAFRESFYARRSP

SEQ ID NO: 57082 - protein, 373 aa, unidentified
  source 1..373: note = Luteimonas cucumeris
  REGION 1..373: note = tr|A0A562LBL2|A0A562LBL2_9GAMM Queuine tRNA-ribosyltransferase OS=Luteimonas cucumeris OX=985012; GN = tgt PE=3 SV=1
MSRMSFELLGTDGPARRGRLAFPRGTVETPAFMPVGTYGSVKGVLPEQVRALGAQIILGNTFHLYLRPGLEVIEAHGGLHGFTRWDGPILTDSGGFQVFSLAHRRKITEQGVTFAAPTDGSTVFLGPEESMRIQRVLDSDIVMIFDECPPVHVDGKPVGLGVVQQSMELSLRWAERSKKAHEGNDAALFGIVQGGVHHELRTRSAQGLQQIGFDGYAIGGLAVGETEAERNDMLDHTAPQLPQDRPRYLMGVGRPEDLVEAVARGVDMFDCVMPTRNARNGHYFTGTGTVRIRNARYERDTGPIEAGCGCYTCSNGYSRAYLRHLDRCNEMLAPILGTLHNLWYYQKLMADMRAAIEQGTFATFRLSFHAARA

SEQ ID NO: 57083 - protein, 375 aa, Luteimonas marina
  REGION 1..375: note = tr|A0A5C5TY51|A0A5C5TY51_9GAMM Queuine tRNA-ribosyltransferase OS=Luteimonas marina OX=488485; GN = tgt PE=3 SV=1
MSRLQFQLLSTDGAARRGRLSFPRGTVETPAFMPVGTYGTVKGMLPEQVRALGAEIILGNTFHLFLRPGLEVIEAHGGLHGFARWDGPILTDSGGFQVFSLAHRRKISEAGVTFAAPTDGSKVFLGPEESMRIQKVLGSDIVMIFDECPPVHVDGQPVDKRVVERSMELSLRWAERSRRAHEGNDAALFGIVQGGVHHDLRTRSAEGLKAIGFDGYAVGGLAVGETEAERNAMLEHTCPQLPADRPRYLMGVGRPEDLVEAVARGIDMFDCVMPTRNARNGHYFTSTGVVRVRNAKYEKDLRPIEEGCGCPACAGGYSRAYLRHLDRCNEMLGPILGTLHNLWHYQTLMADMRAAIGQGTFAAFRESFHAARRPG

SEQ ID NO: 57084 - protein, 374 aa, Luteimonas sp.
  REGION 1..374: note = tr|A0A1B3W8Z7|A0A1B3W8Z7_9GAMM Queuine tRNA-ribosyltransferase OS=Luteimonas sp. JM171 OX=1896164; GN = tgt PE=3 SV=1
MSRMQFELLGTDGAARRGRLVFPRGTVETPAFMPVGTYGTVKGMLPDQLRELGAQMILGNTFHLYLRPGLEVIGDHGGLHGFARWDGPILTDSGGFQVFSLAHKRRITEQGVTFQAPTDGSTVFLGPEESMRIQKVLDSDVVMIFDECPPVHENGKPVDPRVIERSMELSLRWAERSKRAHEGNDAALFGIVQGGVHHDLRTRSAEGLKSIGFDGYAIGGLAVGETEDERNAMLDHTCPQLPGDRPRYLMGVGRPEDLVEAVARGVDMFDCVMPTRNARNGHYFTSTGVVRIRNAKYERDLRPIEEGCGCPACAGGYTRAYLRHLVRCNEMLGPILGTLHNLWHYQRLMAGMRDAIAAGTFGAFRESFYRQRTP

SEQ ID NO: 57085 - protein, 378 aa, Luteimonas sp.
  REGION 1..378: note = tr|A0A0H1AS51|A0A0H1AS51_9GAMM Queuine tRNA-ribosyltransferase OS=Luteimonas sp. FCS-9 OX=1547516; GN = tgt PE=3 SV=1
MSRLQFQLQTTDGTARRGRLTFPRGTIETPAFMPVGTYGTVKGVLPHQIRALGAQIILGNTFHLYLRPGLEVIEAHGGLHGFARWDGPILTDSGGFQVFSLAHKRKITEEGVTFAAPTDGSRVFLGPEESMRIQKALDSDIVMIFDECPPVQVDGKPVDPRVVERSMELSLRWAARSKRAHEGNDAALFGIVQGGVHHDLRTRSAQGLQAIGFDGYAIGGLAVGETEDERNAMLDHTTPQLPADRPRYLMGVGRPEDLVEAVARGVDMFDCVMPTRNARNGHFFTSTGTIRIRNAKFEKDLRPIEEGCGCEACAGGYTRAYLRHLDRCGEMLGPMLGTLHNLWYYQKLMADMRAAIEAGTFAAFRESFYRARMGNPDA

SEQ ID NO: 57086 - protein, 378 aa, unidentified
  source 1..378: note = Luteimonas terrae
  REGION 1..378: note = tr|A0A4R5UC30|A0A4R5UC30_9GAMM Queuine tRNA-ribosyltransferase OS=Luteimonas terrae OX=1530191; GN = tgt PE=3 SV=1
MSRLQFELITTDGVARRGRLTFPRGTIETPAFMPVGTYGTVKGVLPEQVRALGAEIILGNTFHLYLRPGLEVIEAHGGLHGFARWHKPILTDSGGFQVFSLAHKRKITEEGVTFAAPTDGAKVFLGPEESMRIQKVLDSDIVMIFDECPPVQIDGKPVHPRVVEKSMELSLRWAARSKRAHEGNDAALFGIVQGGVHHDLRTRSAEGLKDIGFDGYAIGGLAVGETEDERNAMLDHTAPQLPDDRPRYLMGVGRPEDLVEAVARGVDMFDCVMPTRNARNGHFFTSTGVIRIRNAKFEKDLRPIEEGCGCEACSGGFTRAYLRHLDRCGEMLGPMLGTLHNLWYYQTLMADMRAAIASGTFAAFRDSFYRARTGNPDA

SEQ ID NO: 57087 - protein, 387 aa, unidentified
  source 1..387: note = Luteitalea pratensis
  REGION 1..387: note = tr|A0A143PWI2|A0A143PWI2_9BACT Queuine tRNA-ribosyltransferase OS=Luteitalea pratensis OX=1855912; GN = tgt PE=3 SV=1
MPGAFAFTLTGRDGQARTGCLQTPHGLVETPAFMPVGTRGAVRGVTQRTLEEAGAAIVLANTYHLYLRPGDDLIAERGGLHRFIGWPGPILTDSGGYQIFSLGPLVKITEEGARFQSHLDGSRHALTPEKVVDIQAQLGPDIAMVLDECLAAPASEAASAASLDLTLRWARRARDRFLQLQAGPVAGVTVTNPGQAQFGIVQGGIYPHLREKSAAALREIGFESYAIGGLSVGESVETMYEVVGDTTPFLPDDRPRYLMGTGMPDDLVECVARGIDMFDCVLPTRNARNGQVFTPDGPINLRNARFARDDRPIDEQCPCDTCRRHSRAYLRHLFHNKEMNAGTLASVHNLVFYLDTLRRIRQAIGFGLFAQFRQDFHRRFSRTSPSS

SEQ ID NO: 57088 - protein, 417 aa, Luteococcus japonicus
  REGION 1..417: note = tr|A0A1R4JIB1|A0A1R4JIB1_9ACTN Queuine tRNA-ribosyltransferase OS=Luteococcus japonicus LSP_Lj1; OX = 1255658 GN=tgt PE=3 SV=1
MSGFGFTPRTTLDNGIGRTGTIHTPHGEIQTPAFIAVGTKATVKAVLPESISELGAQAVLANAYHLYLQPGSDLIDEAGGLGRFMNWRGPTFTDSGGFQVMSLGSGFKKVIEMDAKRAEADHAVAPGKERLAHVDDDGVTFKSHLDGSKHRFTPEVSMRVQHQIGADIMFAFDELTHLHNSRGYQEEALERTRLWAERCLAEHRRLTEERVGKPYQALFGVIQGAQYEDLRRKACRDLGGMEVDGQSFDGFGYGGALEKENLGTICGWMSEELPFDKPRHLLGISEPDDFFAAVAAGADTFDCVNPSRVARNSAIYAADGRYNLSTARNRRLFEPLEDGCDCYTCTHYTRAYLHHLFKAKEMLASTLATIHNERFTVRLVDDIRASMDNDDFESFRDHFLGRFYGNSTGPSSVDTTN

SEQ ID NO: 57089 - protein, 417 aa, Luteococcus japonicus
  REGION 1..417: note = tr|A0A3N1ZSS2|A0A3N1ZSS2_9ACTN Queuine tRNA-ribosyltransferase OS=Luteococcus japonicus OX=33984; GN = tgt PE=3 SV=1
MSGFGFTPRTTLDNGIGRTGTIHTPHGEIQTPAFIAVGTKATVKAVLPESISELGAQAVLANAYHLYLQPGSDLIDEAGGLGRFMNWRGPTFTDSGGFQVMSLGSGFKKVIEMDAKRAEADHAVAPGKERLAHVDDDGVTFKSHLDGSKHRFTPEVSMRVQHQIGADIMFAFDELTHLHNSRGYQEEALERTRLWAERCLAEHRRLTEERVGKPYQALFGVIQGAQYEDLRRKACRDLGGMEVDGQSFDGFGYGGALEKENLGTICGWMSEELPFDKPRHLLGISEPDDFFAAVAAGADTFDCVNPSRVARNSAIYTADGRYNLSTARNRRLFEPLEDGCDCYTCTHYTRAYLHHLFKAKEMLASTLATIHNERFTVRLVDDIRASMDNGDFESFRDHFLGRFYGNSTGPSSVDTTN

SEQ ID NO: 57090 - protein, 376 aa, unidentified
  source 1..376: note = Lutibacter agarilyticus
  REGION 1..376: note = tr|A0A238Y232|A0A238Y232_9FLAO Queuine tRNA-ribosyltransferase OS=Lutibacter agarilyticus; OX = 1109740 GN=tgt PE=3 SV=1
MQFELKSKDAQSKARAGVITTDHGTIETPIFMPVGTVGTVKGVHQTELKDEINPDIILGNTYHLYLRPQTKILEQAGGLHKFMNWDRNILTDSGGYQVYSLSGRRKIKEEGVKFKSHIDGSYHTFTPENVMEIQRSIGADIIMAFDECTPYPCDYNYAKRSMHMTHRWLTRCINHLEKVPFKYDYSQTFFPIVQGSTYKDLRKQSAEYIASVGAEGNAIGGLSVGEPAEEMYEMTEVVTAILPEDKPRYLMGVGTPINILENIALGIDMFDCVMPTRNARNGMLFTAHGTINIKNKKWENDFSAIDEMGTTFVDTMYSKAYLRHLFASKELLGKQIASIHNLGFYLWLTREARKHILAGDFTEWKNRMVKQMDKRL

SEQ ID NO: 57091 - protein, 376 aa, unidentified
  source 1..376: note = Lutibacter flavus
  REGION 1..376: note = tr|A0A238XM45|A0A238XM45_9FLAO Queuine tRNA-ribosyltransferase OS=Lutibacter flavus OX=691689; GN = tgt PE=3 SV=1
MQFELKTKDPNSKARAGVITTDHGTIETPIFMPVGTVGTVKGVHQSELKDEINPDIILGNTYHLYLRPQTKILEQAGGLHKFMNWNSNILTDSGGYQVYSLSERRKIKEEGVKFKSHIDGSYHTFTPENVMEIQRSIGADIIMAFDECTPYPCDYSYAKRSMHMTHRWLERCITHLDKTPLKYDYNQTFFPIVQGSTYKDLRKQSAEYIASVGAEGNAIGGLSVGEPAEEMYEMTEVVTAILPEDKPRYLMGVGTPINILENIALGIDMFDCVMPTRNARNGMLFTANGTINIKNKKWENDFSAIDEMDITFVDTMYSKAYLRHLFISKELLGKQIASIHNLGFYLWLVREARKHILAGDFTDWKNRMVKQMDKRL

SEQ ID NO: 57092 - protein, 376 aa, Lutibacter maritimus
  REGION 1..376: note = tr|A0A1I6SC36|A0A1I6SC36_9FLAO Queuine tRNA-ribosyltransferase OS=Lutibacter maritimus OX=593133; GN = tgt PE=3 SV=1
MQFKLKTTDAQSKARAGIITTDHGIIETPIFMPVGTVGTVKGVHQSELKNEINPDIILGNTYHLYLRPQTTILEQAGGLHKFMNWDRNILTDSGGYQVYSLSERRKINEEGVKFKSHIDGSYHTFTPENVMEIQRSIGADIIMAFDECTPYPCDYNYAKRSMHMTHRWLKRCITHLEKTPFKYDYSQAFFPIVQGSTYKDLRQQSAEYIAGVGAEGNAIGGLSVGEPAEEMYAMTEIVTAILPEDKPRYLMGVGTPTNILENIALGIDMFDCVMPTRNARNGMLFTANGSINIKNKKWENDFSPIDEMGITFVDTMYSKAYLRHLFISKELLGKQIASIHNLGFYLWLVREARKHILAGDFTTWKNQMVKQLDQRL

SEQ ID NO: 57093 - protein, 376 aa, unidentified
  source 1..376: note = Lutibacter oceani
  REGION 1..376: note = tr|A0A3D9RSA8|A0A3D9RSA8_9FLAO Queuine tRNA-ribosyltransferase OS=Lutibacter oceani OX=1853311; GN = tgt PE=3 SV=1
MQFELKTKDAQSKARAGVITTDHGTIETPIFMPVGTVGTVKGVHQTELKNEINPDIILGNTYHLYLRPQTTILEQAGGLHKFMNWDRNILTDSGGYQVYSLSGRRKINEEGVKFKSHIDGSYHTFTPENVMEIQRTIGADIIMAFDECTPYPCNYNYAKRSMHMTHRWLKRCITHLDKTPYKYDYSQAFFPIVQGSTYKDLRKQSAEFIASVGAEGNAIGGLSVGEPAEEMYEMTEVVTAILPEDKPRYLMGVGTPINILENIALGIDMFDCVMPTRNARNGMLFTAHGSINIKNKKWENDFSAIDEMGITFVDTMYSKAYLRHLFVSKELLGKQIASIHNLGFYLWLVREARKHILAGDFTEWKNRMVNQMNKRL

SEQ ID NO: 57094 - protein, 409 aa, unidentified
  source 1..409: note = Lutibacter oricola
  REGION 1..409: note = tr|A0A1H3AGR3|A0A1H3AGR3_9FLAO Queuine tRNA-ribosyltransferase OS=Lutibacter oricola OX=762486; GN = tgt PE=3 SV=1
MNVYHKFYPTSLQHITSITYFSLNKTYSVSLPTMQFKLNTKDTASKARAGVITTDHGTIETPIFMPVGTVGTVKGVHQTELKNEINPDIILGNTYHLYLRPQTKILEKAGGLHKFMNWDRNILTDSGGYQVYSLSGRRKIKEEGVKFKSHIDGSYHTFTPENVMEIQRSIGADIIMAFDECTPYPCDYNYAKRSMHMTHRWLKRCITHLDKTPFKYDYAQTFFPIVQGSTYKDLRKQSAEYIASAGAEGNAIGGLSVGEPAEEMYEMTEVVTAILPEDKPRYLMGVGTPINILENIALGIDMFDCVMPTRNARNGMLFTANGTINIKNKKWEDDFSPIDEMGITYVDTLYSKAYLRHLFAAKELLGKQIASIHNLGFYMWLVREARKHILAGDFTEWKNRMVKQMDKRL

SEQ ID NO: 57095 - protein, 376 aa, unidentified
  source 1..376: note = Lutibacter profundi
  REGION 1..376: note = tr|A0A0X8G5P5|A0A0X8G5P5_9FLAO Queuine tRNA-ribosyltransferase OS=Lutibacter profundi OX=1622118; GN = tgt PE=3 SV=1
MQFELKKTDAQSKARAGIITTDHGTIETPIFMPVGTVGTVKGIHQTELKDEINPDVILGNTYHLYLRPKTKILEQAGGLHKFMNWDRNILTDSGGYQVYSLSGRRKIKEEGVKFKSHIDGSYHTFTPENVMEIQRIIGADIIMAFDECTPYPCDYSYAKRSMHMTHRWLKRCITHLEKTPLKYDYNQAFFPIVQGSTYKDLRKKSAEFIASVGAEGNAIGGLSVGEPAEEMYEMTEIVTAILPEDKPRYLMGVGTPINILENIALGIDMFDCVMPTRNARNGMLFTAHGTINIKNKKWENDFSAIDEMGITFVDTMYSKAYLRHLFASKELLGKQIASIHNLGFYLWLVREARKHILAGDFTEWKNGMVKQLDKRL

SEQ ID NO: 57096 - protein, 376 aa, Lutibacter sp.
  REGION 1..376: note = tr|A0A559RZZ0|A0A559RZZ0_9FLAO Queuine tRNA-ribosyltransferase OS=Lutibacter sp. Hel_I_33_5; OX = 1566289 GN=tgt PE=3 SV=1
MIFDLKSTDPKSKARAGVITTDHGTIETPIFMPVGTVGTVKGVHQTELKNEINPDIILGNTYHLYLRPQTSILEQAGGLHKFMNWDRNILTDSGGYQVYSLSGRRKIKEEGVKFKSHIDGSMHFFTPENVMEIQRTIGADIIMAFDECTPYPCDYNYAKRSMHMTHRWLNRCINHLEKLPFKYGYEQTFFPIVQGSTYKDLRKQSAEYIANAGAQGNAIGGLSVGEPAEEMYAMTEVVTAILPEDKPRYLMGVGTPINILENIALGIDMFDCVMPTRNARNGMLFTAHGTINIKNKKWENDFSAIDDMGITYVDTLYSKAYLRHLFAAKEMLGKQIASVHNLGFYLWLTREARKHILAGDFTQWKDKMVKQMDKRL

SEQ ID NO: 57097 - protein, 376 aa, Lutibacter sp.
  REGION 1..376: note = tr|A0A2G2P5P0|A0A2G2P5P0_9FLAO Queuine tRNA-ribosyltransferase OS=Lutibacter sp. OX=1925666; GN = tgt PE=3 SV=1
  VARIANT 21: note = Xaa can be any naturally occurring amino acid
  VARIANT 186: note = Xaa can be any naturally occurring amino acid
  VARIANT 188: note = Xaa can be any naturally occurring amino acid
MQFELKTTDAQSKARAGIITXDHGTIETPIFMPVGTVGTVKGVHQTELKNEINPDIILGNTYHLYLRPKTAILEQAGGLHKFMNWDRPILTDSGGYQVYSLSSRRKIKEEGVRFKSHIDGSYHTFTPENVMEIQRVIGADIIMAFDECTPYPCDYSYAKRSMHMTHRWLKRCITHLDKTPYKYDYXQXFFPIVQGSTYKDLRKQSAEFIASVGAEGNAIGGLSVGEPAEEMYEMTEIVTAILPEDKPRYLMGVGTPINILENIALGIDMFDCVMPTRNARNGMLFTAHGSINIKNKKWENDFSPIDEMGITFVDTMYSKAYLRHLFASKELLGKQIASIHNLGFYLWLVREARKHILAGDFTAWKNRMVKQLDKRL

SEQ ID NO: 57098 - protein, 377 aa, unidentified
  source 1..377: note = Lutibaculum baratangense
  REGION 1..377: note = tr|V4RMR2|V4RMR2_9RHIZ Queuine tRNA-ribosyltransferase OS=Lutibaculum baratangense AMV1; OX = 631454 GN=tgt PE=3 SV=1
MTIQFGYELQARDGKARRGVVHTPRGDIQTPAFMPVGTAGTVKGLLPEQVRATGADIILGNTYHLMLRPGAERVARLGGLHAFMRWDGPILTDSGGFQVMSLASLRKIDEQGVVFKSHLDGSEHAMSPERSVEIQRLLGADITMQLDECIRLPAPHAEAERAMQLSLRWAERCKAAFDPAGGGRALFGIVQGGTERDLRLRSAEGLVGIGFDGYAVGGLAVGEPQEVMIRVLSETLGALPEDRPRYLMGVGTPEDMLLSVAEGIDMFDCVMPTRAGRHGQAYTRFGRLNLKNAKHAEDLRPLDEDSDCPAMRDYSRAYLHHLVRSQELLGAVLLSWANVHYYHSVMRDARRAIEEGLYADHVAATREAWARGDESAA

SEQ ID NO: 57099 - protein, 376 aa, unidentified
  source 1..376: note = Lutimaribacter litoralis
  REGION 1..376: note = tr|A0A521FQQ3|A0A521FQQ3_9RHOB Queuine tRNA-ribosyltransferase OS=Lutimaribacter litoralis; OX = 1010611 GN=tgt PE=3 SV=1
MTAKFSFDLLATDGKARRGVIHTTRGDIRTPAFMPVGTAATVKAMMPESVAATGADILLGNTYHLMLRPTAERIDRLGGLHKFMNWDKPILTDSGGFQVMSLSALRKMTEDGVTFKSHIDGSMHTLTPERSMEIQKLLGSDIVMCFDECTPFPAEEKVAHESMRMSMRWAKRSREAFGDRPGHALFGIQQGSVFRDQRQESAEKLAGIGFDGYAVGGLAVGEGQDMMFDVLDYAPDMLPTDRPRYLMGVGKPDDIVGAVKRGIDMMDCVLPSRSGRTGQVFTRHGVVNIKNARHQDDPRPLDENCTCPACRNYSRAYLHHVFRAQEMISGMLLTWHNLHYYQELMQGMRDAIEVGRFAAFEAEFHAQRAQGDIDPL

SEQ ID NO: 57100 - protein, 375 aa, unidentified
  source 1..375: note = Lutimaribacter pacificus
  REGION 1..375: note = tr|A0A1H0FA06|A0A1H0FA06_9RHOB Queuine tRNA-ribosyltransferase OS=Lutimaribacter pacificus; OX = 391948 GN=tgt PE=3 SV=1
MTGVTFELKATDGRARTGVIRTTRGDIRTPAFMPVGTAATVKAMMPESVAATGADILLGNTYHLMLRPGAERIARLGGLHRFMNWEKPILTDSGGFQVMSLADLRKLTEKGVTFRSHVDGSKHELTPERSMEIQRLLGSDIVMCFDECPALPADRARIEESMRLSMRWAARSKAAFGDRPGHALFGIQQGGLEPDLREESAKALRDIGFDGYAIGGLAVGEGQEAMFACLDYAPDMLPNDKPRYLMGVGKPDDILGAVKRGVDMMDCVLPSRSGRTGQAWTRRGQVNIKNARHADDPRPLDAECTCPACRNYSRAYLHHVFRAGEMISGMLLTWHNLHYYQELMAGMRAAIAEGRFDAWEGEFHAQRAEGDIAPL

SEQ ID NO: 57101 - protein, 375 aa, Lutimaribacter saemankumensis
  REGION 1..375: note = tr|A0A1G8H0B5|A0A1G8H0B5_9RHOB Queuine tRNA-ribosyltransferase OS=Lutimaribacter saemankumensis; OX = 490829 GN=tgt PE=3 SV=1
MSGVTFELKATDGRARTGVIRTTRGDIRTPAFMPVGTAATVKAMMPESVAATGADILLGNTYHLMLRPGAERIARLGGLHKFMNWDKPILTDSGGFQVMSLSDLRKLTEKGVTFRSHVDGSKHELTPERSMEIQRLLGSDIVMCFDECPALPADRKRIEESMRLSMRWAARSKDAFGDRPGHALFGIQQGGLEPDLREESAKALQEIGFDGYAIGGLAVGEGQEAMFACLDYAPGQLPADRPRYLMGVGKPDDIVGAVKRGVDMMDCVLPSRSGRTGQAWTRRGQVNIKNARHSDDPRPLDEECTCPACRNYSRAYLHHVFRAGEMISGMLLTWHNLHYYQEIMAGMREAIAEGRFDAWEAAFHATREEGDIPAL

SEQ ID NO: 57102 - protein, 379 aa, Lutispora thermophila
  REGION 1..379: note = tr|A0A1M6HPH3|A0A1M6HPH3_9CLOT Queuine tRNA-ribosyltransferase OS=Lutispora thermophila DSM 19022; OX = 1122184 GN=tgt PE=3 SV=1
MNREGNIVAIRYELIKECKDTNARLGRVYTPHGTIETPAFMPVGTQASVKAMSPDELKEIGSQIILSNTYHLYIRPGHKLIEDFGGLHGFMNWDIPILTDSGGFQVFSLNELRKISEEGVEFKSHLDGSKHFFTPEFVMEIEESLGADIIMAFDECIPYPCEKDYARKSMERTVRWLKRCKKAHTKTDKQALFGIVQGGTFKDLRIESAKMTVDVDLPGYAVGGLSVGESKEEMYEVLEYTVPLLPKDKPRYLMGVGSPDSLIDGVIRGIDMFDCVLPTRIARNGTVMTSKGKLVVRNAEYARDSLPLDENCDCYACRNFSRAYIRHLIKAGEILGARLTTIHNLRFLQNLMKNIRDAIKEDRLLNFRKDFFDSYGYEK

SEQ ID NO: 57103 - protein, 386 aa, Lyngbya aestuarii
  REGION 1..386: note = tr|U7QEB5|U7QEB5_9CYAN Queuine tRNA-ribosyltransferase OS=Lyngbya aestuarii BL J; OX = 1348334 GN=tgt PE=3 SV=1
MSEPNSFDIQARCSQSSARAGIFWTPHGQVETPRFMPVGTLANVKTLTPAHLEAAGAQMVLSNTYHLHLQPGEKIVASAGGLHRFMAWKGPILTDSGGFQVFSLSEIRTINDEGVIFRSPHDGLMIHFTPERSIQIQNELGADVIMAFDECPPSPASREQVLAATERTYRWLERCITAHQRSDQALFGIVQGGVYPELRQEAAQQLTKLDLPGYAIGGVSVGEPAELIEKIVKVTTPFLPPEKPRYLMGVGTYREMAQAIASGIDLFDCVIPTRLARHGAALVKGERWNLKNSPFREDFQPLDETCPCYTCQNFSRAYLSHLVRAKELLAYTLLSIHNVTELIRFTQRIRDAIFRDRFSEEFAEWLIPSQSGKTLEEVGFSDQDEP

SEQ ID NO: 57104 - protein, 375 aa, Lyngbya confervoides; identical to SEQ ID NO: 55893
  REGION 1..375: note = tr|A0A0C1YB35|A0A0C1YB35_9CYAN Queuine tRNA-ribosyltransferase OS=Lyngbya confervoides BDU141951; OX = 1574623 GN=tgt PE=3 SV=1

SEQ ID NO: 57105 - protein, 386 aa, Lyngbya sp.
  REGION 1..386: note = tr|A0YJH8|A0YJH8_LYNSP Queuine tRNA-ribosyltransferase OS=Lyngbya sp. (strain PCC 8106); OX = 313612 GN=tgt PE=3 SV=1
MSEPNSFDIQARCSQSSARAGIFSTPHGSVETPRFMPVGTLANVKTLTPAHLEAAGAQMVLSNTYHLHLQPGEKIVASAGGLHRFMAWNGPILTDSGGFQVFSLSEIRTINDEGVIFRSPHDGLMIHLTPERSIQIQNELGADVIMAFDECPPYPASREQVLAATERTYRWLERCITAHQRSDQALFGIVQGGVYPELRQEAAQQLAKLNLPGYAIGGVSVGEPSELIEKIVKVTTPFLPPEKPRYLMGVGTYREMAQAIASGIDLFDCVIPTRLARHGAALVQGERWNLKNSPFREDFQPLDETCPCYTCQNFSRAYLSHLVRAKELLAYTLLSIHNVTELIRFTQRIRDAIFRDRFSEEFAEWIKPSESGKTLEEVGFSHQDDP

SEQ ID NO: 57106 - protein, 381 aa, unidentified
  source 1..381: note = Lysinibacillus acetophenoni
  REGION 1..381: note = tr|A0A285U3K3|A0A285U3K3_9BACI Queuine tRNA-ribosyltransferase OS=Lysinibacillus acetophenoni; OX = 614649 GN=tgt PE=3 SV=1
MTQPAIRYEHIKTCKQTGARLGIVHTPHGSFETPAFMPVGTQATVKTMSPEEVKEMGAGIILSNTYHLWLRPGNEIVKEAGGLHKFMNWDRAILTDSGGFQVFSLSDFRKIEEEGVYFRNHLNGDKLFLSPEKSIQVQNDLGADIIMAFDECPPYPATYEYMLASVDRTTRWAKRCKEAHSRPEEQGLFGIIQGGEFEDLRKRSAEALVELDFPGYAIGGLSVGEPKDVMNKVLEFTTPLMPFDKPRYLMGVGSPDSLIDGAIRGVDMFDCVLPTRIARNGTLMTSEGRLVVKNAQYAKDFGPLDPNCDCYTCKNYSRAYIRHLIKAGETFGIRLTTYHNLQFLLKLMEQVRQAIREDRLGDFREEFFEKYGFNKPDAKNF

SEQ ID NO: 57107 - protein, 381 aa, Lysinibacillus boronitolerans
  REGION 1..381: note = tr|A0A0A3IYD7|A0A0A3IYD7_9BACI Queuine tRNA-ribosyltransferase OS=Lysinibacillus boronitolerans JCM 21713 = 10a = NBRC 103108 OX=1294264 GN=tgt PE=3 SV=1
MTQPAIRYELLHTCKQTGARLGIVHTPHGSFETPAFMPVGTQATVKTMSPEELKEMNAGIILSNTYHLWLRPGNDIVKEAGGLHKFMNWDRPILTDSGGFQVFSLSQFRKIEEEGVHFRNHLNGDKLFLSPEKAMEIQNDLGSDIMMAFDECPPYPATHDYMLQSVDRTTRWAKRCKEAHQRPEEQGLFGIIQGGEYEDLRRRSAEALVELDFPGYAIGGLSVGEPKDVMNRVLEFTTPMMPENKPRYLMGVGSPDSLIDGAIRGIDMFDCVLPTRIARNGTLMTSEGRLVVKNAKYARDFGPIDPNCDCYTCKNYSRAYVRHLIRTEETFGIRLTSYHNLHFLLKLMEQVREAIRQDRLGDFREEFFEKYGFNGPDAKNF

SEQ ID NO: 57108 - protein, 381 aa, unidentified
  source 1..381: note = Lysinibacillus chungkukjangi
  REGION 1..381: note = tr|A0A318TY78|A0A318TY78_9BACI Queuine tRNA-ribosyltransferase OS=Lysinibacillus chungkukjangi; OX = 1202712 GN=tgt PE=3 SV=1
MTKPAVTYELIKTCKQTGARLGIVHTPHGSFETPAFMPVGTQATVKTMSPEDLKEMEAGIILSNTYHLWLRPGNDIVKEAGGLHKFMNWDRPILTDSGGFQVFSLSDFRKIEEEGVHFRNHLNGDKLFLSPEKAMEIQNDLGSDIMMAFDECPPFPATYEYMLDSVDRTTRWAKRCKEAHARPEDQGLFGIVQGGEFEDLRKRSAEALVELDLPGYAVGGLSVGEPKDIMNRVLEFTTPLLPENKPRYLMGVGSPDSLIDGSIRGIDMFDCVLPTRIARNGTLMTSEGRLVVKNAKYARDFSPIDPNCDCYTCKNYTRAYVRHLIRTEETFGIRLTTYHNLHFLLKLMEQVRQAIREDRLGDFREEFFEKYGFNKPNAKNF

SEQ ID NO: 57109 - protein, 381 aa, unidentified
  source 1..381: note = Lysinibacillus composti
  REGION 1..381: note = tr|A0A3N9UKS1|A0A3N9UKS1_9BACI Queuine tRNA-ribosyltransferase OS=Lysinibacillus composti; OX = 720633 GN=tgt PE=3 SV=1
MTQPAIRYEFIKTCKQTGARLGIVHTPHGSFETPAFMPVGTQATVKTMSPEDLKEMGAGIILSNTYHLWLRPGNDIVKEAGGLHKFMNWDRPILTDSGGFQVFSLSEFRKIEEEGVHFRNHLNGDKLFLSPEKAMEIQNDLGSDIMMAFDECPPFPATYDYMLASVDRTTRWAKRCKDAHQRPEDQGLFGIVQGGEFEDLRKRSAEALVELDLPGYAVGGLSVGEPKEIMNRVLEFTTPLLPENKPRYLMGVGSPDSLIDGAIRGIDMFDCVLPTRIARNGTLMTSEGRLVVKNAKYARDFGPLDPNCDCYTCKNYSRAYIRHLIRTEETFGIRLTTYHNLHFLLNLMEQVRQAIREDRLGDFREEFFEKYGFNKPNAKNF

SEQ ID NO: 57110 - protein, 381 aa, unidentified
  source 1..381: note = Lysinibacillus contaminans
  REGION 1..381: note = tr|A0A0M8Q2A5|A0A0M8Q2A5_9BACI Queuine tRNA-ribosyltransferase OS=Lysinibacillus contaminans; OX = 1293441 GN=tgt PE=3 SV=1
MTQPAIRYELLHTCKQTGARLGIVHTPHGSFETPAFMPVGTQATVKTMSPEELKEMNAGIILSNTYHLWLRPGNDIVKEAGGLHKFMNWDRPILTDSGGFQVFSLSKFRKIEEEGVHFRNHLNGDKLFLSPEKAMEIQNDLGSDIMMAFDECPPFPATHEYMLKSVDRTTRWAKRCKEAHARPEDQGLFGIIQGGEYEDLRRRSAEALVELDFPGYAIGGLSVGEPKDIMNRVLEFTTPLMPENKPRYLMGVGSPDSLIDGAIRGIDMFDCVLPTRIARNGTLMTSEGRLVVKNAKYARDFGPIDPNCDCYTCKNYSRAYVRHLIRTEETFGLRLTSYHNLRFLLNLMEQVREAIREDRLGDFREEFFEKYGFNEPNAKNF

SEQ ID NO: 57111 - protein, 381 aa, unidentified
  source 1..381: note = Lysinibacillus endophyticus
  REGION 1..381: note = tr|A0A494ZBR1|A0A494ZBR1_9BACI Queuine tRNA-ribosyltransferase OS=Lysinibacillus endophyticus; OX = 1978490 GN=tgt PE=3 SV=1
MTKPAVTYELIKTCKQTGARLGIVHTPHGSFETPAFMPVGTQATVKTMSPEELKEMNAGIILSNTYHLWLRPGNEIVKEAGGLHKFMNWDRPILTDSGGFQVFSLSQFRKIEEEGVHFRNHLNGDKLFLSPEKAMEIQNDLGSDIMMAFDECPPYPATYDYMLASVDRTTRWAKRCKEAHQRPEDQGLFGIVQGGEYEDLRKRSAEALVELDFPGYAIGGLSVGEPKDIMNRVLEFTTPLLPTNKPRYLMGVGSPDSLIDGAIRGVDMFDCVLPTRIARNGTLMTSEGRLVVKNAKYARDFSPIDPNCDCYTCKNYTRAYIRHLIRTEETFGIRLTTYHNLHFLLKLMEQVRQAIREDRLGDFREEFFEKYGFNKPDAKNF

SEQ ID NO: 57112 - protein, 381 aa, Lysinibacillus fusiformis
  REGION 1..381: note = tr|A0A1E4R9U0|A0A1E4R9U0_9BACI Queuine tRNA-ribosyltransferase OS=Lysinibacillus fusiformis; OX = 28031 GN=tgt PE=3 SV=1
MTQPAIRYELLHTCKQTGARLGIVHTPHGSFETPAFMPVGTQATVKTMSPEELKEMNAGIILSNTYHLWLRPGNDIVKEAGGLHKFMNWDRPILTDSGGFQVFSLSKFRKIEEEGVHFRNHLNGDKLFLSPEKAMEIQNDLGSDIMMAFDECPPYPATHEYMLQSVDRTTRWAKRCKEAHNRPEEQGLFGIIQGGEYEDLRRRSAEALVELDFPGYAIGGLSVGEPKDIMNRVLEFTTPLMPANKPRYLMGVGSPDSLIDGAIRGVDMFDCVLPTRIARNGTLMTSEGRLVVKNAKYARDFGPIDPNCDCYTCKNYSRAYIRHLIRTEETFGIRLTSYHNLHFLLKLMEQVREAIRQDRLGDFREEFFEKYGFNGPDAKNF

SEQ ID NO: 57113 - protein, 381 aa, Lysinibacillus fusiformis
  REGION 1..381: note = tr|D7WQC0|D7WQC0_9BACI Queuine tRNA-ribosyltransferase OS=Lysinibacillus fusiformis ZC1; OX = 714961 GN=tgt PE=3 SV=1
MTQPAIRYELLHTCKQTGARLGIVHTPHGSFETPAFMPVGTQATVKTMSPEELKEMNAGIILSNTYHLWLRPGNDIVKEAGGLHKFMNWDRPILTDSGGFQVFSLSQFRKIEEEGVHFRNHLNGDKLFLSPEKAMEIQNDLGSDIMMAFDECPPYPATHDYMLKSVDRTTRWAKRCKEAHQRPEEQGLFGIIQGGEYEDLRRRSAEALVELDFPGYAIGGLSVGEPKDVMNRVLEFTTPMMPENKPRYLMGVGSPDSLIDGAIRGIDMFDCVLPTRIARNGTLMTSEGRLVVKNAKYARDFGPIDPNCDCYTCKNYSRAYVRHLIRTEETFGIRLTSYHNLHFLLKLMEQVREAIRQDRLGDFREEFFEKYGFNGPNAKNF

SEQ ID NO: 57114 - protein, 381 aa, unidentified
  source 1..381: note = Lysinibacillus halotolerans
  REGION 1..381: note = tr|A0A3M8H4X2|A0A3M8H4X2_9BACI Queuine tRNA-ribosyltransferase OS=Lysinibacillus halotolerans; OX = 1368476 GN=tgt PE=3 SV=1
MTKPAVTYELIKTCKQTGARLGIVHTPHGSFETPAFMPVGTQATVKTMSPEELKEMDAGIILSNTYHLWLRPGNDIIKEAGGLHKFMNWDRPILTDSGGFQVFSLSEFRKIEEEGVHFRNHLNGDKLFLSPEKAMEIQNDLGSDIMMAFDECPPYPASYEYMLNSVDRTTRWAKRCKEAHARPEDQALFGIVQGGEYEDLRKRSAEALVELDLPGYAIGGLSVGEPKEIMNRMLEYTTPLLPDNKPRYLMGVGSPDSLIDGAIRGVDMFDCVLPTRIARNGTLMTSEGRLVVKNAKYARDFSPIDPNCDCYTCKNYTRAYVRHLIRTEETFGIRLTTYHNLHFLLKLMEQVRQAIREDRLGDFREEFFEKYGFNKPDAKNF

SEQ ID NO: 57115 - protein, 381 aa, Lysinibacillus macroides
  REGION 1..381: note = tr|A0A0N0UWC3|A0A0N0UWC3_9BACI Queuine tRNA-ribosyltransferase OS=Lysinibacillus macroides; OX = 33935 GN=tgt PE=3 SV=1
MTQPAIRYELLHTCKQTGARLGIVHTPHGSFETPAFMPVGTQATVKTMSPEELKEMNAGIILSNTYHLWLRPGNDIVKEAGGLHKFMNWDRPILTDSGGFQVFSLSQFRKIEEEGVHFRNHLNGDKLFLSPEKAMEIQNDLGSDIMMAFDECPPYPATYDYMLQSVDRTTRWAKRCKEAHQRPEEQGLFGIIQGGEYEDLRRRSAEALVELDFPGYAIGGLSVGEPKDVMNRVLEFTTPMMPVNKPRYLMGVGSPDSLIDGAIRGIDMFDCVLPTRIARNGTLMTSEGRLVVKNAKYARDFGPLDPNCDCYTCKNYSRAYIRHLIRTEETFGIRLTTYHNLHFLLKLMEQVREAIRQDRLGDFREEFFEKYGFNGSNAKNF

SEQ ID NO: 57116 - protein, 381 aa, unidentified
  source 1..381: note = Lysinibacillus manganicus
  REGION 1..381: note = tr|A0A0A3I535|A0A0A3I535_9BACI Queuine tRNA-ribosyltransferase OS=Lysinibacillus manganicus DSM 26584 OX=1384049 GN=tgt PE=3 SV=1
MTQPAIRYEHIKTCKQTGARLGIVHTPHGSFETPAFMPVGTQATVKTMSPEEVKEMGAGIILSNTYHLWLRPGNEIVKEAGGLHKFMNWDRAILTDSGGFQVFSLSDFRKIEEEGVYFRNHLNGDKLFLSPEKSIQVQNDLGADIIMAFDECPPYPATYDYMLASVDRTTRWAKRCKEAHSRPEDQGLFGIIQGGEFEDLRKRSAEALVELDFPGYAIGGLSVGEPKDVMNKVLDFTTPLMPFDKPRYLMGVGSPDSLIDGAIRGVDMFDCVLPTRIARNGTLMTSEGRLVVKNAQYAKDFGPLDPNCDCYTCKNYSRAYIRHLIKAGETFGIRLTTYHNLHFLLKLMEQVRQAIREDRLGDFREEFFEKYGFNKPDAKNF

SEQ ID NO: 57117 - protein, 381 aa, unidentified
  source 1..381: note = Lysinibacillus mangiferihumi
  REGION 1..381: note = tr|A0A4U2ZFG2|A0A4U2ZFG2_9BACI Queuine tRNA-ribosyltransferase OS=Lysinibacillus mangiferihumi; OX = 1130819 GN=tgt PE=3 SV=1
MTQPAIRYELLHTCKQTGARLGIVHTPHGSFETPAFMPVGTQATVKTMSPEELKEMNAGIILSNTYHLWLRPGNDIVKEAGGLHKFMNWDRPILTDSGGFQVFSLSQFRKIEEEGVHFRNHLNGDKLFLSPEKAMEIQNDLGSDIMMAFDECPPYPATYDYMLKSVDRTTRWAKRCKEAHARPEEQGLFGIIQGGEYEELRRRSAEALVELDFPGYAIGGLSVGEPKDVMNQVLEFTTPLMPTNKPRYLMGVGSPDSLIDGAIRGIDMFDCVLPTRIARNGTLMTSEGRLVVKNAKYARDFGPIDPNCDCYTCKNYSRAYVRHLIRTEETFGIRLTSYHNLHFLLKLMEQVREAIREDRLGDFREEFFEKYGFNGPNAKNF

SEQ ID NO: 57118 - protein, 381 aa, unidentified
  source 1..381: note = Lysinibacillus massiliensis
  REGION 1..381: note = tr|A0A0A3J3Z0|A0A0A3J3Z0_9BACI Queuine tRNA-ribosyltransferase OS=Lysinibacillus massiliensis 4400831 = CIP 108448 = CCUG 49529 OX=1211035 GN=tgt PE=3; SV = 1
MTKPAVTYELIKTCKQTGARLGIVHTPHGSFETPAFMPVGTQATVKTMSPEELKEMNAGIILSNTYHLWLRPGNDIVKEAGGLHKFMNWDRPILTDSGGFQVFSLSEFRKIEEEGVHFRNHLNGDKLFLSPEKAMEIQNDLGSDIMMAFDECPPYPATYEYMLNSVDRTTRWAKRCKEAHSRPEDQGLFGIVQGGEFEDLRKRSAEALVELDLPGYAVGGLSVGEPKDIMNRVLEFTTPLLPDNKPRYLMGVGSPDSLIDGAIRGIDMFDCVLPTRIARNGTLMTSEGRLVVKNAKYARDFSPIDPNCDCYTCKNYTRAYVRHLIRTEETFGIRLTTYHNLHFLLKLMEQVRQAIREDRLGDFREEFFEKYGFNKPDAKNF

SEQ ID NO: 57119 - protein, 381 aa, unidentified
  source 1..381: note = Lysinibacillus odysseyi
  REGION 1..381: note = tr|A0A0A3IFE2|A0A0A3IFE2_9BACI Queuine tRNA-ribosyltransferase OS=Lysinibacillus odysseyi 34hs-1 = NBRC 100172 OX=1220589 GN=tgt PE=3 SV=1
MTQPPIRYELIKTCKQTGARLGIVHTPHGSFETPTFMPVGTQATVKAMSPEELKEMNAGIILSNTYHLWLRPGNDIVKEAGGLHKFMNWDRPILTDSGGFQVFSLSQFRKIEEEGVHFRNHLNGDKLFLSPEKAMEIQNDLGSDIMMAFDECPPYPATHEYMLKSVDRTTRWAKRCKEAHQRPDEQGLFGIIQGGEYEDLRRRSAEALVELDFPGYAVGGLSVGEPKDVMNRVLDFTTPLMPADKPRYLMGVGSPDSLIDGSIRGIDMFDCVLPTRIARNGTLMTSEGRMVIKNAKYARDFRPIDENCDCYTCKNYTRAYVRHLLRTEETFGLRLTSYHNLRFLIKLMEDVRQAIREDRLGDFKEEFFEKYGYNKPDAKNF

SEQ ID NO: 57120 - protein, 381 aa, unidentified
  source 1..381: note = Lysinibacillus saudimassiliensis
  REGION 1..381: note = tr|A0A078M0R1|A0A078M0R1_9BACI Queuine tRNA-ribosyltransferase OS=Lysinibacillus saudimassiliensis OX=1461583 GN=tgt PE=3 SV=1
MTKPAVWYEPIKTCKQTGARLGIVHTPHGSFETPTFMPVGTQATVKTMSPEDLKEMNAGIILSNTYHLWLRPGNDIVKEAGGLHKFMNWDKPILTDSGGFQVFSLSKFRKIEEEGVHFRNHLNGDKLFLSPEKAMEIQNDLGSDIMMAFDECPPFPATHEYMLKSVDRTTRWAKRCKEAHKNTENQALFGIVQGGEYEDLRQRSAEALVALDFPGYAIGGLSVGEPKDIMYRVLEQTTHLLPEDKPRYLMGVGSPDSLIEGAIRGVDMFDCVLPTRIARNGTLMTSQGRLVVKNAKYERDFTPIDPECDCYTCKNYTRAYVRHLIRTEETFGLRLTSYHNLRFLIKLMEQVRQAIREDRLGDFRDEFFEKYGFNKPDAKNF

SEQ ID NO: 57121 - protein, 381 aa, unidentified
  source 1..381: note = Lysinibacillus sinduriensis
  REGION 1..381: note = tr|A0A0A3HTA5|A0A0A3HTA5_9BACI Queuine tRNA-ribosyltransferase OS=Lysinibacillus sinduriensis BLB-1 = JCM 15800 OX=1384057 GN=tgt PE=3 SV=1
MTKPAVTYELIKTCKQTGARLGIVHTPHGSFETPAFMPVGTQATVKTMSPEELKEMDAGIILSNTYHLWLRPGNDIVKEAGGLHKFMNWDRPILTDSGGFQVFSLSEFRKIEEEGVHFRNHLNGDKLFLSPEKAMEIQNDLGSDIMMAFDECPPYPATYEYMLNSVDRTTRWAKRCKEAHARPEDQGLFGIVQGGEFEDLRKRSAEALVELDFPGYAIGGLSVGEPKDIMNRVLEFTTPLLPDNKPRYLMGVGSPDSLIDGAIRGVDMFDCVLPTRIARNGTLMTSEGRLVVKNAKYARDFGPIDPNCDCYTCKNYTRAYVRHLIRTEETFGIRLTTYHNLHFLLKLMEQVRQAIREDRLGDFREEFFEKYGFNKPDAKNF

SEQ ID NO: 57122 - protein, 381 aa, Lysinibacillus sp.
  REGION 1..381: note = tr|A0A0B1YCW4|A0A0B1YCW4_9BACI Queuine tRNA-ribosyltransferase OS=Lysinibacillus sp. A1; OX = 1571920 GN=tgt PE=3 SV=1
MTQPAIRYELLHTCKQTGARLGIVHTPHGSFETPAFMPVGTQATVKTMSPEELKEMNAGIILSNTYHLWLRPGNDIVKEAGGLHKFMNWDRPILTDSGGFQVFSLSQFRKIEEEGVHFRNHLNGDKLFLSPEKAMEIQNDLGSDIMMAFDECPPYPATHEYMLQSVDRTTRWAKRCKEAHNRPEEQGLFGIIQGGEYEDLRRRSAEALVELDFPGYAIGGLSVGEPKDIMNRVLEFTTPLMPANKPRYLMGVGSPDSLIDGAIRGVDMFDCVLPTRIARNGTLMTSEGRLVVKNAKYARDFGPIDPNCDCYTCKNYSRAYIRHLIRTEETFGIRLTSYHNLHFLLKLMEQVREAIRQDRLGDFREEFFEKYGFNGPDAKNF

SEQ ID NO: 57123 - protein, 376 aa, Lysinibacillus sp.; identical to SEQ ID NO: 52825
  REGION 1..376: note = tr|A0A544UZG1|A0A544UZG1_9BACI Queuine tRNA-ribosyltransferase OS=Lysinibacillus sp. SDF0063; OX = 2133753 GN=tgt PE=3 SV=1

SEQ ID NO: 57124 - protein, 381 aa, Lysinibacillus sphaericus
  REGION 1..381: note = tr|A0A2X1AI97|A0A2X1AI97_LYSSH Queuine tRNA-ribosyltransferase OS=Lysinibacillus sphaericus; OX = 1421 GN=tgt PE=3 SV=1
MTQPAIRYELLHTCKQTGARLGIVHTPHGSFETPAFMPVGTQATVKTMSPEELKEMNAGIILSNTYHLWLRPGNDIVKEAGGLHKFMNWDRPILTDSGGFQVFSLSQFRKIEEEGVHFRNHLNGDKLFLSPEKAMEIQNDLGSDIMMAFDECPPYPATHDYMLKSVDRTTRWAKRCKEAHQRPEEQGLFGIIQGGEYEDLRRRSAEALVELDFPGYAIGGLSVGEPKDVMNRVLEFTTPMMPENKPRYLMGVGSPDSLIDGAIRGIDMFDCVLPTRIARNGTLMTSEGRLVVKNAKYARDFGPIDPNCDCYTCKNYSRAYVRHLIRTEETFGIRLTSYHNLHFLLKLMEQVREAIRQDRLGDFREEFFEKYGFNGPDAKNF

SEQ ID NO: 57125 - protein, 381 aa, Lysinibacillus sphaericus
  REGION 1..381: note = sp|B1HVA1|TGT_LYSSC Queuine tRNA-ribosyltransferase; OS = Lysinibacillus sphaericus (strain C3-41) OX=444177; GN = tgt PE=3 SV=1
MTQPAIRYELLHTCKQTGARLGIVHTPHGSFETPAFMPVGTQATVKTMSPEELKEMNAGIILSNTYHLWLRPGNDIVKEAGGLHKFMNWDRPILTDSGGFQVFSLSQFRKIEEEGVHFRNHLNGDKLFLSPEKAMEIQNDLGSDIMMAFDECPPYPATHEYMLQSVDRTTRWAKRCKEAHSRPEEQGLFGIIQGGEYEDLRRRSAEALVELDFPGYAIGGLSVGEPKDIMNRVLEFTTPLMPANKPRYLMGVGSPDSLIDGAIRGVDMFDCVLPTRIARNGTLMTSEGRLVVKNAKYARDFGPIDPNCDCYTCKNYSRAYIRHLIRTEETFGIRLTSYHNLHFLLKLMEQVREAIRQDRLGDFREEFFEKYGFNGPNAKNF

SEQ ID NO: 57126 - protein, 381 aa, unidentified
  source 1..381: note = Lysinibacillus tabacifolii
  REGION 1..381: note = tr|A0A4U2XQJ2|A0A4U2XQJ2_9BACI Queuine tRNA-ribosyltransferase OS=Lysinibacillus tabacifolii; OX = 1173107 GN=tgt PE=3 SV=1
MTQPAIRYELLHTCKQTGARLGIVHTPHGSFETPAFMPVGTQATVKTMSPEELKEMNAGIILSNTYHLWLRPGNDIVKEAGGLHKFMNWDRPILTDSGGFQVFSLSQFRKIEEEGVHFRNHLNGDKLFLSPEKAMEIQNDLGSDIMMAFDECPPYPATYDYMLKSVDRTTRWAKRCKEAHARPEEQGLFGIIQGGEYEELRRRSAEALVELDFPGYAIGGLSVGEPKDVMNRVLEFTTPLMPTNKPRYLMGVGSPDSLIDGAIRGIDMFDCVLPTRIARNGTLMTSEGRLVVKNAKYARDFGPIDPNCDCYTCKNYSRAYVRHLIRTEETFGIRLTSYHNLHFLLKLMEQVREAIREDRLGDFREEFFEKYGFNGPNAKNF

SEQ ID NO: 57127 - protein, 381 aa, unidentified
  source 1..381: note = Lysinibacillus telephonicus
  REGION 1..381: note = tr|A0A431UX31|A0A431UX31_9BACI Queuine tRNA-ribosyltransferase OS=Lysinibacillus telephonicus; OX = 1714840 GN=tgt PE=3 SV=1
MTKPAVTYELIKTCKQTGARLGIVHTPHGSFETPAFMPVGTQATVKTMSPEELKEMNAGIILSNTYHLWLRPGNDIIKEAGGLHKFMNWDRPILTDSGGFQVFSLSDFRKIKEEGVHFRNHLNGDKLFLSPEKAMEIQNDLGSDIMMAFDECPPYPATYEYMLDSVDRTTRWAKRCKEAHKRPEDQALFGIVQGGEYEELRKRSAEALVELDLPGYAVGGLSVGEPKDIMNRMLEYTTPLLPENKPRYLMGVGSPDSLIDGAIRGIDMFDCVLPTRIARNGTLMTSEGRIVIKNAKYARDFGPLDPNCDCYTCKNYTRAYVRHLFRTEETFGLRLTTYHNLHFLLNLMEQVRQAIREDRLGDFREEFFEKYGFNKPNAKNF

SEQ ID NO: 57128 - protein, 381 aa, unidentified; identical to SEQ ID NO: 57126
  source 1..381: note = Lysinibacillus varians
  REGION 1..381: note = tr|X2GZ69|X2GZ69_9BACI Queuine tRNA-ribosyltransferase OS=Lysinibacillus varians; OX = 1145276 GN=tgt PE=3 SV=1

SEQ ID NO: 57129 - protein, 381 aa, Lysinibacillus xylanilyticus
  REGION 1..381: note = tr|A0A2M9PXC5|A0A2M9PXC5_9BACI Queuine tRNA-ribosyltransferase OS=Lysinibacillus xylanilyticus; OX = 582475 GN=tgt PE=3 SV=1
MTQPAIRYELLHTCKQTGARLGIVHTPHGSFETPAFMPVGTQATVKTMSPEELKDMNAGIILSNTYHLWLRPGNDIVKEAGGLHKFMNWDRPILTDSGGFQVFSLSQFRKIEEEGVHFRNHLNGDKLFLSPEKAMEIQNDLGSDIMMAFDECPPYPATYDYMLKSVDRTTRWAKRCKEAHQRPEDQGLFGIIQGGEYEDLRRRSAEALVELDFPGYAIGGLSVGEPKDIMNRVLEFTTPLMPTNKPRYLMGVGSPDSLIDGAIRGIDMFDCVLPTRIARNGTLMTSEGRLVVKNAKYARDFGPIDPNCDCYTCKNYSRAYIRHLIRTEETFGIRLTTYHNLHFLLKLMEQVREAIREDRLGDFREEFFEKYGFNEPNAKNF

SEQ ID NO: 57130 - protein, 381 aa, Lysinibacillus xylanilyticus
  REGION 1..381: note = tr|A0A0K9F755|A0A0K9F755_9BACI Queuine tRNA-ribosyltransferase OS=Lysinibacillus xylanilyticus; OX = 582475 GN=tgt PE=3 SV=1
MTQPAIRYELLHTCKQTGARLGIVHTPHGSFETPAFMPVGTQATVKTMSPEELKDMNAGIILSNTYHLWLRPGNDIVKEAGGLHKFMNWDRPILTDSGGFQVFSLSQFRKIEEEGVHFRNHLNGDKLFLSPEKAMEIQNDLGSDIMMAFDECPPYPATYDYMLKSVDRTTRWAKRCKEAHNRPEDQGLFGIIQGGEYEDLRRRSAEALVELDFPGYAIGGLSVGEPKDIMNRVLEFTTPLMPTNKPRYLMGVGSPDSLIDGAIRGIDMFDCVLPTRIARNGTLMTSEGRLVVKNAKYARDFGPIDPNCDCYTCKNYSRAYIRHLIRTEETFGIRLTTYHNLHFLLKLMEQVREAIREDRLGDFREEFFEKYGFNEPNAKNF

SEQ ID NO: 57131 - protein, 381 aa, unidentified
  source 1..381: note = Lysinibacillus xyleni
  REGION 1..381: note = tr|A0A285SA89|A0A285SA89_9BACI Queuine tRNA-ribosyltransferase OS=Lysinibacillus xyleni OX=614648; GN = tgt PE=3 SV=1
MTKPAVTYELIKTCKQTGARLGIVHTPHGSFETPAFMPVGTQATVKTLSPEELKEMNAGIILSNTYHLWLRPGNDIVKEAGGLHKFMNWDRPILTDSGGFQVFSLSEFRKIEEEGVHFRNHLNGDKLFLSPEKAMEIQNDLGSDIMMAFDECPPYPATYDYMLASVDRTTRWAKRCKEAHQRPEDQALFGIVQGGEFEELRKRSAEALVELDFPGYAIGGLSVGEPKDIMNRMLEYTTPLLPANKPRYLMGVGSPDSLIDGAIRGVDMFDCVLPTRIARNGTLMTSEGRLVVKNAKYARDFGPIDPNCDCYTCKNYSRAYVRHLIRTEETFGIRLTTYHNLHFLLNLMEQVRQAIREDRLGDFREEFFEKYGFNKPDAKNF

SEQ ID NO: 57132 - protein, 379 aa, unidentified
  source 1..379: note = Lysobacter aestuarii
  REGION 1..379: note = tr|A0A508A0N4|A0A508A0N4_9GAMM Queuine tRNA-ribosyltransferase OS=Lysobacter aestuarii OX=1706195; GN = tgt PE=3 SV=1
MSRMDFELLGTDGQARRGRIRFPRGTIETPAFMPVGTYGTVKGVLPHQVRELGAEIILGNTFHLFLRPGLEVIGEHGGLHGFARWDGPILTDSGGFQVFSLAHKRKITEAGVHFAAPTDGRKVFLGPEESMHIQKVLGSDIVMIFDECPPVHVDGQPVPVERIARSMELSLRWAERSRRAHEGNDAALFGIVQGGVHPDLRTRSAEGLRAIGFDGYAIGGLAVGETEDERNAMLDHTCPQLPADRPRYLMGVGRPEDLVEAVARGVDMFDCVMPTRNARNGHFFTSTGTIRVRNATYEHDLRPIEEGCDCHACANGFSRAYLRHLDRCNEMLGPMLGTLHNLRYYQRLMAGMREAIARGTFAAFRESFYATRGLTLPGA

SEQ ID NO: 57133 - protein, 365 aa, Lysobacter antibioticus
  REGION 1..365: note = tr|A0A0S2E059|A0A0S2E059_9GAMM Queuine tRNA-ribosyltransferase OS=Lysobacter antibioticus; OX = 84531 GN=tgt PE=3 SV=1
MSFQLLGQDGAARRGRLTFPRGTVETPAFMPVGTYGSVKGIMPEHVRDLGAEIILGNTFHLYLRPGLDVIGDHGGLHGFARWNGPILTDSGGFQVFSLAHRRKITEQGVTFASPVDGSKVFLGPEESMNIQRVLDSDIVMIFDECTPYPATVEVARKSMELSLRWAERSKKAHEGNDAALFGIVQGGVHHELRTQSAAGLKGLGFDGYAIGGLAVGEPEAERNEMLEHTCPQLPEDRPRYLMGVGRPEDLVESVARGVDMFDCVMPTRNARNGHYFTPSGTVRVRNAKYERDLRPIEEGCDCYACSNGFSRAYLRHLDRCNEMLGPMLGTLHNLRYYQRLMAQMREAIEQGTFTAFRESFYAARA

SEQ ID NO: 57134 - protein, 370 aa, unidentified
  source 1..370: note = Lysobacter arseniciresistens
  REGION 1..370: note = tr|A0A0A0F415|A0A0A0F415_9GAMM Queuine tRNA-ribosyltransferase OS=Lysobacter arseniciresistens ZS79 OX=913325 GN=tgt PE=3 SV=1
MSRMSFELLATDGAARRGRMSFPRGTVETPAFMPVGTYGSVKGVLPQQVRELGAEIILGNTFHLYLRPGLEVIEAHGGLHGFERWDGPILTDSGGFQVFSLAHKRKITEQGVTFAAPTDGSRVFLGPEESMRIQKVLGSDIVMIFDECTPYPATEQVAHASMELSLRWAERSKRAHEGNDAALFGIVQGGVHRELRTRSAASLKDIGFDGYAIGGLAVGEPEAERNAMLDHTAPQLPADRPRYLMGVGRPEDLVEAVARGVDMFDCVMPTRNARNGHFFTAEGVVRIRNSKYEKDLGPIEEGCDCLACAGGFSRSYLRHLDRCNEMLGPMLGTLHNLRHYQRLMAGMREAIAQGTFGAFRESFYAARTPG

SEQ ID NO: 57135 - protein, 368 aa, Lysobacter capsici
  REGION 1..368: note = tr|A0A120AG06|A0A120AG06_9GAMM Queuine tRNA-ribosyltransferase OS=Lysobacter capsici AZ78; OX = 1444315 GN=tgt PE=3 SV=1
MSRMSFELLGNDGAARRGRLTFPRGTVETPAFMPVGTYGSVKGIMPEHVAELGAQIILGNTFHLYLRPGLDVIGDHGGLHGFARWNGPILTDSGGFQVFSLAHRRKITEQGVTFASPVDGSKVFLGPEESMNIQRVLDSDIVMIFDECTPYPATIDVARKSMELSLRWAERSKKAHEGNDAALFGIVQGGVHHDLRTRSADGLKAIGFDGYAVGGLAVGEPEEERNAMLEHTCPQLPEDRPRYLMGVGRPEDLVESVARGVDMFDCVMPTRNARNGHYFTAHGTVRVRNAKYERDLRPIEEGCDCYACRNGFSRAYLRHLDRCNEMLGPMLGTLHNLRYYQRLMAQMRSAIEQGTFAAFRESFYAART

SEQ ID NO: 57136 - protein, 368 aa, Lysobacter capsici
  REGION 1..368: note = tr|A0A290ZZ70|A0A290ZZ70_9GAMM Queuine tRNA-ribosyltransferase OS=Lysobacter capsici OX=435897; GN = tgt PE=3 SV=1
MSRMSFELLGNDGAARRGRLTFPRGTVETPAFMPVGTYGSVKGIMPEHVAELGAQIILGNTFHLYLRPGLDVIGDHGGLHGFARWNGPILTDSGGFQVFSLAHRRKITEQGVTFASPVDGSKVFLGPEESMNIQRVLDSDIVMIFDECTPYPATEEVARKSMELSLRWAERSKKAHEGNDAALFGIVQGGVHHDLRTRSADGLKAIGFDGYAVGGLAVGEPEEERNAMLEHTCPQLPEDRPRYLMGVGRPEDLVESVARGVDMFDCVMPTRNARNGHYFTAHGTVRVRNAKYERDLRPIEEGCDCYACRNGFSRAYLRHLDRCNEMLGPMLGTLHNLRYYQRLMAQMRSAIEQGTFAAFRESFYAART

SEQ ID NO: 57137 - protein, 374 aa, Lysobacter concretionis
  REGION 1..374: note = tr|A0A0A0EJ13|A0A0A0EJ13_9GAMM Queuine tRNA-ribosyltransferase OS=Lysobacter concretionis Ko07 = DSM 16239 OX=1122185 GN=tgt PE=3 SV=1
MSGLPDSRMSFTLLGTDGDARRGRLSFPRGTVETPAFMPVGTYGTVKGIYPDDVRELGAQIILGNTFHLYLRPGLEVIEAHGGLHGFMRWDGPILTDSGGFQVFSLAHKRKITEAGVTFAAPIDGRKVFLGPEESMHIQKVLGADVVMIFDECTPYPATEEVARKSMELSLRWAERSRIAHGGNDAALFGIVQGGVHHDLRTRSADGLKQIGFDGYAIGGLAVGEPEHERNAMLEHTCPQLPADRPRYLMGVGRPEDLVEGVARGIDMFDCVMPTRNARNGHFFTSTGTVRIRNAKYEHDLRPIEEGCDCLACAGGFTRSYLRHLDRCNEMLGPMLGTAHNLRYYQRLMAQMREAIGQGTFAAFRESFYAAREP

SEQ ID NO: 57138 - protein, 377 aa, Lysobacter daejeonensis
  REGION 1..377: note = tr|A0A0A0F129|A0A0A0F129_9GAMM Queuine tRNA-ribosyltransferase OS=Lysobacter daejeonensis GH1-9; OX = 1385517 GN=tgt PE=3 SV=1
MSRMSFELLGSDGQARRGRLTFPRGTVETPAFMPVGTYGSVKGVMPEQVRELGAEIILGNTFHLYLRPGLDVIADHGGLHGFGRWSGPILTDSGGFQVFSLAHKRKITEQGVTFAAPTDGRKVFLGPEESMHIQKVLDSDIVMIFDECTPYLVDGQPASEQVARKSMELSLRWAERSKKAHEGNDAALFGIVQGGMYPELRTRSAEGLKQIGFDGYAIGGLAVGEPEEVRNHTLDHIAPQLPEDRPRYLMGVGRPEDLVEAVARGVDMFDCVMPTRNARNGHYFTSFGTVRVRNAKYERDLRPIEEGCDCYACSRGFSRSYLRHLDRCNEMLAPMLGTLHNLRYYQRLMAQMRAAIEQGTFQAFREAFYATRAAGGD

SEQ ID NO: 57139 - protein, 375 aa, Lysobacter defluvii
  REGION 1..375: note = tr|A0A0A0M9N8|A0A0A0M9N8_9GAMM Queuine tRNA-ribosyltransferase OS=Lysobacter defluvii IMMIB APB-9 = DSM 18482 OX=1385515 GN=tgt PE=3 SV=1
MSRMSFELLGTDGAARRGRLSFPRGTVETPAFMPVGTYGSVKGVLPPQLRDMGAEIILGNTFHLFLRPGLEVIEAHGGLHGFARWDGPILTDSGGFQVFSLAHKRRITEAGVHFAAPTDGSRVFLGPEESMHIQKVLGSDIVMIFDECTPYPATEEVARTSMELSLRWAERSRRAHEGNDAALFGIVQGGVHPDLRSRSAAALVDIGFDGYAVGGLAVGEPEHERNAMLEHTCPQLPADRPRYLMGVGRPEDLVEGVARGIDMFDCVMPTRNGRNGHYFTASGTVRVRNAKYEHDLRPIEEGCDCVACAGGFTRAYLRHLDRCNEMLGPMLGTLHNLRYYQRLMAQVRAAVASGTFRAFRESFYQARGAQPPPLA

SEQ ID NO: 57140 - protein, 376 aa, Lysobacter dokdonensis
  REGION 1..376: note = tr|A0A0A2WE95|A0A0A2WE95_9GAMM Queuine tRNA-ribosyltransferase OS=Lysobacter dokdonensis DS-58; OX = 1300345 GN=tgt PE=3 SV=1
MRFEFLGTDGGARRGRLHFPRGTVETPAFMPVGTYGSVKGVLPEQIRALGAEIILGNTFHLYLRPGLEVIEAHGGLHGFARWDGPILTDSGGFQVFSLAHRRKITEKGVTFAAPTDGSTVFLGPEESMRIQKVLDSDIVMIFDECTPYPATQAVAQASMELSLRWAERSKRAHEGNDAALFGIVQGGVHHDLRSASAAGLRGIGFDGYAIGGLAVGEPEDERNAMLDHTCPQLPEDRPRYLMGVGRPEDLVEAVARGVDMFDCVMPTRNARNGHYFTSFGTVRIRNAKYEKDVRPIEEGCGCPTCSGGYTRAYLRHLDRCNEMLAPMLGTLHNLWYYEKLMADMRAAIEAGTFAAFRESFYAARTTSPGASPGHVA

SEQ ID NO: 57141 - protein, 368 aa, Lysobacter enzymogenes
  REGION 1..368: note = tr|A0A0S2DJP2|A0A0S2DJP2_LYSEN Queuine tRNA-ribosyltransferase OS=Lysobacter enzymogenes OX=69; GN = tgt PE=3 SV=1
MSRMSFQLLGQDGAARRGRLTFPRGTVETPAFMPVGTYGSVKGIMPEHVRELGAQIILGNTFHLYLRPGLDVIGDHGGLHGFARWNGPILTDSGGFQVFSLAHRRKITEQGVTFASPVDGSKVFLGPEESMNIQRVLDSDIVMIFDECTPYPAAEDVARKSMELSLRWAERSKKAHEGNDAALFGIVQGGVHHGLRTRSAEALKALGFDGYAIGGLAVGEPEAERNEMLEHTCPQLPQDRPRYLMGVGRPEDLVESVARGVDMFDCVMPTRNARNGHYFTAQGTVRVRNAKYERDLRPIEEGCDCYACANGFSRAYLRHLDRCNEMLGPMLGTLHNLRYYQRLMAQMRAAIEQGTFAAFRESFYAARM

SEQ ID NO: 57142 - protein, 368 aa, Lysobacter enzymogenes
  REGION 1..368: note = tr|A0A1H2XZ81|A0A1H2XZ81_LYSEN Queuine tRNA-ribosyltransferase OS=Lysobacter enzymogenes OX=69; GN = tgt PE=3 SV=1
MSRMSFQLLGQDGAARRGRLTFPRGTVETPAFMPVGTYGSVKGIMPEHVRDLGAQIILGNTFHLYLRPGLDVIGDHGGLHGFARWNGPILTDSGGFQVFSLAHRRKITEQGVTFASPVDGSKVFLGPEESMKIQRVLDSDIVMIFDECTPYPATEEVARKSMELSLRWAERSKRAHEGNDAALFGIVQGGVHHDLRTRSAQALKALDFDGYAVGGLAVGEPEAERNEMLEHTCPQLPEHRPRYLMGVGRPEDLVESVARGVDMFDCVMPTRNARNGHYFTAQGTVRVRNAKYERDLRPIEEGCDCYACANGFSRAYLRHLDRCNEMLGPMLGTLHNLRYYQRLMAQMRAAIEQGTFAAFRESFYAARM

SEQ ID NO: 57143 - protein, 365 aa, Lysobacter gummosus
  REGION 1..365: note = tr|A0A0S2G9C3|A0A0S2G9C3_9GAMM Queuine tRNA-ribosyltransferase OS=Lysobacter gummosus OX=262324; GN = tgt PE=3 SV=1
MSFQLLGNDGAARRGRLTFPRGTVETPAFMPVGTYGSVKGIMPEHVAELGAQIILGNTFHLYLRPGLDVIGDHGGLHGFARWNGPILTDSGGFQVFSLAHRRKITEQGVTFASPVDGSKVFLGPEESMNIQRVLDSDIVMIFDECTPYPATIDVARKSMELSLRWAERSKRAHEGNDAALFGIVQGGVHHELRTRSAEALRALDFDGYAVGGLAVGEPEDERNAMLEHTCPQLPEDRPRYLMGVGRPEDLVESVARGVDMFDCVMPTRNARNGHYFTAQGTVRVRNAKYERDLRPIEEGCDCYACRNGFSRAYLRHLDRCNEMLGPMLGTLHNLRYYQRLMAQMREAIEQGTFTAFRESFYAARQ

SEQ ID NO: 57144 - protein, 385 aa, unidentified
  source 1..385: note = Lysobacter lycopersici
  REGION 1..385: note = tr|A0A516V4G0|A0A516V4G0_9GAMM Queuine tRNA-ribosyltransferase OS=Lysobacter lycopersici; OX = 1324796 GN=tgt PE=3 SV=1
MSRMQFQLLGNDGAARRGRITFPRGTVETPAFMPVGTYGSVKGMLPGQLRDLGAEMVLGNTFHLFLRPGLEVIEAHGGLHGFMRWNGPILTDSGGFQVFSLAHRRKVTEQGVTFAAPTDGSKVFLGPEESMHIQKVLGSDIVMIFDECPPVNGKDGQPVHPRVVEKSMELSLRWAERSKVAHAGNDAALFGIVQGGVHRDLRTRSAEGLKQIGFDGYAIGGLAVGESEAERNAMLDHTAPQLPEDRPRYLMGVGRPEDLVEAVARGVDMFDCVMPTRNARNGHYFTSTGTVRIRNSKYERDLRTIEEGCGCAACAGGYSRAYLRHLDRCNEMLAPILGTLHNLWYYEKLMADMRSAIGQGTFAAFRESFHAARKTPRPHSGEGLG

SEQ ID NO: 57145 - protein, 375 aa, unidentified
  source 1..375: note = Lysobacter maris
  REGION 1..375: note = tr|A0A2U9T5T9|A0A2U9T5T9_9GAMM Queuine tRNA-ribosyltransferase OS=Lysobacter maris OX=1605891; GN = tgt PE=3 SV=1
MSFQLLGRDGAARRGRISFPRGTIETPAFMPVGTYGTVKGVLPHQIRELGAQIILGNTFHLFLRPGLEVIGEHGGLHGFARWDGPILTDSGGFQVFSLAHKRKITEAGVHFAAPTDGRKVFLGPEESMHIQKVLGSDIVMIFDECPPVQVDGKPVAVEVVKRSMELSLRWAERSKKAHEGNDAALFGIVQGGVHHELRSRSADGLKAIGFDGYAIGGLAVGETEAERNAMLDHTCPQLPQERPRYLMGVGRPEDLVEAVARGVDMFDCVMPTRNARNGHFFTAGGTIRVRNAKYEHDLRPIEEGCDCHACANGFSRAYLRHLDRCNEMLGPMLGTLHNLRYYQRLMAQMRDAIGQGTFAAFRESFYAARGAAPPA

SEQ ID NO: 57146 - protein, 378 aa, unidentified
  source 1..378: note = Lysobacter maris
  REGION 1..378: note = tr|A0A507ZWQ3|A0A507ZWQ3_9GAMM Queuine tRNA-ribosyltransferase OS=Lysobacter maris OX=1605891; GN = tgt PE=3 SV=1
MSRMSFQLLGRDGAARRGRISFPRGTIETPAFMPVGTYGTVKGVLPHQIRELGAQIILGNTFHLFLRPGLEVIGEHGGLHGFARWDGPILTDSGGFQVFSLAHKRKITEAGVHFAAPTDGRKVFLGPEESMHIQKVLGSDIVMIFDECPPVQVGGKPVAVEVVKRSMELSLRWAERSKKAHEGNDAALFGIVQGGVHHELRSRSADGLKAIGFDGYAIGGLAVGETEAERNAMLDHTCPQLPQERPRYLMGVGRPEDLVEAVARGVDMFDCVMPTRNARNGHFFTAGGTIRVRNAKYEHDLRPIEEGCDCHACANGFSRAYLRHLDRCNEMLGPMLGTLHNLRYYQRLMAQMRDAIGQGTFAAFRESFYVARGAAPPA

SEQ ID NO: 57147 - protein, 376 aa, unidentified
  source 1..376: note = Lysobacter pythonis
  REGION 1..376: note = tr|A0A3M2I1V3|A0A3M2I1V3_9GAMM Queuine tRNA-ribosyltransferase OS=Lysobacter pythonis OX=2483112; GN = tgt PE=3 SV=1
MSRMSFQLIGRDGAARRGRLHFPRGSVETPAFMPVGTYGSVKGVFPEQIRQLGAEIILGNTFHLWLRPGLEVIEAHGGLHGFGRWAGPILTDSGGFQVFSLAHRRKIDEAGVTFAAPTDGRKVFLGPEASMHIQKVLGSDIVMIFDECPPVNIDGKPADKGLIERSMQLSLRWAERSKRAHAGNDAALFGIVQGGVHHDLRTRSAEGLKAIGFDGYAIGGLAVGESEAERNAMLDHTAPQLPADRPRYLMGVGRPEDLVEAVARGVDMFDCVMPTRNARNGHFFTSTGTVRIRNAKYERDLRPIEEGCDCYACANGFSRGYLRHLDRCNEMLAPMLGTLHNLRYYQRLMAGMREAIEQARFADFRAAFYAARGRDG

SEQ ID NO: 57148 - protein, 420 aa, Lysobacter ruishenii
  REGION 1..420: note = tr|A0A562LSP0|A0A562LSP0_9GAMM Queuine tRNA-ribosyltransferase OS=Lysobacter ruishenii OX=686800; GN = tgt PE=3 SV=1
MSPGLPPATDNEHAPDASGEGNPAVGNDGFRSDVADDRATPAADSRMSFELLGTDGQARRGRLTFPRGTVETPAFMPVGTYGSVKGVMPEQVRELGAEIILGNTFHLYLRPGLDVIADHGGLHGFGRWNGPILTDSGGFQVFSLAHKRRITEQGVTFAAPTDGRKVFLGPEESMHIQKVLDSDIVMIFDECTPYLVDGQPASEQVACKSMELSLRWAERSRKAHEGNDAALFGIVQGGMYPELRTRSAEGLKQIGFDGYAIGGLAVGEPEEVRNHTLDHIAPQLPEDRPRYLMGVGRPEDLVEAVARGVDMFDCVMPTRNARNGHYFTSFGTVRVRNARYERDLRPIEEGCDCYACSRGFSRSYLRHLDRCNEMLAPMLGTLHNLRYYQRLMAQMRAAIEQGRFADFRAEFYALRAGGGD

SEQ ID NO: 57149 - protein, 377 aa, unidentified
  source 1..377: note = Lysobacter silvestris
  REGION 1..377: note = tr|A0A2K1PXZ8|A0A2K1PXZ8_9GAMM Queuine tRNA-ribosyltransferase OS=Lysobacter silvestris; OX = 1645665 GN=tgt PE=3 SV=1
MNFELLAIDGAARRGRLTFPRGTVETPAFMPVGTYGSVKGVLPQQVRDLGAEIILGNTFHLYLRPGLEVIAAHGGLHGFTRWSGPILTDSGGFQVFSLAHRRKITEEGVTFAAPTDGSKVFLGPEESMHIQKVLDSDIVMIFDECPPVHVDGKPVDQRVVERSMELSLRWAERSKRAHEGNDAALFGIVQGGVHRDLRTRSAEGLKKIGFDGYAVGGLAVGETEAERNAMLEHTVPQLPADRPRYLMGVGRPEDLVEGVARGIDMFDCVMPTRNARNGHFFTATGTIRIRNAKYESDLRPIEEGCDCEACAGGYSRSYLRHLDRCNEMLAPMLGTLHNLRYYQRLMAQMREAIAAGRFEEFRQAFYAARAGNPAAEA

SEQ ID NO: 57150 - protein, 370 aa, Lysobacter soli
  REGION 1..370: note = tr|A0A3D8VC65|A0A3D8VC65_9GAMM Queuine tRNA-ribosyltransferase OS=Lysobacter soli OX=453783; GN = tgt PE=3 SV=1
MSRLSFELLRTDGAARRGRLTFPRGTVETPTFMPVGTYGSVKGVLPEQVRELGAEMILGNTFHLYLRPGLDVIGDHGGLHRFTGWNGPILTDSGGFQVFSLAHKRKITEQGVTFAAPTDGSKVFLGPEESMRIQKVLDSDVVMIFDECTPYPATEDVARRSMELSLRWAERSKRAHEGSDAALFGIVQGGVHEALRTRSAAALVDIGFDGYAIGGLAVGEPEAERNHMLEHTCPQLPADQPRYLMGVGRPEDLVEGVARGIDMFDCVMPTRNARNGHYFTSFGTVRVRNAKYERDLRPIEEGCDCYTCRNGFTRSYLRHLDRCNEMLGPMLGTLHNLRYYQRLMAQMREAIAQGTFAAFRESFYASRTPE

SEQ ID NO: 57151 - protein, 378 aa, Lysobacter sp.
  REGION 1..378: note = tr|A0A4R4EYF2|A0A4R4EYF2_9GAMM Queuine tRNA-ribosyltransferase OS=Lysobacter sp. N42 OX=2545719; GN = tgt PE=3 SV=1
MSRMSFQLLGTDGVARRGRLTFPRGTVETPAFMPVGTYGSVKGVMPQQVRELGAEIILGNTFHLYLRPGLDVIADHGGLHGFARWNGPILTDSGGFQVFSLAHRRKITEEGVTFASPTDGAKVFLGPEESMRIQKVLDSDIVMIFDECPPVQKDGKPVHPDVVRRSMELSLRWAERSRRAHERNDAALFGIVQGGVHHELRTRSAEGLKAIGFDGYAIGGLAVGETEAERNAMLEHTAPQLPADRPRYLMGVGRPEDLVEAVARGVDMFDCVMPTRNARNGHYFTAFGTVRVRNAKYERDTRPIEEGCDCYACANGFTRSYLRHLDRCNEMLGPMLGTLHNLRYYQRLMAGMRLAIEERRFEAFRAEFHRRRQAGEGG

SEQ ID NO: 57152 - protein, 369 aa, Lysobacter sp.
  REGION 1..369: note = tr|A0A0D0RZY4|A0A0D0RZY4_9GAMM Queuine tRNA-ribosyltransferase OS=Lysobacter sp. A03 OX=1199154; GN = tgt PE=3 SV=1
MSRMAFELLGTDGAARRGRLSFPRGMVETPAFMPVGTYGTVKGIYPQAVRELGAQMVLGNTFHLFLRPGLEVIEAHGGLHGFMRWDGPILTDSGGFQVFSLAHKRKITEAGVTFAAPIDGRKVFLGPEESMHIQKVLGSDVVMIFDECTPYPATEEVARTSMELSLRWAERSRKAHEGNDAALFGIVQGGVHHALRTRSAAGLTAIGFDGYAIGGLAVGEPEEERNAMLEHTCPQLPSERPRYLMGVGRPEDLVEGVARGIDMFDCVMPTRNARNGHFFTATGTVRIRNAKYEHDLGPIEEGCDCTACAGGFSRSYLRHLDRCNEMLGPMLGTAHNLRYYQRLMAQMRGAIAGGTFAAFRESFYEARRA

SEQ ID NO: 57153 - protein, 374 aa, Lysobacter spongiicola
  REGION 1..374: note = tr|A0A1T4N6K3|A0A1T4N6K3_9GAMM Queuine tRNA-ribosyltransferase OS=Lysobacter spongiicola DSM 21749 OX=1122188 GN=tgt PE=3 SV=1
MSASPASRMSFELLGTDGGARRGRVSFPSGTIETPAFMPVGTYGSVKAVLPQQVRELGAEIILGNTFHLYLRPGLEVIEAHGGLHRFMGWERPILTDSGGFQVFSLAHKRKITEAGVTFAAPTDGRKVFLGPEESMHIQKVLGSDIVMIFDECTPYPATEDVARASMELSLRWAERSRRAHEGNDAALFGIVQGGVHHGLRTRSAEALKQIGFDGYAIGGLAVGEPEAERNEMLEHTTPQLPQDRPRYLMGVGRPEDLVEAVARGVDMFDCVMPTRNARNGHFFTDQGVVRIRNARYEHDLRPIEEGCDCHACANGFSRSYLRHLDRCNEMLGPMLGTLHNLRHYQRLMARMRAAIEQGGFAAFRESFHAARQG

SEQ ID NO: 57154 - protein, 378 aa, unidentified
  source 1..378: note = Lysobacter tolerans
  REGION 1..378: note = tr|A0A1N6NXZ4|A0A1N6NXZ4_9GAMM Queuine tRNA-ribosyltransferase OS=Lysobacter tolerans OX=1604334; GN = tgt PE=3 SV=1
MSRMSFELLATDGAARRGRLTFPRGTVETPAFMPVGTYGSVKGVFPEQIRDLGAEIILGNTFHLYLRPGLDVIEAHGGLHGFGKWNGPILTDSGGFQVFSLAKRRKITEEGVTFAAPTDGSKVFIGPEESMHIQKVLGSDIVMIFDECPPVQIDGKPVDVGVVARSMELSLRWAERSKRAHEGNDAALFGIVQGGVHHDLRSRSAEGLKEIGFDGYAIGGLAVGETEAERNAMLDHTTPQLPDDHPRYLMGVGRPEDLVEAVARGVDMFDCVMPTRNARNGHFFTADGTVRIRNAKYEHDLGVIEEGCDCYACANGFSRAYIRHLDRCNEMLAPMLGTLHNLRHYQRLMAGMREAIAAGRFTDFRADFYAARGANPPN

SEQ ID NO: 57155 - protein, 376 aa, unidentified
  source 1..376: note = Macellibacteroides sp.
  REGION 1..376: note = tr|A0A1C2BSV2|A0A1C2BSV2_9PORP Queuine tRNA-ribosyltransferase OS=Macellibacteroides sp. HH-ZS; OX = 1857568 GN=tgt PE=3 SV=1
MKFELQYKDTKTNARAGLITTDHGVIETPIFMPVGTQGSVKAVHMTELKEDIKAQIILGNTYHLYLRPGLEILKQAGGLHKFNSWNGPILTDSGGFQVFSLAENRKLHEEGAEFRSHIDGSKHLFTPEKVMDIERTIGADIIMAFDECCPGDADYNYAKESLGLTERWLDRCFNRFNSTDPMYGYNQSLFPIVQGCVYPDLRIRAAENVASKGADGNAIGGLAVGEPTEKMYEMIEVVNDILPKDKPRYLMGVGTPVNLLEAIERGVDMFDCIMPTRNGRNGQLFTKYGTMNMRNQKWENDFSPLDTEGTSYVDSLYSKAYVRHLFKTNELLGLQIASIHNLAFYLWLVGEARKHIIAGDFSIWKSGMVTQLSNRL

SEQ ID NO: 57156 - protein, 379 aa, unidentified
  source 1..379: note = Macrococcus bohemicus
  REGION 1..379: note = tr|A0A4R5Y7M8|A0A4R5Y7M8_9STAP Queuine tRNA-ribosyltransferase OS=Macrococcus bohemicus; OX = 1903056 GN=tgt PE=3 SV=1
MPAVTYEHIKTCKQSGARLGIVHTPHGSFETPMFMPVGTQATVKTMSPEELKAMNAKIILSNTYHLWLRPGSDIIREAGGLHKFMNWDRPILTDSGGFQVFSLSDMRKIEEEGVHFRHHLNGSKLFLSPEKAMHIQNDLGSDIMMAFDECPPMPATYEYVKASIERTSRWAERCLEAHQRPNDQALFGIIQGGEYEDLRTQSAKDLVSLDFPGYAIGGLSVGEPKPIMYRMLEHTTPLMPFDKPRYLMGVGSPDALIEGAIRGIDMFDCVLPTRIARNGTCMTSKGRVVVKNAKYERDYTPLDENCDCYTCKNYTKAYIRHLIKADETFGIRLTTIHNLHFLLNMMEQVREAIRNDRLLDFKEEFFEAYGLNVENPKNF

SEQ ID NO: 57157 - protein, 379 aa, unidentified
  source 1..379: note = Macrococcus bohemicus
  REGION 1..379: note = tr|A0A328A6X4|A0A328A6X4_9STAP Queuine tRNA-ribosyltransferase OS=Macrococcus bohemicus; OX = 1903056 GN=tgt PE=3 SV=1
MPAVTYEHIKTCKQSGARLGIVHTPHGSFETPMFMPVGTQATVKTMSPEELKAMNAKIILSNTYHLWLRPGSDIIREAGGLHKFMNWDRPILTDSGGFQVFSLSDMRKIEEEGVHFRHHLNGSKLFLSPEKAMHIQNDLGSDIMMAFDECPPMPATYEYVKASIERTSRWAERCLEAHQRPNDQALFGIIQGGEYEDLRTQSAKDLVSLDFPGYAIGGLSVGEPKPIMYRMLEHTTPLMPFDKPRYLMGVGSPDALIEGAIRGIYMFDCVLPTRIARNGTCMTSKGRVVVKNAKYERDYTPLDENCDCYTCKNYTKAYIRHLIKADETFGIRLTTIHNLHFLLNMMEQVREAIRNDRLLDFKEEFFEAYGLNVENPKNF

SEQ ID NO: 57158 - protein, 379 aa, Macrococcus bovicus
  REGION 1..379: note = tr|A0A4R6C3B2|A0A4R6C3B2_9STAP Queuine tRNA-ribosyltransferase OS=Macrococcus bovicus OX=69968; GN = tgt PE=3 SV=1
MPAVTYEHIKTCKQSGARLGIVHTPHGSFETPMFMPVGTQATVKTVSPEELHAMNAKIILSNTYHLWLRPGSDIIREAGGLHQFMNWDGPILTDSGGFQVFSLSDMRKIEEEGVHFRHHLNGSKLFLSPEKAMQIQNDLGSDIMMAFDECPPMPAEYQYVKDSIERTSRWAERCLKAHNRPEDQALFGIIQGGEYEDLRTQSAKDLVSLDFPGYAIGGLSVGEPKPIMYRMLEHTTPLMPFNKPRYLMGVGSPDALIEGAIRGIDMFDCVLPTRIARNGTCMTSKGRVVVKNAKYERDFTPLDENCDCYTCKNYTKAYIRHLIKADETFGIRLTSIHNLHFLLNMMEQVREAIRNDRLLDFKEEFFESYGLNVENPKNF

SEQ ID NO: 57159 - protein, 379 aa, Macrococcus brunensis
  REGION 1..379: note = tr|A0A4R6BEJ8|A0A4R6BEJ8_9STAP Queuine tRNA-ribosyltransferase OS=Macrococcus brunensis OX=198483; GN = tgt PE=3 SV=1
MPAVTYEHIKTCKQSGARLGIVHTPHGSFETPMFMPVGTQATVKTVSPEELHAMNAKIILSNTYHLWLRPGNDVIREAGGLHKFMNWDGPILTDSGGFQVFSLSDMRKIEEEGVHFRHHLNGSKLFLSPEKAMHIQNDLGSDIMMAFDECPPMPAEYKYVKDSIERTSRWAERCLKAHNRPEDQALFGIIQGGEYEDLRTQSAKDLVSLDFPGYAIGGLSVGEPKPIMYRMLEHTTPLMPFNKPRYLMGVGSPDALIEGAIRGIDMFDCVLPTRIARNGTCMTSKGRVVVKNAKYERDFTPLDENCDCYTCKNYTKAYIRHLIKADETFGIRLTSIHNLHFLLNMMEQVREAIRNDRLLDFKEEFFESYGLNVENPKNF

SEQ ID NO: 57160 - protein, 379 aa, unidentified
  source 1..379: note = Macrococcus canis
  REGION 1..379: note = tr|A0A4R6C7V4|A0A4R6C7V4_9STAP Queuine tRNA-ribosyltransferase OS=Macrococcus canis OX=1855823; GN = tgt PE=3 SV=1
MNAVTYEHIKTCKQSGARLGIVHTPHGSFETPMFMPVGTQATVKTMSPEELKAMNAKIILSNTYHLWLRPGNDIIREAGGLHKFMNWDGPILTDSGGFQVFSLSDMRKIEEEGVHFRHHLNGSKLFLSPEKAMHIQNDLGSDIMMAFDECPPMPATYEYVKASIERTSRWAERCLEAHQRPQDQALFGIIQGGEYEDLRTQSAKDLISMDFPGYAIGGLSVGEPKPIMYRMLEHTTPLMPFNKPRYLMGVGSPDALIEGAIRGIDMFDCVLPTRIARNGTCMTSKGRVVVKNAKYERDFTPLDEKCDCYTCKNYTKAYLRHLIKADETFGIRLTTIHNLHFLLNLMELVREAIRNDRLLDFKEEFFEEYGLNVENPKNF

SEQ ID NO: 57161 - protein, 379 aa, unidentified
  source 1..379: note = Macrococcus canis
  REGION 1..379: note = tr|A0A1W7ACF3|A0A1W7ACF3_9STAP Queuine tRNA-ribosyltransferase OS=Macrococcus canis OX=1855823; GN = tgt PE=3 SV=1
MNAVTYEHIKTCKQSGARLGIVHTPHGSFETPMFMPVGTQATVKTMSPEELKAMNAKIILSNTYHLWLRPGNDIIREAGGLHKFMNWDGPILTDSGGFQVFSLSDMRKIEEEGVHFRHHLNGSKLFLSPEKAMHIQNDLGSDIMMAFDECPPMPATYEYVKASIERTSRWAERCLEAHQRPQDQALFGIIQGGEYEDLRTQSAKDLISMDFPGYAIGGLSVGEPKPIMYRMLEHTTPLMPFNKPRYLMGVGSPDALIEGAIRGIDMFDCVLPTRIARNGTCMTSKGRVVVKNAKYERDFTPLDEKCDCYTCKNYTKAYLRHLIKADETFGIRLTTIHNLHFLLNLMEQVREAIRNDRLLDFKEEFFEEYGLNVENPKNF

SEQ ID NO: 57162 - protein, 379 aa, Macrococcus carouselicus
  REGION 1..379: note = tr|A0A4R6BR31|A0A4R6BR31_9STAP Queuine tRNA-ribosyltransferase OS=Macrococcus carouselicus; OX = 69969 GN=tgt PE=3 SV=1
MSAVTYEHIKTCKQSGARLGIVHTPHGSFETPMFMPVGTQATVKTVSPEELHAMNAKIILSNTYHLWLRPGNEVIREAGGLHKFMNWDGPILTDSGGFQVFSLSDMRKIEEEGVHFRHHLNGSKLFLSPEKAMHIQNDLGSDIMMAFDECPPMPAEYQYVKDSIERTSRWAERCLEAHNRPEDQALFGIIQGGEYEELRTQSAKDLVSLDFPGYAIGGLSVGEPKPVMYRVLEHTTPLMPFNKPRYLMGVGSPDALIEGAIRGIDMFDCVLPTRIARNGTCMTSKGRVVVKNAKYERDFTPLDENCDCYTCRNYTKAYIRHLIKADETFGIRLTSIHNLHFLLNMMEQVRDAIRNDRLLDFKEEFFESYGLNVENPKNF

SEQ ID NO: 57163 - protein, 379 aa, Macrococcus caseolyticus
  REGION 1..379: note = sp|B9E716|TGT_MACCJ Queuine tRNA-ribosyltransferase; OS = Macrococcus caseolyticus (strain JCSC5402) OX=458233; GN = tgt PE=3 SV=1
MNAVTYEHIKTCKQSGARLGIVHTPHGSFETPMFMPVGTQATVKTMSPEELKAMNAKIILSNTYHLWLRPGNDVIREAGGLHKFMNWDGPILTDSGGFQVFSLSDMRKIEEEGVHFRHHLNGSKLFLSPHKAMHIQNDLGSDIMMAFDECPPMPATYEYVKASIERTSRWAERCLEAHQRPEDQALFGIIQGGEYEDLRTQSAKDLVSMDFPGYAIGGLSVGEPKPIMYRMLEHTTPLMPFNKPRYLMGVGSPDALIEGAIRGIDMFDCVLPTRIARNGTCMTSKGRVVVKNAKYERDFTPLDEKCECYTCKNYTKAYLRHLIKADETFGIRLTTIHNLHFLLNLMEQVREAIRNDRLLDFKEEFFEEYGLNVENPKNF

SEQ ID NO: 57164 - protein, 379 aa, Macrococcus caseolyticus
  REGION 1..379: note = tr|A0A2N0VTK6|A0A2N0VTK6_9STAP Queuine tRNA-ribosyltransferase OS=Macrococcus caseolyticus; OX = 69966 GN=tgt PE=3 SV=1
MNAVTYEHIKTCKQSGARLGIVHTPHGSFETPMFMPVGTQATVKTMSPEELKAMNAKIILSNTYHLWLRPGNDVIREAGGLHKFMNWDGPILTDSGGFQVFSLSDMRKIEEEGVHFRHHLNGSKLFLSPEKAMHIQNDLGSDIMMAFDECPPMPATYEYVKASIERTSRWAERCLEAHQRPEDQALFGIIQGGEYEDLRTQSAKNLVSMDFPGYAIGGLSVGEPKPIMYRMLEHTTPLMPFNKPRYLMGVGSPDALIEGAIRGIDMFDCVLPTRIARNGTCMTSKGRVVVKNAKYERDFTPLDEKCECYTCKNYTKAYLRHLIKADETFGIRLTTIHNLHFLLNLMEQVREAIRNDRLLDFKEEFFEEYGLNVENPKNF

SEQ ID NO: 57165 - protein, 379 aa, unidentified; identical to SEQ ID NO: 57156
  source 1..379: note = Macrococcus epidermidis
  REGION 1..379: note = tr|A0A327ZXD5|A0A327ZXD5_9STAP Queuine tRNA-ribosyltransferase OS=Macrococcus epidermidis; OX = 1902580 GN=tgt PE=3 SV=1

SEQ ID NO: 57166 - protein, 379 aa, unidentified
  source 1..379: note = Macrococcus goetzii
  REGION 1..379: note = tr|A0A4R6CBX2|A0A4R6CBX2_9STAP Queuine tRNA-ribosyltransferase OS=Macrococcus goetzii OX=1891097; GN = tgt PE=3 SV=1
MPAVTYEHIKTCKQSGARLGIVHTPHGSFETPMFMPVGTQATVKTMSPEELKAMNAKIILSNTYHLWLRPGSDIIREAGGLHKFMNWDRPILTDSGGFQVFSLSDMRKIEEEGVHFRHHLNGSKLFLSPEKAMHIQNDLGSDIMMAFDECPPMPATYEYVKASIERTSRWAERCLEAHQRPNDQALFGIIQGGEYEDLRTQSAKDLVSLDFPGYAIGGLSVGEPKPIMYRMLEHTTPLMPFDKPRYLMGVGSPDALIEGAIRGIDMFDCVLPTRIARNGTCMTSKGRVVVKNAKYERDYTPLDEKCDCYTCKNYTKAYIRHLIKADETFGIRLTTIHNLHFLLNMMEQVREAIRNDRLLDFKEEFFEAYGLNVENPKNF

SEQ ID NO: 57167 - protein, 379 aa, unidentified; identical to SEQ ID NO: 57156
  source 1..379: note = Macrococcus goetzii
  REGION 1..379: note = tr|A0A2G5NPB3|A0A2G5NPB3_9STAP Queuine tRNA-ribosyltransferase OS=Macrococcus goetzii OX=1891097; GN = tgt PE=3 SV=1

SEQ ID NO: 57168 - protein, 379 aa, Macrococcus hajekii
  REGION 1..379: note = tr|A0A4R6BM77|A0A4R6BM77_9STAP Queuine tRNA-ribosyltransferase OS=Macrococcus hajekii OX=198482; GN = tgt PE=3 SV=1
MPAVTYEHIKTCKQSGARLGIVHTPHGSFETPMFMPVGTQATVKTVSPEELHAMNAKIILSNTYHLWLRPGSDIIREAGGLHQFMNWNGPILTDSGGFQVFSLSDMRKIEEEGVHFRHHLNGSKLFLSPEKAMHIQNDLGSDIMMAFDECPPMPAEYKYVKDSIERTSRWAERCLKAHNRPEDQALFGIIQGGEYEELRTQSAKDLVSLDFPGYAIGGLSVGEPKPIMYRMLEHTTPLMPFNKPRYLMGVGSPDALIEGAIRGIDMFDCVLPTRIARNGTCMTSKGRVVVKNAKYERDFTPLDANCDCYTCKNYTKAYIRHLIKADETFGIRLTSIHNLHFLLNLMEQVREAIRNDRLLDFKEEFFENYGLNVENPKNF

SEQ ID NO: 57169 - protein, 379 aa, Macrococcus lamae
  REGION 1..379: note = tr|A0A4R6BX98|A0A4R6BX98_9STAP Queuine tRNA-ribosyltransferase OS=Macrococcus lamae OX=198484; GN = tgt PE=3 SV=1
MPAVTYEHIKTCKQSGARLGIVHTPHGSFETPMFMPVGTQATVKTMSPEELKAMNAKIILSNTYHLWLRPGNDVIREAGGLHKFMNWDGPILTDSGGFQVFSLSDMRKIEEEGVHFRHHLNGSKLFLSPEKAMHIQNDLGSDIMMAFDECPPMPAEYKYVKDSIERTSRWAERCLKAHNRPEDQALFGIIQGGEYEDLRTQSAKDLVAMDFPGYAIGGLSVGEPKPVMYRMLEHTTPLMPFDKPRYLMGVGSPDALIEGSIRGIDMFDCVLPTRIARNGTCMTSQGRVVIKNAKYERDFTPLDPKCDCYTCKNYTKAYIRHLIKADETFGIRLTTIHNLHFLLNMMEEVREAIRQDRLLDYKEEFFESYGLNVENPKNF

SEQ ID NO: 57170 - protein, 379 aa, Macrococcus sp.
  REGION 1..379: note = tr|A0A4Q1B0R6|A0A4Q1B0R6_9STAP Queuine tRNA-ribosyltransferase OS=Macrococcus sp. DPC7161; OX = 2507060 GN=tgt PE=3 SV=1
MPAVTYEHIKTCKQSGARLGIVHTPHGSFETPMFMPVGTQATVKTMSPEELKAMNAKIILSNTYHLWLRPGNDIIREAGGLHKFMNWDGPILTDSGGFQVFSLSDMRKIEEEGVHFRHHLNGSKLFLSPEKAMHIQNDLGSDIMMAFDECPPMPATYEYVKASIERTSRWAERCLKAHNRPNDQALFGIIQGGEYEDLRTQSAKDLISMDFPGYAIGGLSVGEPKPIMYRMLEHTTPLMPFNKPRYLMGVGSPDALIEGAIRGIDMFDCVLPTRIARNGTCMTSKGRVVVKNAKYERDFTPLDEKCDCYTCKNYTKAYLRHLIKADETFGIRLTTIHNLHFLLNLMEQVREAIRNDRLLDFKEEFFEEYGLNVENPKNF

SEQ ID NO: 57171 - protein, 382 aa, unidentified
  source 1..382: note = Mageeibacillus indolicus
  REGION 1..382: note = tr|D3R1X1|D3R1X1_MAGIU Queuine tRNA-ribosyltransferase OS=Mageeibacillus indolicus (strain UPII9-5) OX=699246 GN=tgt PE=3 SV=1
MNYQDKFPVWYELKHVCRQTGARLGVVHTPHGDFPTPAFMPVGTQATVKGMSPEEVESTGAGILLSNTYHLWMRPGPDIVTKAGGLHKFMNWNKPILTDSGGFQVFSLSDLRHITEDGVKFRSHIDGSSHVLTPEKSIEVQNALGSDIMMAFDECTPWQSDYKYALNSLQRTTRWLERCIKANHNPERQALFGIVQGGMFADLRKQSIAEITAFDLPGFAIGGLSVGEPADLMYHMMDETVHLLPNDKPRYLMGVGTPDYLIEGAIRGIDMFDCVLPTRIGRNGTVLTKYGRLIVRDFKYAEDFRPIEEDCDCYACRNYSRAYIRHLIKAGEMFGLRLASWHNLRFLQRLMQSVREAIAADRLADFRTEFLTQFAQSKKNQI

SEQ ID NO: 57172 - protein, 382 aa, unidentified
  source 1..382: note = Mageeibacillus indolicus
  REGION 1..382: note = tr|A0A2J8B4F7|A0A2J8B4F7_9FIRM Queuine tRNA-ribosyltransferase OS=Mageeibacillus indolicus; OX = 884684 GN=tgt PE=3 SV=1
MNYQDKFPVWYELKHVCRQTGARLGVVHTLHGDFPTPAFMPVGTQATVKGMSPEEVESTGAGILLSNTYHLWMRPGPDIVSKAGGLHKFMNWNKPILTDSGGFQVFSLSDLRHITEDGVKFRSHIDGSSHVLTPEKSIEVQNALGSDIMMAFDECTPWQSDYKYALNSLQRTTRWLERCIKANHNPERQALFGIVQGGMFADLRKQSIAEITAFDLPGFAIGGLSVGEPADLMYHMMDETVHLLPNDKPRYLMGVGTPDYLIEGAIRGIDMFDCVLPTRIGRNGTVLTKYGRLIVRDFKYAEDFRPIEEDCDCYACRNYSRAYIRHLIKAGEMFGLRLASWHNLRFLQRLMQSVREAIAADRLADFRTEFLTQFAQSKKNQI

SEQ ID NO: 57173 - protein, 368 aa, unidentified
  source 1..368: note = Magnetococcales bacterium
  REGION 1..368: note = tr|A0A2E3C1S7|A0A2E3C1S7_9PROT Queuine tRNA-ribosyltransferase OS=Magnetococcales bacterium; OX = 2026759 GN=tgt PE=3 SV=1
MPAFEYKLLKTDGKARLGEVHTAHGVIRTPAFMPVGTAATVKGMRPEEVKALGSDIILGNTYHLFLRPGHELIEELGGLHKFMNWPGPILTDSGGYQVFSLADSRKITEEGVTFRSHIDGDKKTLTPENSTEIQRALDATITMAFDECTPYPAEVDVAADSMRMSMRWAKRSRDAFVKREGYGQFGIMQGGMHPHLRKESMEALEKLDFEGYAIGGLAVGEPPEMLAEMTEVCADLMPTDKPRYLMGVGYPSDIIRAVLAGVDMFDCVLPTRNGRNGQGYTSEGLVKIKLKTFERDPSPLDPNCECNTCKNYSKSYLRHLYRADEMLAGMLITHHNIHFYQQLMQTLRQAISDGNLQEVATKLLKKVR

SEQ ID NO: 57174 - protein, 370 aa, unidentified
  source 1..370: note = Magnetococcales bacterium
  REGION 1..370: note = tr|A0A2D7C6F7|A0A2D7C6F7_9PROT Queuine tRNA-ribosyltransferase OS=Magnetococcales bacterium; OX = 2026759 GN=tgt PE=3 SV=1
MPEFKYELLATDGRARRGRLHTAHGTVETPTFMPVGTVGSVKGMKMEDVKAQGAEVVLGNVYHLMLRPGADLVEKMGGLHKFMNWEGPILTDSGGFQVYSLNDIRTDDEDGVTFRSHIDGSLHRLNPEISTEIQYKLDATITMAFDECTEFPVTYERAKESLERTIRWEKRSRDAFIPREGYGQFGIIQGAHYKDLRKASIDALVDIGFEGYAFGGWLFDETGSKDTYNETVEHCVPFMPEDKPRYMMGVGYPSDLIYSVQQGIDMFDCVIPTRNGRKGQAFVHSGVVKIKQAQYREDPSPLDPECDCYVCKTYTKSYIRHLFVSGESLAGQLITEHNLYFYQKLMRLMRENIEAGTFQEFAAEWLPKVK

SEQ ID NO: 57175 - protein, 395 aa, unidentified
  source 1..395: note = Magnetococcus marinus
  REGION 1..395: note = tr|A0L583|A0L583_MAGMM Queuine tRNA-ribosyltransferase OS=Magnetococcus marinus (strain ATCC BAA-1437 / JCM 17883 / MC-1) OX=156889 GN=tgt PE=3; SV = 1
MRQGGEPYMAPADRFSAELSTPFTFTLHNTDASGARRGVMHTPRGSIETPAFMPVGTQGSVKAMTPQEVEKLGAQIILGNTYHLFLRPGHERVQQLGGLHRFMNWRGPILTDSGGYQVFSLGELNKISEDGVTFRSHIDGSKQFISPEISIQIQQALGSDIMMQFDECPPYPAQRDYVANSLELTLRWGRRSLAAKTPNQPGRALFGIVQGGMYADLREISAQRTLEMGFDGYALGGLSVGEPKALMEEVLSYAPAFLPADKPRYLMGVGKPPDLVMAVERGIDMFDCVLPTRNARNGQLLTRYGPINIKRAEYRESLEAVDPSCGCDCCQNYSRAYIHHLFRTNEILGMRLMTLHNLHYYQTLMAEMRQAISQGDFAAFKANFLHNYFAVTEGA

SEQ ID NO: 57176 - protein, 379 aa, unidentified
  source 1..379: note = Magnetococcus massalia
  REGION 1..379: note = tr|A0A1S7LR77|A0A1S7LR77_MAGMO Queuine tRNA-ribosyltransferase OS=Magnetococcus massalia (strain MO-1) OX=451514 GN=tgt PE=3 SV=1
MCTADLSQPFRFEHLSTDPSGARRGRFVTPRGAVETPAFMPVGTAGTVKAMTPEEVKGLGAQIILGNTYHLYLRPGHERMRRLGGLHKFMNWSGPILTDSGGYQVFSLGELRKITEEGVTFNSHIDGSKHFIGAEESIAIQEALGADIMMQFDECPPYPAEKEYVKNSLDLTIRWGQRSIDAKTPDTPGRALFGIVQGGMYEDLRKESAEKTIALGFDGYALGGLSVGEPKELMQEVLSYAPAFLPEDKPRYLMGVGKPADLVMAVEQGIDMFDCVLPTRNARNGQLLTRYGALNIKQARFRDEVGPVDPSCPCDCCQQYDRAYLHHLFRANEILGMRLMTLHNLTYYQTLMREMREAIEVNGFAAFKTKFLEDQQAGV

SEQ ID NO: 57177 - protein, 319 aa, unidentified
  source 1..319: note = Magnetofaba australis
  REGION 1..319: note = tr|A0A1Y2K305|A0A1Y2K305_9PROT Queuine tRNA-ribosyltransferase OS=Magnetofaba australis IT-1; OX = 1434232 GN=tgt PE=3 SV=1
MKAMTPEEVKATGAQILLGNTYHLFLRPGHERIKRLGGLHRFMNWSGPILTDSGGFQVWSLGELRKITEEGVSFRSHIDGSKRFIGPEESIAIQEALGADIMMQFDECPPYPAERDYAAKSMELSLRWGKRCLEAKTKEQPGRALFAIVQGGMYPDLKKESAERSIEMGFDGYALGGLSVGEPKEVMREVLSYAPSYLPADKPRYLMGVGKPEDLRHAVASGIDMFDCVIPTRNARNGQLFTRNGPMNIKRAEFAEDDRPVDGQCRCDACQNYSRAYLHHLFRANEILGHRLMTNHNLTYFQDVMAEMRAQIETEMTGG

SEQ ID NO: 57178 - protein, 388 aa, unidentified
  source 1..388: note = Magnetospira sp.
  REGION 1..388: note = tr|W6KNK0|W6KNK0_MAGSQ Queuine tRNA-ribosyltransferase OS=Magnetospira sp. (strain QH-2); OX = 1288970 GN=tgt PE=3 SV=1
MTIGFEILATDGAARRGRLTSAHGSAETPAFMPVGTAGTVKAMYPEQVAETGAEIVLGNTYHLMLRPSAERVARLGGLHKFMNWNQTILTDSGGFQVMSLSDLRKLTEDGVTFRSHVDGAYHHLTPERSVEIQHLLDSNITMVLDECPKFGTDKDQIAKSLHLTSRWALRSRHAFQQRPGYGLFGIVQGGVHADLRAESAADLVNIGFDGYAVGGLAVGEDQETTLSVLDFTVPLLPVDRPHYLMGVGTPADIVEAVRRGIDMFDCVMPTRSGRTGQAFTRRGPLNLRNARHKDDPRPIEEGCSCPACRQYSRAYLHHLVRAKEMLGPMLLTRHNLQHYQDLMKDLRAAIEAGTLDAFAAHFHAVQASGDIEPMSSDVFQVDVQNGHQ

SEQ ID NO: 57179 - protein, 375 aa, unidentified
  source 1..375: note = Magnetospirillum caucaseum
  REGION 1..375: note = tr|M3A7D4|M3A7D4_9PROT Queuine tRNA-ribosyltransferase OS=Magnetospirillum caucaseum; OX = 1244869 GN=tgt PE=3 SV=1
MTEFSFELLATDGAARRGRVHTAHGAIDTPAFMPVGTAGTVKAMMPASVAATGAQIVLGNTYHLMLRPGAERVARLGGLHKFMNWPGPILTDSGGFQVMSLAKLRKMDADGVTFQSHHDGSKHRLTPESSMEIQRLLDADITMAFDECTPFPATHGQAEESMRLSMRWARRSKEAFVARDGYGLFGIVQGGVYPDLRAESAKALLEIGFEGYAVGGLAVGEGQDAMFSTLDVTTPLLPGDKPRYLMGVGRPSDIIGAVGRGIDMFDCVMPTRSGRTAQAFTRRGTVNLRNARHQDDPRPLEEDCPCPACRDHSRAYLHHLIRSEEILGPMLLTWHNIQAYQTLMAGLRSAIAEGRFTRFAAEAAALEEMGDIPPP

SEQ ID NO: 57180 - protein, 376 aa, Magnetospirillum gryphiswaldense
  REGION 1..376: note = tr|V6F460|V6F460_MAGGM Queuine tRNA-ribosyltransferase OS=Magnetospirillum gryphiswaldense (strain DSM 6361 / JCM 21280 / NBRC 15271 / MSR-1) OX=431944 GN=tgt PE=3 S V=1
MLTQFRFDLHATDGAARLGIVHTAHGPMDTPAFMPVGTAGTVKAMLPDSVAATGAQTILGNTYHLMLRPGAERIGRLGGLHEFMQWQGPILTDSGGFQVMSLAKLRKMTEEGVAFQSHIDGSKHLLTPERSMQIQHLLDADITMAFDECTPFPATPEQAAQSMRLSMRWAKRSKDAFVERPGYGLFGIVQGGIHHDLRQESAEALQGIGFDGYAVGGLAVGEGQELMFSTLDFTTPLLPTDRPRYLMGVGKPSDIVGAVLRGIDMFDCVMPTRSGRTAQGFTRRGTVNLRNARHQDDPRPLDEHCACPACRQYSRAYLHHLIRSEEILGPMLLTWHNIQFYQDVMKGLRQAIGEGRVQDFARDFLATEALGDIEPI

SEQ ID NO: 57181 - protein, 376 aa, Magnetospirillum gryphiswaldense
  REGION 1..376: note = tr|A4U389|A4U389_9PROT Queuine tRNA-ribosyltransferase OS=Magnetospirillum gryphiswaldense OX=55518 GN=tgt PE=3 SV=1
MLTQFRFDLHATDGAARLGIVHTAHGPMDTPAFMPVGTAGTVKAMLPQSVAATGAQTILGNTYHLMLRPGAERIGRLGGLHEFMQWKGPILTDSGGFQVMSLAKLRKMTEEGVAFQSHIDGSKHLLTPERSMQIQHLLDADITMAFDECTPFPATPEQAAQSMRLSMRWAKRSKDAFVERPGYGLFGIVQGGIYQDLRQESANALQGIGFDGYAVGGLAVGEGQELMFSTLDFTTPLLPTDRPRYLMGVGKPSDIVGAVLRGIDMFDCVMPTRSGRTAQGFTRRGTVNLRNARHQDDPRPLDEHCACPACRQYSRAYLHHLIRSEEILGPMLLTWHNIQFYQDVMKGLRQAIGEGRVQDFARDFLATEALGDIEPI

SEQ ID NO: 57182 - protein, 375 aa, unidentified
  source 1..375: note = Magnetospirillum kuznetsovii
  REGION 1..375: note = tr|A0A364NXP0|A0A364NXP0_9PROT Queuine tRNA-ribosyltransferase OS=Magnetospirillum kuznetsovii; OX = 2053833 GN=tgt PE=3 SV=1
MTDFKFDLLATDGQARLGRVHTAHGVIDTPAFMPVGTAGTVKAMLPGSVAATGAQIVLGNTYHLMLRPGADRVERLGGLHQFMNWPGPILTDSGGFQVMSLAKLRKMDADGVTFQSHHDGSKHRLTPENSMEIQRQLDADITMAFDECTPFPATPQQAAESMRLSMRWAARSKAAFTPRPGYGLFGIVQGGIYPDLRAESAKALLEIGFDGYAIGGLAVGEGQEAMFATLDVTTPLLPEDKPRYLMGVGRPSDIIGAVMRGVDMFDCVMPTRSGRTAQAFTKRGTVNLRNARHQDDPRPLEEGCACPACRDHSRAYLHHLIRSEEILGPMLLTWHNIQAYQDLTRSLRAAIAEGRVEAFAARAAELEAQGDIAAL

SEQ ID NO: 57183 - protein, 375 aa, unidentified
  source 1..375: note = Magnetospirillum magneticum
  REGION 1..375: note = tr|Q2W9S2|Q2W9S2_MAGSA Queuine tRNA-ribosyltransferase OS=Magnetospirillum magneticum (strain AMB-1 / ATCC 700264) OX=342108 GN=tgt PE=3 SV=1
MTEFSFELLATDGAARRGRVHTAHGAIDTPAFMPVGTAGTVKAMLPASVAATGAQIVLGNTYHLMLRPGAERVARLGGLHKFMNWPGPILTDSGGFQVMSLAKLRKMDADGVTFQSHHDGSKHRLTPESSMEIQRLLDADITMAFDECTPFPATFEQAQESMLLSMRWARRSKEAFVAREGYGLFGIVQGGVYPDLRAESAKALLEIGFEGYAVGGLAVGEGQEAMFATLEVTTPLLPTDKPRYLMGVGRPSDIIGAVGRGVDMFDCVMPTRSGRTAQAFTRRGTVNLRNARHQDDPRPLEEGCPCPACRDHSRAYLHHLIRSEEILGPMLLTWHNIQAYQTLTAGLRAAIAEGRFAQFAADAAALEEQGDIAPL

SEQ ID NO: 57184 - protein, 375 aa, Magnetospirillum magnetotacticum
  REGION 1..375: note = tr|A0A0C2U745|A0A0C2U745_MAGMG Queuine tRNA-ribosyltransferase OS=Magnetospirillum magnetotacticum MS-1 OX=272627 GN=tgt PE=3 SV=1
MTQFSFELLATDGAARRGRVNTAHGTLDTPAFMPVGTAGTVKAMLPASVAATGAQIVLGNTYHLMLRPGAERVARLGGLHQFMNWPGPILTDSGGFQVMSLAKLRKMDADGVTFQSHHDGSKHRLTPESSMEIQRLLDADITMAFDECTPFPATHEQAEESMRLSMRWARRSKEAFVQRPGYGLFGIVQGGVYPDLRAESAQALQEIGFEGYAVGGLAVGEGQEAMFATLDVTTPLLPADKPRYLMGVGRPSDIIGAVGRGIDMFDCVMPTRSGRTAQAFTKRGTVNLRNARHQDDPRPLEEGCPCPACRDHSRAYLHHLIRSEEILGPMLLTWHNIQAYQTLMAGLRGAIAEGRFAQFAAEAQALEEMGDIAPL

SEQ ID NO: 57185 - protein, 379 aa, unidentified
  source 1..379: note = Magnetospirillum marisnigri
  REGION 1..379: note = tr|A0A178MFK8|A0A178MFK8_9PROT Queuine tRNA-ribosyltransferase OS=Magnetospirillum marisnigri; OX = 1285242 GN=tgt PE=3 SV=1
MTQFSFELLAEDGAARLGRVHTAHGAIDTPAFMPVGTAATVKAMLPGSVAATGAQIVLGNTYHLMLRPGAERVARLGGLHKFMNWPGPILTDSGGFQVMSLAKLRKLDEDGVTFQSHHDGSRHRLTPESSMDIQRLLDADITMAFDECTPFPATPEQAAVSMRLSMRWAARSKAAFVPRPGYGLFGIVQGGVYPELRADSAKALLEIGFDGYAVGGLAVGEGQEAMFATLEVTTPLLPRDKPRYLMGVGRPSDIIGAVLRGVDMFDCVMPTRSGRTAQAFTRRGTVNLRNARHQDDPRPLEEGCSCPCCRDHSRAYLHHLIRSEEILGPMLLTWHNIQAYQDLMRSLREAIAEGRVAEFAAEAARLEALGDIEVLRHAG

SEQ ID NO: 57186 - protein, 375 aa, unidentified
  source 1..375: note = Magnetospirillum moscoviense
  REGION 1..375: note = tr|A0A178MMW7|A0A178MMW7_9PROT Queuine tRNA-ribosyltransferase OS=Magnetospirillum moscoviense; OX = 1437059 GN=tgt PE=3 SV=1
MTAFRFDLHATDGAARCGTLHTAHGPMDTPAFMPVGTAATVKAMMPESVAATGAQMILGNTYHLMLRPGAERIGKLGGLHRFMNWPGPILTDSGGFQVMSLAKLRKLTEDGVTFQSHIDGSKHLLTPERSMEIQNLLDADVTMAFDECTPFPATEKQAAESMRLSMRWAKRSKDAFVERPGYGLFGIVQGGIYPEFRAESAAALTAMGFDGYAIGGLAVGEGQELMFSTLEVTTPLLPTDRPRYLMGVGRPSDIVGAVLRGVDMFDCVMPTRSGRTAQAFTRRGTVNLRNARHQDDPRPLDQDCTCPACRNYSRAYLHHLIRAEEILGPMLLTWHNLHYYQEVMAGLRSAIKDGRVQEFAKNFAEQEAMGDIEVG

SEQ ID NO: 57187 - protein, 375 aa, Magnetospirillum sp.
  REGION 1..375: note = tr|A0A0U5MBG2|A0A0U5MBG2_9PROT Queuine tRNA-ribosyltransferase OS=Magnetospirillum sp. XM-1; OX = 1663591 GN=tgt PE=3 SV=1
MTEFSFELLATDGAARRGRVQTAHGPIDTPAFMPVGTAGTVKAMLPASVAATGAQIVLGNTYHLMLRPGAERVARLGGLHKFMNWPGPILTDSGGFQVMSLAKLRKMDADGVTFQSHHDGSKHRLTPESSMEIQRLLDADITMAFDECTPFPATHEQAEESMRLSMRWARRSKEAFVAREGYGLFGIVQGGVYPDLRAESAKALLEIGFEGYAVGGLAVGEGQDAMFATLDVTTPLLPADKPRYLMGVGRPSDIIGAVGRGIDMFDCVMPTRSGRTAQAFTRRGTVNLRNARHQDDPRPLEEGCPCPACRDHSRAYLHHLIRSEEILGPMLLTWHNIQAYQTLTAGLRAAIAEGRFAQFAAEAAALEEMGDIPPL

SEQ ID NO: 57188 - protein, 375 aa, Magnetospirillum sp.
  REGION 1..375: note = tr|A0A1M3LHX7|A0A1M3LHX7_9PROT Queuine tRNA-ribosyltransferase OS=Magnetospirillum sp. 64-120; OX = 1895778 GN=tgt PE=3 SV=1
MTQFGFQVHATDGAARLGTVMTAHGPMDTPAFMPVGTAGTVKAMMPESVAATGAQTILGNTYHLMLRPGAERVGRLGGLHEFMQWKGPILTDSGGFQVMSLAKLRKMTEEGVAFQSHIDGSRHMLTPERSMQIQHLLDADITMAFDECTPFPATEQQAAESMRLSMRWAVRSKDAFVQRDGYGLFGIVQGGVYQDLREESAKALQGIGFDGYAIGGLAVGEGQELMFATLDFTTPLLPADRPRYLMGVGKPSDIVGAVLRGVDMFDCVMPTRSGRTAQGFTRRGTVNLRNARHQDDPRPLDEHCSCPACRQYSRAYLHHLIRSEEILGPMLLTWHNIQFYQDVMKGLRQAIGEGRVQQFAADFLAAESQGDIAPL

SEQ ID NO: 57189 - protein, 377 aa, unidentified
  source 1..377: note = Magnetovibrio blakemorei
  REGION 1..377: note = tr|A0A1E5QC71|A0A1E5QC71_9PROT Queuine tRNA-ribosyltransferase OS=Magnetovibrio blakemorei; OX = 28181 GN=tgt PE=3 SV=1
MTTFGFELLGSDGQARTGRVSTAHGAIQTPAFMPVGTAATVKAMTSESVKATGAEILLGNTYHLMLRPGAERIAKLGGLHTFMNWDLPILTDSGGYQVMSLTDLRKLDEEGVTFRSHIDGSYHKLTPERSIEVQHLLDADITMCFDECPPFPCEKDEVARATELSMRWAKRSRDAFVDRPGYGLFGICQGGVHEDLREMSAKALIDIGFDGYAVGGLAVGEGREMMFASLDVTTPHLPTDKPRYLMGVGKPEDIVGAVARGIDMFDCVLPTRSGRTGQAWTPGGSINIRNARHAEDPRPLDANCACPACTNHSRAYLHHLTKADEILGAMLLTWHNLHYYQDLMRAIRQAIGEGRFSQFQADFAATRERGDIEALSI

SEQ ID NO: 57190 - protein, 378 aa, unidentified
  source 1..378: note = Magnetovibrio sp.
  REGION 1..378: note = tr|A0A2E3P6C0|A0A2E3P6C0_9PROT Queuine tRNA-ribosyltransferase OS=Magnetovibrio sp. OX=2024836; GN = tgt PE=3 SV=1
MKKMQFTVSATDGRARRGRLDTAHGPMETPAFMPVGTAATVKAMTPEAVAETGAQCVLGNTYHLMLRPGSARIKRLGGLHEFMNWPGPILTDSGGFQVWSLKDLRKLTEDGVTFRSHIDGAKHELTPESAMAIQNDLDADITMVLDECTPFGVDEAAARVSMELSMRWAQRCRDAFEQRPGYGLFGIVQGGVFPDLRAESAKALVEIGFDGYAIGGLAVGEGQDLMFETLDVTTPHLPEDKPRYLMGVGKPSDLVGAVERGVDMFDCVLPTRSGRTDQAFTRRGQVNIRNARHKDDPRPLDPDCSCYACSNYSRAYLHHLAQAKEILGLTLLTWHNLHYYQELMAGMRQAIESGTFAAFKKAFEDGEAAGDIPAIEGD

SEQ ID NO: 57191 - protein, 375 aa, unidentified
  source 1..375: note = Magnetovibrio sp.
  REGION 1..375: note = tr|A0A2D7AAN7|A0A2D7AAN7_9PROT Queuine tRNA-ribosyltransferase OS=Magnetovibrio sp. OX=2024836; GN = tgt PE=3 SV=1
MANISFKLTKRDGRARLGQLMTAHGPIDTPAFMPVGTAATVKAMTPEAVHNTGAQIILANTYHLMLRPTAERVNRFGGLHKFMNWPGPILTDSGGYQIMSLNKLRKIDEKGVTFRSHLDGSKHKLTPERAIEIQHLLDADISMVLDECTSFPATKTEAENSMRLSMRWALRSKKAFQDRLGYGLFGIVQGGVYGELREESAKALIKIGFDGYAIGGLAVGEGQDLLFSTLEVTEPHLPDSHPRYLMGVGKPEDLVRAVGLGVDMFDCVLPTRSGRTDQAFTRRGRLNMRNARHKDDLRPLDPECTCYTCKNYSRGYVHHLVISNEILAAVLLTGHNLHYYQELMGAMRKAISEEAFDAFTILFTAEQASGDIIMT

SEQ ID NO: 57192 - protein, 374 aa, Mahella australiensis
  REGION 1..374: note = tr|F4A272|F4A272_MAHA5 Queuine tRNA-ribosyltransferase OS=Mahella australiensis (strain DSM 15567 / CIP 107919 / 50-1 BON) OX=697281 GN=tgt PE=3; SV = 1
MALRYELIKKDKSSGARLGRIYTEHSVIDTPVFMPVGTQATVKAMAPDELKDIGFEIILSNTYHLYLRPGHDIVAKAGGLHGFMHWDRSILTDSGGYQVFSMSHLRDITEDGVAFRSYIDGSKHFIGPEKAIEIQNALGADIIMAFDECVPYPCDRDYALHAVERTTRWAKRCKQAHADERQSLFGIIQGSTYKDLRQKSMEEIVNIGFPGYAVGGLSVGEPKDVMYDILEYIMPNMPDDRPRYLMGVGSPDCLIEGVIRGVDMFDCVWPTRIARNGTVMTSQGKLVVRNAAYKDDMRPLDEQCGCYACRNFSRAYIRHLFNVGEILGARLATIHNLYFLAGLMSDIRKAIMEDRLLEFRDIFFGNYYKSQTLS

SEQ ID NO: 57193 - protein, 372 aa, unidentified
  source 1..372: note = Maledivibacter halophilus
  REGION 1..372: note = tr|A0A1T5L2C4|A0A1T5L2C4_9CLOT Queuine tRNA-ribosyltransferase OS=Maledivibacter halophilus; OX = 36842 GN=tgt PE=3 SV=1
MAIRYELIKECKQSGARLGKLHTPHGVIETPIFMPVGTQATVKSMTPEELKEIESQIILSNTYHLYLRPGHKLVEKAGGLHKFMNWDRPILTDSGGFQVFSLGDLRKISEKGVEFRSHIDGSKHFISPEKAIEIQNSLGSDIMMCFDECAPYPSDREYVKNSLERTTRWAKRCKEAHKKTDTQALFGIIQGGMYKELREQSVKEITEIDFPGYSIGGLSVGEPKPLMYEILEYTTPLMPKDKPRYLMGVGSPDCLIEGAIRGVDMFDCVLPTRIARNGTAMTSQGRITIKQARYFDDFTPLDPECDCYTCKNYTKAYLRHLFKANEILSARLFSYHNLYFLLKLMKNIREAIRNDNLLDYRKEFFEKYGYEL

SEQ ID NO: 57194 - protein, 394 aa, Malikia granosa
  REGION 1..394: note = tr|A0A2S9K9I9|A0A2S9K9I9_9BURK Queuine tRNA-ribosyltransferase OS=Malikia granosa OX=263067; GN = tgt PE=3 SV=1
MLKFDLLHTDPDSHARRGQLTLNHGVVQTPIFMPVGTYGTVKGVMPKSLHDMGAQIILGNTFHLWMRPGLDIMQSFGGLHKFEQWDKPILTDSGGFQVWSLGAMRKISEEGVKFASPVNGDKLFMSPEVSMQIQTILNSDIVMQLDECTPYWQGEKGSGHITTEAEARVSMELSRRWALRSKNEFERLGNPNALFGIVQGGMFEHLRQESLEALVEMDFPGYAVGGVSVGEPKELMLQIMAHTPHRLPAHKPRYLMGVGTPEDLVEGVAQGVDMFDCVMPTRNARNGTIFTRYGDLKIRNARHKADPQPLDSSCTCYACAGSSGVSWDDGGREGFSRAYLHHLDRCGEMLGPMLTTVHNLHYYLNLMREVRESLEAGQFSALRARFKSERARGV

SEQ ID NO: 57195 - protein, 394 aa, Malikia spinosa
  REGION 1..394: note = tr|A0A2S9KGJ3|A0A2S9KGJ3_9BURK Queuine tRNA-ribosyltransferase OS=Malikia spinosa OX=86180 GN=tgt; PE = 3 SV=1
MLKFDLLKTDPDSHARRGTLTLNHGVVQTPIFMPVGTYGTVKGVMPKSLHDMGAQIILGNTFHLWMRPGLDIMQSFGGLHQFEQWDKPILTDSGGFQVWSLGAMRKISEEGVKFASPVNGDKLFMSPEVSMQIQTILNSDIVMQLDECTPYWQGEKGSGHITTEAEARVSMELSRRWALRSKNEFERLENPNALFGIVQGGMFEHLRQESLEALVEMDFPGYAVGGVSVGEPKELMLQIMAHTPHRLPAHKPRYLMGVGTPEDLVEGVAQGVDMFDCVMPTRNARNGTIFTRYGDLKIRNARHKADPQPLDPSCNCYACAGSSGVSWDAGGREGFSRAYLHHLDRCGEMLGPMLSTVHNLHYYLNLMREVRESLEAGQFSALRARFKSERARGV

SEQ ID NO: 57196 - protein, 375 aa, unidentified
  source 1..375: note = Maliponia aquimaris
  REGION 1..375: note = tr|A0A238K2E7|A0A238K2E7_9RHOB Queuine tRNA-ribosyltransferase OS=Maliponia aquimaris OX=1673631; GN = tgt PE=3 SV=1
MALTSFDVSARDGRARRGVIRTPRGEIRTPAFMPVGTAATVKGMLPESVAATGADILLGNTYHLMLRPGAERVARLGGLHRFMNWERPILTDSGGFQVMSLADLRKLTEEGVTFRSHIDGSKHMLSPERSMEIQKLLGSDIVMAFDECPALPADRERIAESMRLSMRWAARSREAFGDRPGHMLFGIQQGGLEQDLRGESAEALKAIGFDGYAVGGLAVGEGQEAMFGCLDYAPDMLPEDKPRYLMGVGKPDDIVGAVKRGIDMMDCVLPSRSGRTGQAWTRRGQVNIKNARHADDPRPLDADCTCPACRSYSRAYLHHVFRAGEMISGMLLTWHNLHYYQELMAGMRAAIEAGSFADFEAAFHAQRAEGDIPPV

SEQ ID NO: 57197 - protein, 372 aa, Malonomonas rubra
  REGION 1..372: note = tr|A0A1M6CE40|A0A1M6CE40_MALRU Queuine tRNA-ribosyltransferase OS=Malonomonas rubra DSM 5091; OX = 1122189 GN=tgt PE=3 SV=1
MSAFKYDLLKQDEGSQARRGRITTARGVIETPVFMPVGTAGTVKGLLPEALKEIGAQIILGNTYHLYLRPGHKLIQQLGGLHKFMNWDRPILTDSGGFQVFSLGELRKITEEGASFQSHIDGSKHMLTPELSIEIQQALGADIIMVFDECIPHPAERKYVADSTNLSARWAKRCREAMPAGSSDSALFGIVQGGMHTDLRKQSAEQLQEIGFEGYALGGLSVGEETSLMYEMMEFSLPLLPADKPRYVMGVGTPENLVEGVARGCDMFDCVMPTRNARNGNLFSSFGKISIKQAQYRDDETPIDPDCDCYVCRNYSRAYLRHLFMSREILSSVLNTHHNLYYYQQLMAGIRTALEEGRFHEFRAEFYRKRNQ

SEQ ID NO: 57198 - protein, 378 aa, Malonomonas rubra
  REGION 1..378: note = tr|A0A1M6BSW5|A0A1M6BSW5_MALRU Queuine tRNA-ribosyltransferase OS=Malonomonas rubra DSM 5091; OX = 1122189 GN=tgt PE=3 SV=1
MFQFTLLKEDPKSRARRGRLETPHGTIETPIFMPVGTHGALKAMTPAQVEETEAQIILSNTYHLHLKPGEGLVKKAGGLHKFMNWDKPILTDSGGFQVFSLPKKRIAEDGVHFRHELTGEEIFLGPKEAMQIENDLGADIMMAFDECIPYPASHDYSAKSIKKTIRWAEACLKHHSREDQALFGIVQGSVYEDLRRICAEELTAMDFPGYAIGGVSVGEGLELLKKVVDFTEPHMPKHKPRYLMGVGLPEDILESIERGMDMFDCVIPTRYARSATLFTRRGKIRLTNKNFRRDFFPVDPSCDCYCCRNFTRAYLHHLYNANEILSATLAAIHNVRFYLNMVAGARKAIEAGDYPAYKNEFLAEYKSGEKGGGKKKKR

SEQ ID NO: 57199 - protein, 375 aa, Mameliella alba
  REGION 1..375: note = tr|A0A0B3S067|A0A0B3S067_9RHOB Queuine tRNA-ribosyltransferase OS=Mameliella alba OX=561184; GN = tgt PE=3 SV=1
MAQTSFELTARDGRARRGVIRTPRGEIRTPAFMPVGTAATVKGMMPESVAATGADILLGNTYHLMLRPGAERVARLGGLHKFMNWEKPILTDSGGFQVMSLAELRKLTEEGVSFRSHIDGSKHMLTPERSMEIQKLLGSDIVMAFDECPALPADRDRITQSMRLSMRWAARSREAFGDRPGHMLFGIQQGGLEEDLRGESAEALKAIGFDGYAVGGLAVGEGQEAMFSCLDYAPDMLPEDKPRYLMGVGKPDDIVGAVKRGIDMMDCVLPSRSGRTGQAWTRRGQVNIKNARHADDPRPLDENCTCPACRGYSRAYLHHVFRAGEMISGMLLTWHNLHYYQELMQGMRSAIEAGDFAGFEADFHAKRAEGDIEPL

SEQ ID NO: 57200 - protein, 375 aa, Mameliella sp.
  REGION 1..375: note = tr|A0A2E9I5D7|A0A2E9I5D7_9RHOB Queuine tRNA-ribosyltransferase OS=Mameliella sp. OX=1924940; GN = tgt PE=3 SV=1
MAQTSFELIARDGRARRGVIRTPRGEIRTPAFMPVGTAATVKGMMPESVAATGADILLGNTYHLMLRPGAERVARLGGLHTFMNWSGPILTDSGGFQVMSLAELRKLTEDGVTFRSHIDGSKHMLSPERSMEIQKLLGSDIVMAFDECPALPADRDRIAQSMRLSMRWAARSREAFGDRPGHMLFGIQQGGLEEDLRGESAEALKGIGFDGYAVGGLAVGEGQEAMFGCLDYAPGMLPEDRPRYLMGVGKPDDIVGAVKRGIDMMDCVLPSRSGRTGQAWTRRGQVNIKNARHADDPRPLDEQCTCPACRGYSRAYLHHVFRAGEMISGMLLTWHNLHYYQELMAGMREAISAGRFEAFEAEFHAMRAEGDIEPL

SEQ ID NO: 57201 - protein, 375 aa, unidentified
  source 1..375: note = Mangrovibacter phragmitis
  REGION 1..375: note = tr|A0A1B7L9Z8|A0A1B7L9Z8_9ENTR Queuine tRNA-ribosyltransferase OS=Mangrovibacter phragmitis; OX = 1691903 GN=tgt PE=3 SV=1
MKFELKNTDGRARRGKLVFERGVVETPAFMPVGTYGTVKGMTPEEVEATGAQIILGNTFHLWLRPGQEIMKLHGDLHDFMQWKGPILTDSGGFQVFSLGDIRKITEDGVHFRNPINGDPIFLDPEKSMEIQYDLGSDIVMIFDECTPYPADWDYAKRSMEMSLRWAKRSRDRFDSLGNKNALFGIIQGSVYEDLRDISVKGLVDIGFDGYAVGGLAVGEPKADMHRILEHVCPQIPADKPRYLMGVGKPEDLVEGVRRGIDMFDCVMPTRNARNGHLFVTNGVVKIRNAKYKSDTGPLDEECDCYTCRNYSRAYLHHLDRCNEILGARLNTIHNLRYYQRLMAGLRQAIEEGKLEHFVVDFYQRQGKPVPPLNVD

SEQ ID NO: 57202 - protein, 375 aa, Mangrovibacter plantisponsor
  REGION 1..375: note = tr|A0A317Q5W8|A0A317Q5W8_9ENTR Queuine tRNA-ribosyltransferase OS=Mangrovibacter plantisponsor; OX = 451513 GN=tgt PE=3 SV=1
MKFELKNTDGRARRGKLVFERGVVETPAFMPVGTYGTVKGMTPEEVEATGAQIILGNTFHLWLRPGQEIMKLHGDLHDFMQWKGPILTDSGGFQVFSLGDIRKITEDGVHFRNPINGDPIFLDPEKSMEIQYDLGSDIVMIFDECTPYPADWDYAKRSMEMSLRWAKRSRDRFDSLGNKNALFGIIQGSVYEDLRDISVKGLVEIGFDGYAVGGLAVGEPKADMHRILEHVCPQIPADKPRYLMGVGKPEDLVEGVRRGIDMFDCVMPTRNARNGHLFVTNGVVKIRNAKYKSDTGPLDEECDCYTCRNYSRAYLHHLDRCNEILGARLNTIHNLRYYQRLMAGLRQAIEEGKLEHFVVDFYQRQGKPVPPLNVD

SEQ ID NO: 57203 - protein, 375 aa, Mangrovibacter sp.; identical to SEQ ID NO: 57202
  REGION 1..375: note = tr|A0A071LNH9|A0A071LNH9_9ENTR Queuine tRNA-ribosyltransferase OS=Mangrovibacter sp. MFB070; OX = 1224318 GN=tgt PE=3 SV=1

SEQ ID NO: 57204 - protein, 376 aa, unidentified
  source 1..376: note = Mangrovibacterium diazotrophicum
  REGION 1..376: note = tr|A0A419WBK0|A0A419WBK0_9BACT Queuine tRNA-ribosyltransferase OS=Mangrovibacterium diazotrophicum OX=1261403 GN=tgt PE=3 SV=1
MDFTLKHTASQSEARAGILETDHGVIETPIFMPVGTAGSVKGIHKKDLKEDIGAQIILGNTYHLYLRPGMDIIERAGGLHKFNGWDGPILTDSGGYQVFSLGDIRKLTEEGARFQSHIDGSYHLFTPESVIDIQRKIGADIMMAFDECTPGDADFDYAKKSLALTQRWLDRCVNQMAKTSPLYGHNQSLFPIVQGGVYPELREQAARHVTTIPSDGYAIGGLSVGEPEADMYAMIDVVNPILPKDKLRYLMGVGTPVNILEAIDRGVDMFDCVMPTRNGRNGMLFTKNGFMNMRNAKWADDFSPIDPEGTSFVDINYTKAFLRHLIVSGEMLGAQIASQHNLAFYLWLVKEARRQILADTFKDWKEEMVVKLAQRL

SEQ ID NO: 57205 - protein, 376 aa, unidentified
  source 1..376: note = Mangrovibacterium marinum
  REGION 1..376: note = tr|A0A2T5C178|A0A2T5C178_9BACT Queuine tRNA-ribosyltransferase OS=Mangrovibacterium marinum; OX = 1639118 GN=tgt PE=3 SV=1
MDFTLKHTATGSKARAGTLNTDHGRIETPIFMPVGTAGSVKGIHKKDLKEDIGAQIILGNTYHLYLRPGMDIIERAGGLHKFNGWDGPILTDSGGYQVFSLGAMRKLSEEGAKFQSHIDGSRHLFTPESVIDIQRIIGADIMMAFDECTPGDADFDYAKKSLQLTQRWLERCVNQMQKTKPLYGHSQSLFPIVQGAVYPELREQAARHVTTIPADGYAIGGLSVGESEADMYAMIEVVNPILPIDKPRYLMGVGTPVNILEAIDRGVDMFDCVMPTRNGRNGMLFTRNGVINIRNKKWADDFSPVDPDGTSFVDQNYTKAFLRHLIVANEMLGAQIASHHNLAFYLWLVKEARRQILADNFKSWKEEMVVKLAQRL

SEQ ID NO: 57206 - protein, 376 aa, unidentified
  source 1..376: note = Mangrovimonas sp.
  REGION 1..376: note = tr|A0A428JYX5|A0A428JYX5_9FLAO Queuine tRNA-ribosyltransferase OS=Mangrovimonas sp. HN-E26; OX = 2494697 GN=tgt PE=3 SV=1
MTFDLLAKDLQSKARAGTITTDHGTIETPIFMPVGTVASVKGVHQRELKNDINPDIILGNTYHLYLRPKTPILEAAGGLHKFMNWDRNILTDSGGYQVYSLSANRKIKEEGVKFKSHIDGSYHTFTPENVMEIQRTIGADIIMAFDECTPYPCDYHYAKRSMHMTHRWLDRCINHLEKTPLKYDYNQTLFPIVQGSTYKDLRQQSAEYIANVGAAGNAIGGLSVGEPAEEMYAMTDVVCNILPEDKPRYLMGVGTPINILENIALGVDMFDCVMPTRNARNGMLFTAHGTINIKNKKWEDDFSPIDDMGITFVDTEYSKAYLRHLFTVNELLGKQIATIHNLGFYLWLVREARKHILAGDFRTWKDKMVKQMDKRL

SEQ ID NO: 57207 - protein, 376 aa, unidentified
  source 1..376: note = Mangrovimonas sp.
  REGION 1..376: note = tr|A0A1V1ZKR7|A0A1V1ZKR7_9FLAO Queuine tRNA-ribosyltransferase OS=Mangrovimonas sp. DI 80; OX = 1779330 GN=tgt PE=3 SV=1
MKFDLKAKDPQSSARAGVITTDHGTIETPIFMPVGTVASVKGVHQRELKDEINPDIILGNTYHLYLRPQTSILEKAGGLHKFMNWDRNILTDSGGYQVYSLSGNRKIKEEGVKFKSHIDGSYHTFTPENVMEIQRSIGADIIMAFDECTPYPCDYNYAKRSMHMTHRWLDRCINHLEKVPFKYDYSQAFFPIVQGSTYKDLRKQSAEYIANAGAVGNAIGGLSVGEPAEEMYAMTDVVTAILPEDKPRYLMGVGTPINILENIALGIDMFDCVMPTRNARNGMLFTAHGTINIKNKKWEDDFSPIDEMGITFVDTEYSKAYLRHLFTVNELLGKQIATIHNLGFYLWLVREARKHILAGDFRTWKDMMVKQMDKRL

SEQ ID NO: 57208 - protein, 376 aa, unidentified
  source 1..376: note = Mangrovimonas yunxiaonensis
  REGION 1..376: note = tr|A0A084TNB3|A0A084TNB3_9FLAO Queuine tRNA-ribosyltransferase OS=Mangrovimonas yunxiaonensis; OX = 1197477 GN=tgt PE=3 SV=1
MTFDLHVKDAQSQARAGTITTDHGVIETPIFMPVGTVASVKGVHQRELKNDINPDIILGNTYHLYLRPQTPILEAAGGLHKFMNWDRNILTDSGGYQVYSLSANRKIKEEGVRFKSHIDGSYHTFTPENVMEIQRSIGADIIMAFDECTPYPCDYHYAKRSMHMTHRWLDRCIKHLEKTPLKYDYNQTLFPIVQGSTYKDLRQQSAEYIANAGAKGNAIGGLSVGEPAEEMYAMTDVVCSILPEDKPRYLMGVGTPINILENIALGVDMFDCVMPTRNARNGMLFTAHGTINIKNKKWEDDFSPIDDMGITFVDTEYSKAYLKHLFSVNELLGKQIATIHNLGFYLWLVREARKHILAGDFRTWKDKMVKQMDKRL

SEQ ID NO: 57209 - protein, 382 aa, Mannheimia granulomatis
  REGION 1..382: note = tr|A0A011LXU7|A0A011LXU7_9PAST Queuine tRNA-ribosyltransferase OS=Mannheimia granulomatis; OX = 85402 GN=tgt PE=3 SV=1
MKYELKKTSGNARRGRLTFSRPKGEYHVETPAFMPVGTYGTVKGMTPEEVAATGAQILLGNTFHLWLRPGQEVMRMHGDLHDFMQWHGPILTDSGGFQVFSLGKLRKIKEEGVTFQNPISGEKIFLSPEKSMEIQYDLGSDIVMIFDECTPYPATFDYAKKSMEMSLRWAKRSRDRFDELENPNALFGIIQGGIYEELRKVSVEKLVEIGFDGYAVGGLAVGEPKEDMHRILEYVCPQIPADKPRYLMGVGKPEDLVEGVRRGIDMFDCVMPTRNARNGHLFVTNGIVKIRNAKYRNDTTPLDPECDCYTCKNYTKAYLYHLDKCGEILGARLNTIHNLRYYQRLMAEIRQAIEDDRFDDFVIEFYARIGKEVPPLQSEINK

SEQ ID NO: 57210 - protein, 134 aa, Mannheimia haemolytica
  REGION 1..134: note = tr|A0A378N860|A0A378N860_MANHA Queuine tRNA-ribosyltransferase OS=Mannheimia haemolytica OX=75985; GN = tgt_2 PE=4 SV=1
MVTLVVGVLTFNRPKGEFHVETPAFMPVGTYGTVKGMTPEEVKATGAQILLGNTFHLWLRPGQEVMKMHGDLHDFMQWHGPILTDSGGFQVFSLGKLRKIKEEGVTFQNRLAVRKFSFRRKNQWRSNTILDQTL

SEQ ID NO: 57211 - protein, 119 aa, Mannheimia haemolytica
  REGION 1..119: note = tr|A0A378MTL2|A0A378MTL2_MANHA Queuine tRNA-ribosyltransferase OS=Mannheimia haemolytica OX=75985; GN = tgt_2 PE=4 SV=1
MHGDLHDFMQWHGPILTDSGGFQVFSLGKLRKIKEEGVTFQNPISGEKIFLSPEKSMEIQYDLGSDIVMIFDECTPYPATFDYAKKSMEMSLRWAKRSRDRFDELENPNALFGIIQGGI

SEQ ID NO: 57212 - protein, 351 aa, Mannheimia sp.
  REGION 1..351: note = tr|W0Q618|W0Q618_9PAST Queuine tRNA-ribosyltransferase OS=Mannheimia sp. USDA-ARS-USMARC-1261 OX=1432056 GN=tgt PE=3 SV=1
MPVGTYGTVKGMTPEEVAATGAQILLGNTFHLWLRPGQEVMKMHGDLHDFMQWHGPILTDSGGFQVFSLGKLRKIKEEGVTFQNPISGEKIFLSPEKSMEIQYDLGSDIVMIFDECTPYPATFDYAKKSMEMSLRWAKRSRDRFDELENPNALFGIIQGGVYEELRKVSVEKLVEIGFDGYAVGGLAVGEPKEDMHRILEYVCPQIPADKPRYLMGVGKPEDLVEGVRRGIDMFDCVMPTRNARNGHLFVTNGIVKIRNAKYREDTTPLDPECDCYTCKNYTKAYLYHLDKCGEILGARLNTIHNLRYYQRLMAEIRQAIEDDRFDDFVVEFYARIGKDVPPLQSEVNNQE

SEQ ID NO: 57213 - protein, 379 aa, unidentified
  source 1..379: note = Mannheimia succiniciproducens
  REGION 1..379: note = sp|Q65S94|TGT_MANSM Queuine tRNA-ribosyltransferase; OS = Mannheimia succiniciproducens (strain MBEL55E); OX = 221988 GN=tgt PE=3 SV=1
MKFKLKTTSGAARRGELTFNRPQGEFSVQTPAFMPVGTYGTVKGMTPEEVRATGAEILLGNTFHLWLRPGQEVMRKHGDLHDFMQWHRPILTDSGGFQVFSLGKLRKITEEGVKFQNPINGERIFLSPEKSMEIQYDLGSDIVMIFDECTPYPATFDYAKKSMEMSLRWAKRSRDRFDELGNKNALFGIVQGGTFEELRKVSAENLINIGFDGYAVGGLAVGEPKEEMHRILEFTTPLLPADKPRYLMGVGKPEDLVEGVRRGIDMFDCVMPTRNARNGHLFVTDGIVKIRNAKYKDDTSPLDPHCDCYTCQHYTKSYLYHLDKCGEILGARLNTIHNLRYYQRLMEQIRTAIEQDRFDDFVQEFYARMDKPVPPLQKA

SEQ ID NO: 57214 - protein, 382 aa, Mannheimia varigena
  REGION 1..382: note = tr|W0Q9V4|W0Q9V4_9PAST Queuine tRNA-ribosyltransferase OS=Mannheimia varigena USDA-ARS-USMARC-1296 OX=1433287 GN=tgt PE=3 SV=1
MKYELKTTSDNARRGRLTFSRPKGEFTVETPAFMPVGTYGTVKGMTPEEVKATGAEILLGNTFHLWLRPGQEVMKMHGDLHDFMQWHGPILTDSGGFQVFSLGKLRKIKEEGVTFQNPISGEKIFLSPEKSMEIQYDLGSDIVMIFDECTPYPATFDYAKQSMEMSLRWAKRSRDRFDELENPNALFGIIQGGVYEELRKVSVEKLVEIGFDGYAVGGLAVGEPKEDMHRILEYVCPQIPADKPRYLMGVGKPEDLVEGVRRGIDMFDCVMPTRNARNGHLFVTNGIVKIRNAKYRADTTPLDPECDCYTCKNYTKAYLYHLDKCGEILGARLNTIHNLRYYQRLMAEIRQAIEDDRFDDFVVEFYARIGKEVPPLQSEINK

SEQ ID NO: 57215 - protein, 383 aa, Maribacter aquivivus
  REGION 1..383: note = tr|A0A1M6VT77|A0A1M6VT77_9FLAO Queuine tRNA-ribosyltransferase OS=Maribacter aquivivus OX=228958; GN = tgt PE=3 SV=1
MQLELENLKFTLHNTDLQSKARAGTIVTDHGTIETPIFMPVGTVASVKGVHQKELREEVNPDIILGNTYHLFLRPKTEILKKAGGLHKFMGWDRNILTDSGGYQVYSLSANRKIKEEGVKFKSHIDGSMHLFTPENVMEIQRVIGADIIMAFDECTPYPCDYNYAKRSMHMTHRWLDRCINHLEKTPFEYDYEQTFFPIVQGSTYKDLRRQSAEYIANAGAEGNAIGGLSVGEPAEEMYGMTEVVCEILPEDKPRYLMGVGTPINILENIALGIDMFDCVMPTRNARNGMLFTAHGTINIKNKKWEDDFSPIDEMGTTFVDHEYSKAYLRHLFAANEYLGKQIATIHNLGFYMWLVREARKHIIAGDFRAWKDIMVKQMDKRL

SEQ ID NO: 57216 - protein, 383 aa, Maribacter arcticus
  REGION 1..383: note = tr|A0A1T5A153|A0A1T5A153_9FLAO Queuine tRNA-ribosyltransferase OS=Maribacter arcticus OX=561365; GN = tgt PE=3 SV=1
MQLDLENLKFTLHTTDAQSKARAGTVVTDHGVIETPIFMPVGTVASVKGVHQKELKEEINPDIILGNTYHLFLRPKTEILRKAGGLHKFMGWDRNILTDSGGYQVYSLSANRKIKEEGVKFKSHIDGSMHLFTPENVMEIQRVIGADIIMAFDECTPYPCDYNYAKRSMHMTHRWLDRCITHLEKTPFTYDFEQTFFPIVQGSTYKDLRRQSAEYIANTGAEGNAIGGLSVGEPAEEMYGMTEVVCEILPEDKPRYLMGVGTPINILENIALGIDMFDCVMPTRNARNGMLFTAHGTINIKNKKWEDDFSQLDEMGTTFVDREYSKAYLRHLFAANEYLGKQIATIHNLGFYMWLVREARKHILAGDFRQWKDIMVKQMDKRL

SEQ ID NO: 57217 - protein, 383 aa, unidentified
  source 1..383: note = Maribacter caenipelagi
  REGION 1..383: note = tr|A0A4R7DB64|A0A4R7DB64_9FLAO Queuine tRNA-ribosyltransferase OS=Maribacter caenipelagi; OX = 1447781 GN=tgt PE=3 SV=1
MQLDLENLKFTLHNTDLQSKARAGTIVTDHGIIETPIFMPVGTVASVKGVHQKELKEEVNPDIILGNTYHLFLRPKTEILKKAGGLHKFMGWDRNILTDSGGYQVYSLSANRKIKEEGVKFKSHIDGSMHLFTPENVMEIQRVIGADIIMAFDECTPYPCDYNYAKRSMHMTHRWLDRCINHLSKTPFEYDYEQTFFPIVQGSTYKDLRRQSAEYIANAGAEGNAIGGLSVGEPAEEMYGMTEVVCEILPEDKPRYLMGVGTPINILENIALGIDMFDCVMPTRNARNGMLFTAHGTINIKNKKWEDDFSPIDEMGTTFVDHEYSKAYLRHLFAANEYLGKQIATIHNLGFYMWLVREARKHIIAGDFRTWKDMMVKQMDKRL

SEQ ID NO: 57218 - protein, 376 aa, unidentified
  source 1..376: note = Maribacter cobaltidurans
  REGION 1..376: note = tr|A0A223VAV5|A0A223VAV5_9FLAO Queuine tRNA-ribosyltransferase OS=Maribacter cobaltidurans; OX = 1178778 GN=tgt PE=3 SV=1
MEFTLHKTDVQSKARAGTIKTDHGAIETPIFMPVGTVASVKGVHQKELREEINPDIILGNTYHLFLRPKTEILQKAGGLHKFMGWDRNILTDSGGYQVYSLSGNRKIKEEGVKFKSHIDGSMHMFTPENVMEIQRVIGADIIMAFDECTPYPCDYNYAKRSMHMTHRWLDRCINHLEKTPFAYDYSQSFFPIVQGSTYKDLRRQSAEYIANAGAEGNAIGGLSVGEPAEEMYGMTEVVCEILPEDKPRYLMGVGTPINILENIALGIDMFDCVMPTRNARNGMLFTAHGTINIKNKKWEDDFSSIDEMGTTFVDKEYSKAYLRHLFVANEYLGKQIATIHNLGFYLWLVREARKHILEGDFYSWKNTMVKQMDKRL

SEQ ID NO: 57219 - protein, 383 aa, Maribacter dokdonensis
  REGION 1..383: note = tr|A0A1H4PWG0|A0A1H4PWG0_9FLAO Queuine tRNA-ribosyltransferase OS=Maribacter dokdonensis; OX = 320912 GN=tgt PE=3 SV=1
MQLELESLKFTLHTTDTQSKARAGTVVTDHGVIETPIFMPVGTVASVKGVHQKELKEEINPDIILGNTYHLFLRPKTEILKKAGGLHKFMGWDRNILTDSGGYQVYSLSGNRKIKEEGVKFKSHIDGSMHLFTPENVMEIQRVIGADIIMAFDECTPYPCEYNYAKRSMHMTHRWLDRCINHLEKTPFEYDYAQTFFPIVQGSTYKNLRRQSAEYIANAGAEGNAIGGLSVGEPAEEMYGMTEVVCEILPEDKPRYLMGVGNPINILENIALGIDMFDCVMPTRNARNGMLFTAHGTINIKNKKWEDDFSPIDEMGTTFVDHEYSKAYLRHLFAANEYLGKQIATIHNLGFYMWLVREARKHIIAGDFRTWKDMMVKQMDKRL

SEQ ID NO: 57220 - protein, 376 aa, unidentified
  source 1..376: note = Maribacter flavus
  REGION 1..376: note = tr|A0A5B2TU89|A0A5B2TU89_9FLAO Queuine tRNA-ribosyltransferase OS=Maribacter flavus OX=1658664; GN = tgt PE=3 SV=1
MKFTLHKTDVQSKARAGTLVTDHGTIETPIFMPVGTVASVKGVHQKELREEINPDIILGNTYHLFLRPKTDILQKAGGLHKFMGWDRNILTDSGGYQVYSLSGNRKIKEEGVKFKSHIDGSMHMFTPENVMEIQRVIGADIIMAFDECTPYPCDYNYAKRSMHMTHRWLDRCIAHLEKTPFVYDYSQSFFPIVQGSTYKDLRRQSAEYIANAGAEGNAIGGLSVGEPAEEMYGMTEVVCEILPEDKPRYLMGVGTPINILENIALGIDMFDCVMPTRNARNGMLFTAHGTINIKNKKWEDDFSPIDEMGTTFVDREYSKAYLRHLFVANEYLGKQIATIHNLGFYLWLVREARKHILEGDFYSWKNNMVKQMDKRL

SEQ ID NO: 57221 - protein, 383 aa, Maribacter orientalis
  REGION 1..383: note = tr|A0A1H7PVS2|A0A1H7PVS2_9FLAO Queuine tRNA-ribosyltransferase OS=Maribacter orientalis OX=228957; GN = tgt PE=3 SV=1
MQLDLENLKFTLHTTDAQSKARAGTVVTDHGVIDTPIFMPVGTVASVKGVHQKELKEEVNPDIILGNTYHLFLRPKTEILRKAGGLHKFMGWDRNILTDSGGYQVYSLSANRKIKEEGVKFKSHIDGSTHLFTPENVMEIQRIIGADIIMAFDECTPYPCDYNYAKRSMHMTHRWLDRCINHLEKTPFEYDYEQTFFPIVQGSTYKDLRRQSAEYIANAGAEGNAIGGLSVGEPAEEMYGMTEVVCEILPEDKPRYLMGVGTPINILENIALGIDMFDCVMPTRNARNGMLFTAHGTINIKNKKWEDDFSQLDEMGTTFVDREYSKAYLRHLFAANEYLGKQIATIHNLGFYMWLVREARKHIIAGDFRQWKDIMVKQMDKRL

SEQ ID NO: 57222 - protein, 386 aa, Maribacter polysiphoniae
  REGION 1..386: note = tr|A0A316E1L7|A0A316E1L7_9FLAO Queuine tRNA-ribosyltransferase OS=Maribacter polysiphoniae; OX = 429344 GN=tgt PE=3 SV=1
MIIFATLNKKVQFTLEHTDAQSKARAGKMVTDHGVIETPIFMPVGTVASVKGVHQRELKEEINPDIILGNTYHLFLRPKTQILQQAGGLHKFMGWDRNILTDSGGYQVYSLSANRKIKEEGVKFKSHIDGSMHMFTPEKVMEIQRVIGADIIMAFDECTPYPCEYNYAKRSMHMTHRWLDRCMAHLDKTPFTYDFSQSFFPIVQGSTYKDLRIQSAEYIANAGAEGNAIGGLSVGEPAEEMYAMTEVVCDILPKDKPRYLMGVGTPINILENIALGIDMFDCVMPTRNARNGMLFTAHGTINIKNKKWEDDFSPIDEMGTTFVDKEYSKAYLRHLFAANEYLGKQIATIHNLGFYLWLVREARKHILAGDFTSWKNIMVKQMDKRL

SEQ ID NO: 57223 - protein, 376 aa, Maribacter sp.
  REGION 1..376: note = tr|A0A2G6QUX3|A0A2G6QUX3_9FLAO Queuine tRNA-ribosyltransferase OS=Maribacter sp. OX=1897614; GN = tgt PE=3 SV=1
MQFTLEHTDAQSKARAGKMVTDHGVVETPIFMPVGTVASVKGVHQRELREDINPDIILGNTYHLFLRPKTRILQQAGGLHKFMGWDRNILTDSGGYQVYSLSANRKIKEEGVKFKSHIDGSMHMFTPERVMEIQRVIGADIIMAFDECTPYPCDYDYAKRSMHMTHRWLDRCMAHLEKTPFAYDYSQSFFPIVQGSTYKDLRIRSAEYIANAGAEGNAIGGLSVGEPAGEMYAMTEVVCDILPEDKPRYLMGVGTPINILENIALGIDMFDCVMPTRNARNGMLFTAHGTMNIKNKKWEDDFSPIDEMGTTFVDKEYSKAYLRHLFAANEYLGRQIATIHNLGFYLWLVREARKHILAGDFTSWKHIMVKQMDKRL

SEQ ID NO: 57224 - protein, 383 aa, Maribacter sp.
  REGION 1..383: note = tr|A0A559NVE9|A0A559NVE9_9FLAO Queuine tRNA-ribosyltransferase OS=Maribacter sp. MAR_2009_72; OX = 1250050 GN=tgt PE=3 SV=1
MHLYLDNLKFTLHKTDAQSKARAGTMVTDHGVIETPIFMPVGTVASVKGVHQKELREEINPDIILGNTYHLFLRPKTDILKKAGGLHKFMGWDRNILTDSGGYQVYSLSANRKIKEEGVKFKSHIDGSMHMFTPENVMEIQRTIGADIIMAFDECTPYPCEYNYAKRSMHMTHRWLDRCIKHLEKTPFEYDYEQTFFPIVQGSTYKDLRRQSAEYIANAGAQGNAIGGLSVGEPAEEMYGMTEVVCEILPEDKPRYLMGVGTPINILENIALGIDMFDCVMPTRNARNGMLFTAHGTINIKNKKWEDDFSPLDEMGTTFVDREYSKAYLRHLFAANEYLGKQIATIHNLGFYMWLVREARRHIIEGDFKTWKDMMVKQMDKRL

SEQ ID NO: 57225 - protein, 383 aa, unidentified
  source 1..383: note = Maribacter spongiicola
  REGION 1..383: note = tr|A0A4R7KAL5|A0A4R7KAL5_9FLAO Queuine tRNA-ribosyltransferase OS=Maribacter spongiicola; OX = 1206753 GN=tgt PE=3 SV=1
MQLELESLKFTLHNTDLQSKARAGTIVTDHGTIETPIFMPVGTVASVKGVHQKELREEVNPDIILGNTYHLFLRPKTEILKKAGGLHKFMGWDRNILTDSGGYQVYSLSANRKIKEEGVKFKSHIDGSTHLFTPENVMEIQRVIGADIIMAFDECTPYPCEYNYAKRSMHMTHRWLDRCINHLEKIPFEYDYAQTFFPIVQGSTYKDLRRQSAEYIANAGAEGNAIGGLSVGEPAEEMYGMTEVVCEILPEDKPRYLMGVGTPINILENIALGIDMFDCVMPTRNARNGMLFTAHGTINIKNKKWEDDFSPIDEMGTTFVDHEYSKAYLRHLFAANEYLGKQIATIHNLGFYMWLVREARKHIIAGDFRTWKDMMVKQMDKRL

SEQ ID NO: 57226 - protein, 383 aa, Maribacter stanieri
  REGION 1..383: note = tr|A0A1I6IPY2|A0A1I6IPY2_9FLAO Queuine tRNA-ribosyltransferase OS=Maribacter stanieri OX=440514; GN = tgt PE=3 SV=1
MQLDLEILKFTLHNTDTQSKARAGTMVTDHGTIETPIFMPVGTVASVKGVHQKELREEVNPDIILGNTYHLFLRPKTEILKKAGGLHKFMGWDRNILTDSGGYQVYSLSANRKIKEEGVKFKSHIDGSMHLFTPENVMEIQRVIGADIIMAFDECTPYPCDYNYAKRSMHMTHRWLDRCINHLEKTPFEYDYEQTFFPIVQGSTYKDLRRQSAEYIANAGAEGNAIGGLSVGEPAEEMYGMTEVVCEILPEDKPRYLMGVGTPINILENIALGIDMFDCVMPTRNARNGMLFTAHGTINIKNKKWEDDFSPLDEMGTTFVDREYSKAYLRHLFAANEYLGKQIATIHNLGFYMWLVREARKHIIAGDFRAWKDIMVKQMDKRL

SEQ ID NO: 57227 - protein, 383 aa, Maribacter ulvicola
  REGION 1..383: note = tr|A0A1N6SPL2|A0A1N6SPL2_9FLAO Queuine tRNA-ribosyltransferase OS=Maribacter ulvicola OX=228959; GN = tgt PE=3 SV=1
MQLDIESLKFTLHNTDLQSKARAGTIVTDHGTIETPIFMPVGTVASVKGVHQKELREEVNPDIILGNTYHLFLRPKTEILKKAGGLHKFMGWDRNILTDSGGYQVYSLSGNRKIKEEGVKFKSHIDGSMHLFTPENVMEIQRVIGADIIMAFDECTPYPCEYNYAKRSMHMTHRWLDRCINHLEKTPFEYDYAQTFFPIVQGSTYKDLRRQSAEYIANAGAEGNAIGGLSVGEPAEEMYGMTEVVCEILPEDKPRYLMGVGTPINILENIALGIDMFDCVMPTRNARNGMLFTAHGTINIKNKKWEDDFSPIDEMGTTFVDREYSKAYLRHLFAANEYLGKQIATIHNLGFYMWLVREARKHIIAGDFRPWKDTMVKQMDKRL

SEQ ID NO: 57228 - protein, 376 aa, unidentified
  source 1..376: note = Maribacter vaceletii
  REGION 1..376: note = tr|A0A495E5A8|A0A495E5A8_9FLAO Queuine tRNA-ribosyltransferase OS=Maribacter vaceletii OX=1206816; GN = tgt PE=3 SV=1
MKFTLHHTDPLSKARAGTMVTDHGTIETPIFMPVGTVASVKGVHQKELREEIKPDIILGNTYHLFLRPKTPILHKAGGLHKFMGWDGNILTDSGGYQVYSLSSNRKIKEEGVKFKSHIDGSYHMFTPENVMEIQRTIGADIIMAFDECTPYPCDYKYAKRSMHMTHRWLDRCITHLDKTPFVYDYSQTFFPIVQGSTYKDLRRQSAEYIANAGAEGNAIGGLSVGEPAEEMYGMTEVVCEVLPEDKPRYLMGVGTPINILENIALGIDMFDCVMPTRNARNGMLFTSHGTINIKNKKWEDDFSMLDPEGTTFVDKEYTKAYLRHLFAANEYLGKQIATIHNLGFYMWLVREARKHILAGDFRVWKDAMVKQMDKRL

SEQ ID NO: 57229 - protein, 375 aa, Maribius pelagius
  REGION 1..375: note = tr|A0A1H8BGP1|A0A1H8BGP1_9RHOB Queuine tRNA-ribosyltransferase OS=Maribius pelagius OX=387096; GN = tgt PE=3 SV=1
MTRFSFDLHATDGAARTGTIHTPRGDIRTPAFMPVGTAATVKATLPESVRATGADILLGNTYHLMLRPTAERIDRLGGLHGFMNWDRPILTDSGGFQVMSLADLRKLTERGVTFKSHIDGSRHEITPERSMEIQRLLGSDIVMCFDECPALPADRDRIASSMRLSMRWAARSKDAFGDRPGHALFGIQQGGLEPDLREESAKALVDIGFDGYAVGGLAVGEGQEAMFGVLDYAPAQLPADKPRYLMGVGKPDDIVGAVKRGIDMMDCVLPSRSGRTGQAFTRRGVVNIKNARHADDPRPLDESCSCPACTGYSRAYLHHVFRAGEMISGMLLTWHNLHYFQEIMQGMRDAIAAGRFAAWEADFHATRAEGDIAPL

SEQ ID NO: 57230 - protein, 375 aa, Maribius salinus
  REGION 1..375: note = tr|A0A1M6AN84|A0A1M6AN84_9RHOB Queuine tRNA-ribosyltransferase OS=Maribius salinus OX=313368; GN = tgt PE=3 SV=1
MTRFSFDLHATDGAARTGTIHTPRGEIRTPAFMPVGTAATVKAMLPESVRATGADILLGNTYHLMLRPTAERIDRLGGLHGFMNWDRPILTDSGGFQVMSLADLRKLTERGVTFKSHIDGSRHEITPERSMEIQRLLGSDIVMCFDECPALPADRDRIASSMRLSMRWAARSKDAFGDRPGHALFGIQQGGLEPDLREESAKALVDIGFDGYAVGGLAVGEGQEAMFGVLDYAPAQLPADKPRYLMGVGKPDDIVGAVKRGIDMMDCVLPSRSGRTGQAFTRRGVVNIKNARHADDPRPLDESCSCPACTGYSRAYLHHVFRAGEMISGMLLTWHNLHYFQEIMQGMRDAIAAGRFAAWEADFHATRAEGDIAPL

SEQ ID NO: 57231 - protein, 380 aa, Maricaulis maris
  REGION 1..380: note = tr|A0A495D1D0|A0A495D1D0_9RHOB Queuine tRNA-ribosyltransferase OS=Maricaulis maris OX=74318; GN = tgt PE=3 SV=1
MTTFPYDIHATDGAARTGVLKTSRGDIRTPAFMPVGTAATVKALYMDQVRETGADIILGNTYHLMLRPGAERVKRLGGLHKFSTWQGPMLTDSGGFQVWSLSKLRKMTEEGVKFRSHIDGSEHNLTPERSIEIQADLLGADISMQLDECTPFGCSEKEARTSMELSIRWGQRSKAAFGTRDSQALFGIVQGSVFETLRRESAERLIETGYDGYAIGGLAVGEGFEKMCDVLDFTTPHLPSERPRYLMGVGKPIDLVEAVARGVDMFDCVLPTRSGRHGQAWSDHGPINIKRAEFAEDDSPLNPEIDCPASRDYSKAYLHHLFRAGEYLSAMLLSWHNIAYFQHLTARMRTAIAAGEFESFRKDFRAKWEAGQAEAAARAS

SEQ ID NO: 57232 - protein, 380 aa, Maricaulis maris
  REGION 1..380: note = tr|Q0ANH9|Q0ANH9_MARMM Queuine tRNA-ribosyltransferase OS=Maricaulis maris (strain MCS10); OX = 394221 GN=tgt PE=3 SV=1
MTTFPYEIHATDGAARTGVLKTSRGDIRTPAFMPVGTAATVKALYMDQVRETGADIILGNTYHLMLRPGAERVKRLGGLHKFSTWKGPMLTDSGGFQVWSLSKLRKMTEEGVKFRSHIDGSEHNLTPERSIEIQADLLGADISMQLDECTPFGCSEAEARTSMELSIRWGQRSKAAFGTRDSQALFGIVQGSVFENLRRESAERLIETGYDGYAIGGLAVGEGFEKMCDVLDFTTPHLPSERPRYLMGVGKPIDLVEAVARGVDMFDCVLPTRSGRHGQAWSDHGPINIKRAEFAEDDSPLNPEIDCPASRDYSKAYLHHLFRSGEYLSAMLLSWHNIAYFQHLTARMRAAIAAGEFEAFRREFRGKWEQGQAEAAERAG

SEQ ID NO: 57233 - protein, 380 aa, Maricaulis salignorans
  REGION 1..380: note = tr|A0A1G9PTW0|A0A1G9PTW0_9RHOB Queuine tRNA-ribosyltransferase OS=Maricaulis salignorans; OX = 144026 GN=tgt PE=3 SV=1
MSVFAYEIHATDGAARTGVLKTPRGDIRTPAFMPVGTAGTVKALYMDQVKETGADIILGNTYHLMLRPGAERVKRMGGLQKFSTWQGPILTDSGGFQVWSLSKLRKMNEQGVTFQSHIDGSKHHLSPERSIEIQADLLGADISMQLDECTAFGCTPAEAQASLELSLRWGQRSKDAFGSRDDQVLFGIVQGSVFEDLRRQSAEGLKEIGFDGYAIGGLAVGEGFEQMCDVLDFTTPHLPVERPRYLMGVGKPIDLVEAVARGVDMFDCVLPTRSGRHGQAWSDYGPINIKRAEFIEDDTPLAPEIDCPASRDYSKAYLNHLFKSGEYLSAMLISWHNIAYFEHLMARIRAAIAAGEYEAFRREFRAKWDQGIAEAATRSA

SEQ ID NO: 57234 - protein, 374 aa, Maricaulis sp.
  REGION 1..374: note = tr|A0A2D8BTL1|A0A2D8BTL1_9RHOB Queuine tRNA-ribosyltransferase OS=Maricaulis sp. OX=1486257; GN = tgt PE=3 SV=1
MTAFSFDIAATDGAARTGALRTTRGDIRTPAFMPVGTAGTVKALYMDQVREAGADIILGNTYHLMLRPGAERVKKLGGLHAFSRWSGPMLTDSGGFQVWSLAGLRKMTEEGVQFASHIDGSRHMLSPERSIEIQADLLGADISMQLDECTPFPCEKEAARASMELSLRWGKRSKEAFGERETQNLFGIVQGSVYPDLRRESAERLIETGFDGYAVGGLAVGEGFEMMCSVLESVVPHLPADRPRYLMGVGKPIDLVEAVARGIDMFDCVMPTRSGRHGQAWSDYGPVNLKAARFAEDAAPLDASLDCPASRDYSRAYIHHLVRAGEYLAAMLLSWHNIAYYQSLMARMRAAIADGRFEDFRREFNARWDSGAFE

SEQ ID NO: 57235 - protein, 380 aa, Maricaulis sp.
  REGION 1..380: note = tr|A0A1Q8FJS9|A0A1Q8FJS9_9RHOB Queuine tRNA-ribosyltransferase OS=Maricaulis sp. W15 OX=1772333; GN = tgt PE=3 SV=1
MTTFPYEIHATDGAARTGVLKTSRGDIRTPAFMPVGTAATVKALYMDQVRETGADIILGNTYHLMLRPGAERVKRLGGLHKFSTWQGPMLTDSGGFQVWSLSKLRKMTEEGVKFRSHIDGSEHNLTPERSIEIQADLLGADISMQLDECTPFGCSEKEARTSMELSIRWGQRSKAAFGPRDSQALFGIVQGSVFENLRRESAERLIETGYDGYAIGGLAVGEGFEKMCDVLDFTTPHLPSERPRYLMGVGKPIDLVEAVARGVDMFDCVLPTRSGRHGQAWSDHGPINIKRAEFAEDDSPLNPEIDCPASRDYSKAYLHHLFRAGEYLSAMLLSWHNIAYFQHLTARMRTAIAVGEFEAFRRDFRAKWEAGQAEAAARAS

SEQ ID NO: 57236 - protein, 367 aa, Marichromatium gracile
  REGION 1..367: note = tr|A0A4V2WA88|A0A4V2WA88_MARGR Queuine tRNA-ribosyltransferase OS=Marichromatium gracile OX=1048; GN = tgt PE=3 SV=1
MEFELLARDGLARRARLHFPRGTVETPAFMPVGTYGTVKAMSPEELRELGAEIVLGNTFHLMLRPGTEVIRRHGDLHDFMHWERPILTDSGGFQVFSLGELRKITEEGVHFRSPVDGSRVFMSPEVSMQVQRELGSDIVMIFDECTPYPADEAQARASMELSLRWAARSREAHGDNPAALFGIVQGGMHEGPRADSLEGLMRIGFDGYAIGGLSVGEPEADRLRVLDFLSGKLPVDHPRYLMGVGTPEDIVAAVCRGVDMFDCVMPTRNARNGYLFTRHGTIKIRNAAHRTDERPLDPECSCYTCRHYSRAYLHHLDRCKEILGSRLATIHNLHYYQELMAGLRAAIAAGRLAEFVAEFKALRGLAD

SEQ ID NO: 57237 - protein, 367 aa, Marichromatium purpuratum
  REGION 1..367: note = tr|W0E241|W0E241_MARPU Queuine tRNA-ribosyltransferase OS=Marichromatium purpuratum 984; OX = 765910 GN=tgt PE=3 SV=1
MEFELLARDGLARRARLHFPRGTVETPAFMPVGTYGTVKAMSPEELRELGAEIVLGNTFHLMLRPGTEVIRRHGDLHDFMHWERPILTDSGGFQVFSLGELRKITEEGVHFRSPVDGSRVFMSPEVSMQVQRELGSDIVMIFDECTPYPADEAQARASMELSLRWAARSREAHGDNPAALFGIVQGGMHEGPRADSLEGLMRIGFDGYAIGGLSVGEPEADRLRVLDFLSDKLPTDHPRYLMGVGTPEDIVAAVCRGVDMFDCVMPTRHARNGYLFTRHGTIKIRNAVHRTDERPLDPACDCYTCRHYSRAYLHHLDRCKEILGSRLATIHNLHYYQELMAGLRAAIADGRLVEFVAEFKALRAQTD

SEQ ID NO: 57238 - protein, 369 aa, unidentified
  source 1..369: note = Unknown
  REGION 1..369: note = tr|A0A0C1UHU1|A0A0C1UHU1_9ACTN Queuine tRNA-ribosyltransferase OS=marine actinobacterium MedAcidi-G1 OX=1550399 GN=tgt PE=3 SV=1
MRADFDLENKDGEARTGIVRLATGSFKTPCFMPVGTRGSVRHLSSLDLKDLGAQVVLANTYHLMLRPGAEIVKNAGGIGSFANWKGLTLTDSGGYQIFSLAPKIDEEGATFRSVYDGSFHKLTPESSAEIQADIGADIQMVLDICPALPAPEETIKESVEMTAAWAERGRKTFIDHPDASSRQSQFGIVQGGINSALRIESARRTLEIGFDGYAIGGLSVGEGRDEMLDSVSVVTDLIPESQPRYFMGLGDPVGLVNVVERGVDMFDCVLPTRLARHGTVLTSEGRINIGNARFAKDDKPLDPGFPQSPGNHWSRSYLRHLMATDEPTGARILTLHNLAWLFNFVERMRTSINENEFDNFRKETLDIWS

SEQ ID NO: 57239 - protein, 369 aa, unidentified
  source 1..369: note = Unknown
  REGION 1..369: note = tr|A0A0C1US03|A0A0C1US03_9ACTN Queuine tRNA-ribosyltransferase OS=marine actinobacterium MedAcidi-G2B OX=1550401 GN=tgt PE=3 SV=1
MKALSNIIAKDGKARLSEVSLANGKFQTPCFMPVGTRGAVKHLSSLDMKDLNAEIILGNTYHLMLRPGADLIKKHGGLGKFANWGGLTLTDSGGYQIFSLKPKVEDEGATFRSIYDGSSHHLTPESASSIQADLGADIQMVLDVCSALPAERNVLKDAVDRTALWAERARTAFLTHPTANEKQSQFGIVQGGTDAPLRIESTEKTLEVGFDGYAIGGLSVGEGRSEMLEPVEVVTDLLPEDQPRYFMGLGDPVGIVEVVARGVDMFDCVLPTRLARHGTVLTSTGRINLRNACFIGDEQPLDPTFENSPASNWSRSYLRHLLITNEPTAPRILTLHNLAWMFDFVFKLRKSIADGEFEEFHKQTLEIWG

SEQ ID NO: 57240 - protein, 376 aa, unidentified
  source 1..376: note = Unknown
  REGION 1..376: note = tr|A0A1Q3GHT9|A0A1Q3GHT9_9BACT Queuine tRNA-ribosyltransferase OS=marine bacterium AO1-C; OX = 1905359 GN=tgt PE=3 SV=1
MKFKLQANDTDSSARAGEITTAHGQIQTPIFMPVGTAGTVKAVHQRELKEDIQAQIILGNTYHLYLRPGLDILKKFGGLHKFNGWDRPILTDSGGYQVYSLSDMRKIKEEGVTFQSHIDGSKHQFSPEIVMDIQRAIGADIIMAFDECTPYPCEYDYAKKSMEMTHRWLKRCCDRFDSTEPLYGYEQTLFPIVQGSTYKDLRKQSAEVIASFERDGNAIGGLSVGEPHEMMYESTELVCGILPKDKPRYLMGVGTPENILECIALGVDMFDCVMPTRNARNGMLFTTQGIINIKNKKWENDETPIDPMLGGYASTFYSKGYLRHLVQSKEILAAQIASIHNLSFYLWLVGQAREQILAGTFLPWKNKMVKQVMQRL

SEQ ID NO: 57241 - protein, 338 aa, unidentified
  source 1..338: note = Unknown
  REGION 1..338: note = tr|B7RY80|B7RY80_9GAMM Queuine tRNA-ribosyltransferase OS=marine gamma proteobacterium HTCC2148 OX=247634 GN=tgt PE=3 SV=1
MPVGTYGTVKGMLPRDIHEIGAEIILGNTFHLWLRPGTDIIEQHGDLHDFMHWNGPILTDSGGFQVFSLGDMRKISEEGVKFQSPVDGSKVFLDPEKSMSIQRKLGSDIVMIFDECTPYPATEQEASDSMELSLRWAARSKTAHADSSAALFGIVQGGMYSHLRAQSLAGLKEIGFDGYAIGGLSVGEPKDEMMSVLEVMQPLLPEDKPRYLMGVGTPADLLEGVRRGVDMFDCVMPTRNARNGNIFTSHGALKLRNARHKTSTLPLDEECGCYTCKNFSRAYLHHLDKCNEILGSQLNTIHNLYFYQQHMAGIREAIEQGRLEQFADQFYAEQERGV

SEQ ID NO: 57242 - protein, 391 aa, unidentified
  source 1..391: note = Unknown
  REGION 1..391: note = tr|A0YHN6|A0YHN6_9GAMM Queuine tRNA-ribosyltransferase OS=marine gamma proteobacterium HTCC2143 OX=247633 GN=tgt PE=3 SV=1
MEQDFMSRECFMQFEIDTSDEQARRGRLTFPRGVVETPAFMPVGTYGTVKGMLPRDIKEIGADIILGNTFHLWLRPGTEVIKGHGANGSGTLHDFMGWDKPILTDSGGFQVFSLGAMRKISEEGVAFRSPIDGSKVFLDPEKSMQVQRDLGSDIVMIFDECTPYPATHQEAKDSMELSLRWAKRSQSAHGDNPSALFGIIQGGMYEDLRNQSMAGLVDLDFDGYAIGGLSVGEPKDEMMKVLDVITPGMPANKPRYLMGVGTPQDLLEGVMRGVDMFDCVMPTRNARNAHIFTSQGVLKLRNAKHRHSTEALDPNCDCYTCKNFSRGYLHHLDKCKEMLGGQLNTIHNLRFYQRHMSHIRTAIEQQQLNTYAAEFYEAQGVSASNRNPVVQ

SEQ ID NO: 57243 - protein, 375 aa, unidentified
  source 1..375: note = Marinibacterium profundimaris
  REGION 1..375: note = tr|A0A225NWW6|A0A225NWW6_9RHOB Queuine tRNA-ribosyltransferase OS=Marinibacterium profundimaris; OX = 1679460 GN=tgt PE=3 SV=1
MSTFSFSLAATDGRARTGTITTPRGEIRTPAFMPVGTAATVKAMLPESVRATGADILLGNTYHLMLRPTAERIDRLGGLHRFMNWERPILTDSGGFQVMSLAGLRKLTEQGVTFKSHIDGSKHELTPERSMEIQRLLGSDIVMCFDECPALPAEENVVAESMRMSMRWAARSREAFGDRPGHALFGIQQGGVTEELRGESAEALTKIGFDGYAVGGLAVGEGQEAMFGVLDYAPEMLPQDKPRYLMGVGKPDDIVGAVARGIDMMDCVLPSRSGRTGQVFTRRGVLNIKNARHMDDPRPLDEACSCPACLNYSRAYLHHVFRSQEIISSMLLTWHNLHYFQEIMEGMRGAISAGRFEAWQAEFHATRAEGDIEPL

SEQ ID NO: 57244 - protein, 372 aa, unidentified
  source 1..372: note = Mariniblastus fucicola
  REGION 1..372: note = tr|A0A5B9PA42|A0A5B9PA42_9PLAN Queuine tRNA-ribosyltransferase OS=Mariniblastus fucicola; OX = 980251 GN=tgt PE=3 SV=1
MFRYELLHVDQNCGARLGRLHTPRGVIELPTFMPVGTCGTVKGMTTDMVEATGSQILLGNTYHLHLRPGESVVKELGGLHKFMGWDKPILTDSGGFQVFSLAQRTVVDEQGATFRSHIDGSKITITPEISVQIQQDLGSDIAMVFDHVIELPSSREKVKDAMDRSIRWAERCRDAHTLESQVQFGILQGGLDESLRIECAKELRQLDFPGYAIGGLSVGEPPPEMYRIIEATTPHMPEDRPRYLMGVGRPEDLLQAVLRGVDMFDCVMPTRNGRNAMAFTDDGFLKMKNAIHERDPRPIQAGMHTPHAELSRGYIRHLFMAKEMLAGMLVSMHNIGYYQRLMTQAREAIAADRFLDFFEERMAGWAGGKSSD

SEQ ID NO: 57245 - protein, 377 aa, unidentified
  source 1..377: note = Marinicauda algicola
  REGION 1..377: note = tr|A0A4V3RYC1|A0A4V3RYC1_9RHOB Queuine tRNA-ribosyltransferase OS=Marinicauda algicola OX=2029849; GN = tgt PE=3 SV=1
MSAFLFEIAAVDGKARTGQLVTPRGAIRTPAFMPVGTAATVKALYPEQVRQAGADIILGNTYHLMLRPGAERVQRLGGLHRFMRWDGPILTDSGGFQVWSLAQLRKMEEEGVTFKSHIDGTSHKLTPERSIEIQADLLGADISMQLDECTPFPCPRQEAESSMELSLRWAKRSKEAFGDREAQNLFGIVQGSTFEDLRQRSAQGLVETGFDGYAVGGLAVGEGFETMCEVLNYTVPELPHERPRYLMGVGKPIDLVEAVARGIDMFDCVMPTRSGRHGQAWSDYGPVNLKNAQFAEDSDPLDPAIDCPASRDYSKAYLHHLVRAGEYLAAMLLSWHNVAYYEHLMARMRAAIAKGEFDSFRRDFNDRWAEGRKSRAE

SEQ ID NO: 57246 - protein, 377 aa, unidentified
  source 1..377: note = Marinicauda pacifica
  REGION 1..377: note = tr|A0A4S2HEM5|A0A4S2HEM5_9RHOB Queuine tRNA-ribosyltransferase OS=Marinicauda pacifica OX=1133559; GN = tgt PE=3 SV=1
MTHFPFEIAAVDGAARTGRIQTPRGDIRTPAFMPVGTAATVKALYPEQVSEAGADIILGNTYHLMLRPGAERVHRLGGLHRFMRWSGPILTDSGGFQVWSLSKLRQMSEEGVTFKSHIDGSAHSLTPERSIEIQADLLGADISMQLDECTAFPSPREEAERSMEMSLRWAKRSKAAFGERETQNLFGIVQGSTFEDLRRRSAEGLMEIGFDGYAIGGLAVGEGFEAMCEVLDFTTPVLPLDRPRYLMGVGKPVDLVESVARGVDMFDCVMPTRSGRHGQAWSDYGPVNLKNARFAEDDTPLNAAIACPASRDYSRAYIHHLVRAGEYLGSMLLSWHNIAYYEDLMARMRTAIAEGEFEAFRRGFLERWHSNEKDRAE

SEQ ID NO: 57247 - protein, 376 aa, unidentified
  source 1..376: note = Marinicauda sp.
  REGION 1..376: note = tr|A0A2U2BRI9|A0A2U2BRI9_9RHOB Queuine tRNA-ribosyltransferase OS=Marinicauda sp. WD6-1; OX = 2135793 GN=tgt PE=3 SV=1
MASFDFPVSAVDGAARTGRLITSRGEIRTPAFMPVGTAATVKALYPEQVRAAGADIILGNTYHLMLRPGAERIARLGGLHRFMGWDGPILTDSGGFQVWSLAKLRKMSEQGVEFASHIDGSKHMLTPERSIEIQADLLGADISMQLDECTAFGSDRDEAAKSMELSLRWGKRSKDAFGERESQALFGIVQGSVYEDLRAASAEALVETGYDGYAIGGLAVGEGFETMCAVLDHTTPRLPADRPRYLMGVGKPIDLVESVARGVDMFDCVMPTRSGRHGQAWSDYGPVNLKNARFAEDPEPLDASIDCPASRDYAKAYIHHLVRANEYLGAMLLSWHNVAYYEDLMARMRAAIAEGAFEAFRRDFLSRWEAGPAAGR

SEQ ID NO: 57248 - protein, 375 aa, unidentified
  source 1..375: note = Marinicaulis flavus
  REGION 1..375: note = tr|A0A2S7K3N3|A0A2S7K3N3_9PROT Queuine tRNA-ribosyltransferase OS=Marinicaulis flavus OX=2058213; GN = tgt PE=3 SV=1
MSEGFSFTVSATDAGARAGVIETPRGDIRTPAFMPVGTAGTVKAMLPENVRATGADIVLGNTYHLMLRPTAERVAALGGLHHFMNWPHPILTDSGGFQVMSLSKLRKLTEEGVSFQSHIDGSKHMLTPERSIEIQCLLGADIQMQLDECPAIPIEEEKARTSMLLSVRWAERSKRAFEEKSQPGQALFGIVQGANYEALRRESLEKLMEIDFPGYSIGGLAVGEGREEMFRVLDFTTPHMPAQKPRYLMGVGKPADIVGAVARGVDMFDCVAPTRSGRHGQAWTKAGAINIKNASFADDPEPLDPESPCPASRDYSKAYLHHLFRAGEYLGPMLLTWHNLQYYQELMAGMRAAIATGDFAGFVAEFRAATGETVL

SEQ ID NO: 57249 - protein, 371 aa, Marinicella litoralis
  REGION 1..371: note = tr|A0A4V3DHI6|A0A4V3DHI6_9GAMM Queuine tRNA-ribosyltransferase OS=Marinicella litoralis OX=644220; GN = tgt PE=3 SV=1
MKFDLKKQDGLARRGELTFERGTVQTPCFMPVGTYGTVKAMSPEEVKGIGAEIVLGNTFHLMLRPGTEVIEAHGDLHDFMGWDKPILTDSGGFQVFSLAKRRKITEEGVTFASPVDGSTVFMGPEESMEVQRKLGSDIVMIFDECTPYPASHEEAKVSMELSLRWAQRSKNAFADNPNALFGIVQGGMYDDLRKISAQGLADIDFHGFAIGGLSVGEPKDLREQVLKTTTPLLPADKPRYLMGVGKPEDILEAVLLGVDMFDCVMPTRNARNGYLFTWDGVVKIRNAKHQFDATPLDKDCGCYTCQHFSKSYLRHLDKCGEMLGSRLNTIHNLYFYQEFMQKIREAIDTDDLELFADNYYRRIESHKKSSS

SEQ ID NO: 57250 - protein, 376 aa, unidentified
  source 1..376: note = Marinifilaceae bacterium
  REGION 1..376: note = tr|A0A434AVI8|A0A434AVI8_9BACT Queuine tRNA-ribosyltransferase OS=Marinifilaceae bacterium T3-2 S1-C OX=2487017 GN=tgt PE=3 SV=1
MDFKLYKTDPKSSARTGELTTDHGKIQTPIFMPVGTLGSVKGVHQRELKEDINAEIILGNTYHLYLRPGLDVLEQAGGLHKFNGWDRPILTDSGGFQVFSLAENRKLTEEGAIFRSHIDGSKHSFTPEGVMDIQRTIGADIIMAFDECPPGTSNYEYSKNSLELTQRWLERCVKRFDETESKYGYSQTLFPIVQGCVYKDLRIKAAEHAASLNREGYAIGGLAVGEPVEDMYSMIEVVNEILPENKPRYLMGVGTPVNILEGIARGVDMFDCVMPTRNGRNGMMFTSEGTINIKNKKWANDFSVIDPNGTSYVDKFYSKAYVRHLIHSGELLGSQICSIHNLAFYLWLVREAREQINLGTFAAWKDIMVKKLSIRL

SEQ ID NO: 57251 - protein, 376 aa, unidentified
  source 1..376: note = Marinifilum breve
  REGION 1..376: note = tr|A0A2V3ZSE1|A0A2V3ZSE1_9BACT Queuine tRNA-ribosyltransferase OS=Marinifilum breve OX=2184082; GN = tgt PE=3 SV=1
MDFKLHKTDPKSSARTGELTTDHGKIQTPIFMPVGTLGSVKGVHQRELRDDINAEIILGNTYHLYLRPGLDILEKAGGLHKFNGWERPILTDSGGFQVFSLADNRKLTEEGAMFRSHIDGSKHFFTPENVMDIQRTIGADIIMAFDECPPGTSTYEYAKNSLELTQRWLERCVKRFDETDPKYGYSQTLFPIVQGCVYDDLRIKAAEHAASLDREGYAIGGLAVGEPVEEMYSMIEVVNDVLPEDKPRYLMGVGTPVNILEAISRGVDMFDCVMPTRNGRNGMIFTSEGIINIKNKKWADDFSPIDPNGTSFVDSAYSKAYVRHLVHSGELLGSQICSIHNLAFYLWLVREAREQINAGTFAAWKDIMVKKLATRL

SEQ ID NO: 57252 - protein, 376 aa, unidentified
  source 1..376: note = Marinifilum flexuosum
  REGION 1..376: note = tr|A0A419WWZ8|A0A419WWZ8_9BACT Queuine tRNA-ribosyltransferase OS=Marinifilum flexuosum; OX = 1117708 GN=tgt PE=3 SV=1
MDFKLHKTDPKSSARTGELTTDHGKIQTPIFMPVGTLGSVKGVHQRELRDDINAEIILGNTYHLYLRPGLDILEKAGGLHKFNGWERPILTDSGGFQVFSLADNRKLTEEGAMFRSHIDGSKHFFTPENVMDIQRTIGADIIMAFDECPPGTSTYEYAKNSLELTQRWLERCVKRFDETDPKYGYSQTLFPIVQGCVYDDLRIKAAEHAASLNREGYAIGGLAVGEPVEEMYSMIEVVNDVLPEDKPRYLMGVGTPVNILEAISRGVDMFDCVMPTRNGRNGMIFTSEGIINIKNKKWADDFSPIDPNGTSFVDSAYSKAYVRHLIHSGELLGSQICSIHNLAFYLWLVREAREQINAGTFAAWKDIMVKKLATRL

SEQ ID NO: 57253 - protein, 378 aa, Marinifilum sp.
  REGION 1..378: note = tr|A0A4T2AD79|A0A4T2AD79_9BACT Queuine tRNA-ribosyltransferase OS=Marinifilum sp. JC120; OX = 2302941 GN=tgt PE=3 SV=1
MSEEKKKPGNFTVHATDGNARRGTLMTAHGEIQTPVYMPVGTQGAVKAVSPRDLHEINSQIILGNTYHLYLRPGDELIARRGGLHKFSNWDKPILTDSGGFQVFSLESIRKITEQGVEFRSYIDGSKHFFSPEKVISIQNNIGSDIMMVLDECVGYGHDRDYTAKSLEMTTRWAKRCRDAYPVGSGDQLMFGIVQGGFHKDLREVSLEQLSEIPFEGYAIGGLSVGEPIPDMYDILQHIGPKLPADKPRYLMGVGTPLDILEGIANGVDMFDCVLPTRNARNGTLYTSQGKVNIKRAQYREDDSPLDPNCDCYTCRNFSKAYLRHLYTAKELLSSQLNSIHNLRFFLKLTEEAREAIEKGTFDDLRKKYEAVYEPVVR

SEQ ID NO: 57254 - protein, 376 aa, Mariniflexile fucanivorans
  REGION 1..376: note = tr|A0A4R1R993|A0A4R1R993_9FLAO Queuine tRNA-ribosyltransferase OS=Mariniflexile fucanivorans; OX = 264023 GN=tgt PE=3 SV=1
MKFELKAKDTQSKARAGTITTDHGTIETPIFMPVGTVGTVKGVHQRELKNDINPDIILGNTYHLYLRPQTDIIEKAGGLHKFMNWDRNILTDSGGYQVYSLSANRKIKEEGVKFKSHIDGSYHTFTPENVMEIQRTIGADIIMAFDECTPYPCDYNYAKRSMHMTHRWLDRCINHLEKTPLKYDYNQAFFPIVQGSTYKDLRKQSAEYIANAGAFGNAIGGLSVGEPAEEMYAMTEIVTAILPENKPRYLMGVGTPINILENIALGIDMFDCVMPTRNARNGMLFTAHGTINIKNKKWEADFSPVDAMGITFVDTEYTKAYLRHLFTVNELLGKQIATIHNLGFYLWLVREARKHILAGDFTTWKDQMVKQMDNRL

SEQ ID NO: 57255 - protein, 376 aa, Mariniflexile sp.
  REGION 1..376: note = tr|A0A385BJ67|A0A385BJ67_9FLAO Queuine tRNA-ribosyltransferase OS=Mariniflexile sp. TRM1-10; OX = 2027857 GN=tgt PE=3 SV=1
MKFELKAKDTQSKARAGTITTNHGVIETPIFMPVGTVGTVKGVHQRELKEDINPDIILGNTYHLYLRPQTDIIEKAGGLHRFMNWDRNILTDSGGYQVYSLSANRKIKEEGVKFKSHIDGSYHTFTPENVMEIQRSIGADIIMAFDECTPYPCDYKYAKRSMHMTHRWLDRCINHLEKTPLKYDYDQAFFPIVQGSTYKDLRQQSAEYIANAGAVGNAIGGLSVGEPAEEMYAMTEVVTEILPEDKPRYLMGVGTPINILENIALGIDMFDCVMPTRNARNGMLFTAHGTINIKNKKWEADFSPVDDMGITFVDTEYTKAYLRHLFTVNELLGKQIATIHNLGFYLWLVREARKHILAGDFKTWKDQMVKQMDNRL

SEQ ID NO: 57256 - protein, 376 aa, Marinilabilia salmonicolor
  REGION 1..376: note = tr|A0A2T0XA67|A0A2T0XA67_9BACT Queuine tRNA-ribosyltransferase OS=Marinilabilia salmonicolor; OX = 989 GN=tgt PE=3 SV=1
MQFTLEKTDDQTAARAGEVVTDHGNIPTPVFMPVGTVGSVKGIHVNDLKEEVKAHIILGNTYHLYLRPGLEVLEQAGGLHRFNAWDKPILTDSGGFQVFSLSDKRKLTAEGAEFQSHLDGSRHLFTPENVVDIQRTIGADIIMAFDECPPGDADYKYALQSMELTHKWLKRGLDRFDTTDPKYGYSQTFFPIVQGAGYADLRRKSAEYIASFNREGNAIGGLAVGEPEDVMYEMIEVVNEILPEDKPRYLMGVGTPVNLLEAISRGVDMFDCVMPTRNGRNGMLFTSEGIINIRNEKWKNDFSPVDPDGHCSFDTIYSKAYLRHLFISREMLGPQVASIHNLSFYLWLVGEARRRILDGTFSGWKDQMVKQLARRL

SEQ ID NO: 57257 - protein, 376 aa, Marinilabilia sp.
  REGION 1..376: note = tr|A0A2U2B8C9|A0A2U2B8C9_9BACT Queuine tRNA-ribosyltransferase OS=Marinilabilia sp. WTE; OX = 2162893 GN=tgt PE=3 SV=1
MQFTLEKTDNQTSARAGEIITDHGKIPTPVFMPVGTVGSVKGIHVKDLEEEVKAHIILGNTYHLYLRPGLDVLKQAGGLHRFNGWNRPILTDSGGFQVFSLSDKRKLSHEGAEFRSHLDGSKHMFTPENVVDIQRVIGADIIMAFDECPPGDSDFKYAFQSMELTHKWLKRGIERFDSTDPVYDYSQTFFPIVQGGSFPELRRKSAEYIASFNREGNAIGGLAVGEPEEVMYEMVEVVNDILPEDKPRYLMGVGNPVNILEAISRGVDMFDCVMPTRNGRNGMLFTSRGIINIKNEKWKADFSPIDPDGHCSFDTLYSKSYLRHLFVSREMLGPQIASIHNLSFYLWLVTEARRQIQNDTFAAWKDGMVKQLARRL

SEQ ID NO: 57258 - protein, 376 aa, unidentified
  source 1..376: note = Marinilabiliaceae bacterium
  REGION 1..376: note = tr|A0A359FXG8|A0A359FXG8_9BACT Queuine tRNA-ribosyltransferase OS=Marinilabiliaceae bacterium; OX = 2053574 GN=tgt PE=3 SV=1
MEFVLQKSDNKTKARAGKLTTDHGEIQTPVFMPVGTLGSVKGVHMKDMEEEVKASIILGNTYHLYLRPGLEVLKKAGGLHRFNSWKRPILTDSGGFQVFSLSHRRKLSEEGAEFQSHIDGSRHFFSPEGVVDIQRTIGADIIMAFDECPPGDSDYKYAKASMELTHRWLKRGIDRFDGTEPLYSYNQTFFPIVQGAGFKDLRRQSAEYIASFGRDGNAIGGLAVGEPEDVMYEMIEVVNEILPSDKPRYLMGVGTPANILEAISLGVDMFDCVMPTRNGRNGMLFTARGIINIKNEKWKKDYSPMDPDGHCEADLRYSRAYLRHLFIAKEMLGPQLASLHNLSFYLWLVSEARAQILGGKFFEWKERMLKQLSQRL

SEQ ID NO: 57259 - protein, 376 aa, unidentified
  source 1..376: note = Marinilabiliaceae bacterium
  REGION 1..376: note = tr|A0A4Q8S1D5|A0A4Q8S1D5_9BACT Queuine tRNA-ribosyltransferase OS=Marinilabiliaceae bacterium JC017 OX=2234116 GN=tgt PE=3 SV=1
MKFDLQYTDGLSEARAGKITTDHGEIQTPIFMPVGTVGSVKGVHFRDLKEDIKAQIILGNTYHLYLRPGMEVIKAAGGLHKFNGWDRPLLTDSGGYQVFSLSANRKLKEHGAEIRSHLDGSKHIFTPENVVDIQRTIGADIIMAFDECTPGTADFKYAKNSMELTHRWLQRGITRFDETDPHYGHSQTFFPIVQGGVYPELRKQSAEFIASMGREGNAIGGLSVGEPAEVMYEMIEVVHPILPKDKPRYLMGVGTPQNILEAIARGVDMFDCVMPSRNGRNGMLFTRNGIMNMKNEKWKNDFSPVDPDGPSYVDKHYTKAYLRHLFVSKELLAMQIASIHNLAFYLWLVTEARKHIIEGDFTSWKNQMVKQVSTRL

SEQ ID NO: 57260 - protein, 376 aa, unidentified
  source 1..376: note = Marinilabiliales bacterium
  REGION 1..376: note = tr|A0A2J6I063|A0A2J6I063_9BACT Queuine tRNA-ribosyltransferase OS=Marinilabiliales bacterium; OX = 2053303 GN=tgt PE=3 SV=1
MKYSLQATDPKGKARAGTIETDHGKIETPIFMPVGTAATVKAIHQRDIYDDVKAQIILGNTYHLYLRPGLDILQKAGGLHKFNGWHKPILTDSGGFQVYSLSGMRKLTEEGVKFQSHIDGSYHIFTPERVMDIQRVIGADIIMAFDECTPYPCDYEYAKKSMGLTHRWLERCVSHLNSTEPVYGHTQSLFPIVQGSTYRDLRAQSAEFIASQGADGNAIGGLAVGEPAEMMYEMIDLVNGILPQEKPRYLMGVGTPVNILESIALGVDMFDCVMPTRNGRNGMLFTSEGIINIKNKKWEDDFSPVDPQGTSFVDSQYSKAYLRHLFVAGERLGPMIASLHNLAFYLELVTQARAHIIDGDFTEWKNMMVPKLSNRL

SEQ ID NO: 57261 - protein, 376 aa, unidentified
  source 1..376: note = Marinilabiliales bacterium
  REGION 1..376: note = tr|A0A359FS13|A0A359FS13_9BACT Queuine tRNA-ribosyltransferase OS=Marinilabiliales bacterium; OX = 2053303 GN=tgt PE=3 SV=1
MKFKLLKTDTKTNARLGVITTEHGQIQTPIFMPVGTVGSIKGVHQLEVKNDIKAQIILGNTYHLYLRPGIELLKQAGGLHKFMNWDLPILTDSGGYQVFSLSDNRKLTKEGAKFSSHIDGSKHIFTPENVVDIQRVIGADIMMAFDECPPGTADYKYASHSLDLTMQWLKRGLKRFDETEPLYGHSQTFFPIVQGGTYSDLRKKAANMIAELQREGNAIGGLSVGEPTEVMYEMTEVVNAILPADKPRYLMGVGTPVNILEGISRGVDMFDCVMPTRNGRNGMLFTSGGIINIKNKKWENDFSAIDPKGTSYVDSYYSKAYLRHLFVAKELLGPQVASIHNLAFYLWLVNEARTKIEDGSFSEWKDGMVKKLSSRL

SEQ ID NO: 57262 - protein, 381 aa, Marinilactibacillus piezotolerans
  REGION 1..381: note = tr|A0A1I4ABL0|A0A1I4ABL0_9LACT Queuine tRNA-ribosyltransferase OS=Marinilactibacillus piezotolerans OX=258723 GN=tgt PE=3 SV=1
MIDHPVKYHLEKKEKHTGARLGKIETPHGTFETPMFMPVGTLASVKTMAPEELEEMGAGIILSNTYHLWLRPGEDIVDEAGGLHEFMNWDRGILTDSGGFQVFSLSDMRDIKEEGVHFRSHLDGSKLFLSPEKAIQIQNKLGSDIMMSFDECPPFDESYDYVKKSVERTSRWAERGLKAHEKLNKQGLFGIVQGAGFEDLRKQSAKDLVSMDFPGYSIGGLSVGEPKKEMYRVLDFTTPLLPENKPRYLMGVGTPDALIEGVIRGIDMFDCVLPTRIARNGTTMTSKGRVVIKNAEYARDYRPLDENCNCYTCRNYSRAYIRHLIKSDETFGLRLTSYHNLYFLLDLMKKVRQAIREDNLLEFKESFFEEYGYNKPNPKNF

SEQ ID NO: 57263 - protein, 381 aa, Marinilactibacillus psychrotolerans
  REGION 1..381: note = tr|A0A511H2U1|A0A511H2U1_9LACT Queuine tRNA-ribosyltransferase OS=Marinilactibacillus psychrotolerans OX=191770 GN=tgt PE=3 SV=1
MIDHPVKYHLEKKEKHTGARLGKIETPHGTFETPMFMPVGTLASVKTMAPEELEEMGAGIILSNTYHLWLRPGEDIVDEAGGLHEFMNWDRGILTDSGGFQVFSLSDMRDIKEEGVHFRSHLDGSKLFLSPEKAIQIQNKLGSDIMMSFDECPPFDESYDYVKKSVERTSRWAERGLNAHEKLNKQGLFGIVQGAGFEDLRKQSAKDLVSMDFSGYSIGGLSVGEPKKEMYRVLDFTTPLLPENKPRYLMGVGTPDALIEGVIRGVDMFDCVLPTRIARNGTTMTSKGRVVIKNAEYARDYRPLDEKCNCYTCRNYSRAYIRHLIKSDETFGLRLTSYHNLYFLLDLMKKVRQAIREDNLLEFKERFFEEYGYNKPNAKNF

SEQ ID NO: 57264 - protein, 381 aa, Marinilactibacillus psychrotolerans
  REGION 1..381: note = tr|A0A1R4JDC3|A0A1R4JDC3_9LACT Queuine tRNA-ribosyltransferase OS=Marinilactibacillus psychrotolerans 42ea OX=1255609 GN=tgt PE=3 SV=1
MIDHPVKYHLEKKEKHTGARLGKIETPHGTFETPMFMPVGTLASVKTMAPEELEEMGAGIILSNTYHLWLRPGEDIVDEAGGLHEFMNWDRGILTDSGGFQVFSLSDMRDIKEEGVHFRSHLDGSKLFLSPEKAIQIQNKLGSDIMMSFDECPPFDESYDYVKKSVERTSRWAERGLNAHEKLNKQGLFGIVQGAGFEDLRKQSAKDLVSMDFSGYSIGGLSVGEPKKEMYRVLDFTTPLLPENKPRYLMGVGTPDALIEGVIRGVDMFDCVLPTRIARNGTTMTSKGRVVIKNAEYARDYRPLDEKCNCYTCRNYSRAYIRHLIKSDETFGLRLTSYHNLFFLLDLMKKVRQAIREDNLLEFKESFFEEYGYNKPNAKNF

SEQ ID NO: 57265 - protein, 381 aa, Marinilactibacillus sp.; identical to SEQ ID NO: 57262
  REGION 1..381: note = tr|A0A1L4BZ08|A0A1L4BZ08_9LACT Queuine tRNA-ribosyltransferase OS=Marinilactibacillus sp. 15R; OX = 1911586 GN=tgt PE=3 SV=1

SEQ ID NO: 57266 - protein, 391 aa, unidentified
  source 1..391: note = Marinimicrobia bacterium
  REGION 1..391: note = tr|A0A117M8Q2|A0A117M8Q2_9BACT Queuine tRNA-ribosyltransferase OS=Marinimicrobia bacterium 46_43; OX = 1635280 GN=tgt PE=3 SV=1
MKFELLKTSNAYAARAGLIHTDHGPVETPVFMPVGTRGTVKALTNEELISASAHIILGNTYHLYLSPGMDVIREAGGLHKFMNWNRPILTDSGGYQVFSLAHMRKIEGDVTTFRSHIDGSLHTLSPEKSMEIQRILGSDIVMVFDECTPYPCDYAYAKESLIRTHRWERLSKEAFDATDPLWEHTQALFAIVQGSVYEDLRMESAAYLTDLDFDGYAIGGLAVGEPKAIMYELTEKICQLLPTEKPRYLMGVGKPEDILHSIARGVDMMDCVLPTRNARNGTLYTRRGKINIKRAEFSRDFSPLDPECPCPACQNHNKAYLHHLYKAGEITGLRLNSLHNITFFLQLVREARRAIQEGTFSDFYEKFCRTYPMEEDHSAKNAAARERRQKP

SEQ ID NO: 57267 - protein, 391 aa, unidentified; identical to SEQ ID NO: 57266
  source 1..391: note = Marinimicrobia bacterium
  REGION 1..391: note = tr|A0A101GC19|A0A101GC19_9BACT Queuine tRNA-ribosyltransferase OS=Marinimicrobia bacterium 46_47; OX = 1635279 GN=tgt PE=3 SV=1

SEQ ID NO: 57268 - protein, 376 aa, Marinimicrobium koreense
  REGION 1..376: note = tr|A0A3N1P4R2|A0A3N1P4R2_9GAMM Queuine tRNA-ribosyltransferase OS=Marinimicrobium koreense; OX = 306545 GN=tgt PE=3 SV=1
MSSFMQFELDREDGLARRGRLKFPRGVVETPAFMPVGTYGTVKGMLPRDIEAIGAQIILGNTFHLMLRPGTEVVKAHGDLHDFMQWSGPILTDSGGFQVFSLGDIRKITEEGVSFRSPIDGSPVFLGPEEAMQVQRDLGSDIVMIFDECTPYPATEDEARKSMELSLRWAKRSKDAHGDNPSALFGIVQGGMYESLRRESLAGLEEIGFDGYAIGGLSVGEPKEDMVRVLSALTPHMPKDKPRYLMGVGKPEDLVEGVRRGVDMFDCVMPTRNARNGHLFTHEGVIKIRNAKHRHDTGSLDPKCDCYTCQNFSRAYLHHLDKCGEILGAQLQTIHNLRYYQLVMAGLREAIAAGELEAFVADFYRALGKDVPPLTP

SEQ ID NO: 57269 - protein, 372 aa, Marinimicrobium sp.
  REGION 1..372: note = tr|A0A2D8WHX8|A0A2D8WHX8_9GAMM Queuine tRNA-ribosyltransferase OS=Marinimicrobium sp. OX=2024837; GN = tgt PE=3 SV=1
MQFELDREDGLARRGRLKFPRGVVETPAFMPVGTYGTVKGMLPRDIEAIGAQIILGNTFHLMLRPGTEVVKAHGDLHDFMQWSGPILTDSGGFQVFSLGDIRKITEEGVSFRSPIDGSPVFLGPEEAMQVQRDLGSDIVMIFDECTPYPATEDEARKSMELSLRWAKRSKDAHGDNPSALFGIVQGGMYESLRRESLAGLEEIGFDGYAIGGLSVGEPKEDMVRVLSALTPHMPKDKPRYLMGVGKPEDLVEGVRRGVDMFDCVMPTRNARNGHLFTHEGVIKIRNAKHRHDTGSLDPKCDCYTCQNFSRAYLHHLDKCGEILGAQLQTIHNLRYYQLVMAGLREAIAAGELEAFVADFYRALGKDVPPLTP

SEQ ID NO: 57270 - protein, 381 aa, unidentified
  source 1..381: note = Marininema halotolerans
  REGION 1..381: note = tr|A0A1I6R1Z7|A0A1I6R1Z7_9BACL Queuine tRNA-ribosyltransferase OS=Marininema halotolerans; OX = 1155944 GN=tgt PE=3 SV=1
MAVRYELIKTCSQTGARLGRLHTPHGTIDTPVFMPVGTLATVKTMSPEELKEMGSGIILSNTYHLFLRPGHDVVKEAGGLHSFMNWDRAILTDSGGFQVFSLSDLRKITEEGVSFRSHLSGEPLFISPEKSIEIQNALGADIIMAFDECPPYPADRDYVKKSMERTYRWLKRCVDAHERPEEQGLFGIVQGGMYGDLRKESARQITSIDLPGYAIGGLSVGEPKELMYEALEETTPLLPVDKPRYLMGVGSPDALVEGVMRGVDMFDCVLPTRIARNGTTMTSEGRVVVRNAKYTRDFGPLDPECDCYTCRNYSRAYLRHLFKAEETLGLRLTTYHNLYFLLKLMEGVRQAIQEDRLQDFRNQFFTKYYGSMNSDAMRRGF

SEQ ID NO: 57271 - protein, 381 aa, Marininema mesophilum
  REGION 1..381: note = tr|A0A1H2SAY4|A0A1H2SAY4_9BACL Queuine tRNA-ribosyltransferase OS=Marininema mesophilum; OX = 1048340 GN=tgt PE=3 SV=1
MAVRYELIKTCSQTGARLGRLHTPHGTIDTPAFMPVGTLATVKTMSPEELKEMGSGIILSNTYHLFLRPGQDVVKEAGGLHQFMNWDRAILTDSGGFQVFSLSDLRKITEEGVSFRSHLSGEPLFISPEKSIEIQNALGADIIMAFDECPPYPADRDYVKQSMERTYRWLKRCVDAHQRPEEQGLFGIVQGGMYGDLRKESVRQITSIDLPGYAIGGLSVGEPKELMYEALEQTTPLLPTDKPRYLMGVGSPDALVEGVLRGVDMFDCVLPTRIARNGTTMTSEGRIVVRNAKYTRDFGPLDPECDCYTCRNYSRAYLRHLFKAEETLGLRLTTYHNLYFLLKLMEGVRQAIREDQLQAFRDQFFTKYYGSTNADALRRGF

SEQ ID NO: 57272 - protein, 375 aa, unidentified
  source 1..375: note = Mariniphaga anaerophila
  REGION 1..375: note = tr|A0A1M5DKB2|A0A1M5DKB2_9BACT Queuine tRNA-ribosyltransferase OS=Mariniphaga anaerophila; OX = 1484053 GN=tgt PE=3 SV=1
MEFKLTATENGTRARAGILSTGHGQIETPIFMPVGTAGSVKGIHARDLKNDIKAQIILGNTYHLYLRPGTSVIETAGGLHKFNRWDGPILTDSGGYQVFSLGDIRKLSDEGARFQSHIDGSYHLFSPEKVIDIQRSIGADIMMAFDECTPGDADFDYAKKSLELTQRWLQRCFEQFEKTEPKYGYSQSLFPIVQGNTYPELRKQAAIHVKNFEADGYAIGGLSVGEPEEVMYEMTEVVNAELPENKPRYLMGVGTPVNILESIDRGVDMFDCVMPTRNGRNGMLFTSKGVINIRNKKWENDHSPIDEAENSFVDLYSKAYLRHLIISNEMLGAQIASQHNLAFYLWLVKTARQKITEGSFKSWKTNMVQQLKTRL

SEQ ID NO: 57273 - protein, 375 aa, unidentified
  source 1..375: note = Mariniphaga sediminis
  REGION 1..375: note = tr|A0A399D2L3|A0A399D2L3_9BACT Queuine tRNA-ribosyltransferase OS=Mariniphaga sediminis; OX = 1628158 GN=tgt PE=3 SV=1
MEFKLTATESGSRARAGIISTGHGQIETPIFMPVGTTGSVKGIHARDLKEDIGAQIILGNTYHLYLRPGVSVLEAAGGLHKFNSWDGPILTDSGGYQVFSLGDIRKITEDGARFQSHIDGSYHLFSPEKVVDIQRSIGADIIMAFDECTPGDADFDYARKSLELTQRWLDRCFAQFDKTEPKYGYPQTLFPIVQGNTYPELRKQAAIHVKTFDADGYAIGGLSVGEPEEVMYEMTEVVNAELPENKPRYLMGVGNPVNILESIDRGVDMLDCVMPTRNGRNGMLFTSEGIINIRNKKWANDHSPIDENGASFVDRYSKAYLRHLIISNEMLGAQIASQHNLAFYLWLVRTARQKITEGNFKSWKSNMVEQLKIRL

SEQ ID NO: 57274 - protein, 376 aa, unidentified
  source 1..376: note = Mariniradius saccharolyticus
  REGION 1..376: note = tr|M7Y468|M7Y468_9BACT Queuine tRNA-ribosyltransferase OS=Mariniradius saccharolyticus AK6 OX=1239962 GN=tgt PE=3 SV=1
MKFKLEATDTKSKARAGLINTDHGDIETPIFMPVGTAGSVKAVHQRELQYDIKAQIILGNTYHLYLRPGLDILEKAGGLHKFNGWSKPILTDSGGYQVFSLAENRKLTEEGAIFKSHIDGSKHVFSPERVMDIQRIIGADIIMAFDECPPYPCDFTYARKSMELTHRWLKRCITRFDETEGKYGYSQTLFPIVQGSVFPELRKQSAEFIASCEREGNAIGGLSVGEPAEEMYAMTEMVTDILPKDKPRYLMGVGTPANILESIALGVDMFDCVMPTRNARNGMLFTSEGIINIRNEKWKDDFSPIDPHIRSYVSSFYSKAYLRHLTISKEILAAQIASIHNLSFYLWLVGQAREKIKSGEFSVWKNQMVEKVSRRL

SEQ ID NO: 57275 - protein, 376 aa, unidentified
  source 1..376: note = Marinirhabdus gelatinilytica
  REGION 1..376: note = tr|A0A370Q908|A0A370Q908_9FLAO Queuine tRNA-ribosyltransferase OS=Marinirhabdus gelatinilytica; OX = 1703343 GN=tgt PE=3 SV=1
MQFTLHKTDPETQARAGTIQLDHGPVETPIFMPVGTIGTVKGVHQRELKEEINPDIILGNTYHLYLRPQTEILEKAGGLHKFMNWDRNILTDSGGYQVYSLSDRRKIKEEGVKFKSHIDGSYHTFTPENVMEIQRTIGADIIMAFDECTPYPCDYNYAKRSMHMTHRWLERCITHLEKTPLKYGYDQTFFPIVQGSTYKDLRKQSAEYIAGVGAEGNAIGGLSVGEPAEEMYEMTEVVTAILPKEKPRYLMGVGTPINLLENVALGIDMFDCVMPTRNGRNGMLFTAHGTINIKNKKWEADFSPIDEMGITWVDLEYSKAYVRHLFTVNEMLGRQICTIHNLGFYLWLMREARKQILAGTFATWKNKMVKQMDKRL

SEQ ID NO: 57276 - protein, 372 aa, unidentified
  source 1..372: note = Marinisporobacter balticus
  REGION 1..372: note = tr|A0A4R2KYV1|A0A4R2KYV1_9CLOT Queuine tRNA-ribosyltransferase OS=Marinisporobacter balticus; OX = 2018667 GN=tgt PE=3 SV=1
MAVKYELIKECKQSGARLGRLHTPHGTIETPIFMPVGTQATVKTMTPEELKEINAQIILSNTYHLYLRPGHELVEKAGGLHKFMNWNKPILTDSGGFQVFSLGDLRKISEEGVEFRSHIDGSKHFISPEKAIEIENALGADIIMAFDECAPYPADREYVKNSLERTTRWAKRCKEAHRNPDTQALFGIIQGGMYKDLREQSVAEITALDFPGYAVGGLSVGEPKPLMYEVLDYTTPLMPKDKARYLMGVGSPDCLIEGAIRGIDMFDCVLPTRIARNGTAMTSVGKVVIKNAKYTEDFGPLDPNCDCYTCRNYSRAYLRHLYKAGEILSGRLVSYHNLYFLLNLMKDVREAIKADCLLDFRKEFFERYGYDL

SEQ ID NO: 57277 - protein, 387 aa, Marinithermus hydrothermalis
  REGION 1..387: note = tr|F2NPL1|F2NPL1_MARHT Queuine tRNA-ribosyltransferase OS=Marinithermus hydrothermalis (strain DSM 14884 / JCM 11576 / T1) OX=869210 GN=tgt PE=3; SV = 1
MFAFRVTATDGKARTGTLHTPHGPVQTPLFMPVGTQATVKGLTPAELHQVGSQIVLANTYHLLLRPGPELVARLGGLHHFAGYQGPWLTDSGGYQVMSLGHMRTITEEGVTFRSHLNGDLITLTPETSIQVQEHLGADIIMAFDECPPYPSERRYLEASLERTLRWLERSVRAQTRKDQALFGITQGGTDLELRRRSTRETVRFDLPGYAIGGLAVGEPKEKMFPTVALSTDLLPEDRPRYLMGVGHPEDLVAAVGLGVDLFDCVYPTRTGRFGYALVPEGRLNLNSARYKEDPRPLMEDCDCYACRTFSRAYLTHLVRAGEMLGLRMLSLHNVRYLHRLMEAARAAIREGRYAAFAWAFAERRFAGHPPAWFLEALRAGGHEPPGD

SEQ ID NO: 57278 - protein, 374 aa, Marinitoga hydrogenitolerans
  REGION 1..374: note = tr|A0A1M4SKW4|A0A1M4SKW4_9BACT Queuine tRNA-ribosyltransferase OS=Marinitoga hydrogenitolerans DSM 16785 OX=1122195 GN=tgt PE=3 SV=1
MFDDIPLKYELLHKDKNSNARRGRIYTQNGIIETPVFMPVGTNGTVKALKNTDLKDIEAEIILGNAFHLFLRPGLEVLKNVGGLHNFMNWERPILTDSGGFQVFSLRDRKISDEGVLFRSPLDGSKIMMTPELSMEIQMTIGSNIAMAFDECVEAGAERKYVEESVDRTFEWAKRSFKSHAKKDQALFGIVQGGFFEDLRDRSLKQITSIDFDGFALGGLSVGEHYAETERILKHSGPKLPENKPRYIMGIGTPLIILMSVENGMDMFDCVLPTRMGRHGTAMTWEGKVNLKAGKWKYSTDPIDNKCDCYACQNHTRGYIHHLIRKDEILGKILLSIHNLRFLINFVKEVRKAIEDDRFIQFKEEFLSNPNNIY

SEQ ID NO: 57279 - protein, 373 aa, Marinitoga piezophila
  REGION 1..373: note = tr|H2J3I3|H2J3I3_MARPK Queuine tRNA-ribosyltransferase OS=Marinitoga piezophila (strain DSM 14283 / JCM 11233 / KA3) OX=443254 GN=tgt PE=3 SV=1
MLEGPLKYELLHKDKHSNARRGRIYTPNGIIETPVFMPVGTNGTVKALKNSDLKDIEAEIILGNAFHLFLRPGLEVLKNAGGLHKFMNWDRPILTDSGGFQVFSLRDRKISDEGVLFRSPLDGSKIMMTPELSMEIQMTIGSNIAMAFDECVEAGAERKYVEESVDRTFEWAKRSYKAHTKKDQALFGIVQGGFHEDLRDRSLKQITSIDFDGFALGGLSVGEHYSETERILKHSGPKLPEDKPRYIMGIGTPLIILMSVENGMDMFDCVLPTRMGRHGTAMTWEGKVNLKAGKWKYSTEPIDNKCDCYACQNHTRGYIHHLIRKDEILGKILLSIHNLRFLINFVKEVRKAIEEDRFLEFKEEFLSNPNNVY

SEQ ID NO: 57280 - protein, 374 aa, Marinitoga sp.
  REGION 1..374: note = tr|A0A0H2SLP2|A0A0H2SLP2_9BACT Queuine tRNA-ribosyltransferase OS=Marinitoga sp. 1155 OX=1428448; GN = tgt PE=3 SV=1
MFEDSPLKYELLHKDKNSNARRGRIYTKNGIIETPVFMPVGTNGTVKTLKNSDLKDIEAEIILGNAFHLFLRPGLDVLRNVGGLHNFMNWDRPILTDSGGFQVFSLKDRKISDDGVLFRSPLDGSKIMMTPELSMEIQMIIGSNIAMAFDECVEAGAEKKYVEESVERTYQWAKRSYQAHTKKDQALFGIVQGGFHEDLREKSIKQITSIDFDGFALGGLSVGEHYSETERILKHSGPKLPENKPRYIMGIGTPLIILMSVENGMDMFDCVLPTRMGRHGTAMTWEGKVNLKAGKWKYSTDPIDNKCDCYACQNHTRGYIHHLIRKDEILGKILLSIHNLRFLINFVKEVRKAIEDDRFIQFKEEFLSNPNNIY

SEQ ID NO: 57281 - protein, 374 aa, Marinitoga sp.
  REGION 1..374: note = tr|A0A1W9TMN0|A0A1W9TMN0_9BACT Queuine tRNA-ribosyltransferase OS=Marinitoga sp. 4572_148; OX = 1971619 GN=tgt PE=3 SV=1
MFDSKPIKYELLHKDKHSNARRGRIYTQNGIIETPVFMPVGTNGTVKALKNSDLKDIEAEIILGNAFHLFLRPGLEVLKNAGGLHKFMNWDRPILTDSGGFQVFSLKDRKISDDGVLFRSPLDGSKIMMTPEKSMEIQMTIGSNIAMAFDECVEAGAEKKYVEESVERTYAWAKRSFEAHTKEDQALFGIVQGGFHEDLRDRSLEQITSIDFDGFALGGLSVGEHYSETERILKHSGPKLPEDKPRYIMGIGTPLIILMSVENGMDMFDCVLPTRMGRHGTAMTWDGKVNLKAGKWKYSTEPIDNKCDCYACQNHTRGYIHHLIRKDEILGKILLSIHNLRFLINFVKKVRKAIEEDRFMEFKEEFLSNPNNIY

SEQ ID NO: 57282 - protein, 373 aa, Marinobacter adhaerens
  REGION 1..373: note = tr|A0A352IPQ6|A0A352IPQ6_9ALTE Queuine tRNA-ribosyltransferase OS=Marinobacter adhaerens; OX = 1033846 GN=tgt PE=3 SV=1
MSFEKLGEDGRARRGRLTFPRGTVETPAFMPVGTYGTVKGMLPRDIHEIGAEIILGNTFHLMLRPGTEVVKAHGDLHDFTQWHGPILTDSGGFQVFSLGEMRKITEDGVTFRSPVDGSPVELSPEIAIQVQRDLGSDIVMIFDECTPYPATERQAKDSMELSLRWAQRSKDAHEGNPAALFGIVQGGMYEGLRDRSLEGLTEIGFDGYAIGGLSVGEPKEDMIRILDHLPPKMPEDKPRYLMGVGRPEDLVEAVRRGVDMFDCVMPTRNARNGYLFTSTGIVKIRNARHRHDTAPLDDRCDCYTCKNFSRSYLHHLDKCGEMLGSQLNTIHNLRFYQNLMAELRGAIEAGTLSDFVTDFYALRGETVPPLGNV

SEQ ID NO: 57283 - protein, 373 aa, Marinobacter adhaerens
  REGION 1..373: note = tr|A0A1E3C5A2|A0A1E3C5A2_9ALTE Queuine tRNA-ribosyltransferase OS=Marinobacter adhaerens; OX = 1033846 GN=tgt PE=3 SV=1
MSFEKLGEDGRARRGRLTFPRGTVETPAFMPVGTYGTVKGMLPRDIHEIGAEIILGNTFHLMLRPGTEVVKAHGDLHDFTQWQGPILTDSGGFQVFSLGEMRKITEEGVTFRSPVDGSPVELSPEIAIQVQRDLGSDIVMIFDECTPYPATERQAKDSMELSLRWAQRSKDAHEGNPAALFGIVQGGMYENLRDRSLEGLTDIGFDGYAIGGLSVGEPKEDMIRILDHLPPKMPEDKPRYLMGVGRPEDIVEAVRRGVDMFDCVMPTRNARNGYLFTSTGIVKIRNARHRHDTAPLDERCDCYTCKNFSRSYLHHLDKCGEMLGSQLNTIHNLRFYQNLMAGLRGAIEAGTLSDFVTDFYALRGETVPPLGNV

SEQ ID NO: 57284 - protein, 378 aa, Marinobacter algicola
  REGION 1..378: note = tr|A6EWH7|A6EWH7_9ALTE Queuine tRNA-ribosyltransferase OS=Marinobacter algicola DG893; OX = 443152 GN=tgt PE=3 SV=1
MSDQCYMSFEKLGEDGRARRGRLTFPRGTVETPTFMPVGTYGTVKGMLPRDIKEIGAEIILGNTFHLMLRPGTEVVKAHGDLHDFTQWQGPILTDSGGFQVFSLGEMRKITEAGVTFRSPIDGSPVELSPEIAMQVQRDLGSDIVMIFDECTPYPATEKQAKESMELSLRWAARSKQAHAGNPAALFGIVQGGMYESLRDRSLEGLTEIGFDGYAIGGLSVGEPKEDMIRILDHLPPRMPEDRPRYLMGVGRPEDLVEAVRRGVDMFDCVMPTRNARNGYLFTSTGIIKIRNAKHRHDTAPLDDQCDCYTCENFSRSYLHHLDKCGEMLGSQLNTIHNLRYYQNVMAGLRGAIEAGTLSDFISDFYARRGETVPPMAQ

SEQ ID NO: 57285 - protein, 379 aa, unidentified
  source 1..379: note = Marinobacter antarcticus
  REGION 1..379: note = tr|A0A1M6U236|A0A1M6U236_9ALTE Queuine tRNA-ribosyltransferase OS=Marinobacter antarcticus; OX = 564117 GN=tgt PE=3 SV=1
MSQSCFMSFEKLGEDGLARRGRLTFPRGTVETPAFMPVGTYGTVKGMLPRDIHETGAEIILGNTFHLMLRPGTEVVKAHGDLHDFTQWKGPILTDSGGFQVFSLGEMRKITEEEVTFRSPIDGSPVKLSPEIAIQVQRDLGSDIVMIFDECTPYPATEKQAKESMELSLRWAKRSKDAHEGNPAALFGIVQGGMYESLRDRSLEGLTDIGFDGYAIGGLSVGEPKEDMIRILDHLPSKMPGDKPRYLMGVGRPEDLVEAVRRGVDMFDCVMPTRNARNGYLFTSVGIVKIRNARHRHDTAPLDERCDCYTCENFSRSYLHHLDKCGEMLGAQLNTIHNLRFYQNLMAGLRGAIEAGTLSNFINDFYALRGETVPAMGNG

SEQ ID NO: 57286 - protein, 372 aa, unidentified
  source 1..372: note = Marinobacter confluentis
  REGION 1..372: note = tr|A0A4Z1BXR9|A0A4Z1BXR9_9ALTE Queuine tRNA-ribosyltransferase OS=Marinobacter confluentis; OX = 1697557 GN=tgt PE=3 SV=1
MSFEKLGEDGRARRGRLTFPRGAVETPAFMPVGTYGTVKGMLPRDIENIGAHIILGNTFHLMLRPGTEVVKAHGDLHDFTQWHGPILTDSGGFQVFSLGEMRKITEQGVTFRSPVDGSPVELSPEIAMQVQRDLGSDIVMIFDECTPYPATETEARESMELSLRWAKRSKDAHEGNPAALFGIVQGGMYESLRERSLEGLVDIGFDGYAIGGLSVGEPKEDMIRILDDLPPKMPDDKPRYLMGVGRPEDIVEAVRRGVDMFDCVMPTRNARNGYLFTSTGIVKIRNARHRYDTQPLDDQCDCYTCQNFSRSYLHHLDKCGEMLGSQLNTIHNLRYYQNIMAGLRGAIEAGTLSDFISDFYARRDQPVPPLAD

SEQ ID NO: 57287 - protein, 379 aa, Marinobacter daqiaonensis
  REGION 1..379: note = tr|A0A1I6GL77|A0A1I6GL77_9ALTE Queuine tRNA-ribosyltransferase OS=Marinobacter daqiaonensis; OX = 650891 GN=tgt PE=3 SV=1
MTDRCFMTFEKLGEDGKARRGRLTFPRGVVETPAFMPVGTYGTVKGMLPRDIEATGAQIILGNTFHLMLRPGTEVIRAHGDLHDFTQWQGPILTDSGGFQVFSLGDMRKITEEGVSFRSPVDGSPVELNPEIAMRVQRDLGSDIVMIFDECTPYPATMTEARVSMEMSLRWAARSRIAHGDSPSALFGIIQGGMYNDLRQRSLDGLVEIGFDGYAIGGLSVGEPKEEMLAVLDDLPPRMPADRPRYLMGVGRPEDIVEAVRRGVDMFDCVMPTRNARNGYLFTSTGIVKIRNATHRHDTSPLDAECDCYTCSQFSRSYLHHLDKCGEMLGSQLNTIHNLHYYQKLMAGLRGAIEAGTLSDFVASFYAKRGLPVPPLAGV

SEQ ID NO: 57288 - protein, 379 aa, Marinobacter excellens
  REGION 1..379: note = tr|A0A0N8KKE6|A0A0N8KKE6_9ALTE Queuine tRNA-ribosyltransferase OS=Marinobacter excellens HL-55; OX = 1305731 GN=tgt PE=3 SV=1
MSQSCFMSFEKLGEDGKARRGRLTFPRGTVETPAFMPVGTYGTVKGMLPRDIEAIGAEIILGNTFHLMLRPGTEVVKAHGDLHDFTQWQGPILTDSGGFQVFSLGEMRKITEQGVTFRSPIDGSKVELSPEIAIQVQRDLGSDIVMIFDECTPYPATEKQAKDSMELSLRWADRSKQAHEGNPAALFGIVQGGMYESLRDQSLEGLINIGFDGYAIGGLSVGEPKEDMIRILDHLPPKMPEDKPRYLMGVGRPEDLVEAVRRGVDMFDCVMPTRNARNGYLFTSTGIVKIRNAKNRHDTGPLDERCDCHTCQHFSKSYLHHLDKCGEMLGSQLNTIHNLRFYQNLMSGLRGAIEAGTLSDFVSEFYALRGESVPPMGNS

SEQ ID NO: 57289 - protein, 379 aa, Marinobacter excellens
  REGION 1..379: note = tr|A0A137SBM9|A0A137SBM9_9ALTE Queuine tRNA-ribosyltransferase OS=Marinobacter excellens LAMA 842; OX = 1306954 GN=tgt PE=3 SV=1
MSNSCFMSFEKLGEDGRARRGRLTFPRGTVETPAFMPVGTYGTVKGMLPRDIEAIGAEIILGNTFHLMLRPGTEVIKAHGDLHDFTQWQGPILTDSGGFQVFSLGEMRKITEQGVTFRSPVDGSKVELSPEIAIQVQRDLGSDIVMIFDECTPYPATEKQAKESMELSLRWAERSKKAHEGNPAALFGIVQGGMFEPLRDRSLQGLTDIGFDGYAIGGLSVGEPKEDMIRILDHLPSKMPEDKPRYLMGVGRPEDIVEAVRRGVDMFDCVMPTRNARNGYLFTSTGIVKIRNAKNRHDTGPLDERCDCYTCQNFSKSYLHHLDKCGEMLGAQLNTIHNLRFYQNLMSGLRGAIEAGTLSDFISEFYALRGESVPPLGES

SEQ ID NO: 57290 - protein, 373 aa, Marinobacter flavimaris
  REGION 1..373: note = tr|A0A3D8H1D9|A0A3D8H1D9_9ALTE Queuine tRNA-ribosyltransferase OS=Marinobacter flavimaris; OX = 262076 GN=tgt PE=3 SV=1
MSFEKLGEDGRARRGRLTFPRGTVETPAFMPVGTYGTVKGMLPRDIHEIGAEIILGNTFHLMLRPGTEVVKAHGDLHDFTQWHGPILTDSGGFQVFSLGEMRKITEDGVTFRSPVDGSPVELSPEIAIQVQRDLGSDIVMIFDECTPYPATERQAKDSMELSLRWAQRSKDAHEGNPAALFGIVQGGMYEGLRDRSLEGLTEIGFDGYAIGGLSVGEPKEDMIRILDHLPPKMPEDKPRYLMGVGRPEDLVEAVRRGVDMFDCVMPTRNARNGYLFTSTGIVKIRNARHRHDTAPLDDRCDCYTCKNFSRSYLHHLDKCGEMLGSQLNTIHNLRFYQNLMAGLRGAIEAGTLSDFVTDFYALRGETVPPLGNV

SEQ ID NO: 57291 - protein, 373 aa, unidentified
  source 1..373: note = Marinobacter fuscus
  REGION 1..373: note = tr|A0A2T1K6G1|A0A2T1K6G1_9ALTE Queuine tRNA-ribosyltransferase OS=Marinobacter fuscus OX=2109942; GN = tgt PE=3 SV=1
MSFEKLGEDGKARRGRLTFPRGVVETPAFMPVGTYGTVKGMLPRDIEEIGAHIILGNTFHLMLRPGTEVVKAHGDLHDFTQWQGPILTDSGGFQVFSLGEMRKITEKGVTFRSPVDGSKVELSPEIAIQVQRDLGSDIVMIFDECTPYPATEKQAKDSMELSLRWAQRSKDAHQGSPSALFGIVQGGMYESLRDQSLEGLTSIGFDGYAIGGLSVGEPKEDMIRILDYLPPKMPEDKPRYLMGVGRPEDLVEGVRRGVDMFDCVMPTRNARNGYLFTSTGIVKIRNAKNRHDTGPLDERCDCYTCKHFSKSYLHHLDKCGEMLGSQLNTIHNLRFYQNLMSGLRGAIEAGTLSDFVSEFYALRGEAVPPLGDS

SEQ ID NO: 57292 - protein, 379 aa, Marinobacter gudaonensis
  REGION 1..379: note = tr|A0A1I6G7P4|A0A1I6G7P4_9ALTE Queuine tRNA-ribosyltransferase OS=Marinobacter gudaonensis; OX = 375760 GN=tgt PE=3 SV=1
MSQTCFMSFEKLGEDGRARRGRLTFPRGTVETPAFMPVGTYGTVKGMLPRDIQEIGAEIILGNTFHLMLRPGTEVVKAHGDLHDFTQWHGPILTDSGGFQVFSLGEMRKITEEGVTFRSPVDGSPVELNPEIAIQVQRDLGSDIVMIFDECTPYPATERQAKESMELSLRWAQRSKDAHEGNPAALFGIVQGGMYEGLRDVSLEGLTDIGFDGYAIGGLSVGEPKEDMIRILDHLPPKMPEDKPRYLMGVGRPEDIVEAVRRGVDMFDCVMPTRNARNGYLFTSTGIVKIRNARHRHDTAPLDERCDCYTCQNFSRSYLHHLDKCGEMLGSQLNTIHNLRFYQNLMAGLRGAIEAGTLSDFVTNFYALRGEAVPPLHKV

SEQ ID NO: 57293 - protein, 373 aa, Marinobacter guineae
  REGION 1..373: note = tr|A0A2G1VBJ3|A0A2G1VBJ3_9ALTE Queuine tRNA-ribosyltransferase OS=Marinobacter guineae OX=432303; GN = tgt PE=3 SV=1
MSFEKLGEDGRARRGRLTFPRGTVETPAFMPVGTYGTVKGMLPRDIHEIGAEIILGNTFHLMLRPGTEVVKAHGDLHDFTQWQGPILTDSGGFQVFSLGEMRKITEEGVTFRSPVDGSPVELSPEIAIRVQRDLGSDIVMIFDECTPYPATEQEAKDSMELSLRWAKRSKDAHEGNPAALFGIVQGGMYENLRDRSLDGLTGIGFDGYAIGGLSVGEPKEDMIRILDHLPPKMPEDKPRYLMGVGRPEDIVEAVRRGVDMFDCVMPTRNARNGYLFTSTGIVKIRNARHRHDTAPLDERCDCYTCQNFSRSYLHHLDKCGEMLGAQLNTIHNLRFYQNLMAGLRGAIEAGTLSDFVTDFYALRGETVPSLGNV

SEQ ID NO: 57294 - protein, 373 aa, unidentified
  source 1..373: note = Marinobacter halophilus
  REGION 1..373: note = tr|A0A2T1KH79|A0A2T1KH79_9ALTE Queuine tRNA-ribosyltransferase OS=Marinobacter halophilus; OX = 1323740 GN=tgt PE=3 SV=1
MSFEKLGEDGKARRGRLTFPRGTVETPAFMPVGTYGTVKGMLPRDIEAIGAEIILGNTFHLMLRPGTEVVKAHGDLHDFTQWQGPILTDSGGFQVFSLGDMRKISEQGVTFRSPIDGSKVELSPEIAIQVQRDLGSDIVMIFDECTPYPATEKQARESMELSLRWADRSKQAHAGNPAALFGIVQGGMYESLRDRSLEGLTEIGFDGYAIGGLSVGEPKEDMIRILDHLPPKMPADKPRYLMGVGRPEDLVEAVRRGVDMFDCVMPTRNARNGYLFTSTGIVKIRNAKNRHDTGPLDERCDCYTCQHFSKSYLHHLDKCGEMLGSQLNTIHNLRFYQNLMSGLRGAIEAGTLSDFISEFYALRGENVPPMGNS

SEQ ID NO: 57295 - protein, 373 aa, Marinobacter hydrocarbonoclasticus
  REGION 1..373: note = sp|A1TZN7|TGT_MARHV Queuine tRNA-ribosyltransferase; OS = Marinobacter hydrocarbonoclasticus (strain ATCC 700491 / DSM 11845 / VT8) OX=351348 GN=tgt PE=3 SV=1
MSFEKLGEDGKARRGRLTFPRGVVETPAFMPVGTYGTVKGMLPRDIEEIGAHIILGNTFHLMLRPGTEVVKAHGDLHDFTQWQGPILTDSGGFQVFSLGEMRKITEQGVTFRSPVDGSKVELSPEIAIQVQRDLGSDIVMIFDECTPYPATEKQAKESMELSLRWAERSKRAHEGNPAALFGIVQGGMYESLRDQSLEGLEKIGFDGYAIGGLSVGEPKEDMIRILDHLPPKMPEDKPRYLMGVGRPEDIVEAVRRGVDMFDCVMPTRNARNGYLFTSAGIVKIRNAKNRHDTGPLDERCDCYTCKHFSKSYLHHLDKCGEMLGSQLNTIHNLRFYQNLMSGLRGAIEAGTLSDFVSEFYALRGETVPPLGDS

SEQ ID NO: 57296 - protein, 379 aa, Marinobacter hydrocarbonoclasticus
  REGION 1..379: note = tr|A0A455W5D7|A0A455W5D7_MARHY Queuine tRNA-ribosyltransferase OS=Marinobacter hydrocarbonoclasticus OX=2743 GN=tgt PE=3 SV=1
MSNSCFMSFKKLGEDGRARRGRLTFPRGTVETPAFMPVGTYGTVKGMLPRDIEAIGAEIILGNTFHLMLRPGTEVVKAHGDLHDFTQWQGPILTDSGGFQVFSLGEMRKITEQGVTFRSPVDGSKVELSPEIAIQVQRDLGSDIVMIFDECTPYPATEKQAKESMELSLRWAERSKKAHEGNPAALFGIVQGGMYEPLRDRSLQGLTDIGFDGYAIGGLSVGEPKEDMIRILDHLPPKMPADKPRYLMGVGRPEDIVEAVRRGVDMFDCVMPTRNARNGYLFTSTGIVKIRNAKNRHDTGPLDERCDCYTCQNFSKSYLHHLDKCGEMLGSQLNTIHNLRFYQNLMSGLRGAIEAGTLSDFISEFYALRGETVPPLGES

SEQ ID NO: 57297 - protein, 372 aa, Marinobacter lipolyticus
  REGION 1..372: note = tr|R8B198|R8B198_9ALTE Queuine tRNA-ribosyltransferase OS=Marinobacter lipolyticus SM19; OX = 1318628 GN=tgt PE=3 SV=1
MSFEKLGEDGRARRGRLTFPRGTVETPAFMPVGTYGTVKGMLPRDIKEIGAEIILGNTFHLMHRPGTEVVKAHGDLHDFTQWHGPILTDSGGFQVFSLGEMRKITEEGVTFRSPVDGSPVKLNPEIAMQVQRDLGSDIVMIFDECTPYPATEKEARESMEMSLRWADRSKQAHEGNPAALFGIVQGGMYESLRDRSLDGLTEIGFDGYAIGGLSVGEPKEDMIRILDHLPPRMPADKPRYLMGVGRPEDIVEAVRRGVDMFDCVMPTRNARNGYLFTSTGIVKIRNAKNRHDTGPLDERCDCYTCENFSRSYLHHLDKCGEMLGSQLNTIHNLRFYQNLMAGLRGAIEAGTLSDFISDFYARRGETVPPLAD

SEQ ID NO: 57298 - protein, 379 aa, Marinobacter litoralis
  REGION 1..379: note = tr|A0A3M2R9P4|A0A3M2R9P4_9ALTE Queuine tRNA-ribosyltransferase OS=Marinobacter litoralis; OX = 187981 GN=tgt PE=3 SV=1
MNESCFMSFEKLGEDGKARRGRLTFPRGTVETPAFMPVGTYGTVKGMLPRDIKEIGAEIILGNTFHLMLRPGTEVVKAHGDLHDFTQWHGPILTDSGGFQVFSLGEMRKITEKGVTFRSPVDGAKVELNPEIAMQVQRDLGSDIVMIFDECTPYPATEKQAKDSMELSLRWAARSKKAHEGNPSALFGIVQGGMYESLRDRSLEGLTEIGFDGYAIGGLSVGEPKEDMIRILDHLPPKMPEDKPRYLMGVGRPEDIVEAVRRGVDMFDCVMPTRNARNGYLFTSTGIVKIRNAKNRHDAGPLDERCDCYTCENFSKSYLHHLDKCGEMLGSQLNTIHNLRFYQNLMSGLRGAIEAGTLSDFVSEFYALRGETVPPLGDE

SEQ ID NO: 57299 - protein, 374 aa, Marinobacter lutaoensis
  REGION 1..374: note = tr|A0A1V2DUT8|A0A1V2DUT8_9ALTE Queuine tRNA-ribosyltransferase OS=Marinobacter lutaoensis; OX = 135739 GN=tgt PE=3 SV=1
MSFEKIAEQGRARRGRLRFPRGVVETPAFMPVGTYGTVKGMLPRDIREIGAQIILGNTFHLMLRPGTEVIKTHGDLHDFTQWHGPILTDSGGFQVFSLGEMRKISEEGVTFRSPVDGSRVELSPEIAIQVQRDLGSDIVMIFDECTPYPATEKQARESMELSLRWAARSKRAHGDNPAALFGIVQGGMYESLRERSLTGLTEIGFDGYAIGGLSVGEPKADMLRILDFLPPRMPEDKPRYLMGVGRPEDIVEAVRRGVDMFDCVMPTRNARNGYLFTSTGIVKIRNARHRHDTAPLDERCDCYTCQNFSRSYLHHLDKCGEMLGAQLNTIHNLRFYQNLMAGLRGAIEAGTLSDFVSNFYALRGETVPPLDGAE

SEQ ID NO: 57300 - protein, 373 aa, unidentified
  source 1..373: note = Marinobacter manganoxydans
  REGION 1..373: note = tr|G6YV86|G6YV86_9ALTE Queuine tRNA-ribosyltransferase OS=Marinobacter manganoxydans MnI7-9 OX=1094979 GN=tgt PE=3 SV=1
MSFEKLGEDGRARRGRLTFPRGTVETPAFMPVGTYGTVKGMLPRDIHEIGAEIILGNTFHLMLRPGTEVVKAHGDLHDFTQWQGPILTDSGGFQVFSLGEMRKITEDGVTFRSPVDGSPVELSPEIAIQVQRDLGSDIVMIFDECTPYPATERQAKDSMELSLRWAQRSKDAHEGNPAALFGIVQGGMYENLRDYSLEGLTDIGFDGYAIGGLSVGEPKEDMIRILDHLPPKMPEDKPRYLMGVGRPEDIVEAVRRGVDMFDCVMPTRNARNGYLFTSTGIVKIRNARHRHDTSPLDERCDCYTCKNFSRSYLHHLDKCGEMLGSQLNTIHNLRFYQNLMAGLRGAIEAGTLSDFVTDFYALRGETVPPLGNV

SEQ ID NO: 57301 - protein, 376 aa, Marinobacter mobilis
  REGION 1..376: note = tr|A0A1H3BS60|A0A1H3BS60_9ALTE Queuine tRNA-ribosyltransferase OS=Marinobacter mobilis OX=488533; GN = tgt PE=3 SV=1
MSYMSFEKLGEDGKARRGRLTFPRGAVETPAFMPVGTYGTVKGMLPRDIEEIGAHIILGNTFHLMLRPGTEVIKAHGDLHDFTQWQGPILTDSGGFQVFSLGEMRKITEQGVKFRSPVDGSPVELNPEIAMQVQRDLGSDIVMIFDECTPYPATRKQAEESMELSLRWAARSRKAHGDNPAALFGIVQGGMYPELRDRSLAGLTEIGFDGYAIGGLSVGEPKDEMIRILDHLPPKMPEDKPRYLMGVGRPEDIVEAVRRGVDMFDCVMPTRNARNGYLFTSTGIVKIRNARHRHDTSPLDDQCDCYTCKNFSRSYLHHLDKCGEMLGSQLNTIHNLRYYQNVMSGLRGAIEAGKLSDFVEDFYARRGESVPALEEQ

SEQ ID NO: 57302 - protein, 376 aa, unidentified
  source 1..376: note = Marinobacter nanhaiticus
  REGION 1..376: note = tr|N6WQE8|N6WQE8_9ALTE Queuine tRNA-ribosyltransferase OS=Marinobacter nanhaiticus D15-8W; OX = 626887 GN=tgt PE=3 SV=1
MSFKTTAADGKARRGTLTFPRGEVQTPAFMPVGTYGTVKGMLPRDIEEIGAQIILGNTFHLMLRPGTGVIKEHGDLHDFTQWQGPILTDSGGFQVFSLGEMRKITEQGVNFRSPVDGSPVELSPEISMQVQRDLGSDIVMIFDECTPYPATERQAKDSMEMSLRWAKRSKDAHGDSPSALFGIVQGGMYPHLRDRSLEGLVDIGFDGYAIGGLSVGEPKEDMIRILDHLPPRMPADRPRYLMGVGKPEDIVEAVRRGVDMFDCVMPTRNARNGHLFTSEGVVKIRNAKHRNDTGPLDEQCDCYTCQHFSRGYLHHLDRCGEMLGSQLNTIHNLRYYQNLMAGLRGAIEAGTLSDFIEQFYARRGQPVPAMSAGSEA

SEQ ID NO: 57303 - protein, 379 aa, unidentified
  source 1..379: note = Marinobacter nitratireducens
  REGION 1..379: note = tr|A0A072N5R9|A0A072N5R9_9ALTE Queuine tRNA-ribosyltransferase OS=Marinobacter nitratireducens; OX = 1137280 GN=tgt PE=3 SV=1
MSQTSFMSFEKLGEDGRARRGRLTFPRGTVETPAFMPVGTYGTVKGMLPRDIEEIGAEIILGNTFHLMLRPGTEVVKAHGDLHDFTQWQGPILTDSGGFQVFSLGDMRKITEEGVKFRSPVDGSPVELSPEIAMQVQRDLGSDIVMIFDECTPYPATERQAKDSMELSLRWAARSKAAHEGNPSALFGIVQGGMYEHLRDRSLEGLTEIGFDGYAIGGLSVGEPKEDMIRILDHLPPKMPEDRPRYLMGVGRPEDIVEAVRRGVDMFDCVMPTRNARNGYLFTSTGIVKIRNAKNRHDTGPLDERCDCYTCKNFSKSYLHHLDKCGEMLGSQLNTIHNLRFYQNLMAGLRGAIEAGTLSDFVSEFYALRGESVPALAEA

SEQ ID NO: 57304 - protein, 379 aa, Marinobacter pelagius
  REGION 1..379: note = tr|A0A1I4VZK7|A0A1I4VZK7_9ALTE Queuine tRNA-ribosyltransferase OS=Marinobacter pelagius OX=379482; GN = tgt PE=3 SV=1
MTNSCFMSFEKITEDGRARRGRLTFPRGAVETPAFMPVGTYGTVKGMLPRDIHEIGAQIILGNTFHLMLRPGTEVVKAHGDLHDFTQWQGPILTDSGGFQVFSLGEMRKITEEGVTFRSPVDGSKVELSPEIAIRVQRDLGSDIVMIFDECTPYPATEKQARESMELSLRWAERSKQAHEGNPAALFGIVQGGMYEGLRDKSLEGLTEIGFDGYAIGGLSVGEPKEDMIRILDHLPPKMPEDKPRYLMGVGRPEDIVEAVRRGVDMFDCVMPTRNARNGYLFTSTGIVKIRNARHRHDTSPLDERCDCYTCQNFSRSYLHHLDKCGEMLGSQLNTIHNLRFYQNLMAGLRGAIEAGTLSDFVSDFYALRGESVPPLAGA

SEQ ID NO: 57305 - protein, 379 aa, Marinobacter pelagius
  REGION 1..379: note = tr|A0A366GMI4|A0A366GMI4_9ALTE Queuine tRNA-ribosyltransferase OS=Marinobacter pelagius OX=379482; GN = tgt PE=3 SV=1
MTNSCFMSFEKITEDGRARRGRLTFPRGVVETPAFMPVGTYGTVKGMLPRDIHEIGAQIILGNTFHLMLRPGTEVVKAHGDLHDFTQWQGPILTDSGGFQVFSLGEMRKITEEGVTFRSPVDGSKVELSPEIAIRVQRDLGSDIVMIFDECTPYPATEKQARESMELSLRWAERSKNAHEGNPAALFGIVQGGMYEGLRDQSLAGLTEIGFDGYAIGGLSVGEPKEDMIRILDHLPPKMPEDKPRYLMGVGRPEDIVEAVRRGVDMFDCVMPTRNARNGYLFTSTGIIKIRNARHRHDTSPLDERCDCYTCQNFSRSYLHHLDKCGEMLGAQLNTIHNLRFYQNLMAGLRGAIEAGTLSDFVSDFYALRGESVPPLAGA

SEQ ID NO: 57306 - protein, 377 aa, unidentified
  source 1..377: note = Marinobacter persicus
  REGION 1..377: note = tr|A0A1I3WTL0|A0A1I3WTL0_9ALTE Queuine tRNA-ribosyltransferase OS=Marinobacter persicus OX=930118; GN = tgt PE=3 SV=1
MSQSCFMSFEKLGEDGKARRGRLTFPRGTVETPAFMPVGTYGTVKGMLPRDIEAIGAEIILGNTFHLMLRPGTEVVKAHGDLHDFTQWQGPILTDSGGFQVFSLGDMRKITEKSVTFRSPVDGSKVELSPEIAIQVQRDLGSDIVMIFDECTPYPATEKQARESMEMSLRWAERSKKAHEGNPAALFGIVQGGMYESLRERSLQGLTDIGFDGYAIGGLSVGEPKEDMIRILDHLPPKMPGDKPRYLMGVGRPEDIVEAVRRGIDMFDCVMPTRNARNGYLFTSTGIIKIRNARHRHDTGPLDERCDCYTCQHFSRSYLHHLDKCGEMLGSQLNTIHNLRFYQNLMRGLRGAIEAGTLSDFIREFYALRGESVPPLG

SEQ ID NO: 57307 - protein, 377 aa, unidentified
  source 1..377: note = Marinobacter persicus
  REGION 1..377: note = tr|A0A2S6G7X3|A0A2S6G7X3_9ALTE Queuine tRNA-ribosyltransferase OS=Marinobacter persicus OX=930118; GN = tgt PE=3 SV=1
MSQSCFMSFEKLGEDGKARRGRLTFPRGTVETPAFMPVGTYGTVKGMLPRDIEAIGAEIILGNTFHLMLRPGTEVVKAHGDLHDFTQWQGPILTDSGGFQVFSLGDMRKITEKSVTFRSPVDGSKVELSPEIAIQVQRDLGSDIVMIFDECTPYPATEKQARESMELSLRWAERSKKAHEGNPAALFGIVQGGMYEPLRERSLQGLTDIGFDGYAIGGLSVGEPKEDMIRILDHLPPKMPEDKPRYLMGVGRPEDIVEAVRRGIDMFDCVMPTRNARNGYLFTSTGIIKIRNARHRHDTGPLDERCDCYTCQHFSRSYLHHLDKCGEMLGSQLNTIHNLRFYQNLMSGLRGAIEAGTLSDFISEFYALRGETVPPLG

SEQ ID NO: 57308 - protein, 373 aa, Marinobacter psychrophilus
  REGION 1..373: note = tr|A0A0H4I914|A0A0H4I914_9ALTE Queuine tRNA-ribosyltransferase OS=Marinobacter psychrophilus; OX = 330734 GN=tgt PE=3 SV=1
MRFEKLGEDGRARLGRLTFPRGVVETPAFMPVGTYGTVKGMLPRDIKEIGAHIILGNTFHLMLRPGTEVIKAHGDLHDFTQWQGPILTDSGGFQVFSLGETSKITEQGVIFRSPVDGSQVELNPEIAMQVQRDLGSDIVMIFDECTPYPATEKEAKDSMELSLRWAARSKNAHEGNPAALFGIVQGGMYEGLRQQSLDGLTNIGFDGYAIGGLSVGEPKEDMIRILDDLPPKMPADKPRYLMGVGRPEDIVEAVRRGVDMFDCVMPTRNARNGYLFTATGTVKIRNAKNRHDTAPLDDSCDCYTCQNFSRSYLHHLDKCGEMLASQLNTIHNLRYYQNLMSGLRGAIEAGTLCDFVTGFYALRGATAPELSGA

SEQ ID NO: 57309 - protein, 372 aa, unidentified
  source 1..372: note = Marinobacter salarius
  REGION 1..372: note = tr|W5YQI5|W5YQI5_9ALTE Queuine tRNA-ribosyltransferase OS=Marinobacter salarius; OX = 1420917 GN=tgt PE=3 SV=1
MSFEKLGEDGRARRGRLTFPRGTVETPAFMPVGTYGTVKGMLPRDIKDIGAEIILGNTFHLMLRPGTEVVKAHGDLHDFTQWQGPILTDSGGFQVFSLGEMRKITEAGVTFRSPIDGSPVELSPEIAMQVQRDLGSDIVMIFDECTPYPATEKQASESMELSLRWAARSKQAHAGNPAALFGIVQGGMYESLRDRSLEGLTEIGFDGYAIGGLSVGEPKEDMIRILDHLPPKMPEDRPRYLMGVGRPEDLVEAVRRGVDMFDCVMPTRNARNGYLFTSTGIIKIRNARHRHDTAPLDDQCDCYTCENFSRSYLHHLDKCGEMLGSQLNTIHNLRYYQNVMAGLRGAIEAGTLSDFISDFYARRGETVPPMAQ

SEQ ID NO: 57310 - protein, 378 aa, unidentified
  source 1..378: note = Marinobacter salarius
  REGION 1..378: note = tr|A0A1W6KAK3|A0A1W6KAK3_9ALTE Queuine tRNA-ribosyltransferase OS=Marinobacter salarius; OX = 1420917 GN=tgt PE=3 SV=1
MSDQCYMSFEKLGEDGRARRGRLTFPRGTVETPAFMPVGTYGTVKGMLPRDIKDIGAEIILGNTFHLMLRPGTEVVKAHGDLHDFTQWQGPILTDSGGFQVFSLGEMRKITEAGVTFRSPIDGSPVELSPEIAMQVQRDLGSDIVMIFDECTPYPATEKQASESMELSLRWAARSKQAHAGNPAALFGIVQGGMYESLRDRSLEGLTEIGFDGYAIGGLSVGEPKEDMIRILDHLPPKMPEDRPRYLMGVGRPEDLVEAVRRGVDMFDCVMPTRNARNGYLFTSTGIIKIRNARHRHDTSPLDDQCDCYTCENFSRSYLHHLDKCGEMLGSQLNTIHNLRYYQNVMAGLRGAIEAGTLSDFISDFYARRGETVPPMAQ

SEQ ID NO: 57311 - protein, 373 aa, unidentified
  source 1..373: note = Marinobacter salinus
  REGION 1..373: note = tr|A0A1D9GS28|A0A1D9GS28_9ALTE Queuine tRNA-ribosyltransferase OS=Marinobacter salinus OX=1874317; GN = tgt PE=3 SV=1
MSFEKFGEDGRARRGRLTFPRGSVETPAFMPVGTYGTVKGMLPRDIEEIGAEIILGNTFHLMLRPGTEVIKAHGDLHDFTQWKGPILTDSGGFQVFSLGEMRKITEEDVTFRSPVDGSPVKLSPEIAIQVQRDLGSDIVMIFDECTPYPATEQQARDSMELSLRWAERSKNAHQGNPAALFGIVQGGMYENLRERSLDGLTEIGFDGYAIGGLSVGEPKEDMIRILDHLPPRMPEDKPRYLMGVGRPEDIVEAVRRGVDMFDCVMPTRNARNGYLFTSTGIVKIRNARHRHDTLPLDERCDCYTCKNFSRSYLHHLDKCGEMLGSQLNTIHNLRFYQNLMAGLRGAIEAGTLSDFVTDFYALRGETAPPMSTD

SEQ ID NO: 57312 - protein, 373 aa, Marinobacter santoriniensis
  REGION 1..373: note = tr|M7CU60|M7CU60_9ALTE Queuine tRNA-ribosyltransferase OS=Marinobacter santoriniensis NKSG1 OX=1288826 GN=tgt PE=3 SV=1
MSFEKLTEDGRARRGRLTFPRGTVETPAFMPVGTYGTVKGMLPRDIHEIGAEIILGNTFHLMLRPGTEVVKAHGDLHDFTQWQGPILTDSGGFQVFSLGEMRKITEEGVTFRSPVDGSKVELSPEIAIRVQRDLGSDIVMIFDECTPYPATEKQARESMELSLRWAERSKKAHEGNPAALFGIVQGGMYEGLRDRSLAGLTEIGFDGYAIGGLSVGEPKEDMIRILDHLPPKMPENRPRYLMGVGRPEDVVEAVRRGVDMFDCVMPTRNARNGYLFTSEGIVKIRNARHRHDTSPLDARCDCYTCKNFSRSYLHHLDKCGEMLGAQLNTIHNLRFYQNLMAGLRGAIEAGTLSDFISEFYGLRGESVPPMPAA

SEQ ID NO: 57313 - protein, 379 aa, Marinobacter segnicrescens
  REGION 1..379: note = tr|A0A1H9YDE9|A0A1H9YDE9_9ALTE Queuine tRNA-ribosyltransferase OS=Marinobacter segnicrescens; OX = 430453 GN=tgt PE=3 SV=1
MRDNCFLSFEKLGEDGKARRGRLTFPRGVVETPAFMPVGTYGTVKGMLPRDIEATGAQIILGNTFHLMLRPGTEVIKAHGDLHDFTQWQGPILTDSGGFQVFSLGDMRKITEQGVSFRSPVDGSPVELNPEIAMQVQRDLGSDIVMIFDECTPYPATEKQARESMEMSLRWAARSKVAHGESPSALFGIIQGGMYNDLRQRSLEGLVDIGFDGYAIGGLSVGEPKEEMIAVLDYLPVRMPEDHPRYLMGVGRPEDIVEAVRRGVDMFDCVMPTRNARNGYLFTSTGIVKIRNATHRHDTSPLDAECDCYTCSHFSRSYLHHLDKCGEMLGSQLNTIHNLHYYQKVMAGLRGAIEAGTLSDFVESFYAKRGLPVPPLAGG

SEQ ID NO: 57314 - protein, 373 aa, unidentified
  source 1..373: note = Marinobacter shengliensis
  REGION 1..373: note = tr|A0A2T1KNS5|A0A2T1KNS5_9ALTE Queuine tRNA-ribosyltransferase OS=Marinobacter shengliensis; OX = 1389223 GN=tgt PE=3 SV=1
MSFEKLGEDGRARRGRLTFPRGTVETPAFMPVGTYGTVKGMLPRDIEAIGAEIILGNTFHLMLRPGTEVVKAHGDLHDFTQWQGPILTDSGGFQVFSLGEMRKITEQGVTFRSPVDGSKVELSPEIAIQVQRDLGSDIVMIFDECTPYPATEKQAKESMELSLRWAERSKKAHEGNPAALFGIVQGGMYEPLRDRSLQGLTDIGFDGYAIGGLSVGEPKEDMIRILDHLPSKMPEDKPRYLMGVGRPEDIVEAVRRGVDMFDCVMPTRNARNGYLFTSTGIVKIRNAKNRHDTGPLDERCDCYTCQNFSKSYLHHLDKCGEMLGAQLNTIHNLRFYQNLMSGLRGAIEAGTLSDFISEFYALRGESVPPLGES

SEQ ID NO: 57315 - protein, 373 aa, unidentified
  source 1..373: note = Marinobacter similis
  REGION 1..373: note = tr|W5YNF4|W5YNF4_9ALTE Queuine tRNA-ribosyltransferase OS=Marinobacter similis OX=1420916; GN = tgt PE=3 SV=1
MSFEKLGEDGRARRGRLSFPRGTVETPAFMPVGTYGTVKAMLPRDIHGIGAEIILGNTFHLMLRPGTEVIKAHGDLHDFTQWKGPILTDSGGFQVFSLGEMRKITEEGVTFRSPVDGSPVKLNPEIAIQVQRDLGSDIVMIFDECTPYPATEQEAKDSMELSLRWAERSKKAHEGNPAALFGIVQGGMYEGLRDVSLEGLTDIGFDGYAIGGLSVGEPKEDMIRILDHLPPKMPEDKPRYLMGVGRPEDIVEAVRRGVDMFDCVMPTRNARNGYLFTSTGIVKIRNARHRHDTAPLDERCDCYTCQNFSRSYLYHLDKCGEMLGSQLNTIHNLRFYQNLMAGLRGAIEAGTLSDFVTDFYALRGETVPPMGSA

SEQ ID NO: 57316 - protein, 373 aa, Marinobacter sp.
  REGION 1..373: note = tr|A0A1E7Q1Z1|A0A1E7Q1Z1_9ALTE Queuine tRNA-ribosyltransferase OS=Marinobacter sp. X15-166B; OX = 1897620 GN=tgt PE=3 SV=1
MAFEKLAEDGKARRGRLTFPRGVVETPAFMPVGTYGTVKGMLPRDIEATGAHIILGNTFHLMLRPGTEVVKAHGSLHDFTQWQGPILTDSGGFQVFSLGAMRKITEEGVTFRSPVNGDPVELNPEIAMQVQRDLGSDVVMIFDECTPYPATEQEAEQSMELSLRWAARSRKAHGDNPAALFGIVQGGMYTHLRDRSLAGLTDIGFDGYAIGGLSVGEPHEDMVRVLDHLAHRMPADKPRYLMGVGRPEDLVEGVRRGVDMFDCVMPTRNARNGHLFTSTGTVKIRNARHRHDTGRLDEQCDCYTCENFSLSYLHHLEKCKEMLGSQLNTIHNLRYYQILMRGLREAIEAGTLSDFVEDFYERRGQTVPPLTET

SEQ ID NO: 57317 - protein, 372 aa, Marinobacter sp.
  REGION 1..372: note = tr|A0A434ASP9|A0A434ASP9_9ALTE Queuine tRNA-ribosyltransferase OS=Marinobacter sp. NP-6; OX = 2488666 GN=tgt PE=3 SV=1
MSFEKLGDDGRARRGRLTFPRGTVETPAFMPVGTYGTVKGMLPRDIKDIGAEIILGNTFHLMLRPGTEVVKAHGDLHDFTQWQGPILTDSGGFQVFSLGEMRKITEAGVTFRSPIDGSPVELSPEIAMQVQRDLGSDIVMIFDECTPYPATEKQASESMELSLRWAARSKQAHADNPAALFGIVQGGMYESLRDRSLEGLTEIGFDGYAIGGLSVGEPKEDMIRILDYLPPRMPEDRPRYLMGVGRPEDLVEAVRRGVDMFDCVMPTRNARNGYLFTSTGIIKIRNARHRHDTAPLDDQCDCYTCENFSRSYLHHLDKCGEMLGSQLNTIHNLRYYQNVMAGLRGAIEAGTLSDFISDFYARRGETVPPMAQ

SEQ ID NO: 57318 - protein, 379 aa, unidentified
  source 1..379: note = Marinobacter subterrani
  REGION 1..379: note = tr|A0A0J7J8G3|A0A0J7J8G3_9ALTE Queuine tRNA-ribosyltransferase OS=Marinobacter subterrani; OX = 1658765 GN=tgt PE=3 SV=1
MTQTCFMSFEKLGEDGQARRGRLTFPRGTVETPAFMPVGTYGTVKGMLPRDIHEIGAEIILGNTFHLMLRPGTEVVKAHGDLHDFTQWQGPILTDSGGFQVFSLGEMRKITEEGVTFRSPVDGSPVELSPEIAIRVQRDLGSDIVMIFDECTPYPATERQAQESMELSLRWAKRSKDAHEGNPAALFGIVQGGMYEGLRDRSLAGLTDIGFDGYAIGGLSVGEPKEDMIRILDHLPPKMPEDKPRYLMGVGRPEDIVEAVRRGIDMFDCVMPTRNARNGYLFTSTGIVKIRNARHRHDTAPLDERCDCYTCQNFSRSYLHHLDKCGEMLGAQLNTIHNLRFYQNLMAGLRGAIEAGTLSDFVTDFYALRGETVPPQGSV

SEQ ID NO: 57319 - protein, 373 aa, Marinobacter vinifirmus
  REGION 1..373: note = tr|A0A558BER9|A0A558BER9_9ALTE Queuine tRNA-ribosyltransferase OS=Marinobacter vinifirmus; OX = 355591 GN=tgt PE=3 SV=1
MSFEKLGEDGKARRGRLTFPRGTVETPAFMPVGTYGTVKGMLPRDIKEIGAEIILGNTFHLMLRPGTEVVKAHGDLHDFTQWQGPILTDSGGFQVFSLGEMRKITEQGVTFRSPVDGSKVELSPEIAIGVQRDLGSDIVMIFDECTPYPATEKQAKESMELSLRWAERSKNAHEGNPAALFGIVQGGMYESLRDRSLEGLANIGFDGYAIGGLSVGEPKEDMIRILDHLPPKMPEDKPRYLMGVGRPEDIVEAVRRGVDMFDCVMPTRNARNGYLFTSTGIVKIRNARNRHDTGPLDERCDCYTCQNFSKSYLHHLDKCGEMLGSQLNTIHNLRFYQNLMSGLRGAIEAGTLSDFVSEFYALRGESVPPLGDS

SEQ ID NO: 57320 - protein, 376 aa, Marinobacter zhejiangensis
  REGION 1..376: note = tr|A0A1I4P8P3|A0A1I4P8P3_9ALTE Queuine tRNA-ribosyltransferase OS=Marinobacter zhejiangensis; OX = 488535 GN=tgt PE=3 SV=1
MSFMSFEKLGEDGKARRGRLTFPRGVVETPAFMPVGTYGTVKGMLPRDIEQIGAHIILGNTFHLMLRPGTEVIKAHGDLHDFTQWQGPILTDSGGFQVFSLGEMRKITEQGVKFRSPVDGSPVELNPEIAMQVQRDLGSDIVMIFDECTPYPATHKQAEASMELSLRWAARSRDAHGDNPAALFGIIQGGMYPELRDRSLEGLTAIGFDGYAIGGLSVGEPKEDMIRILDHLPPKMPEDKPRYLMGVGRPEDIVEAVRRGVDMFDCVMPTRNARNGYLFTSTGIVKIRNARNRHDTSPLDDQCDCYTCQNFSRSYLHHLDKCGEMLGSQLNTIHNLRYYQNVMSGLRGAIEAGKLSDFVEDFYARRGETVPPLEEQ

SEQ ID NO: 57321 - protein, 379 aa, unidentified
  source 1..379: note = Marinobacterium aestuarii
  REGION 1..379: note = tr|A0A1A9F3S5|A0A1A9F3S5_9GAMM Queuine tRNA-ribosyltransferase OS=Marinobacterium aestuarii; OX = 1821621 GN=tgt PE=3 SV=1
MSRSCFMNYERLAVDGKARRGRLTFPRGAVETPAFMPVGTYGTVKGMLPRDIEATGAQMILGNTFHLMLRPGTEIIRQHGDLHDFMQWKGPILTDSGGFQVFSLGAMRKITEEGVAFQSPVDGSKVFIDPERSMQVQRELGSDVVMIFDECTPHPATEDEAAKSMRLSLRWAERSKRAHGDSPSALFGIVQGGMYESLRDESLAGLTEIGFDGYAIGGLSVGEPKEDMMRVLDHLAWKMPEDKPRYLMGVGKPEDLVEGVRRGVDMFDCVMPTRNARNGFLFGSKGVVKIRNSANKTDMRPVDDKCDCYTCQNFSRAYLHHLDKCKEILGAQLNTIHNLHYYQVLMASLRAAIEQGKLSAFVDEFYAERGLETPPLASI

SEQ ID NO: 57322 - protein, 372 aa, Marinobacterium georgiense
  REGION 1..372: note = tr|A0A1H4GRD0|A0A1H4GRD0_9GAMM Queuine tRNA-ribosyltransferase OS=Marinobacterium georgiense DSM 11526 OX=1122198 GN=tgt PE=3 SV=1
MQFETLASEGKARRGRLTFPRGVVETPAFMPVGTYGTVKGMLPRDIEATGAQIILGNTFHLMLRPGTEIVQQHGDLHDFMQWKGPILTDSGGFQVFSLGKLRKITEEGVTFQSPVNGSKVFMTPESSMQVQRELGSDIVMIFDECTPYPATEKEAADSMRMSLRWAERSKKAHGESPSALFGIIQGGMYESLRDESLAGLTEIGFDGYAIGGLSVGEPKEDMVRILDRLAWKMPEDKPRYLMGVGKPEDLVEGVRRGVDMFDCVMPTRNARNGFLFTRNGIVKIRNSANKTNTAPVDETCSCYTCQNFSRAYLHHLDKCKEILGAQLNTIHNLHYYQELMAGLRNAIEQGKLSDFVDEFYRQRGQETPPLTA

SEQ ID NO: 57323 - protein, 372 aa, Marinobacterium halophilum
  REGION 1..372: note = tr|A0A2P8EQT3|A0A2P8EQT3_9GAMM Queuine tRNA-ribosyltransferase OS=Marinobacterium halophilum; OX = 267374 GN=tgt PE=3 SV=1
MQFETTASEGKARRGRLTFPRGVVETPAFMPVGTYGTVKGMTPRDIEATGAQIILGNTFHLMLRPGTEIVQQHGDLHDFMNWKGPILTDSGGFQVFSLGKMRKITENGVVFQSPVNGSKVVMTPESSMQVQRELGSDIVMIFDECTPYPATHKEAADSMRMSLRWAQRSKDAHGDSPSALFGIIQGGMYEDLRDESLEGLTSIGFDGYAIGGLSVGEPKEDMKRVLDHLAWKMPEDKPRYLMGVGKPEDLVEGVRRGVDMFDCVMPTRNARNGFLFTRDGIVKIRNSANKTNTAPVDETCSCYTCQNFSRAYLHHLDKCKEILGAQLNTIHNLHYYQELMAGLRNAIEQGKLSDFIDEFYRRRGQTTPPLTA

SEQ ID NO: 57324 - protein, 382 aa, Marinobacterium lutimaris
  REGION 1..382: note = tr|A0A1H6CT77|A0A1H6CT77_9GAMM Queuine tRNA-ribosyltransferase OS=Marinobacterium lutimaris; OX = 568106 GN=tgt PE=3 SV=1
MSDNSTRECFMNFELLGSEGKARRGRLTFPRGTVETPAFMPVGTYGTVKGMLPRDVEEIGAQIILGNTFHLMLRPGTEIIKQHGDLHDFMNWKGPILTDSGGFQVFSLGNMRKITEEGVSFQSPVNGSKVFISPEVSMQVQRDLGSDIVMIFDECTPYPADEMEAAKSMRMSLRWAERSKKAHGDSPSALFGIIQGGMYEHLRDESLEGLTGIGFDGYAIGGLSVGEPKEEMIKILDHLAYKMPEDKPRYLMGVGKPEDLVEGVRRGVDMFDCVMPTRNARNGFLFTTDGIVKIRNSANKTNTGPVDETCDCYTCQNFSRAYLHHLDKCGEILGSQLNTIHNLHYYQVLMAGLRGALEQGTLSAFVADFYAKRGKEVPPLKG

SEQ ID NO: 57325 - protein, 382 aa, unidentified
  source 1..382: note = Marinobacterium mangrovicola
  REGION 1..382: note = tr|A0A4R1GG44|A0A4R1GG44_9GAMM Queuine tRNA-ribosyltransferase OS=Marinobacterium mangrovicola; OX = 1476959 GN=tgt PE=3 SV=1
MSDNSTRECFMNFELLGSEGKARRGRLTFPRGTVETPAFMPVGTYGTVKGMLPRDVEEIGAQIILGNTFHLMLRPGTEIIKQHGDLHDFMNWKGPILTDSGGFQVFSLGNMRKITEEGVSFQSPVNGSKVFISPEVSMQVQRDLGSDIVMIFDECTPYPADEMEAAKSMRMSLRWAKRSKDAHGDSPSALFGIIQGGMYEHLRDESLEGLTGIGFDGYAIGGLSVGEPKEEMIKILDHLAYKMPEDKPRYLMGVGKPEDLVEGVRRGVDMFDCVMPTRNARNGFLFTTDGIVKIRNSANKTNTGPVDETCDCYTCQNFSRAYLHHLDKCGEILGSQLNTIHNLHYYQVLMAGLRGALEQGTLSDFVADFYAKRGKEVPPLKG

SEQ ID NO: 57326 - protein, 384 aa, Marinobacterium sp.
  REGION 1..384: note = tr|A0A081G1E2|A0A081G1E2_9GAMM Queuine tRNA-ribosyltransferase OS=Marinobacterium sp. AK27; OX = 1232683 GN=tgt PE=3 SV=1
MSDNTTQGRECFMNFELLGSEGKARRGRLTFPRGVVETPAFMPVGTYGTVKGMLPRDIEGIGAQIILGNTFHLMLRPGTDIIAQHGDLHDFMQWQGPILTDSGGFQVFSLGKMRKITEEGVSFQSPVDGSKVFLSPEVSMEVQRALGSDIVMIFDECTPHPATEVEAAQSMRLSLRWAKRSKEAHGDSPSALFGIVQGGMYEHLRDESLEGLTEIGFDGYAIGGLSVGEPKEDMMRILDHLAYKMPEDKPRYLMGVGKPEDLVEGVRRGVDMFDCVMPTRNARNAFLFTTTGVVKIRNSANKTDTRPLDETCDCYTCQHFSRAYLHHLDKCGEILGAQLNTIHNLHYYQQLMAGLRGALEQGKLSDFVENFYALRGQEVPPLKG

SEQ ID NO: 57327 - protein, 378 aa, Marinobacterium stanieri
  REGION 1..378: note = tr|A0A1N6U6Q0|A0A1N6U6Q0_9GAMM Queuine tRNA-ribosyltransferase OS=Marinobacterium stanieri; OX = 49186 GN=tgt PE=3 SV=1
MRKECFMKFETTTTEGKARRGRLTFPRGVVETPAFMPVGTYGTVKGMTPRDIEATGAQIILGNTFHLMLRPGTEIVQQHGDLHDFMQWKGPILTDSGGFQVFSLGKMRKISEQGVTFQSPVNGDKVLMTPESSMQVQRELGSDIVMIFDECTPYPATHKEAADSMRLSMRWAQRSKDAHGDSPSALFGIIQGGMYEDLRDESLEGLTEIGFDGYAIGGLSVGEPKEDMKRVLDHLAWKMPEDKPRYLMGVGKPEDLVEGVRRGVDMFDCVMPTRNARNGFLFTRNGIVKIRNSSNKTNTAPVDETCSCYTCQNFSRAYLHHLDKCREILGAHLNTIHNLHYYQELMAGLRNAIEQGKLSDFVDEFYRQRGQETPPLTA

SEQ ID NO: 57328 - protein, 379 aa, Marinococcus halophilus
  REGION 1..379: note = tr|A0A510Y618|A0A510Y618_MARHA Queuine tRNA-ribosyltransferase OS=Marinococcus halophilus OX=1371; GN = tgt PE=3 SV=1
MTAVTYEHIKTCRQSGARLGKVHTPHGSFDTPAFMPVGTLATVKTLSPEELESMGAGMILSNTYHLWIRPGEDIVEEAGGLHKFMNWNKPILTDSGGFQVFSLSKLRDIKEEGVHFRNHISGAKLFLSPEKAMQIQNSLGADVMMAFDECPPYPAEEEYMKASVERTTRWAERCLEAHTRPKDQALFGIVQGGDYQHLREKSAKELISMDFPGYAIGGLSVGEPKETMNRVLEYTAPLLPQNKPRYLMGVGSADALIDGSIRGIDMFDCVLPTRIGRNGTCMTSKGRLVVRNASNARDFRPIDEACSCYTCRNYSRAYIRHLIKSEETFGVRLTSYHNLYFLLSLMQQVREAIQQDRLLDFRETFFEQYGFNRPDAKNF

SEQ ID NO: 57329 - protein, 379 aa, Marinococcus luteus
  REGION 1..379: note = tr|A0A1H2S7C6|A0A1H2S7C6_9BACI Queuine tRNA-ribosyltransferase OS=Marinococcus luteus OX=1122204; GN = tgt PE=3 SV=1
MTAVTYEHIKTCRQSGARLGKVHTPHGSFDTPAFMPVGTLATVKTLSPEELESMGAGMILSNTYHLWIRPGEDIVEEAGGLHKFMNWNKPILTDSGGFQVFSLSKLRDIKEEGVHFRNHISGAKLFLSPEKAMQIQNSLGADVMMAFDECPPYPAEEEYMKASVERTTRWAERCLEAHTRPKDQALFGIVQGGDYRHLREKSAKELISMDFPGYAIGGLSVGEPKETMNRVLEYTTPLLPQNKPRYLMGVGSADALIDGSIRGIDMFDCVLPTRIGRNGTCMTSKGRLVVRNASNARDFRPIDEACGCYTCRNYSRAYIRHLIKSEETFGVRLTSYHNLYFLLSLMQQVREAIQQDRLLDFRETFFEQYGFNRPDAKNF

SEQ ID NO: 57330 - protein, 381 aa, Marinomonas alcarazii
  REGION 1..381: note = tr|A0A318VDI8|A0A318VDI8_9GAMM Queuine tRNA-ribosyltransferase OS=Marinomonas alcarazii OX=491949; GN = tgt PE=3 SV=1
MSDKRPECFMDFELHTTSGKARRATLTFPRGKVETPAFMPVGTYGTVKGMLTKDIEEIGADIILGNTFHLWLRPGTDVVKAHGDLHDFTQWKKPILTDSGGFQVFSLGEMRKITEEGVSFRSPINGSKVFLSPEISMQVQRDLGSDIVMIFDECTPYPATPEVAAKSMRMSLRWAKRSKDEHGDSPSALFGIIQGSMYENLRDESLEGLVDIGFDGYAIGGLSVGEPKEEMMKVLDHTTPKMPADKPRYLMGVGKPEDLVEGVRRGVDMFDCVMPTRNARNGHLFTSDGVVRIRNAQYRHDVGPLDKECDCYTCKNFSRSYLHHLDKCQEMVGAQLNTIHNLRYYQTLMAGLRLALDEGRFDAFVDEFYAKRGLETPALSE

SEQ ID NO: 57331 - protein, 381 aa, Marinomonas aquimarina
  REGION 1..381: note = tr|A0A1A8TII9|A0A1A8TII9_9GAMM Queuine tRNA-ribosyltransferase OS=Marinomonas aquimarina; OX = 295068 GN=tgt PE=3 SV=1
MSDKRPECFMDFEVLATSGKARRARLSFPRGDIETPAFMPVGTYGTVKSMLTKDIEAIGADIILGNTFHLWLRPGTEVIKAHGDLHDFTQWQKPILTDSGGFQVFSLGDMRKITEQGVSFRSPVNGDKVFLSPEISMQVQRDLGSDIVMIFDECTPYPATEDEAAKSMRMSLRWAQRSKDAHGDSPSALFGIIQGSMYEQLRDESLEALTNIGFDGYAIGGLSVGEPKEDMVRILDHVAYKMPEDKPRYLMGVGKPEDLVEGVRRGVDMFDCVMPTRNARNGHLFTSEGIIRIRNAFHRYDTDPLDKECDCYTCKNFSRSYLHHLDKCQEMVGAQLNTIHNLRYYQNLMAGLRKALDEGRFDAFVDEFYAKRGMETPPLSE

SEQ ID NO: 57332 - protein, 381 aa, Marinomonas aquiplantarum
  REGION 1..381: note = tr|A0A366CXG4|A0A366CXG4_9GAMM Queuine tRNA-ribosyltransferase OS=Marinomonas aquiplantarum; OX = 491951 GN=tgt PE=3 SV=1
MSEKRPECFMDFELHTSSGKARRATLTFPRGKVETPAFMPVGTYGTVKGMLTKDIEEIGADIILGNTFHLWLRPGTEVVKAHGDLHDFTQWKKPILTDSGGFQVFSLGEMRKITEEGVSFRSPINGSKVFLSPEISMQVQRDLGSDIVMIFDECTPYPATADVAAKSMRMSLRWAKRSKEEHGDSPSALFGIIQGSMYENLRDESLEGLEEIGFDGYAIGGLSVGEPKEEMIKVLDYITPKMPENKPRYLMGVGKPEDLVEGVRRGVDMFDCVMPTRNARNGHLFTSEGVVRIRNAQYRHDIDPLDKECDCYTCKNFSRAYLHHLDKCQEMVGAQLNTIHNLRYYQTLMAGLRKALDEGRFDAFVDEFYAKRGLETPALSE

SEQ ID NO: 57333 - protein, 381 aa, Marinomonas balearica
  REGION 1..381: note = tr|A0A4R6MG38|A0A4R6MG38_9GAMM Queuine tRNA-ribosyltransferase OS=Marinomonas balearica OX=491947; GN = tgt PE=3 SV=1
MSDKRPECFMDFEVHATSGKARRATLSFPRGNVETPAFMPVGTYGTVKGMLTKDIEEIGADIILGNTFHLWLRPGTQVIKEHGDLHDFTQWKKPILTDSGGFQVFSLGEMRKITEEGVSFRSPVDGSKVFLNPEISMEVQRDLGSDIVMIFDECTPYPATETEAAKSMRMSLRWAKRSKDAHGDSPSALFGIIQGSMYETLRDESLEGLVDIGFDGYAIGGLSVGEPKHEMMKVLDHVTPKMPDNKPRYLMGVGKPEDLVEGVRRGVDMFDCVMPTRNARNGHLFTSDGVVRIRNAKNRHDTGPLDKECDCYTCKNFSRAYLHHLDKCQEMVGAQLNTIHNLRYYQTLMAGLRKALDEGKFDAFVDEFYAKRGMETPTLAE

SEQ ID NO: 57334 - protein, 381 aa, Marinomonas communis
  REGION 1..381: note = tr|A0A4R6X338|A0A4R6X338_9GAMM Queuine tRNA-ribosyltransferase OS=Marinomonas communis OX=28254; GN = tgt PE=3 SV=1
MSEKRPECFMDFEVLATSGKARRARLSFPRGDIETPAFMPVGTYGTVKSMLTKDIEAIGADIILGNTFHLWLRPGTDVIKAHGDLHDFTQWQKPILTDSGGFQVFSLGDMRKITEEGVSFRSPVNGDKVFLSPEISMQVQRDLGSDIVMIFDECTPYPATEDEAARSMRMSLRWAQRSKDAHGDSPSALFGIIQGSMYEQLRDESLEGLTNIGFDGYAIGGLSVGEPKEDMVRILDHLAYKMPEDKPRYLMGVGKPEDLVEGVRRGVDMFDCVMPTRNARNGHLFTSEGIVRIRNAFHRHDTSPLDKECDCYTCKNFSRSYLHHLDKCQEMVGAQLNTIHNLRYYQTLMAGLRKALDEGRFDAFVDEFYAKRGMETPPLSE

SEQ ID NO: 57335 - protein, 381 aa, Marinomonas foliarum
  REGION 1..381: note = tr|A0A369ACX4|A0A369ACX4_9GAMM Queuine tRNA-ribosyltransferase OS=Marinomonas foliarum OX=491950; GN = tgt PE=3 SV=1
MSDKRPECFMDFELHTTSGKARRATLTFPRGKVETPAFMPVGTYGTVKGMLTKDIEEIGADIILGNTFHLWLRPGTDVVKAHGDLHDFTQWKKPILTDSGGFQVFSLGEMRKITEEGVSFRSPINGSKVFLSPEISMQVQRDLGSDIVMIFDECTPYPATPEVAAKSMRMSLRWAKRSKDEHGDSPSALFGIIQGSMYENLRDESLEGLVDIGFDGYAIGGLSVGEPKDEMMKVLDHTTPKMPADKPRYLMGVGKPEDLVEGVRRGVDMFDCVMPTRNARNGHLFTSDGVVRIRNAQYRHDVGPLDKECDCYTCKNFSRSYLHHLDKCQEMVGAQLNTIHNLRYYQTLMAGLRLALDEGRFDAFVDEFYAKRGLETPALSE

SEQ ID NO: 57336 - protein, 381 aa, unidentified
  source 1..381: note = Marinomonas fungiae
  REGION 1..381: note = tr|A0A0K6IR53|A0A0K6IR53_9GAMM Queuine tRNA-ribosyltransferase OS=Marinomonas fungiae OX=1137284; GN = tgt PE=3 SV=1
MSDKRPECFMDFEVLATSGKARRARLSFPRGDIETPAFMPVGTYGTVKSMLTKDIEAIGADIILGNTFHLWLRPGTDVIKAHGDLHDFTQWQKPILTDSGGFQVFSLGDMRKITEEGVSFRSPVNGDKVFLSPEISMQVQRDLGSDIVMIFDECTPYPATEDEAAKSMRMSLRWAQRSKDAHGDSPSALFGIIQGSMYEQLRDESLEGLTNIGFDGYAIGGLSVGEPKEDMVRILDHLAYKMPEDKPRYLMGVGKPEDLVEGVRRGVDMFDCVMPTRNARNGHLFTSEGIVRIRNAFHRYDTNPLDKECDCYTCKNFSRSYLHHLDKCQEMVGAQLNTIHNLRYYQTLMAGLRQALDEGRFDAFVDEFYAKRGMETPPLSE

SEQ ID NO: 57337 - protein, 381 aa, unidentified
  source 1..381: note = Marinomonas gallaica
  REGION 1..381: note = tr|A0A1C3JT60|A0A1C3JT60_9GAMM Queuine tRNA-ribosyltransferase OS=Marinomonas gallaica OX=1806667; GN = tgt PE=3 SV=1
MSDKRPECFMDFEVLATSGKARRARLSFPRGDVETPAFMPVGTYGTVKSMLTKDIEAIGADIILGNTFHLWLRPGTEVIKAHGDLHDFTQWKKPILTDSGGFQVFSLGDMRKITEEGVSFRSPVNGDKVFLSPEISMQVQRDLGSDIVMIFDECTPYPASDDEAAKSMRMSLRWAQRSKDAHGDSPSALFGIIQGSMYETLRDESLEGLVGIGFDGYAIGGLSVGEPKEDMIRILDHLAHKMPEDKPRYLMGVGKPEDLVEGVRRGVDMFDCVMPTRNARNGHLFTSEGIVRIRNAFHRHDTNPLDKECDCYTCKNFSRSYLHHLDKCQEMVGAQLNTIHNLRYYQTLMAGLRQALDEGRFDAFVDEFYAKRGLETPPLSQ

SEQ ID NO: 57338 - protein, 382 aa, unidentified
  source 1..382: note = Marinomonas hwangdonensis
  REGION 1..382: note = tr|A0A3M8Q7B5|A0A3M8Q7B5_9GAMM Queuine tRNA-ribosyltransferase OS=Marinomonas hwangdonensis; OX = 1053647 GN=tgt PE=3 SV=1
MSDKRPECFMDFELHTTSGKARRATLTFPRGKVETPAFMPVGTYGTVKGMLTKDIEEIGADIILGNTFHLWLRPGTDVVKAHGDLHDFTQWKKPILTDSGGFQVFSLGEMRKITEEGVSFRSPINGSKVFLSPEISMQVQRDLGSDIVMIFDECTPYPATPEVAAKSMRMSLRWAQRSKDEHGDSPSALFGIIQGSMYENLRDESLEGLVGIGFDGYAIGGLSVGEPKDEMMKVLDHTTPKMPEDKPRYLMGVGKPEDLVEGVRRGIDMFDCVMPTRNARNGHLFTSDGVVRIRNAQYRHDVGPLDKECDCYTCKNFSRSYLHHLDKCQEMVGAQLNTIHNLRYYQTLMAGLRQALDEGRFDAFVDEFYAKRGLETPALNKE

SEQ ID NO: 57339 - protein, 381 aa, Marinomonas mediterranea
  REGION 1..381: note = tr|F2JY80|F2JY80_MARM1 Queuine tRNA-ribosyltransferase OS=Marinomonas mediterranea (strain ATCC 700492 / JCM 21426 / NBRC 103028 / MMB-1); OX = 717774 GN=tgt PE=3 SV=1
MSEKRPECFMDFEVHATSGKARRATLSFPRGNVETPAFMPVGTYGTVKGMLTKDIEEIGADIILGNTFHLWLRPGTEVVKEHGDLHDFTQWKKPILTDSGGFQVFSLGEMRKITEDGVSFRSPVDGSKVFLNPEISMEVQRELGSDIVMIFDECTPYPATETEAAKSMRMSLRWAQRSKDAHGDSPSALFGIIQGSMYENLRDESLEGLTDIGFDGYAIGGLSVGEPKHEMMKVLDHVAHKMPEDKPRYLMGVGKPEDLVEGVRRGVDMFDCVMPTRNARNGHLFTSDGVVRIRNAKNRHDTRPLDEECDCYTCKNFSRAYLHHLDKCQEMVGAQLNTIHNLRYYQTLMAGLRTALDEGRFDAFVDEFYAKRGMETPPLSK

SEQ ID NO: 57340 - protein, 381 aa, Marinomonas polaris
  REGION 1..381: note = tr|A0A1M5G7I0|A0A1M5G7I0_9GAMM Queuine tRNA-ribosyltransferase OS=Marinomonas polaris DSM 16579; OX = 1122206 GN=tgt PE=3 SV=1
MSDKRPECFMDFELHTTSGKARRATLTFPRGKVETPAFMPVGTYGTVKGMLTKDIEEIGADIILGNTFHLWLRPGTDVVKAHGDLHDFTQWKKPILTDSGGFQVFSLGEMRKITEEGVSFRSPINGSKVFLSPEISMQVQRDLGSDIVMIFDECTPYPATPEVAAKSMRMSLRWAQRSKDEHGDSPSALFGIIQGSMYENLRDESLEGLVDIGFDGYAIGGLSVGEPKDEMMKVLDHTTPKMPEDKPRYLMGVGKPEDLVEGVRRGVDMFDCVMPTRNARNGHLFTSDGVVRIRNAQYRHDVGPLDKECDCYTCKNFSRSYLHHLDKCQEMVGAQLNTIHNLRYYQTLMAGLRQALDEGRFDAFVDEFYAKRGLETPALSE

SEQ ID NO: 57341 - protein, 381 aa, Marinomonas pollencensis
  REGION 1..381: note = tr|A0A3E0DG13|A0A3E0DG13_9GAMM Queuine tRNA-ribosyltransferase OS=Marinomonas pollencensis; OX = 491954 GN=tgt PE=3 SV=1
MSDKRPECFMDFDLHTTSGKARRATLTFPRGKVETPAFMPVGTYGTVKGMLTKDIEEIGADIILGNTFHLWLRPGTEVVKAHGDLHDFTQWKKPILTDSGGFQVFSLGEMRKITEEGVSFRSPINGSKVFLSPEISMQVQKDLGSDIVMIFDECTPYPATPERAADSMRMSLRWAKRSKQEHGDSPSALFGIIQGSMYENLRDESLEGLVDIGFDGYAIGGLSVGEPKEEMMKVLDYVTPKMPQDKPRYLMGVGKPEDLVEGVRRGVDMFDCVMPTRNARNGHLFTSEGVVRIRNATHRHDTAPLDKECDCYTCKNFSRSYLHHLDKCQEMVGAQLNTIHNLRYYQTLMAGLRQALDEGRFDAFVDEFYAKRGLETPPLSE

SEQ ID NO: 57342 - protein, 381 aa, Marinomonas posidonica
  REGION 1..381: note = tr|F6CXB3|F6CXB3_MARPP Queuine tRNA-ribosyltransferase OS=Marinomonas posidonica (strain CECT 7376 / NCIMB 14433 / IVIA-Po-181) OX=491952 GN=tgt; PE = 3 SV=1
MSEKRPECFMDFELHTSSGKARRATLTFPRGKVETPAFMPVGTYGTVKGMLTKDIEEIGADIILGNTFHLWLRPGTEVVKAHGDLHDFTQWKKPILTDSGGFQVFSLGEMRKITEEGVSFRSPINGSKVFLSPEISMQVQRDLGSDIVMIFDECTPYPATADVAAKSMRMSLRWAKRSKDEHGDSPSALFGIIQGSMFENLRDESLEGLEEIGFDGYAIGGLSVGEPKEEMIKVLDYITPKMPENKPRYLMGVGKPEDLVEGVRRGVDMFDCVMPTRNARNGHLFTSEGVVRIRNAQYRHDIDPLDKECDCYTCKNFSRAYLHHLDKCQEMVGAQLNTIHNLRYYQTLMAGLRKALDEGRFDAFVDEFYAKRGLETPALSE

SEQ ID NO: 57343 - protein, 381 aa, Marinomonas primoryensis
  REGION 1..381: note = tr|A0A2Z4PUR0|A0A2Z4PUR0_9GAMM Queuine tRNA-ribosyltransferase OS=Marinomonas primoryensis; OX = 178399 GN=tgt PE=3 SV=1
MSDKRPECFMDFDLHTTSGKARRATLTFPRGKVETPAFMPVGTYGTVKGMLTKDIEEIGADIILGNTFHLWLRPGTDVVKAHGDLHDFTQWKKPILTDSGGFQVFSLGEMRKITEEGVSFRSPINGSKVFLSPEISMQVQKDLGSDVVMIFDECTPHPATTDVAATSMRRSLRWAQRSKDEHGDSPSALFGIIQGSMYENLREESLEGLVDIGFDGYAIGGLSVGEPKEEMMKVLDFVTPKMPADKPRYLMGVGKPEDLVEGVRRGVDMFDCVMPTRNARNGHLFTSDGVVRIRNAQYREDIGPLDKECDCYTCKNFSRSYLHHLDKCKEMVGAQLNTIHNLRYYQTLMAGLRLALDEGRFDAFVDEFYAKRGLDVPVLSE

SEQ ID NO: 57344 - protein, 382 aa, unidentified
  source 1..382: note = Marinomonas profundimaris
  REGION 1..382: note = tr|W1RZX8|W1RZX8_9GAMM Queuine tRNA-ribosyltransferase OS=Marinomonas profundimaris; OX = 1208321 GN=tgt PE=3 SV=1
MSDKRPECFMDFDLHTTSGKARRATLTFPRGKVETPAFMPVGTYGTVKGMLTKDIEEIGADIILGNTFHLWLRPGTEVVKAHGDLHDFTQWKKPILTDSGGFQVFSLGEMRKITEEGVSFRSPINGSKVFLSPEISMQVQKDLGSDVVMIFDECTPHPATTDVAATSMRRSLRWAKRSKDEHGDSPSALFGIIQGSMYENLRDESLEGLVDIGFDGYAIGGLSVGEPKEEMMKVLDFVTPKMPEDKPRYLMGVGKPEDLVEGVRRGVDMFDCVMPTRNARNGHLFTSDGVVRIRNAQYRHDVGPLDKECDCYTCKNFSRSYLHHLDKCQEMVGAQLNTIHNLRYYQTLMAGLRLALDEGRFDAFVDEFYAKRGLDTPPLSEK

SEQ ID NO: 57345 - protein, 381 aa, Marinomonas rhizomae
  REGION 1..381: note = tr|A0A366JER5|A0A366JER5_9GAMM Queuine tRNA-ribosyltransferase OS=Marinomonas rhizomae OX=491948; GN = tgt PE=3 SV=1
MSDKRPECFMDFELHTTSGKARRATLTFPRGKVETPAFMPVGTYGTVKGMLTKDIEEIGADIILGNTFHLWLRPGTDVVKAHGDLHDFTQWKKPILTDSGGFQVFSLGEMRKITEEGVSFRSPINGSKVFLSPEISMQVQRDLGSDIVMIFDECTPYPATPEVAAKSMRMSLRWAQRSKDEHGDSPSALFGIIQGSMYENLRDESLEGLVDIGFDGYAIGGLSVGEPKDEMMKVLDHTTPKMPEDKPRYLMGVGKPEDLVEGVRRGVDMFDCVMPTRNARNGHLFTSDGVVRIRNAQYRHDVGPLDKECDCYTCKNFSRSYLHHLDKCQEMVGAQLNTIHNLRYYQTLMAGLRKALDEGRFDAFVDEFYAKRGLETPALSE

SEQ ID NO: 57346 - protein, 372 aa, Marinomonas sp.
  REGION 1..372: note = tr|A0A370U5F7|A0A370U5F7_9GAMM Queuine tRNA-ribosyltransferase OS=Marinomonas sp. YLB-05; OX = 2213058 GN=tgt PE=3 SV=1
MDFEVLATSGKARRARLSFPRGDVETPAFMPVGTYGTVKSMLTKDIEEIGADIILGNTFHLWLRPGTEVIKAHGDLHDFTQWKKPILTDSGGFQVFSLGAMRKITEEGVSFRSPVNGDKVFLSPEISMQVQRDLGSDIVMIFDECTPYPAKEDEAAKSMRMSLRWAQRSKDAHGDSPSALFGIIQGSMYETLRDESLEGLTNIGFDGYAIGGLSVGEPKEDMVRILDHLAHKMPDNKPRYLMGVGKPEDLVEGVRRGVDMFDCVMPTRNARNGHLFTSEGVVRIRNAFHRHDTSPLDKECDCYTCKNFSRSYLHHLDKCQEMVGAQLNTIHNLRYYQTLMAGLRKALDEGRFDAFVDEFYAKRGMETPPLNN

SEQ ID NO: 57347 - protein, 387 aa, Marinomonas sp.
  REGION 1..387: note = tr|A3YFR8|A3YFR8_9GAMM Queuine tRNA-ribosyltransferase OS=Marinomonas sp. MED121; OX = 314277 GN=tgt PE=3 SV=1
MTDKRPECFMDFEVAATSGKARRATLTFPRGKVETPAFMPVGTYGTVKGMLTKDIEEIGADIILGNTFHLWLRPGMEVIKAHGDLHDFTQWKKPILTDSGGFQVFSLGAMRKITEEGVSFQSPVNGSKVFMSPEISMQVQRDLGSDIVMIFDECTPYPATPERAAESMRMSLRWAKRSKAEHGDSPSALFGIIQGSMYDNLRDESLEGLVDIGFDGYAIGGLSVGEPKQEMMKVLDYITPKMPDDKPRYLMGVGKPEDLVEGVRRGVDMFDCVMPTRNARNGHLFTSEGVVKIRNAKHRHDVSPLDKECDCYTCKNFSRSYLHHLDKCQEMVGAQLNTIHNLRYYQTLMAGLRLALEEGRFDAFVDEFYAKRGLETPPLNAEQAIES

SEQ ID NO: 57348 - protein, 381 aa, unidentified
  source 1..381: note = Marinomonas spartinae
  REGION 1..381: note = tr|A0A1A8TCZ7|A0A1A8TCZ7_9GAMM Queuine tRNA-ribosyltransferase OS=Marinomonas spartinae; OX = 1792290 GN=tgt PE=3 SV=1
MSDKRPECFMDFELHNTSGKARRATLTFPRGKVETPAFMPVGTYGSVKGMLTKDIEEIGADIILGNTFHLWLRPGTEVIKAHGDLHDFTQWKKPILTDSGGFQVFSLGEMRKITEEGVSFRSPINGSKVFLSPEISMQVQKDLGSDIVMIFDECTPYPATPERAAASMRMSLRWAKRSKDEHGDSPSALFGIIQGSMYEHLRDESLEGLTDIGFDGYAIGGLSVGEPKEEMMKVLDYVTPKMPENKPRYLMGVGKPEDLVEGVRRGVDMFDCVMPTRNARNGHLFTSDGVVRIRNATNRHDTSPLDKECDCYTCKNFSRSYLHHLDKCQEMVGAQLNTIHNLRYYQTLMAGLRLALDEGRFDAFVDEFYAKRGLETPPLSD

SEQ ID NO: 57349 - protein, 373 aa, Marinomonas ushuaiensis
  REGION 1..373: note = tr|X7E3I2|X7E3I2_9GAMM Queuine tRNA-ribosyltransferase OS=Marinomonas ushuaiensis DSM 15871 OX=1122207 GN=tgt PE=3 SV=1
MDFELHTTSGKARRATLTFPRGKVETPAFMPVGTYGTVKGMLTKDIEEIGADIILGNTFHLWLRPGTDVIKAHGDLHDFTQWKKPILTDSGGFQVFSLGEMRKITEEGVSFRSPINGSKVFLSPEISMQVQRDLGSDIVMIFDECTPHPATTEVAATSMRRSLRWAKRSKDEHGDSPSALFGIIQGSMYENLRDESLEGLVDIGFDGYAIGGLSVGEPKEEMMKVLDHTTPKMPEDKPRYLMGVGKPEDLVEGVRRGVDMFDCVMPTRNARNGHLFTSDGVVRIRNAQYRHDVGPLDKECDCYTCKNFSRSYLHHLDKCQEMVGAQLNTIHNLRYYQTLMAGLRKALDEGKFDAFVDEFYAKRGLETPALSEK

SEQ ID NO: 57350 - protein, 390 aa, Marinoscillum furvescens
  REGION 1..390: note = tr|A0A3D9KXA7|A0A3D9KXA7_9BACT Queuine tRNA-ribosyltransferase OS=Marinoscillum furvescens DSM 4134 OX=1122208 GN=tgt PE=3 SV=1
MGVIRIGPTIFAAFMDFSLQHTDPKSKARAGVVTTDHGQIETPIFMPVGTAGTVKAVHQREIKEDIAAEIILGNTYHLYLRPGLEVIQAAGGLHKFNGWDRPILTDSGGYQVYSLGDNRKITEKGVRFKSHIDGSMHDFTPERVMDIQRVIGADIIMAFDECTPYPCERKYAEDSMHMTHRWLKRCIDHFDQTEPVYDYSQTLFPIVQGSTYPDLRRQSAEFIAEQGREGNAIGGLSVGEPHEDMYAMTELVCDILPKDKPRYLMGVGTPENILECIALGVDMFDCVMPTRNARNGMLFTSEGIINIKNERWKSDFSPIDPEIGGYVSTFYTRAYLRHLIMSKEMLGAQICSVHNLTFYLWLVKQAREQIKAGTFASWKNQMVKKVTTRL

SEQ ID NO: 57351 - protein, 381 aa, Marinoscillum sp.; identical to SEQ ID NO: 55282
  REGION 1..381: note = tr|A0A2D7TFN5|A0A2D7TFN5_9BACT Queuine tRNA-ribosyltransferase OS=Marinoscillum sp. OX=2024838; GN = tgt PE=3 SV=1
  VARIANT 74..75: note = Xaa can be any naturally occurring amino acid
  VARIANT 219: note = Xaa can be any naturally occurring amino acid
  VARIANT 237: note = Xaa can be any naturally occurring amino acid
  VARIANT 281: note = Xaa can be any naturally occurring amino acid
  VARIANT 307: note = Xaa can be any naturally occurring amino acid
  VARIANT 327: note = Xaa can be any naturally occurring amino acid
  VARIANT 357: note = Xaa can be any naturally occurring amino acid
  VARIANT 376: note = Xaa can be any naturally occurring amino acid

SEQ ID NO: 57352 - protein, 377 aa, Marinospirillum alkaliphilum
  REGION 1..377: note = tr|A0A1K1VZJ2|A0A1K1VZJ2_9GAMM Queuine tRNA-ribosyltransferase OS=Marinospirillum alkaliphilum DSM 21637 OX=1122209 GN=tgt PE=3 SV=1
MRSECFMQFDLLKTDGKARRGRISFPRGTIETPAFMPVGTYGTVKGILPRDVEDLGAEIVLGNTFHLMLKPGTDVIEAHGDLHDFMQWQKPILTDSGGFQVFSLGDLRKITEQGVHFRSPHDGAKVFMGPEESMAVQRKLGSDIVMIFDECTPYPASFSEAETSMELSLRWAKRSRIAHADSPSALFGIIQGGMYPDLRKRSLEGLLEIGFDGMAIGGLSVGEPKEEMIKTLDYLPALMPTDKPRYLMGVGKPEDLVEAVRRGVDMFDCVMPTRNARNGHYFTAEGVVKIRNARYKADTGPIEEGCDCHACQNFSRSYLHHLDRSGEMLGAMLGTIHNLRHYQRLMAGLRQAIEAGKLTGFVDEFYSRRGLPTPELA

SEQ ID NO: 57353 - protein, 378 aa, Marinospirillum celere
  REGION 1..378: note = tr|A0A1I1IXP9|A0A1I1IXP9_9GAMM Queuine tRNA-ribosyltransferase OS=Marinospirillum celere; OX = 1122252 GN=tgt PE=3 SV=1
MRPEASMQFDLLATDGKARRGRITFPRGSIETPAFMPVGTYGTVKGVLPRDIEDLGAEIVLGNTFHLMLKPGTEIIKAHGDLHDFMQWQRPILTDSGGFQVFSLGKLRKITEQGVHFRSPHNGAKVFMGPEESIQVQKDLGSDIVMIFDECTPYPATFSEAEKSMELSLRWAKRSRLAHGDSPAALFGIIQGGMYPDLRKRSLEGLNEIGFDGMAIGGLSVGEPKEEMLKTLNYLPALMPENKPRYLMGVGKPEDLVEGVRRGVDMFDCVMPTRNARNGHYFTAEGVVKIRNAKHKTAIGPIEEGCDCYACQHFSRAYLHHLDRSGEMLGAMLGTLHNLRHYQRLMASLRQAIEAGKLSSFVDDFYARRGQTTPPLGE

SEQ ID NO: 57354 - protein, 375 aa, unidentified
  source 1..375: note = Marinosulfonomonas sp.
  REGION 1..375: note = tr|A0A0P8Z0Y8|A0A0P8Z0Y8_9RHOB Queuine tRNA-ribosyltransferase OS=Marinosulfonomonas sp. PRT-SC04; OX = 1527300 GN=tgt PE=3 SV=1
MKKFSFDLAATDGKARTGTIRTPRGDIRTPAFMPVGTAATVKAMLPENVAATGADILLGNTYHLMLRPTAERIANLGGLHKFMNWERPILTDSGGFQVMSLSDLRKMSENGVTFKSHIDGSLHEITPERSMEIQQLLGSDIVMCFDECTPHPAPEDVALKSMQMSMRWAKRSRDAFGDRPGHALFGIQQGSVFQDQREESAKALTDIGFEGYAVGGLAVGEGQQVMFEVLDYATDMLPCDKPRYLMGVGKPDDLVGGGKRGIDMFDCVLPSRSGRTGQVFTRNGVLNIKNARHRDDPRPLDENCSCPACKNYSRAYLHHVFRSQEIIASMLMTWHNLHYYQELMATMRAAIAAGKFNDFEIAFHAQRAEGDIEPI

SEQ ID NO: 57355 - protein, 375 aa, unidentified
  source 1..375: note = Marinosulfonomonas sp.
  REGION 1..375: note = tr|A0A2G2B542|A0A2G2B542_9RHOB Queuine tRNA-ribosyltransferase OS=Marinosulfonomonas sp.; OX = 2030815 GN=tgt PE=3 SV=1
  VARIANT 170: note = Xaa can be any naturally occurring amino acid
  VARIANT 172: note = Xaa can be any naturally occurring amino acid
  VARIANT 192: note = Xaa can be any naturally occurring amino acid
  VARIANT 194..195: note = Xaa can be any naturally occurring amino acid
  VARIANT 265: note = Xaa can be any naturally occurring amino acid
MTQFSFDLAATDGKARTGTIHTPRGDIRTPAFMPVGTAATVKAMLPENVRATGADILLGNTYHLMLRPTAERIANLGGLHKFMNWQRPILTDSGGFQVMSLSDLRKMSENGVTFKSHIDGSEHEITPERSMEIQRLLGSDIVMCFDECTPHPSPEDVALKSMQMSMRWAXRXREAFGDRPGHALFGIQQGSXFXXQREESAAALTDIGFEGYAVGGLAVGEGQEVMFEVLDYAPDMLPTDKPRYLMGVGKPDDLVGAVKRGIDMXDCVLPSRSGRTGQIFTRNGVLNIKNARHRDDPRPLDEDCSCPACKNYSRAYLHHVFKAQEIISSMLMTWHNLHYYQELMAGMRCAIAAGAFANFEARFHAMRAGGDIEPI

SEQ ID NO: 57356 - protein, 404 aa, Marinovum algicola
  REGION 1..404: note = tr|A0A0H4KXH2|A0A0H4KXH2_9RHOB Queuine tRNA-ribosyltransferase OS=Marinovum algicola DG 898; OX = 988812 GN=tgt PE=3 SV=1
MHGLQAKAEPARVKSALSTNAVKPGKSGRMTQTSFTLHASDGRARTGVISTPRGEIRTPAFMPVGTAATVKAMLPESVRETGADILLGNTYHLMLRPTAERIDRLGGLHDFMNWQRPILTDSGGFQVMSLASLRKLTEQGVSFKSHIDGSKHMLSPERSMEIQRLLGSDIVMCFDECPALPADRDRIAESMELSMRWAARSKAAFGDRPGHMLFGIQQGGLEQDLRQHSAEALREIGFDGYAIGGLAVGEGQEAMFGCLDFAPGQLPEDRPRYLMGVGKPDDIVGAVARGVDMMDCVLPSRSGRTGQVFTRLGQLNIKNARHQDDPRPLDEDCGCPTCRNYSRAYLHHVFRSQEIISSMLLTWHNLHYYQELMDGMRTAIAKGGFAQWASEFHAQRAQGDIDPL

SEQ ID NO: 57357 - protein, 376 aa, Marinovum sp.
  REGION 1..376: note = tr|A0A2E4R1T0|A0A2E4R1T0_9RHOB Queuine tRNA-ribosyltransferase OS=Marinovum sp. OX=2024839 GN=tgt; PE = 3 SV=1
  VARIANT 27: note = Xaa can be any naturally occurring amino acid
  VARIANT 52: note = Xaa can be any naturally occurring amino acid
MTDRFSYSVAASDGKARTGKISTPRGXIRTPAFMPVGTAATVKAMMPESVAXTGADILLGNTYHLMLRPGAERVDALGGLHNFMNWQRPILTDSGGFQVMSLAGLRKLTERGVTFKSHVDGSKHEITPERSMDIQRLLGSDIVMCFDECTPFPADEKTALDSMQLSMRWAARSKEAFGDRPGHALFGIQQGSVFPEQRAESAEALKAIGFDGYAVGGLAVGEGQEAMFSVLDYAPDMLPQDKPRYLMGVGKPDDIVGAVKRGIDMMDCVLPSRSGRTGQAFTRQGVVNIKNARHQDDPRPLDSACSCPACKNYSRAYLHHVFRSQEMISGMLLTWHNLQYYQDLMADMRAAIAAGRFASFEAEFHAQRAAGDIAPL

SEQ ID NO: 57358 - protein, 376 aa, Marinovum sp.
  REGION 1..376: note = tr|A0A2D5IG55|A0A2D5IG55_9RHOB Queuine tRNA-ribosyltransferase OS=Marinovum sp. OX=2024839 GN=tgt; PE = 3 SV=1
MSKNFSFSLNATDGKARSGLISTPRGDIRTPAFMPVGTAATVKAMLPESVGATGADVLLGNTYHLMLRPGAERIDALGGLHKFMNWDRPILTDSGGFQVMSLSGLRKMTESGVTFKSHIDGSQHVLSPERSMEIQRLLGSDIVMAFDECTPFPADPDTSLQSMQLSMRWAKRSRDGFGDRPGHALFGIQQGSIYQDQRAESAEALKSIGFDGYAVGGLAVGEGQETMFKVLEYAPDMLPSDKPRYLMGVGKPDDIVGAVKRGIDMMDCVLPSRSGRTGQVFTRRGVINIKNARHQNDPRPLDENCSCPACTGYSRAYLHHVFRAQEMISGMLLTWHNLHYFQELMQSMRDAIAMQKFAEFEQNFHAMRAAGDIEPL

SEQ ID NO: 57359 - protein, 374 aa, unidentified
  source 1..374: note = Mariprofundus aestuarium
  REGION 1..374: note = tr|A0A2K8L1A6|A0A2K8L1A6_9PROT Queuine tRNA-ribosyltransferase OS=Mariprofundus aestuarium; OX = 1921086 GN=tgt PE=3 SV=1
MSSLSFEIVANDENGYARAGRMQLPHGLVETPVFMPVGTQATVKSLTPADLTDDIQASIILGNTYHLMLRPGADLVEKMGGLHKFMAWNRPILTDSGGFQVWSLGELRKIEAHGVRFRSHIDGREVFLGPKESMDIQRKLGSDIVMAFDECTPYPATFKEANDSMQLSMRWASECREHLPVNDTQALFGIVQGGMYPELRLESLKAISEIDFEGIAIGGLSVGEPKEEMMAMMDALAPHLPKEKPHYVMGVGTPDDLIEGIDRGIDMFDCVMPTRNARNGTLFTDDGKINIKNLKHAEDKRPIMESCNCYTCKNFSRAYLRHLYMAKEILSSRLNTLHNLHYYCDLMSRARNALVEGNWPEFRDNFLQRYRSEA

SEQ ID NO: 57360 - protein, 374 aa, unidentified
  source 1..374: note = Mariprofundus ferrinatatus
  REGION 1..374: note = tr|A0A2K8L9P7|A0A2K8L9P7_9PROT Queuine tRNA-ribosyltransferase OS=Mariprofundus ferrinatatus; OX = 1921087 GN=tgt PE=3 SV=1
MSALSFKILARDANSYARAGRIELPHGVVETPVFMPVGTQATVKSLTPADLTDDIKASIILGNTYHLMLRPGADLVERLGGLHKFMAWERPILTDSGGFQVWSLGELRKIEEHGVRFRSHIDGREVFLGPKESMDIQRKLGSDIVMAFDECTPYPATWNEANDSMQLSMRWAAECREHLPVNDSQALFGIVQGGMYPELRLESLKAISAIDFEGIAIGGLSVGEPKKEMMAMMDALAPHLPEHKPHYVMGVGTPDDLIEGIDRGIDMFDCVMPTRNARNGTIFTDDGKINIKNLKHAEDERPIMEECNCYTCKHFSRAYLRHLYMSKEILSSRLNTLHNLHYYCHLMSRARNALIEGNWPEFRDNFLQRYRGEA

SEQ ID NO: 57361 - protein, 53 aa, Mariprofundus ferrooxydans
  REGION 1..53: note = tr|Q0EY74|Q0EY74_9PROT Queuine tRNA-ribosyltransferase OS=Mariprofundus ferrooxydans PV-1; OX = 314345 GN=SPV1_05307 PE=4 SV=1
MVNVNHQYRLFIDAGIVRHVNGKHQKLVRVACWLRHLGHTLYVEDEQGMQIQV

SEQ ID NO: 57362 - protein, 374 aa, Mariprofundus ferrooxydans
  REGION 1..374: note = tr|Q0EY73|Q0EY73_9PROT Queuine tRNA-ribosyltransferase OS=Mariprofundus ferrooxydans PV-1; OX = 314345 GN=tgt PE=3 SV=1
MSALSFEILATDANGYARRGRMQLAHGVVETPVFMPVGTQATVKSMTPADLTDDIKADIILGNTYHLMLRPGADLVEKMGGLHRFMGWERPILTDSGGFQVWSLGELRKIEEHGVRFRSHIDGAEVFLGPKESMEIQRKLGSDIVMAFDECTPYPATYAEAEESMQMSMRWAGECREHLPVNETQALFGIVQGGMYPELRIKSLQALSAIDFEGIAIGGLSVGEPKEEMMAMLDALAPHLPVDKPHYVMGVGTPDDLIEGIDRGIDMFDCVMPTRNARNGTLFTDDGKLNIKNLCHAEDPRPIMHDCDCYTCRNFSRAYLRHLYMAKEILSSRLNTLHNLHYYCTLMQRARDAIAEENWPAFRHQFLQRYRGKA

SEQ ID NO: 57363 - protein, 374 aa, unidentified
  source 1..374: note = Mariprofundus micogutta
  REGION 1..374: note = tr|A0A1L8CJS7|A0A1L8CJS7_9PROT Queuine tRNA-ribosyltransferase OS=Mariprofundus micogutta; OX = 1921010 GN=tgt PE=3 SV=1
MAALSFEILAKDESGYARRGRMQLPHGIVETPVFMPVGTQATVKSLTPADLTDDINASIILGNTYHLMLRPGADLVEKMGGLHQFMAWERPILTDSGGFQVWSLGELRKIEQHGVRFRSHIDGREVFLGPKESMEIQRKLGSDIVMAFDECTPYPATLEEAEASMQLSMRWAGECREHLPAGDTQALFGIVQGGMYPELRLQSLEAIAAIDFEGIAIGGLSVGEPKQEMMGMMDALAPHLPEDKPHYVMGVGTPDDLIEGIDRGIDMFDCVMPSRNARNGTLFTDDGKINIKNLKHFDDERPIMESCNCYTCKHFSRSYLRHLYMAKEILSSRLNTLHNLHYYCDLMHRARTALEEGNWPQFRDQFLQRYRGEA

SEQ ID NO: 57364 - protein, 374 aa, Mariprofundus sp.
  REGION 1..374: note = tr|A0A498DLY0|A0A498DLY0_9PROT Queuine tRNA-ribosyltransferase OS=Mariprofundus sp. EBB-1; OX = 2650971 GN=tgt PE=3 SV=1
MSALSFEILAKDKTGYARRGRVTLPHGTVETPVFMPVGTQATVKSLTPADLTDDIEASIILGNTYHLMLRPGADLVEKMGGLHKFMAWDRPILTDSGGFQVWSLGELRKIEEHGVRFRSHIDGREVFLGPKESMEIQRQLGSDIVMAFDECTPYPATYEEANDSMQMSMRWAGECREALPVNDTQALFGIVQGGMYPELRLESLKAVADIDFEGIAIGGLSVGEPKEEMMAMLDALAPHLPEDKPHYVMGVGTPADLIEGIDRGIDMFDCVMPSRNARNGTLFTDDGKINIKNLKHFDDKRPIMDDCSCYTCKNFSRAYLRHLFMAKEILSSRLNTLHNLHYYCDLMKRARTALEQGNWPEFKKQFLQRYHSNA

SEQ ID NO: 57365 - protein, 370 aa, unidentified
  source 1..370: note = Marisediminitalea aggregata
  REGION 1..370: note = tr|A0A1M5GX29|A0A1M5GX29_9ALTE Queuine tRNA-ribosyltransferase OS=Marisediminitalea aggregata; OX = 634436 GN=tgt PE=3 SV=1
MQFELLHTDGKARRGRLVFERGVVETPAFMPVGTYGTVKGMTPEELEDSGAHICLGNTFHLMLRPGTGIIKQHGDLHDFMHWDKPILTDSGGFQVFSLGDLRKITEEGVTFRSPINGEKILLTPEKSMEVQRDLGSDIVMIFDECTPYPATEQEARISMELSLRWAKRSKDAHGDNPSALFGIIQGGMYEDLRDVSLAGLEDIGFDGYAIGGLSVGEPKDDMIRIINHTAPKIPENKPRYLMGVGKPEDIVEAVRRGIDMFDCVMPTRNARNGHLFVTEGVIKIRNAKHKHDTGPLDENCDCYTCKNYSRSYLHHLDKCNEILGARLNTIHNLRYYQRVMQGLRDAIANDALDAFVEEFYAQKNMPVPAL

SEQ ID NO: 57366 - protein, 376 aa, unidentified
  source 1..376: note = Marispirochaeta aestuarii
  REGION 1..376: note = tr|A0A1Y1S2Q7|A0A1Y1S2Q7_9SPIO Queuine tRNA-ribosyltransferase OS=Marispirochaeta aestuarii; OX = 1963862 GN=tgt PE=3 SV=1
MSIKFTVTERDGTSLARNGILELAHGSMETPAFMPVGTNGSVKAISHQKLEEMGVPLILGNTYHLYLRPGTEVIDAYGGLHQFSSWKGNILTDSGGFQVFSLATFRKITEEGVRFRSHIDGSYHELTPEKVVGIQNSLNSDIAMVLDVCTPPDIEYREALKALEITTAWAKRSLKEWQLHDPAPGRALFPILQGNFYKDLRQRSAEELLPLDFPGVAVGGLSVGEPFPLFLEMLHHTGELLPPEKPHYLMGIGTPEYILAAVENGIDLFDCVFPTRIARNGSVFTPRGVMALKNARFEKDTGPIDSECDCTACRRYSRAYIRHLFKAKEILGPMLATEHNIHFLMRMTRNIRTAIRNSAFREYKEAFLDEYRGKHT

SEQ ID NO: 57367 - protein, 376 aa, Maritalea mobilis
  REGION 1..376: note = tr|A0A4R6VQG4|A0A4R6VQG4_9RHIZ Queuine tRNA-ribosyltransferase OS=Maritalea mobilis OX=483324; GN = tgt PE=3 SV=1
MTQDFAFELKSKSNGARLGEISTPRGEIRTPAFMPVGTAATVKGMYPDQVRELGADIILGNTYHLMLRPGAERVAHLGGLHKFANWSRPILTDSGGFQVMSLAKLRKLDEHGVSFKSHIDGSKHMLTPERSIEIQTLLGADIQMQLDECVALPSTREDIQRAMELSVRWAERSKNAFGTQPGRALFGIVQGGDQEDLRLRSAQALTEIGFKGYAVGGLAVGEPQETMFEVLDYTTPALPQDRPRYLMGVGKPDDLLGAVKRGIDMFDCVHPTRAGRHGHAYTKYGVINLKNARHKDDARPLDETSSNPNCQIYQRAYLHHLIRANEMLGAMILSQINLAYYQTLMQGMRDAIAEDRFDDFAAETREGWAKGDIPPL

SEQ ID NO: 57368 - protein, 377 aa, Maritalea myrionectae
  REGION 1..377: note = tr|A0A2R4MFK7|A0A2R4MFK7_9RHIZ Queuine tRNA-ribosyltransferase OS=Maritalea myrionectae OX=454601; GN = tgt PE=3 SV=1
MTTDFAFEFKSESNGARLGEISTPRGEIRTPAFMPVGTAATVKGMYPDQVRETGADIILGNTYHLMLRPGAERVAHLGGLHKFANWSRPILTDSGGFQVMSLAKLRKLDEKGVSFKSHIDGSKHMLTPERSIEIQTLLGADIQMQLDECVALPSTREDIQRAMELSIRWAERSKNAFGTQPGRALFGIVQGGDQEDLRLRSAQALTEIGFKGYAVGGLAVGEPQETMFEVLDYTTPALPQDRPRYLMGVGKPDDLLGAVKRGIDMFDCVHPTRAGRHGHAYTKYGVINLKNARHKDDARPLDETSSNPNCQIYQRAYLHHLIRANEMLGAMILSQINLAYYQTLMQGMRDAIAADRFDDFAAETREGWAKGDIPPLS

SEQ ID NO: 57369 - protein, 380 aa, Maritimibacter alkaliphilus
  REGION 1..380: note = tr|A3VDX4|A3VDX4_9RHOB Queuine tRNA-ribosyltransferase OS=Maritimibacter alkaliphilus HTCC2654 OX=314271 GN=tgt PE=3 SV=1
MSAAMTERFSYSLNATDGKARTGVISTPRGEIRTPAFMPVGTAATVKAMLPESVAATGADILLGNTYHLMLRPGAERVERLGGLHRFMNWDKPILTDSGGFQVMSLAELRKLTEEGVTFRSHVDGSKHVLSPETSMEIQRQLGSDIVMCFDECPALPADETTVAQSMRLSMRWAQRSRDAFGDRPGHALFGIQQGGVTEDLRGESAEALTAIGFDGYAIGGLAVGEGQEAMFGVLDYAPGMLPEDKPRYLMGVGKPDDIVGAVKRGVDMMDCVLPSRSGRTGQAWTRRGQVNIKNARHADDPRPLDEACACPACTGYSRAYLHHVFRAGEMISGMLLTWHNLHYYQELMSHMRAAIAEGRFTAFEAQFHALRAEGDIDPL

SEQ ID NO: 57370 - protein, 376 aa, Maritimibacter sp.
  REGION 1..376: note = tr|A0A1X7MWE9|A0A1X7MWE9_9RHOB Queuine tRNA-ribosyltransferase OS=Maritimibacter sp. HL-12; OX = 1162418 GN=tgt PE=3 SV=1
MPDRFSFALHATDGKARTGVISTPRGQIRTPAFMPVGTAATVKAMMPESVAATGADILLGNTYHLMLRPGAERIDRLGGLHRFMNWSGPILTDSGGFQVMSLAELRKLTEEGVTFRSHVDGSRHSLTPERSMEIQKLLGSDIVMCFDECPALPADEAVVARSMRLSMRWAERSKAAFGDRPGHALFGIQQGGVTPELRAESAEKLKEIGFDGYAIGGLAVGEGQEAMFGVLDVAPDMLPEDRPRYLMGVGKPDDIVGAVKRGVDMMDCVLPTRSGRTGQAWTRRGPVAIKNARHADDPRPLDEECACPACRSYSRAYLHHVFRSGEIISSMLLTWHNLQYYQDLMAGMRAAIAAGEFATFEAEFHALRAEGDIERL

SEQ ID NO: 57371 - protein, 371 aa, Maritimibacter sp.
  REGION 1..371: note = tr|A0A3D0G220|A0A3D0G220_9RHOB Queuine tRNA-ribosyltransferase (Fragment) OS=Maritimibacter sp.; OX = 2003363 GN=DEO85_00605 PE=3 SV=1
MTQRFSFSLDATDGKARTGVISTPRGEIRTPAFMPVGTAATVKAMMPESVAATGADILLGNTYHLMLRPGADRVERLGGLHRFMNWAGPILTDSGGFQVMSLAELRRLTEEGVTFRSHVDGSRHMLSPESSMEIQKKLGSDIVMCFDECPALPAEHKRIADSMRLSMRWAQRSRDAFGDRPGHALFGIQQGGDVEELRGESAEALKAIEFDGYAIGGLAVGEGQEVMFKVLDYAPGMLPIDKPRYLMGVGKPDDIVGAVKRGVDMMDCVLPSRSGRTGQVWTRRGQVNIKNARHADDPRPLDESCRCPACSNYSRAYLHHVFRSGEIISSMLLTWHNLHYYQELMGEMRAAIAEGTFDAFAARFHALRAEG

SEQ ID NO: 57372 - protein, 376 aa, Marivirga sericea
  REGION 1..376: note = tr|A0A1X7ILP6|A0A1X7ILP6_9BACT Queuine tRNA-ribosyltransferase OS=Marivirga sericea OX=1028; GN = tgt PE=3 SV=1
MQFTISNKDKNSNARAGELTTAHGNIKTPIFMPVGTAGSVKAVHQRELKDDIQAQIILGNTYHLYLRPGLDILQKAGGLHKFNGWDKPILTDSGGYQVYSLSGTRKIKEEGVTFKSHIDGSKHIFSPEGVMDIQRKIGADIIMAFDECTPYPCDYEYARKSMDMTHRWLDRCIAQFDSTEGNYGYEQTLFPIVQGSTYKDLRKRSAEEIASKGRSGNAIGGLSVGEPAEDMYEMTELVCDILPEDKPRYLMGVGTPANILECIALGVDMFDCVMPTRNARNGMLFTTEGIINIRNKKWEDDFSAIDPALGTYVDTFYTKAYLRHLMHSKEILGAQIASIHNLTFYLWLVEQAREQITSGTFYDWKQKMVKKLMTRL

SEQ ID NO: 57373 - protein, 376 aa, Marivirga tractuosa
  REGION 1..376: note = tr|E4TMM3|E4TMM3_MARTH Queuine tRNA-ribosyltransferase OS=Marivirga tractuosa (strain ATCC 23168 / DSM 4126 / NBRC 15989 / NCIMB 1408 / VKM B-1430 / H-43) OX=643867GN=tgt PE=3 SV=1
MQFTISNKDQNSNARAGELTTAHGNIKTPIFMPVGTAGSVKAVHQRELKEDIQAQIILGNTYHLYLRPGLEVLQKAGGLHKFNGWDKPILTDSGGYQVYSLSGTRKIKEEGVTFKSHIDGSSHIFSPEGVMDIQRKIGADIIMAFDECTPYPCDYEYARKSMDMTHRWLDRCIKQFDKTEGHYGYDQSLFPIVQGSTYKDLRKRSAEEIASKGREGNAIGGLSVGEPAEDMYEMTELVCDILPQDKPRYLMGVGTPANILECIALGVDMFDCVMPTRNARNGMLFTTEGIINIRNKKWEDDFSPIDPALGSYVDTFYTKAYLRHLIHSKEILGAQIASIHNLTFYLWLVEQAREQITSGTFYEWKEKMVKKLMTRL

SEQ ID NO: 57374 - protein, 376 aa, Marivita cryptomonadis
  REGION 1..376: note = tr|A0A1X4NX53|A0A1X4NX53_9RHOB Queuine tRNA-ribosyltransferase OS=Marivita cryptomonadis; OX = 505252 GN=tgt PE=3 SV=1
MTVSSSFALHATDGLARTGAITTPRGTIRTPAFMPVGTAATVKAMMPESVAATGADILLGNTYHLMLRPTAERIDRLGGLHRFMNWNKPILTDSGGFQVMSLADLRKLTEKGVTFKSHIDGSKHELTPERSMEIQRLLSSDIVMCFDECPALPADRDRIAESMRLSMRWAERSKEAFGDRPGHMLFGIQQGGLEQDFREESAEALKAIGFDGYAIGGLAVGEGQDAMFGCLDFAPSQLPVDRPRYLMGVGKPDDIVGAVKRGVDMMDCVLPSRSGRTGQAWTRRGQVNIKNARHQDDPRPLDEECTCPACRNYSRAYLHHVFRAQEMISGMLLTWHNLHYYQELMQGMRDAIAGGQFAEFEARFHAQRASGDIEPL

SEQ ID NO: 57375 - protein, 376 aa, unidentified
  source 1..376: note = Marivita geojedonensis
  REGION 1..376: note = tr|A0A1X4NNG3|A0A1X4NNG3_9RHOB Queuine tRNA-ribosyltransferase OS=Marivita geojedonensis; OX = 1123756 GN=tgt PE=3 SV=1
MTVSSFFTLHATDGTARTGVIETPRGAIRTPAFMPVGTAATVKAMMPESVAATGADILLGNTYHLMLRPTAERIARLGGLHRFMNWSKPILTDSGGFQVMSLSDLRKLTEKGVTFKSHIDGSKHELTPERSMEIQRLLGSDIVMCFDECPALPADRDRIAESMRLSMRWAERSKDAFGDRPGHMLFGIQQGGLEQDFREESAEALKAIGFDGYAVGGLAVGEGQAAMFQCLDFAPGQLPQDKPRYLMGVGKPDDIVGAVRRGIDMMDCVLPSRSGRTGQAWTRRGQVNIKNARHQDDPRPLDENCTCPACRNYSRAYLHHVFRAQEMISGMLLTWHNLHYYQELMQAMRDAISSGTFAAFEAQFHALRAEGDIEPV

SEQ ID NO: 57376 - protein, 375 aa, Marivita hallyeonensis
  REGION 1..375: note = tr|A0A1M5RDU7|A0A1M5RDU7_9RHOB Queuine tRNA-ribosyltransferase OS=Marivita hallyeonensis; OX = 996342 GN=tgt PE=3 SV=1
MTKTSFTLQATDGLARTGRIDTPRGTIRTPAFMPVGTAATVKAMMPESVAATGADILLGNTYHLMLRPTAERIDRLGGLHRFMNWDKPILTDSGGFQVMSLADLRKLTEKGVTFKSHIDGSKHELTPERSMDIQRLLGSDIVMCFDECPALPADRDRIAESMRLSMRWAQRSRDAFGDRPGYMLFGIQQGGLEEDLRAESAEALRAIGFDGYAVGGLAVGEGQEAMFGCLEYAPGQLPEDKPRYLMGVGKPDDIVGAVKRGIDMMDCVLPSRSGRTGQAWTRRGQVNIKNARHQDDPRPLDEDCTCPACRNYSRAYLHHVFRAQEMISGMLLTWHNLHYYQELMQGMREAIAAGQFAAFEADFHALRAEGDIASF

SEQ ID NO: 57377 - protein, 376 aa, Marivita sp.
  REGION 1..376: note = tr|A0A316KP47|A0A316KP47_9RHOB Queuine tRNA-ribosyltransferase OS=Marivita sp. XM-24bin2; OX = 2133951 GN=tgt PE=3 SV=1
MTVFSSFALHATDGTARTGAITTPRGTIRTPAFMPVGTAATVKAMMPESVAATGADILLGNTYHLMLRPTAERIARLGGLHKFMNWDKPILTDSGGFQVMSLADLRKLTEKGVTFKSHIDGSRHELTPERSMEIQRLLGSDIVMCFDECPALPADRDRIAESMRLSMRWAERSKEAFGDRPGHMLFGIQQGGLEQDFREESAQALRAIGFDGYAIGGLAVGEGQEAMFDCLDFAPNQLPEDKPRYLMGVGKPDDIVGAVKRGVDMMDCVLPSRSGRTGQAWTRRGQVNIKNARHQDDPRPLDEECTCPACRNYSRAYLHHVFRAQEMISGMLLTWHNLHYYQELMQAMRDAIAAGTFAAFEADFHAKRAEGDIPPI

SEQ ID NO: 57378 - protein, 375 aa, unidentified
  source 1..375: note = Marivivens niveibacter
  REGION 1..375: note = tr|A0A251WUR4|A0A251WUR4_9RHOB Queuine tRNA-ribosyltransferase OS=Marivivens niveibacter; OX = 1930667 GN=tgt PE=3 SV=1
MTRFSFDLHNTDGKARTGVIHTPRGDIRTPAFMPVGTAATVKAMMPESVAATGADILLGNTYHLMLRPTAERVDRMGGLHKFMNWDKPILTDSGGFQVMSLADLRKLTEDGVTFKSHVDGSKHFLSPERSMEIQKLLGSDIVMCFDECPALPADEQTVAESMRLSMRWAQRSRDAFGDRPGHALFGIMQGGVTPHLREESAKALVDIGFEGYAIGGLAVGEGQEAMFGVLEYAPDFLPTDKPRYLMGVGKPDDIVGAVKRGVDMMDCVLPSRSGRTGQAWTHRGQVNIKNARHQDDPRPLDENCTCPCCRNYSRAYLHHVFRAKEMISGMLLTWHNLHYYQEIMAGMRGAIAKGEFAAWEADFHAKRAMGDIEPV

SEQ ID NO: 57379 - protein, 376 aa, Marixanthomonas ophiurae
  REGION 1..376: note = tr|A0A3E1Q626|A0A3E1Q626_9FLAO Queuine tRNA-ribosyltransferase OS=Marixanthomonas ophiurae; OX = 387659 GN=tgt PE=3 SV=1
MQFNLEKTDPESQARAGTITLDHGPVETPIFMPVGTVGTVKGVHQRELSQDINPDIILGNTYHLYLRPQTDILEKAGGIHKFMNWDRNILTDSGGYQVYSLSANRKIKEEGVKFKSHIDGSMHFFTPENVMEIQRTIGADIIMAFDECTPYPCDYKYAKRSMHMTHRWLDRCISHLEKTPLKYDYNQTFFPIVQGSTYKDLRKQSAEYIASVGAAGNAIGGLSVGEPAEEMYAMTEVVTDILPEDKPRYLMGVGTPINLLENIALGIDMFDCVMPTRNGRNGMLFTAHGSINIKNKKWEDDFSPIDDMDITWVDTAYSKAYVRHLFKVKELLGMQIATIHNLGFYLWLVREARKHILAGDFTSWKNKMVKQMDKRL

SEQ ID NO: 57380 - protein, 376 aa, Marixanthomonas sp.
  REGION 1..376: note = tr|A0A2U0I5K5|A0A2U0I5K5_9FLAO Queuine tRNA-ribosyltransferase OS=Marixanthomonas sp. HN-E44; OX = 2174845 GN=tgt PE=3 SV=1
MQFKLENTDPESQARAGTITLDHGPVETPIFMPVGTVGSVKGVHQRELSNDINPDIILGNTYHLYLRPQTTVLEKAGGLHKFMNWDRNILTDSGGYQVYSLSANRKIKEEGVKFKSHIDGSMHFFTPENVMEIQRTIGADIIMAFDECTPYPCDYNYAKRSMHMTHRWLDRCVAHLGKTPLKYDYNQTLFPIVQGSTYKDLRKQSAEYIASVGAAGNAIGGLSVGEPAEEMYAMTEVVTEILPKDKPRYLMGVGTPINLLENIALGIDMFDCVMPTRNGRNGMLFTAHGTINIKNKKWETDFSPIDEMDITWVDTAYSKAYVRHLFKVKELLGMQIATIHNLGFYLWLVREARKHILAGDFTSWKNKMVKQMDKRL

SEQ ID NO: 57381 - protein, 377 aa, unidentified
  source 1..377: note = Martelella endophytica
  REGION 1..377: note = tr|A0A0D5LT19|A0A0D5LT19_9RHIZ Queuine tRNA-ribosyltransferase OS=Martelella endophytica; OX = 1486262 GN=tgt PE=3 SV=1
MSEDFRFTLKNTDGNARLGEISMPRGVIRTPAFMPVGTAGTVKAMYLDQVRDLGADIILGNTYHLMLRPGAERVARLGGLHSLIRWPHPILTDSGGFQVMSLAALREIDERKGVTFKSHIDGSVHHMSPERSIEIQGLLGSDIQMQLDECVRLPAERPEIEKSTEMSLAWAERCRVAFGDQPGKAMFGIVQGGDIPDLRVRSARGLADLDLKGYAVGGLAVGEPQAVMLDMLEITLPELPTQKPRYLMGVGTPDDILKSVARGIDMFDCVMPTRAGRHGLAFTRRGKVNLRNARHAEDLRPLDEESICPATRDYSRAYLHHLVRANESLAGMLLTWNNLHYYQQLMQGIRAAIAEGRYEDFMAETQEGWARGDVPAL

SEQ ID NO: 57382 - protein, 377 aa, Martelella mediterranea
  REGION 1..377: note = tr|A0A1U9Z3L0|A0A1U9Z3L0_9RHIZ Queuine tRNA-ribosyltransferase OS=Martelella mediterranea DSM 17316 OX=1122214 GN=tgt PE=3 SV=1
MSEDFRFTLKATDGNARLGAITMPRGEIRTPAFMPVGTAGTVKAMYLDQVRDLGADIILGNTYHLMLRPGAERVARLGGLHSLIRWPHPILTDSGGFQVMSLAALREIDENNGVTFKSHIDGSVHHMSPERSIEIQGLLGSDIQMQLDECVRLPAERAEIEKSTEMSLAWAERCREAFGDQPGKAMFGIVQGGDIPDLRIRSARGLADLDLKGYAVGGLAVGEPQDVMLAMLETTLPELPAEKPRYLMGVGTPDDILKSVARGIDMFDCVMPTRAGRHGLAFTRRGKVNLRNARHAEDLRPLDEESDCPATRDYSRAYLHHLVRSNESLGGMLLTWNNLHYYQQLMQGIRKAIAEGRYDDFVAETQEGWARGDVAAI

SEQ ID NO: 57383 - protein, 377 aa, Martelella mediterranea
  REGION 1..377: note = tr|A0A4R3NT22|A0A4R3NT22_9RHIZ Queuine tRNA-ribosyltransferase OS=Martelella mediterranea; OX = 293089 GN=tgt PE=3 SV=1
MNDKFQFTLKNTSDKARLGEITMPRGVIRTPAFMPVGTAGTVKAMYLDQVRELGADIILGNTYHLMLRPGAERVARLGGLHALIRWPYPILTDSGGFQVMSLAALRQIDEKKGVTFKSHIDGSVHHMSPERSIEIQGLLGSDIQMQLDECVRLPAERQEIERAMEMSLRWAERCREAFGEQPGKAMFGIVQGGDIPDLRVRSAEGLAALDLKGYAVGGLAVGEPQAVMLDMLNVTLPVLPKEKPRYLMGVGTPDDILKSVACGIDMFDCVMPTRAGRHGLAFTRRGKVNLRNARHAEDLRPLDEESECPATRDYSRAYLHHLVRANESLAGMLLTWNNLHYYQDLMKGIRASIAEGRFADFMAETQDIWARGDLDPV

SEQ ID NO: 57384 - protein, 377 aa, Martelella sp.
  REGION 1..377: note = tr|A0A127CIE3|A0A127CIE3_9RHIZ Queuine tRNA-ribosyltransferase OS=Martelella sp. AD-3 OX=686597; GN = tgt PE=3 SV=1
MSQEFQFTLKTTDGNARLGAITMPRGEIRTPAFMPVGTAGTVKAMYLDQVRDLGADIILGNTYHLMLRPGAERVARLGGLHSLIRWKYPILTDSGGFQVMSLAALRQIDEKKGVTFKSHIDGSVHHMSPERSIKIQGLLGSDIQMQLDECVRLPAERAEIEKSTEMSLRWAERCREAFGDQPGKAMFGIVQGGDIPDLRVRSARGLADLDLKGYAVGGLAVGEPQEVMLAMLETTLPELPTTKPRYLMGVGTPDDILKSVARGIDMFDCVMPTRAGRHGLAFTRRGKVNLRNARHAEDLRPLDEESNCPAARDYSRAYLHHLVRANESLAGMLLTWNNLHYYQSLMQGIRAAIAESRFAAFMAETQEGWARGDIAPV

SEQ ID NO: 57385 - protein, 377 aa, Martelella sp.
  REGION 1..377: note = tr|A0A2E1BEX0|A0A2E1BEX0_9RHIZ Queuine tRNA-ribosyltransferase OS=Martelella sp. OX=1969699; GN = tgt PE=3 SV=1
MSEDFRFTLKATDGNARLGAITMPRGEIRTPAFMPVGTAGTVKAMYLDQVRDLGADIILGNTYHLMLRPGAERVARLGGLHSLIRWPHPILTDSGGFQVMSLAALREIDEKKGVTFKSHIDGSVHHMSPERSIEIQGLLGSDIQMQLDECVRLPADRPEIEKSTEMSLAWAERCRIAFGDQPGKAMFGIVQGGDIPDLRVRSARGLADLDLKGYAVGGLAVGEPQDVMLAMLETTLPELPAEKPRYLMGVGTPDDILKSVARGIDMFDCVMPTRAGRHGLAFTRRGKVNLRNARHAEDLRPLDEESDCPATRDYSRAYLHHLVRSNESLGGMLLTWNNLHYYQQLMQGIRKAIAEGRYDDFVAETQEGWARGDVAAI

SEQ ID NO: 57386 - protein, 380 aa, Marvinbryantia formatexigens
  REGION 1..380: note = tr|C6LEM5|C6LEM5_9FIRM Queuine tRNA-ribosyltransferase OS=Marvinbryantia formatexigens DSM 14469 OX=478749 GN=tgt PE=3 SV=1
MRKRMYQIKKTEGRAKRAELVTVHGTIQTPVFMNVGTAAAVKGAVSTMDLKEIGTQVELSNTYHLHVRPGDDVIRQLGGLHKFMVWDRPILTDSGGFQVFSLAGLRKIKEEGVYFQSHVDGRKIFMGPEESMQIQSNLASTIAMAFDECPSSRATREYVQASVDRTTRWLARCKAEMARLNSLPDTINRQQLLFGINQGAVYEDIRIAHADAISEMDLDGYAVGGLAVGETHEEMYHILDEVVPHLPQNKPTYLMGVGTPANILEAVERGVDFFDCVYPSRNGRHGHVYTAHGKLNLFNEKYKLDERPIEEGCGCPACRHYSRAYIRHLLKAKEMLGMRLCVLHNLYFYNHLMEEIRDALDEGRFSEYKAEKLAGFEKMT

SEQ ID NO: 57387 - protein, 379 aa, Massilia albidiflava
  REGION 1..379: note = tr|A0A411X797|A0A411X797_9BURK Queuine tRNA-ribosyltransferase OS=Massilia albidiflava OX=321983; GN = tgt PE=3 SV=1
MLEFKLIKTDTTGLTKARRGTLKLNHGVVQTPIFMPVGTYGSVKAMSPLELKEIGAQIILGNTFHLWLRPGNAVMGKFGGLHKFMGWDKPILTDSGGFQVFSLGEMRKITEEGVHFNSPINGDKLFLSPEISMQIQRVLNSDIVMQFDECTPYEIDGRPATLEEAAKSMRMSLRWAQRSMNEFKAGENPNALFGIVQGGMFESLRDESLAGLEEIDFPGLAIGGLSVGEPKEDMMRVLEHIGPRLPANKPHYLMGVGTPEDLVAGVSNGVDMFDCVMPTRNARNGWIFTRFGDIKIKNARYKEDTEPFDATCSCYACRNFSRAYLHHLHRAQEILGARLNTIHNLHFYLDIMQQMRDALDEDRFPEWVKQFHADRARGV

SEQ ID NO: 57388 - protein, 379 aa, unidentified
  source 1..379: note = Massilia armeniaca
  REGION 1..379: note = tr|A0A2R4C5E3|A0A2R4C5E3_9BURK Queuine tRNA-ribosyltransferase OS=Massilia armeniaca OX=2072590; GN = tgt PE=3 SV=1
MLEFKLHKTDTTGLTKARRGTLKLNHGTVETPIFMPVGTYGSVKAMSPLELKEIGAQIILGNTFHLWLRPGNDVMSKFGGLHGFMGWDKPILTDSGGFQVFSLGEMRKITEEGVHFNSPINGDKLFLSPEISMQIQRVLNSDIVMQFDECTPYEINGRPATLDEAAKSMRMSLRWAQRSMNEFKAGENPNALFGIVQGGMFESLRDESLEGLEKIDFPGLAIGGLSVGEPKEDMLRVLEHVGPRLPANKPHYLMGVGTPEDLVAGVSNGVDMFDCVMPTRNARNGWIFTRFGDIKIKNARYKDDKEPLDPTCSCYACRNFSRAYLHHLHRAQEILGARLNTIHNLHYYLDIMRQMREALDEDRFPDWVKQFHADRARGI

SEQ ID NO: 57389 - protein, 379 aa, Massilia aurea
  REGION 1..379: note = tr|A0A422QJ98|A0A422QJ98_9BURK Queuine tRNA-ribosyltransferase OS=Massilia aurea OX=373040 GN=tgt; PE = 3 SV=1
MLEFTLLKKDTSGLSHARRGRLKLNHGTIETPIFMPVGTYGSVKAMDPVELKEVGSQIILGNTFHLWLRPGVDVMNKFGGLHQFMGWDKPILTDSGGFQVFSLGAMRKITEEGVKFASPIDGSKLFLSPEISMQIQRALNSDIVMQFDECTPYEIDGRPATAEEAAKSMRMSLRWAQRSMNEFTGGENPNALFGIVQGGMYEHLRDESLAGLEDINFPGLAIGGLSVGEPKEDMKRILAHVGPRLPENKPHYLMGVGTPEDLVDGVANGVDMFDCVMPTRNARNGWLFTRFGDVKIKNARYKDDQAPLDESCDCYCCKNFSRAYLHHLHRSNEILGARLNTIHNLHYYLKLMREMRDAIDADRFNEFRIEFNAGRARGV

SEQ ID NO: 57390 - protein, 379 aa, unidentified
  source 1..379: note = Massilia eurypsychrophila
  REGION 1..379: note = tr|A0A2G8TKE5|A0A2G8TKE5_9BURK Queuine tRNA-ribosyltransferase OS=Massilia eurypsychrophila; OX = 1485217 GN=tgt PE=3 SV=1
MLEFTLLKTDTSGLSHARRGRLKLNHGTIETPIFMPVGTYGSVKAMDPDELVAVGSQIILGNTFHLWLRPGTEVLNKFGGLHGFMGWNGPILTDSGGFQVFSLGAMRKITEEGVKFASPIDGSKLFLSPEISMQIQRALNSDIVMQFDECTPYEIDGRPATSEEAAKSMRMSLRWAQRSMNEFSGGENPNALFGIVQGGMFENLRDESLAGLEEINFPGIAIGGLSVGEPKEDMMRMLAHVGPRLPANKPHYLMGVGTPEDLVAGVANGIDMFDCVMPTRNARNGWLFTRFGDVKIKNARYKEDMGPLDESCDCYCCKNFSRAYLHHLHRSKEILGARLNTIHNLHYYLKLMQEMRDAIDADGFHAFRLTFNEQRARGV

SEQ ID NO: 57391 - protein, 379 aa, Massilia flava
  REGION 1..379: note = tr|A0A562PCF2|A0A562PCF2_9BURK Queuine tRNA-ribosyltransferase OS=Massilia flava OX=871742 GN=tgt; PE = 3 SV=1
MLEFKLIKTDTTGLTKARRGTLTLNHGVVQTPIFMPVGTYGSVKAMSPVELKEIGAQIILGNTFHLWLRPGNAVMGKFGGLHKFMGWDKPILTDSGGFQVFSLGEMRKITEEGVHFNSPINGDKLFLSPEISMQIQRVLNSDIVMQFDECTPYEIDGRPATVEEAAKSMRMSLRWAQRSMDEFKRGENPNALFGIVQGGMYESLRDESLAGLEEIDFPGLAIGGLSVGEPKEDMMRVLEHVGPRLPANKPHYLMGVGTPEDLVAGVSNGVDMFDCVMPTRNARNGWIFTRFGDIKIKNARYKDDQEPYDATCSCYACRNFSRAYLHHLHRAQEILGARLNTIHNLHYYLDIMQQMRDALDEDRFPEWVKQFHTDRARGV

SEQ ID NO: 57392 - protein, 379 aa, unidentified
  source 1..379: note = Massilia glaciei
  REGION 1..379: note = tr|A0A2U2HH90|A0A2U2HH90_9BURK Queuine tRNA-ribosyltransferase OS=Massilia glaciei OX=1524097; GN = tgt PE=3 SV=1
MLDFKLLKTDTSGLSHARRGRLTLNHGVIETPIFMPVGTYGSVKAMSPLELKEIDAQIILGNTFHLWLRPGTDVLNKFGGLHKFMGWDKPILTDSGGFQVFSLGAMRKITEEGVKFSSPIDGSKLFLSPEISMQIQRALNSDIVMQFDECTPYEIEGRPATTEEAAKSMRMSLRWAQRSMNEFKAGGNPNALFGIVQGGMYEHLRDESLAGLEEIDFPGIAIGGLSVGEPKEDMMRMLAHVGPRLPANKPHYLMGVGTPEDLVAGVANGIDMFDCVMPTRNARNGWLFTRFGDVKIKNARYKDDQGPLDESCTCYACSNFSRAYLHHLHRSKEILGARLNTIHNLHYYLQLMKEVREAIDADDFHGFRLKFNAGRARGV

SEQ ID NO: 57393 - protein, 379 aa, unidentified
  source 1..379: note = Massilia lurida
  REGION 1..379: note = tr|A0A562QXE6|A0A562QXE6_9BURK Queuine tRNA-ribosyltransferase OS=Massilia lurida OX=1036180; GN = tgt PE=3 SV=1
MLEFKLLKTDTTGLTKARRGTLQLNHGTVQTPIFMPVGTYGSVKAMSPVELKEIGAQIILGNTFHLWLRPGNTVMEKFGGLHKFMGWDKPILTDSGGFQVFSLGEMRKITEEGVHFNSPINGDKLFLSPEISMQIQRVLNSDIVMQFDECTPYEIDGRPATVEEAAKSMRMSLRWAQRSMDEFKRGENPNALFGIVQGGMFESLRDESLEGLEKIDFPGLAIGGLSVGEPKEDMMRVLEHIGPRLPANKPHYLMGVGTPEDLVAGVSNGVDMFDCVMPTRNARNGWIFTRFGDVKIKNARYKEDVEPLDATCTCYACRNFSRAYLHHLHRAQEILGARLNTIHNLHYYLDIMRQMREALDEDRFPDWVKQFHADRARGV

SEQ ID NO: 57394 - protein, 379 aa, Massilia lutea
  REGION 1..379: note = tr|A0A4P6KYR4|A0A4P6KYR4_9BURK Queuine tRNA-ribosyltransferase OS=Massilia lutea OX=321985 GN=tgt; PE = 3 SV=1
MLEFKLIKTDTTGLTKARRGTLKLNHGVVQTPIFMPVGTYGSVKAMSPIELKEIGAQIILGNTFHLWLRPGNTVMAKFGGLHKFMGWDKPILTDSGGFQVFSLGEMRKITEDGVHFNSPINGDKLFLSPEISMQIQRVLNSDIVMQFDECTPYEINGRPATLEEAAKSMRMSLRWAQRSMNEFKGGENPNALFGIVQGGMFESLRDESLAGLEEIDFPGLAIGGLSVGEPKEDMMRVLEHIGPRLPANKPHYLMGVGTPEDLVAGVSNGVDMFDCVMPTRNARNGWIFTRFGDIKIKNARYKEDTEPFDSTCSCYACRNFSRAYLHHLHRAQEILGARLNTIHNLHYYLDIMQQMRDALDEDRFPAWVKQFHADRARGI

SEQ ID NO: 57395 - protein, 379 aa, unidentified
  source 1..379: note = Massilia namucuonensis
  REGION 1..379: note = tr|A0A1I7L9Q9|A0A1I7L9Q9_9BURK Queuine tRNA-ribosyltransferase OS=Massilia namucuonensis; OX = 1035707 GN=tgt PE=3 SV=1
MLEFKLIKNDTTGLTKARRGTVKLNHGEVQTPIFMPVGTYGSVKAMSPLELKEIGAQIILGNTFHLWLRPGNDVMSKFGGLHGFMGWDKPILTDSGGFQVFSLGEMRKITEEGVHFNSPINGDKLFLSPEISMQIQRVLNSDIVMQFDECTPYEIQGRPATVDEAAKSMRMSLRWAQRSMDEFNRGENPNALFGIVQGGMFENLRDESLAKLEEIDFPGLAIGGLSVGEPKEDMMRVLAHVGPRLPPNKPHYLMGVGTPEDLVAGVSNGVDMFDCVMPTRNARNGWIFTRFGDIKIKNARYKEDTQPLDESCGCYACRNFSRAYLHHLHRSQEILGARLNTIHNLHYYLDIMRQMREALDGDRFPAWVQQFHADRARGV

SEQ ID NO: 57396 - protein, 379 aa, Massilia oculi
  REGION 1..379: note = tr|A0A2S2DJW3|A0A2S2DJW3_9BURK Queuine tRNA-ribosyltransferase OS=Massilia oculi OX=945844 GN=tgt; PE = 3 SV=1
MLEFTLLKKDTSGLSHARRGRLKLNHGTIETPIFMPVGTYGSVKAMSPVELKEVGSQIILGNTFHLWLRPGVDVMNKFGGLHGFMGWDKPILTDSGGFQVFSLGAMRKITEEGVKFASPIDGSRQFLSPEISMQIQRALNSDIVMQFDECTPYEIDGRPATAEEAAKSMRMSLRWAQRSMNEFTGGENPNALFGIVQGGMYEHLRDESLAGLEDIDFPGLAIGGLSVGEPKEDMKRILAHVGPRLPENKPHYLMGVGTPEDLVDGVANGVDMFDCVMPTRNARNGWLFTRFGDVKIKNARYKDDQAPLDESCDCYCCKNFSRAYLHHLHRSNEILGARLNTIHNLHYYLKLMQEMRDAIDADRFNEFRIAFNAGRARGV

SEQ ID NO: 57397 - protein, 379 aa, unidentified
  source 1..379: note = Massilia phosphatilytica
  REGION 1..379: note = tr|A0A2S8H0Q3|A0A2S8H0Q3_9BURK Queuine tRNA-ribosyltransferase OS=Massilia phosphatilytica; OX = 2026176 GN=tgt PE=3 SV=1
MLEFTLLKKDTSGLSHARRGRLKLNHGTIETPIFMPVGTYGSVKAMAPNELKEVGSQIILGNTFHLWLRPGTDVMDKFGGLHGFMGWDKPILTDSGGFQVFSLGAMRKITEEGVKFASPIDGSRLFLSPEISMQIQRSLNSDIVMQFDECTPYEIDGRPATAEEAAKSMRMSLRWAQRSMNEFNKGENPNALFGIVQGGMYERLRDESLAGLEEIDFPGVAIGGLSVGEPKEDMLRVLQHVGPRLPENKPHYLMGVGTPEDLVEGVANGVDMFDCVMPTRNARNGWLFTRFGDLKIKNARYKDDQSPLDESCSCYCCKNFSRAYLHHLHRSKEILGARLNTIHNLHYYLNLMQEIRDAIDADRFHEFRLKFNADRARGV

SEQ ID NO: 57398 - protein, 379 aa, Massilia plicata
  REGION 1..379: note = tr|A0A4P7BI14|A0A4P7BI14_9BURK Queuine tRNA-ribosyltransferase OS=Massilia plicata OX=321984; GN = tgt PE=3 SV=1
MLEFTLHKTDTTGLTKARRGTLKLNHGTVETPIFMPVGTYGSVKAMSPLELKEIGAQIILGNTFHLWLRPGNDVMSKFGGLHGFMGWDKPILTDSGGFQVFSLGEMRKITEEGVHFNSPINGDKLFLSPEISMQIQRVLNSDIVMQFDECTPYEINGRPATVDEAAKSMRMSLRWAQRSMDEFKAGENPNALFGIVQGGMFESLRDESLEGLEKIDFPGLAIGGLSVGEPKEDMMRMLEHVGPRLPPNKPHYLMGVGTPEDLVAGVSNGVDMFDCVMPTRNARNGWIFTRFGDIKIKNARYKDDKEPLDATCSCYACRNFSRAYLHHLHRAQEILGARLNTIHNLHYYLDIMRQMREALDEDRFPDWVKQFHADRARGV

SEQ ID NO: 57399 - protein, 379 aa, unidentified
  source 1..379: note = Massilia psychrophila
  REGION 1..379: note = tr|A0A2G8T671|A0A2G8T671_9BURK Queuine tRNA-ribosyltransferase OS=Massilia psychrophila; OX = 1603353 GN=tgt PE=3 SV=1
MLEFSLLKTDTSGLSHARRGRLKVNHGTIETPIFMPVGTYGSVKAMDPDELVAVGSQIILGNTFHLWLRPGTEVLNKFGGLHGFMGWNGPILTDSGGFQVFSLGAMRKITEEGVKFSSPIDGSKLFLSPEISMQIQRSLNSDIVMQFDECTPYEIDGRPATIDEAATSMRMSLRWAQRSMNEFKGGENPNALFGIVQGGMFEHLRDESLAKLEDIDFPGIAIGGLSVGEPKEDMMRMLAHVGPRLPANKPHYLMGVGTPEDLVAGVANGIDMFDCVMPTRNARNGWLFTRFGDVKIKNARYKDESGPLDESCDCYCCKNFSRAYLHHLHRSKEILGARLNTIHNLHYYLKLMQEMRDAIDADRFHAFRLQFNADRARGV

SEQ ID NO: 57400 - protein, 379 aa, Massilia sp.
  REGION 1..379: note = tr|A0A0Q5HQV2|A0A0Q5HQV2_9BURK Queuine tRNA-ribosyltransferase OS=Massilia sp. Leaf139 OX=1736272; GN = tgt PE=3 SV=1
MLEFTLLKKDTSGLSHARRGRLTLNHGTIETPIFMPVGTYGSVKAMDPVELKTVGSQIILGNTFHLWLRPGIDVFNKFGGLHGFMGWDKPILTDSGGFQVFSLGAMRKITEEGVTFASPIDGSRKFLSPEVSMQIQRALNSDIVMQFDECTPYEIDGRAATAEEAAKSMRMSLRWAQRSMNEFTGGGNPNALFGIVQGGMYEHLRDESLAGLEDINFPGLAIGGLSVGEPKEDMQRILAHVGPRLPENKPHYLMGVGTPEDLVEGVANGVDMFDCVMPTRNARNGWLFTRFGDVKIKNARYKEDTAPLDESCDCYCCKNFSRAYLHHLHRSNEILGARLNTIHNLHYYLNLMQEMRDAIDADGFHAFRLQFAADRARGI

SEQ ID NO: 57401 - protein, 221 aa, Massilia sp.
  REGION 1..221: note = tr|A0A519PEW9|A0A519PEW9_9BURK Queuine tRNA-ribosyltransferase (Fragment) OS=Massilia sp.; OX = 1882437 GN=tgt PE=3 SV=1
PATADEAAKSMRMSLRWAQRSMNEFTSGGNPNALFGIVQGGMYEHLRDESLAGLEDINFPGLAIGGLSVGEPKEDMQRILAHVGPRLPENKPHYLMGVGTPEDLVEGVANGVDMFDCVMPTRNARNGWLFTRFGDVKIKNARYKDDMAPLDESCDCYCCKNFSRAYLHHLHRSNEILGARLNTIHNLHFYLKIMQEMRDAIDADKFNEFRIQFRADRTRGV

SEQ ID NO: 57402 - protein, 379 aa, Massilia timonae
  REGION 1..379: note = tr|A0A1S2NEE6|A0A1S2NEE6_9BURK Queuine tRNA-ribosyltransferase OS=Massilia timonae OX=47229; GN = tgt PE=3 SV=1
MLEFTLLKKDTSGLSHARRGRLKLNHGTIETPIFMPVGTYGSVKAMSPVELKEVGSQIILGNTFHLWLRPGVDVMNKFGGLHQFMGWDKPILTDSGGFQVFSLGAMRKITEEGVKFASPIDGSRQFLSPEISMQIQRALNSDIVMQFDECTPYEIDGRPATAEEAAKSMRMSLRWAQRSMNEFTGGGNPNALFGIVQGGMYEHLRDESLAGLEDINFPGLAIGGLSVGEPKEDMKRILAHVGPRLPENKPHYLMGVGTPEDLVDGVANGVDMFDCVMPTRNARNGWLFTRFGDVKIKNARYKDDQAPLDESCDCYCCKNFSRAYLHHLHRSNEILGARLNTIHNLHYYLKLMQEMRDAIDADRFNEFRIAFNAGRARGV

SEQ ID NO: 57403 - protein, 379 aa, Massilia timonae
  REGION 1..379: note = tr|K9DH06|K9DH06_9BURK Queuine tRNA-ribosyltransferase OS=Massilia timonae CCUG 45783; OX = 883126 GN=tgt PE=3 SV=1
MLEFTLLKKDTSGLSHARRGRLKLNHGTIETPIFMPVGTYGSVKAMSPVELKEVGSQIILGNTFHLWLRPGVDVMNKFGGLHQFMGWDKPILTDSGGFQVFSLGAMRKITEEGVKFASPIDGSRQFLSPEISMQIQRALNSDIVMQFDECTPYEIDGRPATAEEAAKSMRMSLRWAQRSMNEFTGGGNPNALFGIVQGGMYEHLRDESLAGLEDINFPGLAIGGLSVGEPKEDMKRILAHVGPRLPENKPHYLMGVGTPEDLVDGVANGVDMFDCVMPTRNARNGWLFTRFGDIKIKNARYKEDQAPLDESCDCYCCKNFSRAYLHHLHRSNEILGARLNTIHNLHYYLKLMQEMRDAIDADRFNEFRIEFNAGRARGV

SEQ ID NO: 57404 - protein, 379 aa, unidentified
  source 1..379: note = Massilia umbonata
  REGION 1..379: note = tr|A0A4P8HUR7|A0A4P8HUR7_9BURK Queuine tRNA-ribosyltransferase OS=Massilia umbonata OX=864828; GN = tgt PE=3 SV=1
MLEFKLIKTDTTGLTKARRGTLKLNHGVVQTPIFMPVGTYGSVKAMSPLELKEIGAQIILGNTFHLWLRPGNAVMGKFGGLHKFMGWDKPILTDSGGFQVFSLGEMRKITEEGVHFNSPINGDKLFLSPEISMQIQRVLNSDIVMQFDECTPYEIEGRPATLEEAAKSMRMSLRWAQRSMNEFKSGENPNALFGIVQGGMFESLRDESLAGLEEIDFPGLAIGGLSVGEPKEDMMRVLEHIGPRLPANKPHYLMGVGTPEDLVAGVSNGVDMFDCVMPTRNARNGWIFTRFGDIKIKNARYKEDTEPFDSTCSCYACRNFSRAYLHHLHRAQEILGARLNTIHNLHFYLDIMQQMRDALDEDRFPEWVKQFHADRARGV

SEQ ID NO: 57405 - protein, 379 aa, unidentified
  source 1..379: note = Massilia yuzhufengensis
  REGION 1..379: note = tr|A0A1I1T6V0|A0A1I1T6V0_9BURK Queuine tRNA-ribosyltransferase OS=Massilia yuzhufengensis; OX = 1164594 GN=tgt PE=3 SV=1
MLEFTLLKKDTSGLSHARRGRLKLNHGTIETPIFMPVGTYGSVKAMDPTELKDVGSQIILGNTFHLWLRPGTKVLDKFGGLHKFMGWDGPILTDSGGFQVFSLGAMRKITEEGVKFASPIDGSRLFLSPEISMQIQRSLNSDIVMQFDECTPYEIDGRPATADEAAKSMRMSLRWAQRSMNEFKGGENPNALFGIVQGGMYEHLRDESLAGLEDIDFPGLAIGGLSVGEPKEDMKRILAHVGPRLPENKPHYLMGVGTPEDLVDGVANGVDMFDCVMPTRNARNGWLFTRFGDVKIKNARYKEDTAPLDESCDCYCCKNFTRAYLHHLHRSNEILGARLNTIHNLHYYLKLMQEMRDAIDADGFNAFRIRFAADRGRGV

SEQ ID NO: 57406 - protein, 377 aa, unidentified
  source 1..377: note = Massilimicrobiota sp.
  REGION 1..377: note = tr|A0A1Y3TFN9|A0A1Y3TFN9_9FIRM Queuine tRNA-ribosyltransferase OS=Massilimicrobiota sp. An80; OX = 1965658 GN=tgt PE=3 SV=1
MEGFWYELKHVCKQSGARYGILHTPHGDVETPMFMPVGTLATVKGISPEQLKEMHSQVILANTYHLWLRPGEDVVKMAGGLHQFMNYDGPILTDSGGFQVFSLGKTRKIEEEGVTFKSIVDGKKLFLSPEKSIQIQNDLGADIIMSFDECAPYPSTHEYMKKSVERTLRWAKRGKDAHKRKDQALFGIVQGGEFEDLRELSAKELVKMDFPGYSIGGTSVGEPKDVMYKMIDDAVKWLPQDKPRYLMGVGNPIDLIEGAIRGIDMFDCVLPTRVARHGALMTHHGRMNINNEKYKYDFTPIDEKCHCYTCQNYTRAYLRHLHKCDELFGKSLLSIHNVAFLLQLSEDIRKAIQEDRLLDFKEEFLNSYGRDVYERAF

SEQ ID NO: 57407 - protein, 377 aa, unidentified
  source 1..377: note = Massilimicrobiota sp.
  REGION 1..377: note = tr|A0A1Y4R6T3|A0A1Y4R6T3_9FIRM Queuine tRNA-ribosyltransferase OS=Massilimicrobiota sp. An142; OX = 1965564 GN=tgt PE=3 SV=1
MEGFWYELKHVCKQSGARYGILHTPHGDVETPMFMPVGTLATVKGISPEQLKEMHSQVILANTYHLWLRPGEDVIKMAGGLHKFMNYDGPILTDSGGFQVFSLGKTRKIEEEGVTFKSIVDGKKLFLSPEKSIQIQNDLGADIIMSFDECAPYPSTHEYMKKSVERTLRWAKRGKDAHKRKDQALFGIVQGGEFEDLRELSAKELVKMDFPGYSIGGTSVGEPKDVMYKMIDDAVKWLPQDKPRYLMGVGNPIDLIEGAIRGIDMFDCVLPTRVARHGALMTHHGRMNINNEKYKYDFTPIDDKCHCYTCQNYTRAYLRHLHKCDELFGKSLLSIHNVAFLLQLSEDIRKAIQEDRLLDFKEEFLNSYGRDVYERAF

SEQ ID NO: 57408 - protein, 377 aa, unidentified
  source 1..377: note = Massilimicrobiota timonensis
  REGION 1..377: note = tr|A0A1Y4T1Y8|A0A1Y4T1Y8_9FIRM Queuine tRNA-ribosyltransferase OS=Massilimicrobiota timonensis; OX = 1776392 GN=tgt PE=3 SV=1
MEGFWYELKHVCKQSGARYGILHTPHGDVETPMFMPVGTLATVKGISPEQLKEMHSQVILANTYHLWLRPGEDVVKMAGGLHKFMNYDGPILTDSGGFQVFSLGKTRKIEEEGVTFKSIVDGKKLFLSPEKSIQIQNDLGADIIMSFDECAPYPSTHEYMKKSVERTLRWAKRGKDAHKRKDQALFGIVQGGEFEDLRELSAKELVKMDFPGYSIGGTSVGEPKDVMYKMIADAVKWLPDDKPRYLMGVGNPIDLIEGAIRGIDMFDCVLPTRVARHGALMTHHGRMNINNEKYKYDFTPIDDKCHCYTCQNYTRAYLRHLHKCDELFGKSLLSIHNVAFLLQLSEDIRKAIQEDRLLDFKEEFLNSYGRDVYERAF

SEQ ID NO: 57409 - protein, 376 aa, unidentified
  source 1..376: note = Massilioclostridium sp.
  REGION 1..376: note = tr|A0A316T8H1|A0A316T8H1_9CLOT Queuine tRNA-ribosyltransferase OS=Massilioclostridium sp.; OX = 1935928 GN=tgt PE=3 SV=1
MFQLLKKQGEARRGTFTTVHGTVQTPAFMNVGTAAAIKGGISSYDLVDLKCQVELCNTYHLHIRPGDKLIKELGGLHHFMGWNGPILTDSGGFQVFSLASLRKIQEEGVYFSSHVDGKRIFMGPEESMQIQSNLGSTIAMAFDECIENPSPYEYTKHSCDRTVRWLHRCKAEMERLNSLSDTINPNQMLFGINQGCIYEDLRVQHMKEIVELDLDGYAIGGLAVGETKEEMYHIISTVTPYMPLEKPRYLMGVGKPTNIIEAVSRGVDLFDCVMPSRNARHGHLNTWNGVINLNNAKYEKDDTPIDEHCDCPTCRHFSKAYLRHLFKSKEMLSNRLAVMHNLYFYNTLMEKIREAIDTDTFDTFKEKYVPILDRRI

SEQ ID NO: 57410 - protein, 364 aa, Mastigocladus laminosus
  REGION 1..364: note = tr|A0A4D9CC52|A0A4D9CC52_MASLA Queuine tRNA-ribosyltransferase OS=Mastigocladus laminosus UU774; OX = 1594576 GN=tgt PE=3 SV=1
MAQCSHTKARAGVFHTPHGVVETPRFMPVGTLATVKTLTPAQLKETGAQMVLSNTYHLHLQPGEVIVSGGGGLHKFMGWNGPMLTDSGGFQVFSLSEMRKISEEGVTFRSPHDGQIIKFTPEKSIEIQNILGADVIMAFDECPPATANRQEVEAATERTYRWLLRCIEAHQRREEQALFGIVQGGVYLDLRAQAAEALQKLDLPGYAIGGVSVGEEPELIHQVVQTTAPLLPYHKPRYLMGVGTYQEMVIAIASGVDLFDCVIPTRWARHGTAMVQGDRWNLKNAKFREDFTPLDETCPCYTCRNFTRAYISHLVRSQEILAYTLLSIHNITELIRFTQKIREAILNDTFTTEFSKWFKKGVME

SEQ ID NO: 57411 - protein, 342 aa, Mastigocoleus testarum
  REGION 1..342: note = tr|A0A0V7ZXP3|A0A0V7ZXP3_9CYAN Queuine tRNA-ribosyltransferase OS=Mastigocoleus testarum BC008; OX = 371196 GN=tgt PE=3 SV=1
MPVGTLANVKTLTPAQLRDTGAQMILSNTYHLHLQPGEGIVAGGGGLHKFMGWDGPILTDSGGFQVFSLSEMRKISERGVKFRSPHDGQIIELTPERSIEIQNTLGADIIMAFDECPPYPVSREEVETATERTYRWLLRCIETHKRPEQALFGIVQGGIYSDLRSRAANALTELDLPGYAIGGVSVGEEPELIHEIVRVTAPLLPVNKPRYLMGVGTYREIAIAIAAGIDLFDCVIPTRWARHGTAMVRGERWNLKNARFREDFQPLDADCPCYTCKNFTRAYISHLVRSQEILAYTLLSIHNITEIIHFTQKIRQSILQGSFATDFARWLNTDNSVELEHG

SEQ ID NO: 57412 - protein, 376 aa, unidentified
  source 1..376: note = Mediterranea sp.
  REGION 1..376: note = tr|A0A1Y4HM24|A0A1Y4HM24_9BACT Queuine tRNA-ribosyltransferase OS=Mediterranea sp. An20; OX = 1965586 GN=tgt PE=3 SV=1
MTFELQHTDNKTNARAGLITTDHGQIMTPIFMPVGTVGTVKGVHLSELKNDIKAQIILGNTYHLYLRPGLDIIEKAGGLHQFNGFDRPMLTDSGGFQVFSLSSIRKLHEDGAEFRSHIDGSKHFFTPEKVMDIERTIGADIMMAFDECPPGDSDYEYAKKSLGLTHRWLDRCIQRFNETEPKYGYRQSLFPIVQGCVYRDLRIQSAEFVASKNADGNAIGGLAVGEPVEKMYEMIEVVNEILPKDKPRYLMGVGTPVNILEGIERGVDMFDCVMPTRNGRNGMLFTKDGILNMRNKKWEADFSPIEADGASYVDTLYTKAYLRHLFHAQEMLAMQIASVHNLAFYLWLTAEARKHIIAGDFATWKATMVKRVSTRL

SEQ ID NO: 57413 - protein, 374 aa, unidentified
  source 1..374: note = Mediterraneibacter butyricigenes
  REGION 1..374: note = tr|A0A391NXP9|A0A391NXP9_9FIRM Queuine tRNA-ribosyltransferase OS=Mediterraneibacter butyricigenes OX=2316025 GN=tgt PE=3 SV=1
MAYQLIKKEGRAKRGRLETVHGVIETPVFMNVGTTAAIKGAVSTDDLRQIKTQVELSNTYHLHVRPGDKIVKQLGGLHKFMNWDKPILTDSGGFQVFSLAGLRKIREEGVTFQSHIDGHRIFMGPEESMQIQSNLGSTIAMAFDECPSSVAERSYIQNSVDRTVRWLERCKKEMNRLNQLEDTINPHQMLFGINQGGIYADIRIEHAKRITELDLDGYAVGGLAVGETHEEMYHILDEVVPYLPENKPTYLMGVGTPVNILEAVDRGVDFFDCVYPSRNGRHGHVYTNHGKLNLFNAKYELDDRPIEEGCQCPACRSYSRAYIRHLLKAKEMLGMRLCVLHNLYFYNTMMEEIRDALDQGCFQEYKKEKISKMS

SEQ ID NO: 57414 - protein, 377 aa, unidentified
  source 1..377: note = Mediterraneibacter sp.
  REGION 1..377: note = tr|A0A4Q8U596|A0A4Q8U596_9FIRM Queuine tRNA-ribosyltransferase OS=Mediterraneibacter sp. gm002; OX = 2527876 GN=tgt PE=3 SV=1
MYELLKKDGKAKRGRFHTVHGTIETPVFMNVGTAAAIKGAVSTDDLRQIKTQVELSNTYHLHVRPGDEVVKKLGGLHQFMNWDKPILTDSGGFQVFSLADLRKIKEEGVHFHSHIDGRKIFMGPEQSMQIQSNLASTIAMAFDECPSSVADRRYMENSVARTTRWLKRCKDEMERLNSLPDTINKQQLLFGINQGGVYEDIRVEHAKQISKLNLPGYAVGGLAVGESHEEMYRILDAVVPVLPENKPTYLMGVGTPANILEAVDRGVDFFDCVYPSRNGRHGHVYTNHGKLNLFNAKFELDNRPIEEGCQCPACRSYSRAYIRHLLKAKEMLGMRLCVLHNLYFYNTMMEEIRDAIDAGEYQAYKKRKLDNMSQPLD

SEQ ID NO: 57415 - protein, 376 aa, Megamonas funiformis
  REGION 1..376: note = tr|H3KA12|H3KA12_9FIRM Queuine tRNA-ribosyltransferase OS=Megamonas funiformis YIT 11815; OX = 742816 GN=tgt PE=3 SV=1
MKPAITYELIKQCPHTGARAGRIHTPHGSFDTPIFMPVGTQASVKTLAPEELKEMGAGIILSNNYHLFLRPGSKLVKEAGGLHKFMNWDRAILTDSGGFQVFSLGDLRKISEEGVTFRSHIDGSKKFLSPEIATQSQMDLGADIIMAFDECVPYPADFKYTRESMELTLRWAQRCKDTMTNPNQGLFGIVQGGMYKDLRIECANRLVDMDFPGYAVGGLSVGEPKELMYEMLDITLEHLPQNKARYLMGVGTPDCLVEGVMRGIDMFDCVYPTRVARNGTAMTWNGRLVIKNAQYEHDFHPIDEHCNCYTCRNYSRAYIRHLVRVNEIFGLRLLTIHNLHFLIDFMRQMRQSIMEDRFPEFYRKFTANFSFNAKSV

SEQ ID NO: 57416 - protein, 376 aa, Megamonas hypermegale
  REGION 1..376: note = tr|A0A378NVV6|A0A378NVV6_9FIRM Queuine tRNA-ribosyltransferase OS=Megamonas hypermegale OX=158847; GN = tgt PE=3 SV=1
MKPAITYELIKQCPHTGARAGRIHTPHGSFDTPIFMPVGTQASVKTLAPEELKEMGAGIILSNNYHLFLRPGSKLVKEAGGLHKFMNWDRAILTDSGGFQVFSLGDLRKISEEGVTFRSHIDGSKKFLSPEIATQSQMDLGADIIMAFDECVPYPADFKYTRESMELTLRWAQRCKDTMTNPNQGLFGIVQGGMYKDLRIECANRLVEMDFPGYAVGGLSVGEPKELMYEMLDITLEHLPQNKARYLMGVGTPDCLVEGVMRGIDMFDCVYPTRVARNGTAMTWNGRLVIKNAQYEHDFHPIDEHCNCYTCRNYSRAYIRHLVRVNEIFGLRLLTIHNLHFLIDFMRQMRQSIMEDRFPEFYRKFTANFSFNAKSV

SEQ ID NO: 57417 - protein, 376 aa, Megamonas hypermegale
  REGION 1..376: note = tr|A0A239T7A8|A0A239T7A8_9FIRM Queuine tRNA-ribosyltransferase OS=Megamonas hypermegale OX=158847; GN = tgt PE=3 SV=1
MKPAITYELIKECPHTHARAGRIHTPHGTFDTPIFMPVGTQATVKTMAPEELKAMGAGIILSNTYHLFLRPGAALVKEAGGLHKFMNWDRAILTDSGGFQVFSLGDLRKITEEGVTFRSHIDGSKKFLSPEIATKTQMDLGADIIMAFDECVPYPADFKYTHESMELTLRWAQRCKDTMTSPNQGLFGIVQGGMYKDLRIECANRLVDMDFPGYAVGGLSVGEPKELMYDMLDITLEHLPKNKARYLMGVGTPDCLAEGVMRGIDMFDCVYPTRVARNGTAMTWNGRLVMKNAQYEHDFRPIDENCDCYACRNYSRAYIRHLVRVNEIFGLHLLTIHNLHFLINFMKKMREAILNDSFPEFYHRFTANFSFNAKSE

SEQ ID NO: 57418 - protein, 376 aa, Megamonas rupellensis
  REGION 1..376: note = tr|A0A412CGQ7|A0A412CGQ7_9FIRM Queuine tRNA-ribosyltransferase OS=Megamonas rupellensis OX=491921; GN = tgt PE=3 SV=1
MKPAITYELIKQCPHTGARAGRIHTPHGSFDTPIFMPVGTQASVKTLAPEELKEMGAGIILSNNYHLFLRPGSKLVKEAGGLHKFMNWDRAILTDSGGFQVFSLGDLRKISEEGVTFRSHIDGSKKFLSPEIATQSQMDLGADIIMAFDECVPYPADFKYTRESMELTLRWAQRCKDTMTNSNQGLFGIVQGGMYKDLRIECANRLVDMDFPGYAVGGLSVGEPKELMYEMLDITLEHLPQNKARYLMGVGTPDCLVEGVMRGIDMFDCVYPTRVARNGTAMTWNGRLVIKNAQYEHDFHPIDEHCNCYTCRNYSRAYIRHLVRVNEIFGLRLLTIHNLHFLIDFMRQMRQSIMEDRFPEFYRKFTANFSFNAKSV

SEQ ID NO: 57419 - protein, 376 aa, Megamonas rupellensis; identical to SEQ ID NO: 57415
  REGION 1..376: note = tr|A0A411ZV41|A0A411ZV41_9FIRM Queuine tRNA-ribosyltransferase OS=Megamonas rupellensis OX=491921; GN = tgt PE=3 SV=1

SEQ ID NO: 57420 - protein, 376 aa, Megamonas sp.; identical to SEQ ID NO: 57415
  REGION 1..376: note = tr|A0A1H8CST6|A0A1H8CST6_9FIRM Queuine tRNA-ribosyltransferase OS=Megamonas sp. Calf98-2; OX = 1855330 GN=tgt PE=3 SV=1

SEQ ID NO: 57421 - protein, 368 aa, Megasphaera cerevisiae
  REGION 1..368: note = tr|A0A0J6WTD1|A0A0J6WTD1_9FIRM Queuine tRNA-ribosyltransferase OS=Megasphaera cerevisiae DSM 20462 OX=1122219 GN=tgt PE=3 SV=1
MVITYELQAECDGARAGLLRTPHGTFKTPMFMPVGTQATVKTLTPEELYDMGAQVILSNTYHLFLRPGEDLVREAGGLHKFMNWKQAVLTDSGGFQVFSLGQMRKITEQGVTFRSHLDGSKKFLSPEVSMDIQMALDSDIAMAFDECIPYPSDYDYTQLSTERTSRWAKRCADHHHSDTQGLFGIVQGGMYPELRRKSCDDLVDMDFDGYGIGGLSVGESKDMMYDILEKTTPCLPAHKARYLMGVGTPDCLLEGVARGVDMFDCVFPTRVARNGMAMTHTGRVTVRNAKFARDFRPIEDGCGCYTCRNYTRAYIRHLFKAEELLAYRLVSIHNLYFLLDFMRSMRQSILDGTFREFRKQFWQWYQDA

SEQ ID NO: 57422 - protein, 368 aa, Megasphaera elsdenii
  REGION 1..368: note = tr|G0VPU3|G0VPU3_MEGEL Queuine tRNA-ribosyltransferase OS=Megasphaera elsdenii DSM 20460; OX = 1064535 GN=tgt PE=3 SV=1
MVITYEQQAECDGARAGILRTPHGTFKTPMFMPVGTQATVKTLTPEELYDMGAQVILSNTYHLFLRPGHDLVQEAGGLHKFMNWKQAILTDSGGFQVFSLGQMRKITEEGVTFRSHLDGSKKFLSPEVSMDIQMALDSDIAMAFDECIPYPSDYEYTQMSTERTSRWAARCLDHHHSDTQGLFGIVQGGMYKDLRKQSCQDLVDMDFDGYGIGGLSVGESKDIMYDILEHTTPYLPKHKARYLMGVGTPDCLLEGVARGVDMFDCVFPTRVARNGMAMTHTGRLTVRNAKYAHDFHPIEEGCQCYTCRNYSRAYIRHLFKAEELLAYRLVSIHNLYFLLQFMRDMRQSIFDGTFREFRKDFWKRYQDA

SEQ ID NO: 57423 - protein, 368 aa, Megasphaera elsdenii; identical to SEQ ID NO: 57422
  REGION 1..368: note = tr|A0A1M6Q813|A0A1M6Q813_MEGEL Queuine tRNA-ribosyltransferase OS=Megasphaera elsdenii OX=907; GN = tgt PE=3 SV=1

SEQ ID NO: 57424 - protein, 368 aa, unidentified
  source 1..368: note = Megasphaera genomosp.
  REGION 1..368: note = tr|A0A2J8BBE6|A0A2J8BBE6_9FIRM Queuine tRNA-ribosyltransferase OS=Megasphaera genomosp. type_2; OX = 699193 GN=tgt PE=3 SV=1
MVITYELQAECDGARAGLLHTTHGTFKTPMFMPVGTQATVKTLTPEELYDMGAQVILSNTYHLFLRPGADLIKKAGGLHAFMHWRQPILTDSGGFQVFSLGQMRKITEEGVTFRSHLDGSSKFLSPEVSMDIQMDLNSDIAMAFDECIPYPSDYEYTKQSTARTTRWAKRCVEHHRSDTQGLFGIVQGGMYKDLRQQSCQELVDLPFDGYGIGGLSVGEEKALMYEVLDYTTPCLPRHKARYLMGVGTADCLLEGVARGVDMFDCVYPTRVARNGMAMTHQGRLTVRNAAYAEDFRPIEDGCSCYTCQHYTRSYIRHLFKAEELLAYRLVSIHNLHFLLHFMQDMRQSIINGTFREFRRDFWKQYQDV

SEQ ID NO: 57425 - protein, 368 aa, unidentified
  source 1..368: note = Megasphaera genomosp.
  REGION 1..368: note = tr|D3LT21|D3LT21_9FIRM Queuine tRNA-ribosyltransferase OS=Megasphaera genomosp. type_1 str. 28L OX=699218 GN=tgt PE=3 SV=1
MVIRYELQAECDGARAGLLHTPHGTFKTPMFMPVGTQATVKTLTPEELYAMGAQIILSNTYHLFLRPGEELIRQAGGLHAFMHWQQPILTDSGGFQVFSLGQMRKITEDGVTFRSHLDGSRKFLSPEVSMDVQMALNSDIAMAFDECIPYPSDYDYTSQSTARTSRWAQRCLQHHHSPTQGLFGIVQGGMYKDLRARSCAELVAMDFDGYGIGGLSVGEEKSLMYDILEYTVPLLPKHKARYLMGVGTPDCLLEGVARGVDMFDCVYPTRVARNGMAMTKTGRLTVRNAKYAADFVPIEENCDCYTCQNYTRAYIRHLFKAEELLAYRLVSIHNLHFLLHFMRDLRQSIVDGTFREFCRQFRRVYRDR

SEQ ID NO: 57426 - protein, 368 aa, unidentified
  source 1..368: note = Megasphaera hexanoica
  REGION 1..368: note = tr|A0A344MIH1|A0A344MIH1_9FIRM Queuine tRNA-ribosyltransferase OS=Megasphaera hexanoica; OX = 1675036 GN=tgt PE=3 SV=1
MVITYELQAECDGARAGLLRTPHGTFKTPMFMPVGTQATVKTLTPEELYDMGAQVILSNTYHLFLRPGEELIKEAGGLHKFMNWKQAILTDSGGFQVFSLGQMRKIKEEGVTFRSHLDGSKKFLSPEVSMDIQMALNSDIAMAFDECIPYPSDYEYTKLSTERTSRWAQRCLDHHHSDTQGLFGIVQGGMYEDLRRKSCEDLVDMDFDGYGIGGLSVGESKDIMYEVLGYTTKHLPREKARYLMGVGTPDCLVEGVARGVDMFDCVFPTRVARNGMAMTHTGRLTVRNARYAHDFHPIEEGCQCYTCRNYTRAYIRHLFKAEELLAYRLVSIHNLYFLLDFMRHMRQSILDGTFRTFREQFWKRYQDG

SEQ ID NO: 57427 - protein, 368 aa, Megasphaera micronuciformis
  REGION 1..368: note = tr|E2Z9B6|E2Z9B6_9FIRM Queuine tRNA-ribosyltransferase OS=Megasphaera micronuciformis F0359 OX=706434 GN=tgt PE=3 SV=1
MVIEFELQAECDGARAGLLRTPHGTYQTPMFMPVGTQATVKTLTPEELYDMGAQVILSNTYHLFLRPGEDLVHEAGGIHRFMNWKNAVLTDSGGFQVFSLGKMRKITEDGVTFRSHIDGSKKFLSPEVSMDIQMALDSDIAMAFDECIPYPSDYEYTRLSTERTSRWAKRCLDHHHSPTQGLFGIVQGGMYKDLRKKSCEDLVAMDFDGYGIGGLSVGESKDIMYDILEGTTPYLPQDKARYLMGVGTPDCLVEGVARGVDMFDCVFPTRVARNGMAMTAEGRVNVRNAKYARDFSPIEEGCGCYTCRNYTRAYIRHLFKAEELLAYRLVSIHNLYFLLDFMRRMRQSIFDGTFRRFRKEFFDRYKDA

SEQ ID NO: 57428 - protein, 368 aa, Megasphaera paucivorans
  REGION 1..368: note = tr|A0A1G9UV53|A0A1G9UV53_9FIRM Queuine tRNA-ribosyltransferase OS=Megasphaera paucivorans; OX = 349095 GN=tgt PE=3 SV=1
MVISYELQAECDGARAGLLRTPHGTFKTPMFMPVGTQATVKTLTPEELYDMGAQIILSNTYHLFLRPGEDLVREAGGLHKFMNWKQAILTDSGGFQVFSLGQMRKITEEGVTFRSHLDGSRKFLSPEVSMDIQMKLDSDIAMAFDECIPYPSDYDYTKHSTERTSRWAKRCLDHHHSDTQGVFGIVQGGMYKDLRRQSCEELTAMDFDGFGIGGLSVGEAKDIMYDILENTTPYLPIHKARYLMGVGTPDCLLEGVARGVDMFDCVFPTRVARNGMAMTHTGRLTVRNAKYAHDFTPLEEGCQCYTCRNYSRAYIRHLFKAEELLAYRLVSIHNLYFLLDFMRNMRQSIFDGTFRQFRKQFWDRYQDG

SEQ ID NO: 57429 - protein, 368 aa, Megasphaera sp.
  REGION 1..368: note = tr|S7J282|S7J282_9FIRM Queuine tRNA-ribosyltransferase OS=Megasphaera sp. NM10 OX=1273103; GN = tgt PE=3 SV=1
MVITYEQQAECDGARAGILRTPHGTFKTPMFMPVGTQATVKTLTPEELYDMGAQVILSNTYHLFLRPGHDLVQEAGGLHKFMNWKQAILTDSGGFQVFSLGQMRKITEEGVTFRSHLDGSKKFLSPEVSMDIQMALDSDIAMAFDECIPYPSDYEYTQMSTERTSRWAARCLDHHHSDTQGLFGIVQGGMYKDLRKQSCQDLVDMDFDGYGIGGLSVGESKDIMYDILEHTTPYLPKDKARYLMGVGTPDCLLEGVARGVDMFDCVFPTRVARNGMAMTHTGRLTVRNAKYAHDFHPIEEGCQCYTCRNYSRAYIRHLFKAEELLAYRLVSIHNLYFLLQFMRDMRQSIFDGTFRQFRQDFWKRYQDA

SEQ ID NO: 57430 - protein, 368 aa, Megasphaera sp.
  REGION 1..368: note = tr|A0A100YSX7|A0A100YSX7_9FIRM Queuine tRNA-ribosyltransferase OS=Megasphaera sp. DJF_B143; OX = 537288 GN=tgt PE=3 SV=1
MVITYELQAECDGARAGLLRTPHGTFKTPMFMPVGTQATVKTLTPEELYDMGAQVILSNTYHLFLRPGEELIKEAGGLHKFMNWKQAILTDSGGFQVFSLGQMRKIKEEGVTFRSHLDGSKKFLSPEVSMDIQMALNSDIAMAFDECIPYPSDYEYTKLSTERTSRWAQRCLDHHHSDTQGLFGIVQGGMYEDLRRKSCEDLVDMDFDGYGIGGLSVGESKDIMYEVLGYTTKHLPREKARYLMGVGTPDCLVEGVARGVDMFDCVFPTRVARNGMAMTHTGRLTVRNARYAHDFHPIEEGCQCYTCRNYTRAYIRHLFKAEELLAYRLVSIHNLYFLLDFMRQMRQSILDGTFRTFREQFWKRYQDG

SEQ ID NO: 57431 - protein, 368 aa, unidentified
  source 1..368: note = Megasphaera stantonii
  REGION 1..368: note = tr|A0A346AXK7|A0A346AXK7_9FIRM Queuine tRNA-ribosyltransferase OS=Megasphaera stantonii; OX = 2144175 GN=tgt PE=3 SV=1
MVITYELQAECDGARAGILRTPHGTFKTPMFMPVGTQATVKTLSPEELYDMGAQVILSNTYHLFLRPGEDLVKEAGGLHKFMNWKQAILTDSGGFQVFSLGQMRKITEEGVTFRSHLDGSKKFLSPEVSMDVQMALNSDIAMAFDECIPYPSDYDYTLHSTERTSRWAKRCLDHHHSDTQGLFGIVQGGMYADLRRKSCEELVDMNFDGYGIGGLSVGESKDIMYDILDHTTPYLPQTKARYLMGVGTPDCLVEGVARGVDMFDCVFPTRVARNGMAMTHTGRLTVRNAKYARDFSPIEEGCGCYTCRNYTRAYIRHLFKAEELLAYRLVSIHNLYFLLQFMRDMRQSILDGTFRQFRQEFWKRYQDA

SEQ ID NO: 57432 - protein, 367 aa, unidentified
  source 1..367: note = Mehylophilales bacterium
  REGION 1..367: note = tr|A0A258LBS8|A0A258LBS8_9PROT Queuine tRNA-ribosyltransferase OS=Mehylophilales bacterium 35-46-6 OX=1970535 GN=tgt PE=3 SV=1
MQFTLHKQDGLARRGTVALAHGNVETPAFMPVGTYGTVKAMSPLELKEINAHIVLGNTFHLWLRPGLEVIAAHGGLHKFMGWDKPILTDSGGFQVWSLGDLRKISEEGVKFRSPINGDSCFLTPEESMRIQRVLNSDIVMIFDECTPYPATHSEASDSMQLSLRWAKRSKQAHEGNPNALFGIIQGGMFEDLRDVSLNGLEEIGFDGYAIGGLSVGEPKEDMLRILAHTAPKMPQNKPRYLMGVGTPEDLVAAVSQGVDMFDCVMPTRNARNGWLFTQYGDVKIKNASYKNDTQPLDADCGCYTCQNFTRAYLHHLHRIGEILSARLNTIHNLYYYQELMAGMRAAIEAGNFETFKQTFAAKRNSRV

SEQ ID NO: 57433 - protein, 384 aa, Meiothermus cateniformans
  REGION 1..384: note = tr|A0A399DXT8|A0A399DXT8_9DEIN Queuine tRNA-ribosyltransferase OS=Meiothermus cateniformans; OX = 482825 GN=tgt PE=3 SV=1
MFEFAITAQSGRARTGLFHTPHGVVQTPLFMPVGTQGSVKGLSPRELREIGSQIILGNTYHLLLRPGPERVRALGGLHKFAAYDGPWLTDSGGFQVMSLGDLRKISEQGVTFRSHLNGDLIELTPEYSIQVQEALGADIIMAFDECPPYPATTEYLKASIERTLRWLERCLKAKTRPDQALFAIAQGGVDLKLRRFSAEATVAFDTPGFAIGGLAVGEPKEGMYPAVELSTRLLPEHKPRYLMGVGHPEDLVAAVALGVDMFDCVYPTRTGRFGYALVPEGRLNLKLSRYLDDPRPIDPACDCYACTHYSRAYLAHLVRAEEMLAPRMISLHNLRYLHRLMEGARTAIQTGNYGEFAQDFAGRRFGRQIPGWFTRALQEGGHWN

SEQ ID NO: 57434 - protein, 384 aa, Meiothermus granaticius
  REGION 1..384: note = tr|A0A399F6Y0|A0A399F6Y0_9DEIN Queuine tRNA-ribosyltransferase OS=Meiothermus granaticius NBRC 107808 OX=1227551 GN=tgt PE=3 SV=1
MFEFSLTARSGRARTGLLLTPHGEVQTPLFMPVGTLGSVKGISPQELQEIGSQIILGNTYHLLLRPGPERVQRLGGLHGFAAYPGPWLTDSGGFQVMSLGHLRRISEEGVVFQSHLNGDLIELSPEKSVWVQEALGADILMAFDECPPYPASREYMRDSIERTLRWLERCLRAKTRPDQALFAIAQGGVDLELRRLSTEATARFDTPGYAIGGLAVGEPKEGMYPAVELSTRLLPERKPRYLMGVGHPEDLVASVGLGVDMFDCVYPTRTGRFGYALVPEGRMNLKLSKHLDDPNPIDPGCDCYTCQHFSRAYLSHLVRAEEMLGLRMLSLHNLRYLHRLMESARAAIQAQAYGEFAQDFAGKRFGPEVPEWFRKALQAGGHWA

SEQ ID NO: 57435 - protein, 403 aa, Meiothermus hypogaeus
  REGION 1..403: note = tr|A0A511R4K8|A0A511R4K8_9DEIN Queuine tRNA-ribosyltransferase OS=Meiothermus hypogaeus NBRC 106114 OX=1227553 GN=tgt PE=3 SV=1
MRLRVAGLAHKLNNPENTQVFEFSITAQSGRARTGLFSTPHGAVQTPLFMPVGTQGSVKGISPRELKEIGSQIILGNTYHLLLRPGPERVRALGGLHRFAAYDGPWLTDSGGFQVMSLGDLRKISEQGVTFRSHLNGDLIELTPEYSILVQEALGADIIMAFDECPPYPATPDYLRASIERTLRWLERCLKAKTRPDQALFAIAQGGTDLALRKASAEATVAFDTPGLAIGGLAVGEPKEGMYPAVALSTQLLPEHKPRYLMGVGHPEDLVASVALGVDMFDCVYPTRTGRFGYALVPEGRLNLKLTRYLDDPRPIDPECDCYACTHYSRAYLSHLVRAEEMLAPRMISLHNLRYLHRLMESARAAIRSGDYGEFAKDFAGKRFGHAIPPWFTGALQEGGHWR

SEQ ID NO: 57436 - protein, 401 aa, unidentified
  source 1..401: note = Meiothermus luteus
  REGION 1..401: note = tr|A0A399F0A8|A0A399F0A8_9DEIN Queuine tRNA-ribosyltransferase OS=Meiothermus luteus OX=2026184; GN = tgt PE=3 SV=1
MSHLGLAREPNSLENTQVFEFSITARSGRARAGLLTTPHGVVKTPLFMPVGTQGSVKGISPRELKEIGSQIVLANTYHLLLRPGPERVRALGGLHWFAAYDGPWLTDSGGFQVMSLGDLRKIDEQGVTFRSHLNGDLVVLTPERSIEAQEALGADIIMAFDECPPYPSSPDYLKASVGRTLRWLERSLKAKTRPDQALFAIAQGGVDLELRRTSVLATVAFDTPGFAIGGLAVGEPKEDMYPAVELSTRLLPDHKPRYLMGVGHPEDLVAAVALGVDMFDCVYPTRTGRFGYALVPEGRLNLKLSRYLDDPRPIDPACDCYACTHYSRAYLSHLVRAEEILALRMLSLHNLRYLHRLMEAAWEAIQSRDYGAFAREFAGRRFREGIPPWFTLALREGGHWG

SEQ ID NO: 57437 - protein, 384 aa, unidentified
  source 1..384: note = Meiothermus roseus
  REGION 1..384: note = tr|A0A399EFS2|A0A399EFS2_9DEIN Queuine tRNA-ribosyltransferase OS=Meiothermus roseus OX=1644118; GN = tgt PE=3 SV=1
MFSFAITARAGRARTGVFETPHGPVETPLFMPVGTLGSVKGISPQELREIGSQIVLGNTYHLLLRPGPERVRALGGLHRFAAYDGPWLTDSGGFQVMSLGHMRRISEEGVVFQSHINGDLIELSPEKSVAAQEALGADIIMAFDECPPYPAAPEYLEESIERTLRWLERCLEAKTRPDQALFAIAQGGVDLKLRRLSAQATVSFDTPGFAIGGLAVGEPKEAMYPAVELSTRLLPEGKPRYLMGVGHPEDLVASVALGVDMFDCVYPTRTGRFGYALVPEGRLNLKLTRHLDDPTPIDPECDCYACRHFSRAYLAHLVRADEMLGLRMLSLHNLRYLHRLMEQARAAIREGCYGEFAREFARRRFGGEVPGWFRRALEEGGHWA

SEQ ID NO: 57438 - protein, 384 aa, Meiothermus ruber
  REGION 1..384: note = tr|A0A0S7ALB5|A0A0S7ALB5_MEIRU Queuine tRNA-ribosyltransferase OS=Meiothermus ruber H328; OX = 1297799 GN=tgt PE=3 SV=1
MFEFAITAQSGRARTGLFHTPHGLVQTPLFMPVGTQGSVKGISPRELREIGSQIILGNTYHLLLRPGPERVRTLGGLHKFAAYDGPWLTDSGGFQVMSLGDLRQISEQGVTFRSHLNGDLIELTPEYSIQVQEALGADIIMAFDECPPYPASPEYLKASIERTLRWLERCLKAKTRPDQALFAIAQGGIDLALRKASAEATAAFDTPGLAIGGLAVGEPKEGMYPAVELSTRLLPESKPRYLMGVGHPEDLVASVALGVDMFDCVYPTRTGRFGYALVTEGRLNLKLSRYLDDPRPIDPTCDCYACTHYSRAYLAHLVRAEEMLAPRMISLHNLRYLHRLMESARKAIQSGNYGEFAKDFAGQRFGQQIPAWFTRALEEGGHWQ

SEQ ID NO: 57439 - protein, 383 aa, Meiothermus ruber
  REGION 1..383: note = tr|D3PMC1|D3PMC1_MEIRD Queuine tRNA-ribosyltransferase OS=Meiothermus ruber (strain ATCC 35948 / DSM 1279 / VKM B-1258 / 21) OX=504728 GN=tgt PE=3; SV = 1
MFEFAITAQSGRARTGLFHTPHGLVQTPLFMPVGTQGSVKGISPRELREIGSQIILGNTYHLLLRPGPERVRALGGLHKFAAYDGPWLTDSGGFQVMSLGDLRQISEQGVTFRSHLNGDLIELTPEYSIQVQEALGADIIMAFDECPPYPASPEYLKASIERTLRWLERCLKAKTRPDQALFAIAQGGIDLALRKASAEATAAFDTPGLAIGGLAVGEPKEGMYPAVELSTRLLPESKPRYLMGVGHPEDLVASVALGVDMFDCVYPTRTGRFGYALVTEGRLNLKLSRYLDDPRPIDPTCDCYACTHYSRAYLAHLVRAEEMLAPRMISLHNLRYLHRLMESARKAIQSGNYGEFAKDFAGQRFGQQIPAWFTRALEEGGHW

SEQ ID NO: 57440 - protein, 384 aa, Meiothermus silvanus
  REGION 1..384: note = tr|A0A4V1WHB1|A0A4V1WHB1_9DEIN Queuine tRNA-ribosyltransferase OS=Meiothermus silvanus OX=52022; GN = tgt PE=3 SV=1
MFDFRITTQAGRARTGLLQTPHGLVHTPLFMPVGTLGSVKGLSPQEIQEIGSQIVLANTYHLLLRPGPERVRALGGLHRFAAYSGPWLTDSGGFQVMSLGHLRRISEEGVVFQSHINGDLIELSPEKSVAVQEALGADVIMAFDECPPYPAHREYMKESIERTLRWLERCLKAKTRPDQALFAIAQGGIDLELRRISTEATVAYDTPGFAIGGLAVGEPKEAMYPAVELSTRILPESKPRYLMGVGHPEDLVASVALGVDMFDCVYPTRTGRFGYALVAEGRMNLKLTRHLDDPRPIDPECDCYACRHFSRAYLAHLIRAEEMLGLRMVSLHNLRYLHRLMEQARSAIAENRYGEFARDFAQQRFGQEVPGWFARALQEGGHWE

SEQ ID NO: 57441 - protein, 384 aa, Meiothermus silvanus
  REGION 1..384: note = tr|D7BDL5|D7BDL5_MEISD Queuine tRNA-ribosyltransferase OS=Meiothermus silvanus (strain ATCC 700542 / DSM 9946 / VI-R2) OX=526227 GN=tgt PE=3 SV=1
MFDFRITARAGRARNGLLPTPHGLVHTPLFMPVGTLGSVKGISPQEIRDIGSQIVLANTYHLLLRPGPQRVKALGGLHRFAAYSGPWLTDSGGFQVMSLGHLRRISEEGVVFQSHINGDLIELSPEKSVAVQEALGADIIMAFDECPPYPASREYMKESIERTLRWLERCFKAKTRPDQALFAIAQGGIDLELRRISAEATVAFDAPGFAIGGLAVGEPKEAMYPAVELSTRILPESKPRYLMGVGHPEDLVASVALGIDMFDCVYPTRTGRFGYALVAEGRMNLKLTRYLDDPRPIDPECDCYACRHFSRAYLSHLIRAEEMLGLRMVSLHNLRYLHRLMEQARSAIAEKRYGEFARDFARRRFGQEIPGWFARALQEGGHWE

SEQ ID NO: 57442 - protein, 383 aa, Meiothermus sp.
  REGION 1..383: note = tr|A0A370JXJ2|A0A370JXJ2_9DEIN Queuine tRNA-ribosyltransferase OS=Meiothermus sp. QL-1 OX=2058095; GN = tgt PE=3 SV=1
MFAFTLLARSGRARRGRFSTPHGTVETPLFMPVGTQGSVKGLTPRELEEVGSQIILGNTYHLLLRPGPERVRALGGLHGFAAYQGPWLTDSGGFQVMSLGELRRISEEGVTFRSHLNGELVTLTPERSIAVQEALGADIIMAFDECPPYPAEPTYLRASMERTLRWLERSLKAKTRPDQALFAIAQGGTDPGLRRASTEATVAFGTPGFAIGGLAVGEPKEAMYAAVELSTRLLPEDKPRYLMGVGHPEDLVAAVALGVDMFDCVYPTRTGRFGYALVPEGRLNLKLSRFLDDPRPLEPGCDCYACTQFSRAYLAHLVRAGELLAPRLLSLHNLRHLHRLMERARQAIQEGAYGAFAREFAERRFGQIPDWFRYALEAGGHWP

SEQ ID NO: 57443 - protein, 384 aa, Meiothermus sp.; identical to SEQ ID NO: 57440
  REGION 1..384: note = tr|A0A323U3A6|A0A323U3A6_9DEIN Queuine tRNA-ribosyltransferase OS=Meiothermus sp. Pnk-1 OX=873128; GN = tgt PE=3 SV=1

SEQ ID NO: 57444 - protein, 383 aa, unidentified
  source 1..383: note = Meiothermus terrae
  REGION 1..383: note = tr|A0A399EZ46|A0A399EZ46_9DEIN Queuine tRNA-ribosyltransferase OS=Meiothermus terrae OX=1408545; GN = tgt PE=3 SV=1
MFSFAITARAGRARTGVFETPHGPVQTPLFMPVGTLGSVKGISPQELRDIGSQVVLGNTYHLLLRPGPERVRALGGLHGFAAYAGPWLTDSGGFQVMSLGHMRRISEEGVVFQSHINGDLIELTPEKSVATQEALGADVIMAFDECPPYPAAREYLKESIERTLRWLERCLGAKTRPDQALFAIAQGGVDLELRRVSAEATVPFDTPGFAIGGLAVGEPKEGMYPAVGLSTRLLPEHKPRYLMGVGHPEDLVASVALGVDMFDCVYPTRTGRFGYALLPEGRLNLKLTRHLDDPKPIDPECDCYACRHFSRAYLAHLVRADEMLGLRMLSLHNLRYLHRLMEQARAAIREGRYGDFARDFARRRFGGEVPGWFRGALEEGGHW

SEQ ID NO: 57445 - protein, 390 aa, unidentified
  source 1..390: note = Melaminivora alkalimesophila
  REGION 1..390: note = tr|A0A317R8F6|A0A317R8F6_9BURK Queuine tRNA-ribosyltransferase OS=Melaminivora alkalimesophila; OX = 1165852 GN=tgt PE=3 SV=1
MLQFDLLATDPSSHARRGRLTLNHGVVQTPIFMPVGTYGTVKGVMPRSLTEMGAQIILGNTFHLWMRPGLDVVKGFGGLHAFEQWDKPILTDSGGFQVWSLGAMRKITEEGVHFRSPVNGDKLFMSPEVSMQIQTVLNSDIAMQLDECTPYETNGQRTTESEARKSMEMSRRWAARSKAEFERLENPNALFGIVQGGMYEHLRQESLDALVEMDFPGYAVGGVSVGEPKEEMLRIMAHTPHRLPANKPRYLMGVGTPEDLVEGVAQGVDMFDCVMPTRNARNGTIFTRYGDLKIRNARHREDHRPLDTTCTCHACAGTSGVAWDDGGREGFSRAYLHHLERCGEMLGPMLTTIHNLHYYLQLMQEMRDALDAGRFAQFRAQFKSDRARGV

SEQ ID NO: 57446 - protein, 390 aa, unidentified
  source 1..390: note = Melaminivora sp.
  REGION 1..390: note = tr|A0A2P1NIF3|A0A2P1NIF3_9BURK Queuine tRNA-ribosyltransferase OS=Melaminivora sp. SC2-7; OX = 2116657 GN=tgt PE=3 SV=1
MLQFDLLATDPASHARRGALTLNHGVVQTPIFMPVGTYGTVKGVMPRSLTEMGAQIILGNTFHLWMRPGLDVVQGFGGLHAFEQWDKPILTDSGGFQVWSLGAMRKITEEGVHFQSPVNGDKLFMSPEVSMQIQTVLNSDIVMQLDECTPYESNGQLTTESEARKSMEMSRRWALRSKAEFERLANPNALFGIVQGGMFEHLRQESLDALVEMDFPGYAVGGVSVGEPKDEMLRIMAHTPHRLPAHKPRYLMGVGTPEDLVEGVAQGVDMFDCVMPTRNARNGTLFTRYGDLKIRNARHKDDHRPLDTSCTCHACAGTAGVSWDDGGRGGFSRAYLHHLDRCGEMLGPMLTTIHNLHYYLQLMQDIRNALDAGAFAQLRAQFKADRARGV

SEQ ID NO: 57447 - protein, 390 aa, unidentified
  source 1..390: note = Melaminivora sp.
  REGION 1..390: note = tr|A0A2R3QD39|A0A2R3QD39_9BURK Queuine tRNA-ribosyltransferase OS=Melaminivora sp. SC2-9; OX = 2109913 GN=tgt PE=3 SV=1
MLQFDLLATDPASHARRGRLTLNHGVVQTPIFMPVGTYGTVKGVMPRSLTEMGAQIILGNTFHLWMRPGLDVVKSFGGLHAFEQWDKPILTDSGGFQVWSLGAMRKITEEGVHFQSPVNGDKLFMSPEVSMQIQTVLNSDIVMQLDECTPYETGGQLTTESQARKSMEMSRRWALRSKAEFERLGNPNALFGIVQGGMFENLRQESLDALVEMDFPGYAVGGVSVGEPKDEMLRIMAHTPHRLPQGKPRYLMGVGTPEDLVEGVAQGVDMLDCVMPTRNARNGTIFTRYGDLKIRNARHKDDHRPLDTTCTCHACAGTSGVAWDDGGRGGFSRAYLHHLDRCGEMLGPMLTTIHNLHYYLNLMQEIRDALDAGTFAQLRARFREERARGV

SEQ ID NO: 57448 - protein, 378 aa, unidentified
  source 1..378: note = Melghiribacillus thermohalophilus
  REGION 1..378: note = tr|A0A4R3NEJ7|A0A4R3NEJ7_9BACI Queuine tRNA-ribosyltransferase OS=Melghiribacillus thermohalophilus OX=1324956 GN=tgt PE=3 SV=1
MAIIFELLKEDSQTGARLGRLHTPHGSIDTPVFMPVGTLATVKTMSPEELNEIGARILLSNTYHLWLRPGEDIVEEAGGLHSFMNWNGAILTDSGGFQVFSLSDMREIQEEGVHFRNHLSGEKLFLSPEKSIQIQNSLGADIIMAFDECPPYPAEYDYMKQSVERTSRWAERCLKAHRRPEDQGLFGIIQGGEYEDLRQQSARDLVSLDFPGYAVGGLSVGEPKDVMNKVLEFTTPLLPKNKPRYLMGVGSPDSLIDGAIRGIDMFDCVLPTRIARNGTCMTSTGRLVVRNAKYARDFRPLDEHCDCYVCRNYSRAYIRHLIKANEIFGMRLTTYHNLYFLVKLMEQVREAIRENRLLDFREQFFEQYGFNKPDAKNF

SEQ ID NO: 57449 - protein, 378 aa, unidentified
  source 1..378: note = Melghirimyces algeriensis
  REGION 1..378: note = tr|A0A521AUT5|A0A521AUT5_9BACL Queuine tRNA-ribosyltransferase OS=Melghirimyces algeriensis; OX = 910412 GN=tgt PE=3 SV=1
MAVHYELIKTCGQSGARLGRLHTPHGTMKTPVFMPVGTLATVKTMSPEELKELGSGIILSNTYHLFLRPGHDVVQEAGGLHRFMNWDRAILTDSGGFQVFSLADLRQISEEGVSFRSHLNGQPLFLSPEKSMEIQNALGADVIMAFDECPPHPAERDYVKDSSDRTYRWLKRCVDSHRRKEDQALFGIIQGGMYRDLREESAKQITSVDLPGYAIGGLSVGEPKEMMYEALEWTVPLMPKAKPRYLMGVGSPDALVEGVIRGVDMFDCVLPTRIARNGTIMTSRGRVVVRNAKYARDFSPLDPECDCYTCRNYSRAYLRHLLKADEIFGLRLTTYHNLHFLLQLMKQVQQAIQEDRLLDFRNRFFEQYYGSLTPERNF

SEQ ID NO: 57450 - protein, 378 aa, unidentified
  source 1..378: note = Melghirimyces profundicolus
  REGION 1..378: note = tr|A0A2T6BH01|A0A2T6BH01_9BACL Queuine tRNA-ribosyltransferase OS=Melghirimyces profundicolus; OX = 1242148 GN=tgt PE=3 SV=1
MAVRYELIKTCRQSGARLGRLHTPHGTVDTPVFMPVGTLATVKTMSPEELKEMGSGIILANTYHLFLRPGHEVVREAGGLHSFMNWDRAILTDSGGFQVFSLSDLRKITEEGVSFRSHLSGEPLFLSPEKSMEVQNALGADIIMAFDECPPYPAERDYVKASTERTYRWLKRCVKAHGRKEDQALFGIIQGGMHRDLREESARQITSVDLPGYAIGGLSVGEPKEMMYEALEWTTPLMPEDKPRYLMGVGSPDALVEGVIRGVDMFDCVLPTRIARNGTTMTSQGRVVVRNAKYARDFSPLDPECDCYTCRNYSRAYLRHLIKSDETFGLRLTTYHNLYFLLKLKEQVRRAIKEDRLLDFRDRFFEQYYGSTEPTRNF

SEQ ID NO: 57451 - protein, 378 aa, unidentified
  source 1..378: note = Melghirimyces thermohalophilus
  REGION 1..378: note = tr|A0A1G6JJV8|A0A1G6JJV8_9BACL Queuine tRNA-ribosyltransferase OS=Melghirimyces thermohalophilus; OX = 1236220 GN=tgt PE=3 SV=1
MAVRYELIKTCRQSGARLGRLHTPHGTVETPVFMPVGTLATVKTMSPEELKEMGSGIILSNTYHLYLRPGHEVVREAGGLHRFMNWDRAILTDSGGFQVFSLADLRKISEEGVSFRSHLSGEPLFLSPEKSMEIQNALGADIIMAFDECPPYPAERDYVKASLDRTYRWLKRCTEAHSRKEDQALFGIIQGGMYRDLREESARLITSIDLPGYAIGGLSVGEPKEKMYEALEWTTPLLPEEKPRYLMGVGSPDALVEGVIRGVDMFDCVLPTRIARNGATMTSRGRVVVRNAKYARDFSPLDPECDCYTCRNYTRAYLRHLIKSDETFGIRLTTYHNLYFLLRLKEKVRQAIREDRLLDFRDRFFEEYYGSTMPTRNF

SEQ ID NO: 57452 - protein, 382 aa, unidentified
  source 1..382: note = Melioribacter roseus
  REGION 1..382: note = tr|I6ZVC0|I6ZVC0_MELRP Queuine tRNA-ribosyltransferase OS=Melioribacter roseus (strain JCM 17771 / P3M-2) OX=1191523 GN=tgt PE=3 SV=1
MDFKLEKRDTRSKARAGRIITEHGEIKTPIFMPVGTQGTVKAVSQRILKDEIKAQIILSNTYHLYLRPGTDILEQAGGLHKFMSWDLPILTDSGGFQVYSLTELRKLKSDGVEFRSHLDGSIHYFTPQKVIEIQRSIGSDIIMPLDECTPYPCEYDYAKKSTELTSKWAILNKEAFESTKPLYGHSQALFGIIQGSVYKDLREISAKDLLKLDFDGYAIGGLAVGEPPEVMYDLVDFTTDFMPENKPRYLMGVGRPENILEAIERGVDMFDCVMPTRNARNAYLFTSKGVVSMRNAAYKDDFSPLDPECDCYTCKNFSKSYLRHLFNAKEILALELSSIHNLTFYLNLVKTAREKILDGSFVEWKNGIVEVLSTNVQLNKEY

SEQ ID NO: 57453 - protein, 383 aa, unidentified
  source 1..383: note = Melioribacter sp.
  REGION 1..383: note = tr|A0A1G1B9J3|A0A1G1B9J3_9BACT Queuine tRNA-ribosyltransferase OS=Melioribacter sp. GWF2_38_21; OX = 1801612 GN=tgt PE=3 SV=1
MLPFSLIHTDKNSKARVGEFKTGHGTVQTPIFMPVGTQGTVKAITQRVLESEVNAEIVLSNTYHLYLRPGTEILEKAGGLHRFMNWTRPILTDSGGFQIYSLSELRKIKRDGVEFKSHLDGSSHYFDPRKVIEIQRSIGSDILMPLDECTPYPCEFEYAKKSKELTSRWAILNKEAFEQTLPLYGHEQFLFGIIQGSVYKELRESSANDLVKLDFDGYSIGGLAVGEPTDEMYKLVDFTTDFIPQTKPRYLMGVGRPENILEAIARGVDMFDCVMPTRNARNAYLFTSQGIVSMRNAAYKDDMTPLDQECGCYTCKNFSRAYLRHLFNAKEILAMELATIHNLTFYLNLVSEARKRIIDGSFVEWKNEFGKTISINVQSKKEQ

SEQ ID NO: 57454 - protein, 383 aa, Melissococcus plutonius
  REGION 1..383: note = tr|F3Y9H9|F3Y9H9_MELPT Queuine tRNA-ribosyltransferase OS=Melissococcus plutonius (strain ATCC 35311 / CIP 104052 / LMG 20360 / NCIMB 702443); OX = 940190 GN=tgt PE=3 S V=1
MPQSVPAIRYRLLKKEKHTGARLGELITPHGTFPTPMFMPVGTLATVKTISPEELKEIGAGVILSNTYHLWLRPGEDLIEEAGGLHKFIHWDQPILTDSGGFQVFSLSDMRNITEDGVHFKNHLNGSPMFLSPEKAIAIQNKLGSDIMMSFDECPPYYESYTYVKKSIERTSRWAERGLKAHKHPDTQGLFGIIQGAGFEELRRQSAQELVAMDLPGYSIGGLSVGESKEEMNRILEYTTPFIPEDKPRYLMGVGAADSLIDGAIRGVDMFDCVLPTRIARNGTCMTSKGRLVVKNAQFARDFSPIDEKCDCYVCKNYSRAYIRHLIKCDETFGIRLTSYHNLYFLLNLMKNVRQAIQEDKLLEFRQQFFEEYGFNQKNAKNF

SEQ ID NO: 57455 - protein, 383 aa, Melissococcus plutonius
  REGION 1..383: note = tr|A0A2Z5Y3B4|A0A2Z5Y3B4_9ENTE Queuine tRNA-ribosyltransferase OS=Melissococcus plutonius; OX = 33970 GN=tgt PE=3 SV=1
MPQSVPAIRYRLLKKEKHTGARLGELITPHGTFPTPMFMPVGTLATVKTISPEELKEIGAGVILSNTYHLWLRPGEDLIEEAGGLHKFMHWDQPILTDSGGFQVFSLSDMRNITEDGVHFKNHLNGSPMFLSPEKAIAIQNKLGSDIMMSFDECPPYYESYTYVKKSIERTSRWAERGLKAHKHPDTQGLFGIIQGAGFEELRRQSAQELVAMDFPGYSIGGLSVGESKEEMNRILEYTTPFIPEDKPRYLMGVGAADSLIDGAIRGVDMFDCVLPTRIARNGTCMTSKGRLVVKNAQFARDFSPIDEKCDCYVCKNYSRAYIRHLIKCDETFGIRLTSYHNLYFLLNLMKNVRQAIQEDKLLEFRQQFFEEYGFNQKNAKNF

SEQ ID NO: 57456 - protein, 381 aa, Melissococcus sp.
  REGION 1..381: note = tr|A0A374JDY2|A0A374JDY2_9ENTE Queuine tRNA-ribosyltransferase OS=Melissococcus sp. OM08-11BH; OX = 2293110 GN=tgt PE=3 SV=1
MTEPAIKYRLIKKEKHTGARLGEIITPHGTFPTPMFMPVGTLATVKTMAPEELKEMGAGIILSNTYHLWLRPGEDIVEGAGGLHKFMNWDQGILTDSGGFQVWSLSDMRQIEESGVHFRNHLNGSKMFLSPEKAIQIQNKLGPDIMMSFDECPPFQESHDYVKKSIERTSRWAERGLKAHQNPDRQGLFGIIQGAGYKDLREQSARELVSLDFPGYSIGGLSVGEPKEEMNKVLEYTTPLIPENKPRYLMGVGTPDSLIDGVIRGVDMFDCVLPTRIARNGTCMTSQGRLVVKNAKYAEDYRPIDEKCDCYTCRNYTRAYIRHLIKCDETFGIRLTSYHNLYFLLNTMKQVRQAIMDDNLLEFRQAFFEEYGFNKENAKNF

SEQ ID NO: 57457 - protein, 394 aa, Melittangium boletus
  REGION 1..394: note = tr|A0A250ITK9|A0A250ITK9_9DELT Queuine tRNA-ribosyltransferase OS=Melittangium boletus DSM 14713; OX = 1294270 GN=tgt PE=3 SV=1
MGEPREEKGDTRVPPSLVRYELLHEDASGTRARRGRLHTPHGMVETPIFMPVGTVGSVKGVGPDELLTLDAQIILGNTYHLMLRPGDDLVGEMGGLHRFISWDRPMLTDSGGFQVFSLSEKRKITEEGAAFQSHLDGRKLLLTPERSIEIQETLGADIIMAFDECPPSTESRAYLEKSLARTTRWLHRCVKAWRRERSSLFGIVQGGMDPQLRKAHAEEVCAVDLPGYALGGYAVGETPEAMYEGVAYSAPLLPRDKPRYLMGVGTPVDLINCVEQGVDMFDCVLPTRCARNGLLFTTEGKLVIRNATWAKDPRPVDPACSCYTCRTFSRAYLRHLFVAGEILAMRLNTLHNLHYFLTLMKQVREAIAEDRYASFARDFREKARAQEAERTRTK

SEQ ID NO: 57458 - protein, 407 aa, Melittangium boletus
  REGION 1..407: note = tr|A0A250ITF8|A0A250ITF8_9DELT Queuine tRNA-ribosyltransferase OS=Melittangium boletus DSM 14713; OX = 1294270 GN=tgt PE=3 SV=1
MEGVIRARHGYKAGSMAVRFELVTTDSTGARAGVLHTRRGSIPTPVFMPVATHASFRHLGMEEIKATGSKILLSNTYHLMLKPGAEVFKRFGGIHPFMQWDGAVLTDSGGFQIFSLPEDRLITEKGAHFRSFYDNSRQLLSPESSIAMQQAINSEIMMVLDVCIDSRTDEPGTREAMERTHRWAVRSLAAKNQVDTGQALFAIVQGGVHPHLRDESAAFLTQHPFDGFAIGGLAVGETNEERKTMTARAAASLPQDKPRYLMGVGTPTDLLEAVLRGVDMFDCIIPTKMAQQGYAYTFQGLVRITRQAFRLSDEPLDPMCDCYVCKRYSRGYLQHLMSGKHHTGSRMLSVHNVHHYQMLTWKMRDAILRGSYAQAYRELKQMVATPKDLKEARLEVGANAVTLKDVG

SEQ ID NO: 57459 - protein, 376 aa, Meridianimaribacter sp.
  REGION 1..376: note = tr|A0A4V2KED7|A0A4V2KED7_9FLAO Queuine tRNA-ribosyltransferase OS=Meridianimaribacter sp. CL38; OX = 2213021 GN=tgt PE=3 SV=1
MIFELKGKDSQSKARAGKITTDHGVIETPIFMPVGTVASVKGVHQRELKNDINPDIILGNTYHLYLRPQTDILEKAGGLHKFMNWDRNILTDSGGYQVYSLSANRKIKEEGVKFKSHIDGSYHTFTPENVMEIQRSIGADIIMAFDECTPYPCDYNYAKRSMHMTHRWLDRCIAHLEKTPFKYGYSQTFFPIVQGSTYKDLRMQSAEYIANSGALGNAIGGLSVGEPAEEMYAMTDVVCGILPEDKPRYLMGVGTPINILENIALGVDMFDCVMPTRNARNGMLFTAHGTINIKNKKWEDDFSPIDEMGITFVDTEYSKAYLRHLFTVNELLGKQIATIHNLGFYLWLVREARKHILAGDFRSWKDKMVKQMDKRL

SEQ ID NO: 57460 - protein, 380 aa, Merismopedia glauca
  REGION 1..380: note = tr|A0A2T1BZ73|A0A2T1BZ73_9CYAN Queuine tRNA-ribosyltransferase OS=Merismopedia glauca CCAP 1448/3; OX = 1296344 GN=tgt PE=3 SV=1
MNENFTFKSIARCSHTQARAGIFYTPHGVVETPRFMPVGTVATVKTLTPAQLEATEAQMVLANTYHLHLQPGEEIIAKAGGLHKFMNWKGPMLTDSGGFQVFSLSKMRKISEDGVIFRSPRNGDIINLTPEKSIQIQNALGADVIMAFDECPPYPSDRSTIIASTERTYRWLERCINAHECPQDRALFGIVQGGVYLDLRQAAAESLVKLDLPGYAIGGVSVGEPAELIEKIVKVTAPLLPASKPRYLMGVGTYREMAQAIAWGVDMFDCVIPTRLGRHGAALVQGERWNLRNSRFREDFTPLDETCPCYTCQNFSRAYLNHLVKCQEVLGYTLLSLHNTTELIRFTTRIREAILSDRFTEEFAPWLNSTTTESTDPDLC

SEQ ID NO: 57461 - protein, 370 aa, unidentified
  source 1..370: note = Mesoaciditoga sp.
  REGION 1..370: note = tr|A0A2J6WK29|A0A2J6WK29_9BACT Queuine tRNA-ribosyltransferase OS=Mesoaciditoga sp. OX=2060323; GN = tgt PE=3 SV=1
MRFETTRRDGTARSGKLILERGTVETPVFMPVGTNGAIKMCTRDCVKKAGATIVLANAFHLYLKPGLEILREFGGIHDFASWDIPVLTDSGGFQIFSLSKNIKVDDDGADFKSPFDGTVHRFTPEKVVEIQETIGSDIAMVLDECLAPTDLESTKKSMKRTFKWAQRAILAHKRKDQALFGITQGGFFEETRRESTIEITSLPFDGFGIGGLSVGEDIDTTIKMLDVVLPLMPEDRPRYLMGVGDPLLMLEAVERGVDMMDCVLPTRMARHGGILTSQGRINIRAAIYEKDKGPLDPSCDCEVCRSYSRGYIHHLIKRNESTGMILATYHNIYFLTDLMKRSKAAIINKEFKEFKEEVLSKMKYQKRRVL

SEQ ID NO: 57462 - protein, 384 aa, unidentified
  source 1..384: note = Mesocricetibacter intestinalis
  REGION 1..384: note = tr|A0A4R6VFK4|A0A4R6VFK4_9PAST Queuine tRNA-ribosyltransferase OS=Mesocricetibacter intestinalis; OX = 1521930 GN=tgt PE=3 SV=1
MKYQLQTTNGRARRGKLTFERPQGTFSVETPAFMPVGTYGTVKGMTPEEVRESGAEILLGNTFHLWLRPGQEIIRKHGDLHDFMQWQRPILTDSGGFQVFSLGKLRKISEEGVKFQNPINGERIFLSPEKSMEIQYDLGSDIVMIFDECTPYPATFDYAKKSMEMSLRWAKRSRDRFDQLGNKNALFGIIQGGTFEELRQISLDGLKAIGFDGYAVGGLAVGEPKEDMHRILEYITPQIPADKPRYLMGVGKPEDLVEGVRRGIDMFDCVMPTRNARNGHLFVSDGIVKIRNAKYRDDTSPLDAECDCYTCRHYSKAYLYHLDKCGEILGARLNTIHNLRYYQRLMAQIRRAIEEHRFEDFVQEFYARIGKPVPPLDSYHQFEG

SEQ ID NO: 57463 - protein, 376 aa, unidentified
  source 1..376: note = Mesoflavibacter aestuarii
  REGION 1..376: note = tr|A0A2T1NBC0|A0A2T1NBC0_9FLAO Queuine tRNA-ribosyltransferase OS=Mesoflavibacter aestuarii; OX = 1266046 GN=tgt PE=3 SV=1
MIFNLEGKDAQSSARAGKITTDHGVIETPIFMPVGTVGTVKGVHQRELKDEINPDIILGNTYHLYLRPGIETLEKAGGLHKFMNWDRNILTDSGGYQVYSLSGRRKIKEEGVKFKSHIDGSYHVFTPENVMETQRSIGADIIMAFDECTPYPCDYNYAKRSMHMTHRWLDRCIDHLHKVPYKYDYSQAFFPIVQGSTYKDLRRQSAEYIANAGALGNAIGGLSVGEPAEELYAMTEIVTEILPEDKPRYLMGVGTPINILENIALGVDMFDCVMPTRNARNGMLFTAYGSINIKNLKWKDDFSPIDEMNITWVDTEYSKAYLRHLFHVNELLGKQIATIHNLGFYLWLTREARKHILAGDFRTWKDKMVKQMDNRL

SEQ ID NO: 57464 - protein, 376 aa, unidentified
  source 1..376: note = Mesoflavibacter sabulilitoris
  REGION 1..376: note = tr|A0A2T1NBC8|A0A2T1NBC8_9FLAO Queuine tRNA-ribosyltransferase OS=Mesoflavibacter sabulilitoris; OX = 1520893 GN=tgt PE=3 SV=1
MTFDLKAKDTQSKARAGVIKTDHGVIETPIFMPVGTVASVKGVHQRELKEEINPDIILGNTYHLYLKPQTDILEKAGGLHKFMNWDRNILTDSGGYQVYSLSANRKIKEEGVKFKSHIDGSYHTFTPENVMEIQRTIGADIIMAFDECTPYPCDYNYAKRSMHMTHRWLERCLAHLKKTPFKYGYSQAFFPIVQGSTYKDLRKQSAEYIAGVGAEGNAIGGLSVGEPAEEMYAMTEVVTDILPEDKPRYLMGVGTPINILENIALGVDMFDCVMPTRNARNGMLFTAHGTINIKNLKWRDDFSPIDEMGITFVDTEYSKAYLRHLFNVNELLGKQIATIHNLGFYLWLVREARKHIIAGDFRTWKDKMVKQMDKRL

SEQ ID NO: 57465 - protein, 376 aa, Mesoflavibacter sp.
  REGION 1..376: note = tr|A0A2T1NRC2|A0A2T1NRC2_9FLAO Queuine tRNA-ribosyltransferase OS=Mesoflavibacter sp. HG96; OX = 2109944 GN=tgt PE=3 SV=1
MTFDLKAKDTQSKARAGVITTDHGVIETPIFMPVGTVASVKGVHQRELKEEINPDIILGNTYHLYLKPQTDILEKAGGLHKFMNWDRNILTDSGGYQVYSLSANRKIKEEGVKFKSHIDGSYHTFTPENVMEIQRTIGADIIMAFDECTPYPCDYNYAKRSMHMTHRWLERCLTHLKKTPFKYDYSQAFFPIVQGSTYKDLRKQSAEYIAGVGAEGNAIGGLSVGEPAEEMYAMTEVVTDILPEDKPRYLMGVGTPINILENIALGVDMFDCVMPTRNARNGMLFTAHGTINIKNLKWRDDFSPIDEMGITFVDTEYSKAYLRHLFNVNELLGKQIATIHNLGFYLWLVREARKHIIAGDFRTWKDKMVKQMDKRL

SEQ ID NO: 57466 - protein, 376 aa, Mesonia algae
  REGION 1..376: note = tr|A0A2W7HX94|A0A2W7HX94_9FLAO Queuine tRNA-ribosyltransferase OS=Mesonia algae OX=213248 GN=tgt; PE = 3 SV=1
MEFDLLAKDSGSKARAGEITTAHGKIETPIFMPVGTIGTVKGVHQRELKEEINPDIILGNTYHLYLRPQMEVLRKAGGLHKFMNWDRNILTDSGGYQVYSLSANRKIKEEGVKFKSHIDGSYHFFTPENVMDVQRTIGADIIMAFDECTPYPCDYRYAKRSMHMTHRWLDRCMNHFHNTPPLYGYDQTLFPIVQGSTYKDLRQQSAEYIANAGAEGNAIGGLSVGEPAEEMYAMTEVVTAILPEDKPRYLMGVGTPINILENIALGVDMFDCVMPTRNARNGMLFTAHGTINIKNKKWYDDFSPIDEMGITWVDTEYSKAYLKHLFSVNEMLGKQIATIHNLGFYLWLTREARKHIIAGDFREWKDKMVKQMDKRL

SEQ ID NO: 57467 - protein, 376 aa, Mesonia phycicola
  REGION 1..376: note = tr|A0A1M6A9S9|A0A1M6A9S9_9FLAO Queuine tRNA-ribosyltransferase OS=Mesonia phycicola OX=579105; GN = tgt PE=3 SV=1
MKFDLLSTDINSKARAGEITTDHGKIETPIFMPVGTIATVKGVHQKELKEEINPDIILGNTYHLYLKPKTEILRKAGGIHKFMNWDRNILTDSGGYQVYSLSANRKIKEEGVKFKSHIDGSYHFFTPENVMEIQRTIGADIIMAFDECTPYPCDYRYAKKSMHMTHRWLDRCIKHFEKTPPLYGYEQSLFPIVQGSTYKDLRRQSAEYIANAGAVGNAIGGLSVGEPAEEMYAMTEVVTEILPEDKPRYLMGVGTPINILENIALGVDMFDCVMPTRNGRNGMLFTAHGTINIKNKKWEDDFSAIDDMAITWVDTEYSKAYLRHLFTVNEMLGRQIATIHNLGFYLWLVREARKHILAGDFRVWKDMMVKQMDKRL

SEQ ID NO: 57468 - protein, 376 aa, Mesonia sp.
  REGION 1..376: note = tr|A0A5C8LEZ8|A0A5C8LEZ8_9FLAO Queuine tRNA-ribosyltransferase OS=Mesonia sp. HuA40 OX=2602761; GN = tgt PE=3 SV=1
MQFKLEANDVGSKARAGTITTDHGSIETPIFMPVGTIATVKGVHQRELKEEINPDIILGNTYHLYMRPHTDILQKAGGLHKFMNWDRNILTDSGGYQVYSLSANRKIKEEGVKFKSHIDGSYHFFTPEGVMDIQRQIGADIIMAFDECTPYPCDYNYAKRSMHMTHRWLERCLKRFHDTPPLYGYEQTLFPIVQGSTYKDLRQQSAEYIANAGAPGNAIGGLSVGEPAEEMYAMTEVVTAILPEDKPRYLMGVGTPINILENIALGVDMFDCVMPTRNGRNGMLFTAHGTINIKNKKWEDDFSPLDEMGITWVDKEYSKAYVRHLFSVNEMLGRQIATIHNLGFYLWLVREARKHILAGDFTSWKNQMVKQMDKRL

SEQ ID NO: 57469 - protein, 376 aa, Mesonia sp.
  REGION 1..376: note = tr|A0A2W1JUB0|A0A2W1JUB0_9FLAO Queuine tRNA-ribosyltransferase OS=Mesonia sp. K7 OX=2218606; GN = tgt PE=3 SV=1
MFFDLKAKDQHSKARAGVITTDHGIIETPIFMPVGTVGTVKGVHQRELEEEVNPDIILGNTYHLYLRPQTDILEQAGGLHKFMNWDRNILTDSGGYQVYSLSANRKIKEEGVKFKSHIDGSYHTFTPENVMEIQRTIGADIIMAFDECTPYPCDYKYAKKSMHMTHRWLDRCIHHLEKTPLKYDYNQYFFPIVQGSTYKDLRQQSAEYIANAGAVGNAIGGLSVGEPAEEMYAMTDVVCSILPEEKPRYLMGVGTPINILENIALGVDMFDCVMPTRNARNGMLFTAHGTINIKNKKWENDFSPIDEMGITWVDTAYSKAYVRHLFSVNELLGKQIATIHNLGFYLWLVREARKQILEGTFRTWKDKMVKQMDKRL

SEQ ID NO: 57470 - protein, 376 aa, Mesorhizobium albiziae
  REGION 1..376: note = tr|A0A1I4BY43|A0A1I4BY43_9RHIZ Queuine tRNA-ribosyltransferase OS=Mesorhizobium albiziae; OX = 335020 GN=tgt PE=3 SV=1
MADTFTFKLLATDGKARRGEISMPRGTVRTPAFMPVGTGGTVKAMYMDQVRDVGADIILGNTYHLMLRPGAERVARLGGLHDFARWPHPILTDSGGFQVMSLAQLRKLNENGVTFRSHIDGAPYEMSPERSIEIQGLLDSDIQMQLDECVALPAKEKDIERAMEMSLRWAERCKTAFGEQPGKAMFGIVQGGDNAKLRVRSATALSAMGLKGYAVGGLAVGEPQPVMLDMLDITCPELPAEKPRYLMGVGTPDDILKSVARGIDMFDCVMPTRAGRHGLAYTRRGKVNLRNARHTDDPRPLDEESDCPAARDYSRAYLHHLVKSQEALGAMLLTWNNLSYYQRLMQDIRDAIEAGQFTERAAAITEGWARGDLAPV

SEQ ID NO: 57471 - protein, 376 aa, Mesorhizobium albiziae
  REGION 1..376: note = tr|A0A5D4H8T0|A0A5D4H8T0_9RHIZ Queuine tRNA-ribosyltransferase OS=Mesorhizobium albiziae; OX = 335020 GN=tgt PE=3 SV=1
MSDEFTFKVLATDGKARRGEISMPRGTVRTPAFMPVGTGGTVKAMYMDQVRGVGADIILGNTYHLMLRPGAERVARLGGLHEFARWPWPILTDSGGFQVMSLSKLRKLNESGVTFRSHIDGAPYEMSPERSIEIQGLLDSDIQMQLDECVALPATEKEIARAMELSLRWAERCKTAFGEQPGRAMFGIVQGGDIPALRERSAGALKDMGLKGYAVGGLAVGEPQAVMLDMLDVTCPVLPQEKPRYLMGVGTPDDIIKSVARGIDMFDCVMPTRAGRHGLAYTRRGKVNLRNARHADDPRPLDEESDCPAARDYSRAYLHHLVKSGEALGSMLLTWNNLAYYQTLMADIRGSIEAGRFVERTGEIAQAWAEGDLPVL

SEQ ID NO: 57472 - protein, 376 aa, Mesorhizobium alhagi
  REGION 1..376: note = tr|H0HVI0|H0HVI0_9RHIZ Queuine tRNA-ribosyltransferase OS=Mesorhizobium alhagi CCNWXJ12-2; OX = 1107882 GN=tgt PE=3 SV=1
MNQTFSFSLLATDGKARRGEISMPRGTIRTPAFMPVGTGGTVKAMYMDQVRGVGSDIILGNTYHLMLRPGAERVARLGGLHEFARWPYPILTDSGGFQVMSLSKLRKLNEQGVTFRSHIDGAAYEMSPERSIEIQGLLDSDIQMQLDECTALPAKDKEIERAMELSLRWAERCKTAFGEQPGKAMFGIVQGGDDALLREKSARALATMDLKGYAVGGLAVGEPQAVMLEMLEITCPELPAQKPRYLMGVGTPDDILKSVARGIDMFDCVMPTRAGRHGLAYTRRGKVNLRNARHADDHRPLDEESDCPAARDYSRAYLHHLVRSQEALGAMLLTWNNLSYYQSLMGQIRDAISAGAFEERTAEITEGWVKGDLPPL

SEQ ID NO: 57473 - protein, 376 aa, Mesorhizobium amorphae
  REGION 1..376: note = tr|G6Y9D5|G6Y9D5_9RHIZ Queuine tRNA-ribosyltransferase OS=Mesorhizobium amorphae CCNWGS0123 OX=1082933 GN=tgt PE=3 SV=1
MAEAFSFKVLAADGKARRGVIDMPRGEIRTPAFMPVGTGGTVKTMYMDQVRDLGADIILGNTYHLMLRPGAERVARLGGLHEFARWPHPILTDSGGFQVMSLSKLRKLTEKGVTFRSHIDGAAYEMSPERSIEIQGLLDSDIQMQLDECTALPAKEKEIERAMELSLRWAERCKAAFGDQPGKAMFGIVQGGDVPSLRVRSAQALKVMELKGYAVGGLAVGEPQAVMLNMLDITCAELPEDKPRYLMGVGTPDDIIKSVARGIDMFDCVMPTRAGRHGLAYTRRGKVNLRNARHADDPRPLDEESDCPAARDYSRAYLHHLVRSQEALGAMLLTWNNLSYYQNLMHDIRAAIEAGAFEARATEISEGWARGDIPAN

SEQ ID NO: 57474 - protein, 376 aa, Mesorhizobium amorphae
  REGION 1..376: note = tr|A0A2W4YY22|A0A2W4YY22_9RHIZ Queuine tRNA-ribosyltransferase OS=Mesorhizobium amorphae OX=71433; GN = tgt PE=3 SV=1
MTTPFSFSVSATDGLARRGAITTARGTIRTPAFMPVGTAGTVKAMYMDQVRGTGADIILGNTYHLMLRPGAERVARLGGLHAMARWPHPILTDSGGFQVMSLAGLRKLDEQGVVFQSHIDGSRHAMSPERSIEIQGLLGSDIQMQLDECIALPAPRAEVERAMELSLRWAERCKTAFGDQPDRAMFGIVQGGDMPDLRVRSAQALRGLDLKGYAVGGLAVGEPQAVMLDILSATCPALPEEKPRYLMGVGTPEDILLSVARGVDMFDCVMPTRAGRHGLAYTRRGKINLKNARHAEDTRPLDEESDCPAARDYSRAYLHHLVRSGEALGAMLLSWNNIAYYQALMGQIRTAIEAGGLGEATGEIREMWARGDVAPV

SEQ ID NO: 57475 - protein, 379 aa, Mesorhizobium australicum
  REGION 1..379: note = tr|A0A1X7PAD0|A0A1X7PAD0_9RHIZ Queuine tRNA-ribosyltransferase OS=Mesorhizobium australicum; OX = 536018 GN=tgt PE=3 SV=1
MSSTSFQFTLHATDGAARTGEISMPRGTIATPAFMPVGTGGTVKAVYMDQVRGAGADIILGNTYHLMLRPGAERVARLGGLHEFARWPWPILTDSGGFQVMSLAQLRKLTEDGVTFRSHIDGSSWHMSPERSIEIQGLLDSDIQMQLDECVALPAKRQEIERAMELSLRWADRCKTAFGDQPGKAMFGIVQGGDDAELRIRSAQALKALELKGYAVGGLAVGEPQEVMLTMLEATCPELPHEKPRYLMGVGTPDDIVKSVARGIDMFDCVMPTRAGRHGLAYTRRGKINLRNARHADDPRPLDEESSCPAARDYSRAYLHHLIKSGEALGGMLLTWNNISYYQDLMRGLRGAIRESRFVDHAAAVTEGWARGDIAPVTC

SEQ ID NO: 57476 - protein, 376 aa, Mesorhizobium australicum
  REGION 1..376: note = tr|L0KMH6|L0KMH6_MESAW Queuine tRNA-ribosyltransferase OS=Mesorhizobium australicum (strain HAMBI 3006 / LMG 24608 / WSM2073) OX=754035 GN=tgt; PE = 3 SV=1
MAENFTFRVLATDGKARRGLIEMPRGEIRTPAFMPVGTGGTVKAMYMDQVRGVGADIILGNTYHLMLRPGAERVARLGGLHEFARWPHPILTDSGGFQVMSLSKLRKLTEKGVTFRSHIDGAAYEMSPERSIEIQGLLDSDIQMQLDECTALPAEVKEIERAMELSLRWAERCKTAFGDQPGKAMFGIVQGGDNAALRVRSAQALSAMELKGYAVGGLAVGEPQAVMLDMLDITCPELPDDKPRYLMGVGTPDDILKSVARGIDMFDCVMPTRAGRHGLAYTRRGKVNLRNARHADDPRPLDEESDCPAARDYSRAYLHHLVRSQEALGAMLLTWNNLSYYQKLMQDIRAAIETGTFKTRGAEISEGWTRGDIPAP

SEQ ID NO: 57477 - protein, 376 aa, Mesorhizobium ciceri
  REGION 1..376: note = tr|A0A143NBE3|A0A143NBE3_9RHIZ Queuine tRNA-ribosyltransferase OS=Mesorhizobium ciceri OX=39645; GN = tgt PE=3 SV=1
MAKQFSFKVLAIDGKARRGVIDMPRGEIRTPAFMPVGTGGTVKTMYMDQVRGVGADIILGNTYHLMLRPGAERVARLGGLHEFARWPHPILTDSGGFQVMSLSKLRKLTEKGVTFRSHIDGAAYEMSPERSIEIQGLLDSDIQMQLDECTALPAEMKEIERAMELSLRWAERCKTAFGDQPGKAMFGIVQGGDNAALRVRSAQALSAMELKGYAVGGLAVGEPQAVMLEMLDITCPELPADKPRYLMGVGTPDDILKSVARGIDMFDCVMPTRAGRHGLAYTRRGKVNLRNARHADDPRPLDEESDCPAARDYSRAYLHHLVRSQEALGAMLLTWNNLSYYQKLMQDIRAAIEAGTFEARGAEITEGWARGDIPLL

SEQ ID NO: 57478 - protein, 376 aa, Mesorhizobium ciceri
  REGION 1..376: note = tr|E8TB03|E8TB03_MESCW Queuine tRNA-ribosyltransferase OS=Mesorhizobium ciceri biovar biserrulae (strain HAMBI 2942 / LMG 23838 / WSM1271); OX = 765698 GN=tgt PE=3 SV=1
MAKQFSFKVLAIDGKARRGVIDMPRGEIRTPAFMPVGTGGTVKTMYMDQVRGVGADIILGNTYHLMLRPGAERVARLGGLHEFARWPHPILTDSGGFQVMSLSKLRKLTEKGVTFRSHIDGAAYEMSPERSIEIQGLLDSDIQMQLDECTALPAEMKEIERAMELSLRWAERCKTAFGDQPGKAMFGIVQGGDNAALRVRSAQALSAMELKGYAVGGLAVGEPQAVMLEMLDITCPELPDNKPRYLMGVGTPDDILKSVARGIDMFDCVMPTRAGRHGLAYTRRGKVNLRNARHADDPRPLDEESDCPAARDYSRAYLHHLVRSQEALGAMLLTWNNLSYYQKLMQDIRAAIEAGTFEARGAEITEGWARGDIPLL

SEQ ID NO: 57479 - protein, 376 aa, unidentified
  source 1..376: note = Mesorhizobium delmotii
  REGION 1..376: note = tr|A0A2P9A9V0|A0A2P9A9V0_9RHIZ Queuine tRNA-ribosyltransferase OS=Mesorhizobium delmotii; OX = 1631247 GN=tgt PE=3 SV=1
MTKAFTFEVLATDGKARRGSITMPRGEVRTPAFMPVGTGGTVKTMYMDQVRGVGSDIILGNTYHLMLRPGAERVARLGGLHEFARWPHPILTDSGGFQVMSLSKLRKLTENGVTFRSHIDGAAHEMSPERSIEIQGLLDSDIQMQLDECTALPAMEKEIERAMELSLRWAERCKTAFGDQPGKAMFGIVQGGDIPALRLRSAQALKAMDLKGYAIGGLAVGEPQAVMLEMLDITCPELPADRPRYLMGVGTPDDILKSVARGIDMFDCVMPTRAGRHGLAYTRRGKVNLRNARHAEDPRPLDEESDCPAARDYSRAYLHHLVRSQEALGAMLLTWNNLSYYQKLMQDIRAAIEAGAFEARAAEISEGWARGDIPAM

SEQ ID NO: 57480 - protein, 376 aa, unidentified
  source 1..376: note = Mesorhizobium ephedrae
  REGION 1..376: note = tr|A0A2P7SPN3|A0A2P7SPN3_9RHIZ Queuine tRNA-ribosyltransferase OS=Mesorhizobium ephedrae; OX = 2116701 GN=tgt PE=3 SV=1
MTETFGFRVLATDGLARRGEVSMPRGKIRTPAFMPVGTGGTVKTMYMDQVRALGSDIILGNTYHLMLRPGAERVARLGGLHHFSRWPHPILTDSGGFQVMSLAKLRKLDEKGVTFRSHIDGAAYEMSPERSIEIQGLLGSDIQMQLDECIALPGEEKDIERAMELSLRWAERCKAAFGDQPGRAMFGIVQGGDKARLRERSATALSELGLKGYAVGGLAVGEPQAVMLDMLEATCPELPADKPRYLMGVGTPDDILKSVARGIDMFDCVMPTRAGRHGLAYTRRGKVNLRNARHADDPRPLDEESDCPASRDYSRAYLHHLVRSQEALGAMLLTWNNLAYYQRLMQDIRAAIEAGELAERSALISEGWARGDLPPV

SEQ ID NO: 57481 - protein, 376 aa, unidentified
  source 1..376: note = Mesorhizobium erdmanii
  REGION 1..376: note = tr|A0A4Q1UZI8|A0A4Q1UZI8_9RHIZ Queuine tRNA-ribosyltransferase OS=Mesorhizobium erdmanii; OX = 1777866 GN=tgt PE=3 SV=1
MAKPFSFKVLATDGKARRGIIDMPRGEIRTPAFMPVGTGGTVKTMYMDQVRGVGADIILGNTYHLMLRPGAERVARLGGLHEFARWPHPILTDSGGFQVMSLSKLRKLTEKGVTFRSHIDGAPYEMSPERSIEIQGLLDSDIQMQLDECTALPAELKEIERAMELSLRWAERCKTAFGDQPGKAMFGIVQGGDNAALRVRSAQALSEMGLKGYAVGGLAVGEPQAVMLEMLDITCPELPADKPRYLMGVGTPDDILKSVARGIDMFDCVMPTRAGRHGLAYTRRGKVNLRNARHADDPRPLDEESDCPAARDYSRAYLHHLVRSQEALGAMLLTWNNLSYYQKLMQDIRAAIETQTFEARGAEITEGWARGDIPVL

SEQ ID NO: 57482 - protein, 376 aa, unidentified
  source 1..376: note = Mesorhizobium hawassense
  REGION 1..376: note = tr|A0A330HM14|A0A330HM14_9RHIZ Queuine tRNA-ribosyltransferase OS=Mesorhizobium hawassense; OX = 1209954 GN=tgt PE=3 SV=1
MAETFSFKLLASDGKARRGLVSMPRGEIRTPAFMPVGTGGTVKAMYMDQVRGVGADVILGNTYHLMLRPGAERVARLGGLHEFARWPHPILTDSGGFQVMSLSKLRKLTEQGVTFRSHIDGAPYEMSPERSIEIQGLLDSDIQMQLDECTALPAKPKEIERAMELSLRWAERCKTAFGDQPGKAMFGIVQGGDSAPMRVRSAQALKAMDLKGYAVGGLAVGEPQSVMLEMLDITCPELPADRPRYLMGVGTPDDILKSVARGIDMFDCVMPTRAGRHGLAYTRRGKVNLRNARHADDPRPLDEESDCAAARDYSRAYLHHLVRSQESLGAMLLTWNNLSYYQKLMQDIRASIEAQAFEARAAEIAEGWARGDIPAV

SEQ ID NO: 57483 - protein, 377 aa, unidentified
  source 1..377: note = Mesorhizobium helmanticense
  REGION 1..377: note = tr|A0A2T4J1Y9|A0A2T4J1Y9_9RHIZ Queuine tRNA-ribosyltransferase OS=Mesorhizobium helmanticense; OX = 1776423 GN=tgt PE=3 SV=1
MTREFTFKVLATNGRARRGAITMPRGEIRTPAFMPVGTGGTVKAMYMDQVRGVGSDIILGNTYHLMLRPGAERVAKLGGLHEFARWPHPILTDSGGFQVMSLSKLRKLTEKGVTFRSHIDGAAYEMSPERSIEIQGLLDSDIQMQLDECTALPAEKKEIERAMELSLRWAERCKSAFGDQPGKAMFGIVQGGDVPDLRLRSAQALKAMDLKGYAVGGLAVGEPQAVMLDMLDITCPELPADRPRYLMGVGTPDDILKSVARGIDMFDCVMPTRAGRHGLAYTRRGKVNLRNARHADDPRPLDEDSDCPAARDYSRAYLHHLVRSQEALGAMLLTWNNLSYYQKLMQDIRAAIEAGAFEVRTAEISEGWAKGDIPVRY

SEQ ID NO: 57484 - protein, 376 aa, unidentified; identical to SEQ ID NO: 57481
  source 1..376: note = Mesorhizobium japonicum
  REGION 1..376: note = tr|A0A3M9X4R7|A0A3M9X4R7_9RHIZ Queuine tRNA-ribosyltransferase OS=Mesorhizobium japonicum; OX = 2066070 GN=tgt PE=3 SV=1

SEQ ID NO: 57485 - protein, 376 aa, unidentified
  source 1..376: note = Mesorhizobium japonicum
  REGION 1..376: note = sp|Q98M57|TGT_RHILO Queuine tRNA-ribosyltransferase; OS = Mesorhizobium japonicum (strain LMG 29417 / CECT 9101 / MAFF 303099) OX=266835 GN=tgt PE=3 SV=1
MAKPFSFKVLATDGRARRGIIDMPRGEIRTPAFMPVGTGGTVKTMYMDQVRGVGADIILGNTYHLMLRPGAERVARLGGLHEFARWPHPILTDSGGFQVMSLSKLRKLTEKGVTFRSHIDGAPYEMSPERSIEIQSLLDSDIQMQLDECTALPAELKEIERAMELSLRWAERCKTAFGDQPGKAMFGIVQGGDNAALRVRSAQALSAMGLKGYAVGGLAVGEPQAVMLEMLDITCPELPADKPRYLMGVGTPDDILKSVARGIDMFDCVMPTRAGRHGLAYTRRGKVNLRNARHADDPRPLDEESDCPAARDYSRAYLHHLVRSQEALGAMLLTWNNLSYYQKLMQDIRAAIETQTFEARGAEITEGWARGDIPVL

SEQ ID NO: 57486 - protein, 376 aa, unidentified
  source 1..376: note = Mesorhizobium jarvisii
  REGION 1..376: note = tr|A0A3A5KHR7|A0A3A5KHR7_9RHIZ Queuine tRNA-ribosyltransferase OS=Mesorhizobium jarvisii; OX = 1777867 GN=tgt PE=3 SV=1
MAKPFSFKVLAIDGKARRGVIDMPRGEIRTPAFMPVGTGGTVKTMYMDQVRGVGADIILGNTYHLMLRPGAERVARLGGLHEFARWPHPILTDSGGFQVMSLSKLRKLTEKGVTFRSHIDGAPYEMSPERSIEIQGLLDSDIQMQLDECTALPAEMKEIERAMELSLRWAERCKTAFGDQPGKAMFGIVQGGDNAALRVRSAQALSAMGLKGYAVGGLAVGEPQAVMLEMLDITCPELPADKPRYLMGVGTPDDILKSVARGIDMFDCVMPTRAGRHGLAYTRRGKVNLRNARHADDPRPLDEESDCPAARDYSRAYLHHLVRSQEALGAMLLTWNNLSYYQKLMQDIRAAIETGSFEARGAEISEGWARGDIPVL

SEQ ID NO: 57487 - protein, 379 aa, unidentified
  source 1..379: note = Mesorhizobium kowhaii
  REGION 1..379: note = tr|A0A2W7CHZ3|A0A2W7CHZ3_9RHIZ Queuine tRNA-ribosyltransferase OS=Mesorhizobium kowhaii; OX = 1300272 GN=tgt PE=3 SV=1
MAKPFSFKVLATDGKARRGVIDMPRGEIRTPAFMPVGTGGTVKTMYMDQVRGVGADIILGNTYHLMLRPGAERVARLGGLHEFARWPHPILTDSGGFQVMSLSKLRKLTEKGVTFRSHIDGAAYEMSPERSIEIQGLLDSDIQMQLDECTALPAAMKEIERAMELSLRWAERCKTAFGDQPGKAMFGIVQGGDNAALRVRSAQALSAMGLKGYAVGGLAVGEPQAVMLEMLDITCPELPANKPRYLMGVGTPDDILKSVARGIDMFDCVMPTRAGRHGLAYTRRGKVNLRNARHADDPRPLDEENDCPAARDYSRAYLHHLVRSQEALGAMLLTWNNLSYYQKLMQDIRAAIEANAFETRAAEISEGWARGDIPAAARS

SEQ ID NO: 57488 - protein, 376 aa, Mesorhizobium mediterraneum
  REGION 1..376: note = tr|A0A271KZU2|A0A271KZU2_9RHIZ Queuine tRNA-ribosyltransferase OS=Mesorhizobium mediterraneum; OX = 43617 GN=tgt PE=3 SV=1
MTKAFTFEVLATDGKARRGAITMPRGEIRTPAFMPVGTGGTVKTMYMDQVRGVGSDIILGNTYHLMLRPGAERVARLGGLHEFARWPHPILTDSGGFQVMSLSKLRKLTEKGVTFRSHIDGAAYEMSPERSIEIQGLLDSDIQMQLDECTALPAMEKEIERAMELSLRWAERCKAAFGDQQGKAMFGIVQGGDIPALRLRSSQALKAMDLKGYAIGGLAVGEPQAVMLEMLEITCPELPADRPRYLMGVGTPDDILKSVARGIDMFDCVMPTRAGRHGLAYTRRGKVNLRNARHADDPRPLDEESDCPAARDYSRAYLHHLVRSQEALGAMLLTWNNLSYYQKLMQDIRAAIEAGAFEARAVEISEGWARGDIPAR

SEQ ID NO: 57489 - protein, 376 aa, Mesorhizobium metallidurans
  REGION 1..376: note = tr|M5EQK8|M5EQK8_9RHIZ Queuine tRNA-ribosyltransferase OS=Mesorhizobium metallidurans STM 2683 OX=1297569 GN=tgt PE=3 SV=1
MSKAFTFKVSATDGRARRGTITMPRGEIRTPAFMPVGTGGTVKAMYMEQVRGVGADIILGNTYHLMLRPGAERVARLGGLHEFARWPHPILTDSGGFQVMSLSKLRKLTEKGVTFRSHIDGAAHEMSPERSIEIQGLLDSDIQMQLDECTALPAEEKEIERAMDLSLRWAERCKAAFGDQPGKAMFGIVQGGDVPALRLRSARALKAMDLKGYAIGGLAVGEPQAVMLEMLDITCLELPADRPRYLMGVGTPDDILRSVARGIDMFDCVMPTRAGRHGLAYTRRGKVNLRNARHADDPRPLDEESDCPAARDYSRAYLHHLVRSQEALGAMLLTWNNLSYYQKLMQDIRAAIEAGAFDARAAEISEGWARGDIPAI

SEQ ID NO: 57490 - protein, 376 aa, unidentified
  source 1..376: note = Mesorhizobium muleiense
  REGION 1..376: note = tr|A0A1G8TMI8|A0A1G8TMI8_9RHIZ Queuine tRNA-ribosyltransferase OS=Mesorhizobium muleiense; OX = 1004279 GN=tgt PE=3 SV=1
MTKAFTFKVLATDGKARRGSITMPRGEIRTPAFMPVGTGGTVKTMYMDQVRGVGSDIILGNTYHLMLRPGAERVARLGGLHEFARWPHPILTDSGGFQVMSLSKLRKLTEKGVTFRSHIDGAAYEMSPERSIEIQGLLGADIQMQLDECTALPAMEKEIERAMELSLRWAERCRTAFGDQQGKAMFGIVQGGDIPALRLRSAQALKAMDLKGYAIGGLAVGEPQAVMLEMLDITCPELPADRPRYLMGVGTPDDILKSVARGIDMFDCVMPTRAGRHGLAYTRRGKVNLRNARHADDPRPLDEESDCPAARDYSRAYLHHLVRSQEALGAMLLTWNNLSYYQKLMQDIRAAIEAGTFEARAAEISEGWARGDIPAM

SEQ ID NO: 57491 - protein, 376 aa, unidentified
  source 1..376: note = Mesorhizobium oceanicum
  REGION 1..376: note = tr|A0A1L3SS07|A0A1L3SS07_9RHIZ Queuine tRNA-ribosyltransferase OS=Mesorhizobium oceanicum; OX = 1670800 GN=tgt PE=3 SV=1
MSDQFTFRLLATDGDARRGEISMPRGTIRTPAFMPVGTGGTVKAMYMDQVRELGADIILGNTYHLMLRPGAERMARLGGLHEFARWPWPILTDSGGFQVMSLAQLRKLTEKGVTFKSHIDGVAYEMTPERSIEIQGLLDSDIQMQLDECVALPAEPAEIERAMELSLRWAERCKTAFGDQPGKAMFGIVQGGDIAALRVRSAEALKAMDLKGYAVGGLAVGEPQSVMLEMLEATCPVLPAEKPRYLMGVGTPDDIVKSVMRGIDMFDCVMPTRAGRHGLAYTRHGKINLKNARHAEDPRPLDEESACPAARDYSRAYLHHLVKSGENLAGMLLTWNNLSYYQDLMQGIRDAIEAGRMADFATETAEQWARGDLPPV

SEQ ID NO: 57492 - protein, 376 aa, Mesorhizobium opportunistum
  REGION 1..376: note = tr|F7Y777|F7Y777_MESOW Queuine tRNA-ribosyltransferase OS=Mesorhizobium opportunistum (strain LMG 24607 / HAMBI 3007 / WSM2075) OX=536019 GN=tgt; PE = 3 SV=1
MARPFSFKVLATDGKARRGVIDMPRGEIRTPAFMPVGTGGTVKAMYMDQVRGVGADIILGNTYHLMLRPGAERVARLGGLHEFARWPQPILTDSGGFQVMSLSKLRKLTEKGVTFRSHIDGAAYEMSPERSIEIQGLLDSDIQMQLDECTALPAEIKEIERAMELSLRWAERCKTAFGDQPGKAMFGIVQGGDNAALRVRSAQALSAMNLKGYAVGGLAVGEPQAVMLEMLDITCPELPDDKPRYLMGVGTPDDILKSVARGVDMFDCVMPTRAGRHGLAYTRRGKVNLRNARHADDPRPLDEESDCPAARDYSRAYLHHLVRSQEALGAMLLTWNNLSYYQKLMQDIRAAIETGAFDARGVEITEGWARGDIPVL

SEQ ID NO: 57493 - protein, 376 aa, Mesorhizobium plurifarium
  REGION 1..376: note = tr|A0A2T3EM05|A0A2T3EM05_MESPL Queuine tRNA-ribosyltransferase OS=Mesorhizobium plurifarium; OX = 69974 GN=tgt PE=3 SV=1
MTQAFQFKLLANDGNARRGEVVTPRGTIRTPAFMPVGTVGTVKAMYLDQVRDLGADIILGNTYHLMLRPGAERVARLGGLHKFIGWEHPILTDSGGFQVMSLSSLRRINEQGVTFKSHVDGALYHMSPERSIEIQGLLGSDIQMQLDECVALPAEPDEIERAMEMSLRWAERCRIAFGDQPGKAMFGIVQGGDIPRLRERSALALKDLDLKGYAVGGLAVGEPQEVMLDMLDVTCPVLPTDKPRYLMGVGTPDDILKSVAHGIDMFDCVMPTRSGRHGLAFTRYGRINLRNARHAEDIRPLDEQSSCPATRDYSRAYLHHLIRSNESLGGMLLSWNNLAYYQDLMAGIRKAIEEGRYADFMAETIEGWRRGDLPPV

SEQ ID NO: 57494 - protein, 376 aa, Mesorhizobium plurifarium
  REGION 1..376: note = tr|A0A090DL17|A0A090DL17_MESPL Queuine tRNA-ribosyltransferase OS=Mesorhizobium plurifarium; OX = 69974 GN=tgt PE=3 SV=1
MAETFSFKVLATDGKARRGLVSMPRGEIRTPAFMPVGTGGTVKAMYMDQVRGIGADIILGNTYHLMLRPGAERVARLGGLHEFARWPYPILTDSGGFQVMSLSKLRKLTEQGVTFRSHIDGAPYEMSPERSIEIQGLLDSDIQMQLDECTALPAKPKEIERAMELSLRWAERCKAAFGDQPGKAMFGIVQGGDSAAMRLRSAQALKAMDLKGYAVGGLAVGEPQSVMLEMLDITCPELPADRPRYLMGVGTPDDILKSVARGIDMFDCVMPTRAGRHGLAYTRRGKVNLRNARHADDPRPLDEESDCPAARDYSRAYLHHLVRSQEALGAMLLTWNNLSYYQKLMQDIRAAIEAGAFEERAAGITEGWARGDIPAR

SEQ ID NO: 57495 - protein, 376 aa, unidentified
  source 1..376: note = Mesorhizobium prunaredense
  REGION 1..376: note = tr|A0A1R3VJB9|A0A1R3VJB9_9RHIZ Queuine tRNA-ribosyltransferase OS=Mesorhizobium prunaredense; OX = 1631249 GN=tgt PE=3 SV=1
MTKAFTFKVLATDGKARRGSITMPRGEIRTPAFMPVGTGGTVKTMYMDQVRGVGSDIILGNTYHLMLRPGAERVARLGGLHEFARWPHPILTDSGGFQVMSLSKLRKLTEKGVTFRSHIDGAAYEMSPERSIEIQGLLGADIQMQLDECTALPAMEKEIERAMELSLRWAERCRTAFGDQQGKAMFGIVQGGDIAALRLRSAQALKAMDLKGYAIGGLAVGEPQPVMLEMLDITCPELPADRPRYLMGVGTPDDILKSVARGIDMFDCVMPTRAGRHGLAYTRRGKVNLRNARHADDPRPLDEESDCPAARDYSRAYLHHLVRSQEALGAMLLTWNNLSYYQKLMQDIRAAIEAGAFEARAAEISERWARGDIPGM

SEQ ID NO: 57496 - protein, 376 aa, unidentified
  source 1..376: note = Mesorhizobium qingshengii
  REGION 1..376: note = tr|A0A1G5V492|A0A1G5V492_9RHIZ Queuine tRNA-ribosyltransferase OS=Mesorhizobium qingshengii; OX = 1165689 GN=tgt PE=3 SV=1
MAKPFTFKVLATDGKARRGVIDMPRGEIRTPAFMPVGTGGTVKTMYMDQVRDLGADIILGNTYHLMLRPGAERVARLGGLHEFARWPHPILTDSGGFQVMSLSKLRKLTEKGVTFRSHIDGAAYEMSPERSIEIQGLLDSDIQMQLDECTALPAEMKEIERAMELSLRWAERCKTAFGDQPGKAMFGIVQGGDNAALRVRSAQALSAMELKGYAVGGLAVGEPQAVMLEMLDITCPELPADKPRYLMGVGTPDDILKSVARGIDMFDCVMPTRAGRHGLAYTRRGKVNLRNARHADDPRPLDEQSDCPAARDYSRAYLHHLVRSQEALGAMLLTWNNLSYYQKLMQDIRAAIEAGSFETRAAEISEGWARGDIPAM

SEQ ID NO: 57497 - protein, 376 aa, unidentified
  source 1..376: note = Mesorhizobium sanjuanii
  REGION 1..376: note = tr|A0A2A6FGR5|A0A2A6FGR5_9RHIZ Queuine tRNA-ribosyltransferase OS=Mesorhizobium sanjuanii; OX = 2037900 GN=tgt PE=3 SV=1
MTREFTFKVLATNGRARRGAITMPRGEIRTPAFMPVGTGGTVKAMYMDQVRGVGSDIILGNTYHLMLRPGAERVARLGGLHEFARWPHPILTDSGGFQVMSLSKLRKLTEKGVTFRSHIDGAAYEMSPERSIEIQGLLDSDIQMQLDECTALPAEKKEIERAMELSLRWAERCKSAFGDQPGKAMFGIVQGGDVPDLRLRSAQALKAMDLKGYAVGGLAVGEPQAVMLDMLDITCPELPADRPRYLMGVGTPDDILKSVARGIDMFDCVMPTRAGRHGLAYTRRGKVNLRNARHADDPRPLDEDSDCPAARDYSRAYLHHLVRSQEALGAMLLTWNNLSYYQKLMQDIRAAIEARAFDARAAEISEGWARGDIPAM

SEQ ID NO: 57498 - protein, 376 aa, unidentified
  source 1..376: note = Mesorhizobium soli
  REGION 1..376: note = tr|A0A2P7SBK1|A0A2P7SBK1_9RHIZ Queuine tRNA-ribosyltransferase OS=Mesorhizobium soli OX=1295366; GN = tgt PE=3 SV=1
MSTEFTFKVLATDGKARRGEITMPRGTIRTPAFMPVGTGGTVKTMYMDQVRDLGADIILGNTYHLMLRPGAERVAKLGGLHEFARWPHPILTDSGGFQVMSLSKLRKINEQGVTFRSHIDGAPYEMSPERSIEIQGLLDSDIQMQLDECTALPAKEPEIERAMELSLRWAERCKTAFGDQPGKAMFGIVQGGDNPRLRERSAQSLSGLGLKGYAVGGLAVGEPQEVMLDMLDITCPELPTDKPRYLMGVGTPDDIVKSVARGIDMFDCVMPTRAGRHGLAYTRRGKVNLRNARHADDHRPLDDESDCPAARDYSRAYLHHLVRSQEALGAMLLTWNNLSYYQSLMQGLRNAIEQGRFAEHVAEISEGWARGDISAL

SEQ ID NO: 57499 - protein, 376 aa, Mesorhizobium sp.
  REGION 1..376: note = tr|A0A503AK52|A0A503AK52_9RHIZ Queuine tRNA-ribosyltransferase OS=Mesorhizobium sp. B2-7-1; OX = 2589909 GN=tgt PE=3 SV=1
MAEIFSFEVLATDGKARRGLVSMPRGEIRTPAFMPVGTGGTVKAMYMDQVRGVGADIILGNTYHLMLRPGAERVARLGGLHEFARWPYPILTDSGGFQVMSLSKLRKLTEQGVTFRSHIDGAPYEMSPERSIEIQGLLDSDIQMQLDECTALPAKPKEIERAMELSLRWAERCKTAFGDQPGKAMFGIVQGGDSAGLRVRSAQALKAMDLKGYAVGGLAVGEPQPVMLEMLDITCPELPADKPRYLMGVGTPDDILKSVARGIDMFDCVMPTRAGRHGLAYTRRGKVNLRNARHADDPRPLDEESDCPAARDYSRAYLHHLVRSQEALGAMLLTWNNLSYYQRLMQDVRAAIEAQAFEARAAEITEGWARGDIPAL

SEQ ID NO: 57500 - protein, 376 aa, Mesorhizobium sp.; identical to SEQ ID NO: 57477
  REGION 1..376: note = tr|A0A3S1T2P4|A0A3S1T2P4_9RHIZ Queuine tRNA-ribosyltransferase OS=Mesorhizobium sp. M7A.F.Ca.CA.001.05.1.1 OX=2496721 GN=tgt PE=3 SV=1

SEQ ID NO: 57501 - protein, 376 aa, unidentified
  source 1..376: note = Mesorhizobium tamadayense
  REGION 1..376: note = tr|A0A3P3FYN8|A0A3P3FYN8_9RHIZ Queuine tRNA-ribosyltransferase OS=Mesorhizobium tamadayense; OX = 425306 GN=tgt PE=3 SV=1
MAETFSFKLLATDGKARRGLIRMPRGEIRTPAFMPVGTGGTVKTMYMDQVRGVGADIILGNTYHLMLRPGAERVARLGGLHEFARWPHPILTDSGGFQVMSLSKLRKLTEKGVTFRSHIDGAAYEMSPERSIEIQGLLDSDIQMQLDECTALPAKPTEIERAMELSLRWAERCKTAFGDQPGKAMFGIVQGGDSAVMRVRSAQALKAMELKGYAIGGLAVGEPQAVMLEMLDITCPELPADRPRYLMGVGTPDDILKSVARGIDMFDCVMPTRAGRHGLAYTRRGKINLRNARHADDPRPLDEESDCPAARDYSRAYLHHLVRSQESLGAMLLTWNNLSCYQKLMQDIRAAIEAQTFEARAAEMSEGWARGDIPAL

SEQ ID NO: 57502 - protein, 376 aa, Mesorhizobium temperatum
  REGION 1..376: note = tr|A0A271LND8|A0A271LND8_9RHIZ Queuine tRNA-ribosyltransferase OS=Mesorhizobium temperatum; OX = 241416 GN=tgt PE=3 SV=1
MTKAFIFEVLATDGKARRGSITMPRGEIRTPAFMPVGTGGTVKTMYMDQVRGVGSDIILGNTYHLMLRPGAERVARLGGLHEFARWPYPILTDSGGFQVMSLSKLRKLTEKGVTFRSHIDGAAYEMSPERSIEIQGLLDSDIQMQLDECTALPAMEKEIERAMELSLRWAERCKTAFGDQQGKAMFGIVQGGDIPALRLRSAQALKAMDLKGYAIGGLAVGEPQAVMLEMLDITCPELPADRPRYLMGVGTPGDILKSVARGIDMFDCVMPTRAGRHGLAYTRRGKVNLRNARHADDPRPLDEESDCPATRDYSRAYLHHLVRSQEALGAMLLTWNNLSYYQKLMQDVRAAIEAGAFDVRVAEISEGWARGDIPVM

SEQ ID NO: 57503 - protein, 376 aa, Mesorhizobium tianshanense
  REGION 1..376: note = tr|A0A562PE05|A0A562PE05_9RHIZ Queuine tRNA-ribosyltransferase OS=Mesorhizobium tianshanense; OX = 39844 GN=tgt PE=3 SV=1
MSKAFTFEVLATNGRARRGAITMPRGEIRTPAFMPVGTGGTVKTMYMDQVRGVGSDIILGNTYHLMLRPGAERVARLGGLHEFARWPHPILTDSGGFQVMSLSKLRKLTENGVTFRSHIDGAAYEMSPERSIEIQGLLDSDIQMQLDECTALPAMEKEIERAMELSLRWAERCKTAFGDQQGKAMFGIVQGGDIPALRLRSAQALKAMDLKGYAIGGLAVGEPQAVMLEMLDITCPELPADRPRYLMGVGTPDDILKSVARGIDMFDCVMPTRAGRHGLAYTRRGKVNLRNARHADDPRPLDEESDCPAARDYSRAYLHHLVRSQEALGAMLLTWNNLSYYQKLMQDIRAAIEAGAFEARAAEISEGWVRGDIPAM

SEQ ID NO: 57504 - protein, 376 aa, unidentified
  source 1..376: note = Mesorhizobium waimense
  REGION 1..376: note = tr|A0A3A5KK50|A0A3A5KK50_9RHIZ Queuine tRNA-ribosyltransferase OS=Mesorhizobium waimense; OX = 1300307 GN=tgt PE=3 SV=1
MADAFSFKVLATDGKARRGVIDMPRGEIRTPAFMPVGTGGTVKTMYMDQVRNLGADIILGNTYHLMLRPGAERVARLGGLHEFARWQHPILTDSGGFQVMSLSKLRKLTEKGVTFRSHIDGAAYEMSPERSIEIQGLLDSDIQMQLDECTALPAKEKEIERAMELSLRWAERCKTAFGDQPGRAMFGIVQGGDVPSFRVRSAQALKAMDLKGYAVGGLAVGEPQAVMLDMLDITCAELPEDKPRYLMGVGTPDDILKSVARGIDMFDCVMPTRAGRHGLAYTRRGKVNLRNARHADDPRPLDEESDCPAARDYSRAYLHHLVRSQEALGAMLLTWNNLSYYQRLMQDIRAAIGAQAFDARAAEISEGWARGDIPAN

SEQ ID NO: 57505 - protein, 376 aa, unidentified
  source 1..376: note = Mesorhizobium wenxiniae
  REGION 1..376: note = tr|A0A271KC09|A0A271KC09_9RHIZ Queuine tRNA-ribosyltransferase OS=Mesorhizobium wenxiniae; OX = 2014805 GN=tgt PE=3 SV=1
MTKAFTFEVLATDGKARRGSITMPRGEIRTPAFMPVGTGGTVKTMYMDQVRGVGSDIILGNTYHLMLRPGAERVARLGGLHEFARWPHPILTDSGGFQVMSLSKLRKLTEKGVTFRSHIDGAPYEMSPERSIEIQGLLDSEIQMQLDECTALPAMEKEIERAMELSLRWAERCKTAFGDQPGKAMFGIVQGGDIPALRLRSAQALKAMDLKGYAIGGLAVGEPQAVMLEMLDITCPELPADRPRYLMGVGTPDDILKSVARGIDMFDCVMPTRAGRHGLAYTRRGKVNLRNARHADDPRPLDEESDCPAARDYSRAYLHHLVRSQEALGAMLLTWNNLSYYQRLMQDIRVAIEAGAFEARAAAISEGWARGDIAVM

SEQ ID NO: 57506 - protein, 377 aa, unidentified
  source 1..377: note = Mesosutterella multiformis
  REGION 1..377: note = tr|A0A388S9U1|A0A388S9U1_9BURK Queuine tRNA-ribosyltransferase OS=Mesosutterella multiformis; OX = 2259133 GN=tgt PE=3 SV=1
MALSFKVLKTSGKARRGELHLNHGVVQTPIFMPVGTCGTVKSMTPEELKDNGAQIILGNTFHLWLRPGLEVVGLHKGLHDFMHWDRPILTDSGGFQVFSLRGIRKITEEGVKFASPIDGRRLFLSPEESMRIQTVLNSDIVMQLDECTPYEIDGKPATEKQAADSMRMSLRWAKRCKDEFNRLGNPNALFGIVQGGMYKHLREESLHGLVDIGFDGYAVGGLSVGEPKAEMNRIEEEIVSQLPDDKPRYLMGVGTPEDLVEGVSQGIDMFDCVMPTRNARNGWLFTRYGDVKIKNAKYIKDLAPLDESCDCYTCRNYDRSYLHHLHKVGEILGARLNTIHNIHFYLTLMAEMRDALEKGTFEEWKEQFYRDRARGVG

SEQ ID NO: 57507 - protein, 381 aa, unidentified
  source 1..381: note = Mesotoga infera
  REGION 1..381: note = tr|A0A101GYT7|A0A101GYT7_9BACT Queuine tRNA-ribosyltransferase OS=Mesotoga infera OX=1236046; GN = tgt PE=3 SV=1
MVELKIRAKSTETKARTAVLATAHGEFETPVFMPVGTNGTVKGIWQDQLYEMDSKIILGNAFHLFLRPGLDTLRYFGGLHNFMSWDHSILTDSGGFQVFSLSDKKITEEGVKFRSPLDGRSLFVTPELSIEIQEAIGSDIAMAFDECVEPNADKEYVRNSVRRTTNWAKRFLLAHKKDSNQSLFGIVQGGFFNDLREESASEITAMDFEGFALGGLSVGEDFETTEKVLSASVGLLPEDRPRYLMGVGSPELILAAVESGVDMFDCVLPTRLGRHGAALTSGGRINLKSARNKHDKSPVDPNCTCKVCSTYSRAYIHHLFTRDEILGKILLSYHNVSFLMDFVKKIREAILEDRLCEFKEHCAETGLIQVGNLKTSEERLG

SEQ ID NO: 57508 - protein, 381 aa, unidentified
  source 1..381: note = Mesotoga prima
  REGION 1..381: note = tr|I2F2Y7|I2F2Y7_9BACT Queuine tRNA-ribosyltransferase OS=Mesotoga prima MesG1.Ag.4.2; OX = 660470 GN=tgt PE=3 SV=1
MVELKLKAKSTESKARTGVIVTPHGEFETPVFMPVGTNGTVKGLWQDQLEELDARIILGNAFHLFLRPGLNVLRNFGGLHKFMSWKHSILTDSGGFQVFSLKEKKITDDGVKFRSPLDGRALFFTPELSSEIQEAIGSDIAMAFDECVEPSANKDYVRQSVKRTTVWAERFLLSHKGQSMQSLFGIVQGGFFGDLREESAARITSLDFEGFALGGLSVGEDFQTTERILSGSVNLLPEERPRYLMGIGSPELIMAAVENGIDMFDCVLPTRLGRHGAALTSNGRINLKSSTNKEDKRPVDPDCSCKVCSTYSRAYIHHLFIRDEILGKILLSYHNISFLMQFVKRIRQAILDDRLAEFKEHCIETGLIQTENLKTSEERMG

SEQ ID NO: 57509 - protein, 381 aa, unidentified
  source 1..381: note = Mesotoga prima
  REGION 1..381: note = tr|A0A101HRY5|A0A101HRY5_9BACT Queuine tRNA-ribosyltransferase OS=Mesotoga prima OX=1184387; GN = tgt PE=3 SV=1
MVELSIRASSTESKARTGIISTPHGEFDTPVFMPVGTNGTVKGIWQDQLHELEARIILGNAFHLFLRPGLDILRDFGGLHKFMSWGHSILTDSGGFQVFSLKDKKVSDEGVKFRSPLDGRSLFVTPELSMEIQEAVGSDIAMAFDECTEPSATKEYVRNSVNRTTAWAKRFLIAHRRNSKQSFFGVVQGGFFNDLREESASQITAMDFDGFALGGLSVGEDFETTERVLSSSVEFLPEDRPRYLMGVGTPELIMVAVENGVDMFDSVLPTRLGRHGAALTSRGRVNLKSARNKLDRSPVDPFCQCKVCSTYSKAYIHHLFTRDEILGKTLLSYHNISFLMQFVKKIREAILEDRLAEFKNYCLETGLIQAVNPKTSEERMG

SEQ ID NO: 57510 - protein, 378 aa, unidentified
  source 1..378: note = Mesotoga sp.
  REGION 1..378: note = tr|A0A351H916|A0A351H916_9BACT Queuine tRNA-ribosyltransferase OS=Mesotoga sp. OX=2053577 GN=tgt; PE = 3 SV=1
MSIRASSTESKARTGIISTPHGEFDTPVFMPVGTNGTVKGIWQDQLQELEARIILGNAFHLFLRPGLDILRDFGGLHKFMSWGHSILTDSGGFQVFSLKDKMVSDEGVKFRSPLDGRSLFVTPELSMEIQEAVGSDIAMAFDECTEPSATKEYIRNSVNRTTAWAKRFLIAHRRNSKQSFFGVVQGGFFNDLREESASQITAMDFDGFALGGLSVGEDFETTERVLSSSVELLPEDRPRYLMGVGTPELIMVAVENGVDMFDSVLPTRLGRHGAALTSRGRVNLKSARNKLDRSPVDPFCQCKVCSTYSKAYIHHLFTRDEILGKTLLSYHNISFLMQFVKKIREAILEDRLAEFKNYCLETGLIQAVNPKTSEERMG

SEQ ID NO: 57511 - protein, 381 aa, unidentified; identical to SEQ ID NO: 57509
  source 1..381: note = Mesotoga sp.
  REGION 1..381: note = tr|A0A2T7N3P6|A0A2T7N3P6_9BACT Queuine tRNA-ribosyltransferase OS=Mesotoga sp. Brook.08.105.5.1; OX = 1421002 GN=tgt PE=3 SV=1

SEQ ID NO: 57512 - protein, 375 aa, unidentified; identical to SEQ ID NO: 56374
  source 1..375: note = Metakosakonia sp.
  REGION 1..375: note = tr|A0A348DIR7|A0A348DIR7_9ENTR Queuine tRNA-ribosyltransferase OS=Metakosakonia sp. MRY16-398; OX = 2487150 GN=tgt PE=3 SV=1

SEQ ID NO: 57513 - protein, 374 aa, unidentified
  source 1..374: note = Metallibacterium scheffleri
  REGION 1..374: note = tr|A0A4S3KSR8|A0A4S3KSR8_9GAMM Queuine tRNA-ribosyltransferase OS=Metallibacterium scheffleri; OX = 993689 GN=tgt PE=3 SV=1
MQFSLLATDGAARRGRVQFARGAVETPAFMPVGTYGTVKAMTPADLHGVGAQMVLGNTFHLWLRPGMEVIERCGGLHGFMRWNGPILTDSGGFQVFSLAHRRKISEDGVRFASPVDGRAVFLSPEESMRIQRVLDSDVAMIFDECTPYPASARAAQDSMELSLRWAARSRRAFDDLRNPNALFGIVQGGVYPELRQRSAAGLREIGFDGYAVGGLAVGEPEAERERTLDETLPLLPADRPRYLMGVGRPEDIVAAVRRGVDLFDCVMPTRNARNGFLFTAQGTLRIRNARYATDTRPIEEGCDCAACAGGFSRAYLRHLDRCNEILGSILATQHNLRYYQRLMAGLRDAIAATRLDDFCAAFAAARQVAGAGCG

SEQ ID NO: 57514 - protein, 382 aa, unidentified
  source 1..382: note = Methylacidimicrobium cyclopophantes
  REGION 1..382: note = tr|A0A5E6ME42|A0A5E6ME42_9BACT Queuine tRNA-ribosyltransferase OS=Methylacidimicrobium cyclopophantes OX=1041766 GN=tgt PE=3 SV=1
MKFRLLASATESRARIGELSTGHGLVQTPAFLPVGTRGTVKGVFPRDLLDLGASMILCNTYHLLLRPGIDLLRSLGGLHRFLGWPGAILTDSGGYQVFSLSSLRSIDDRGVAFRSHLDGKLLFLSPELAVEFQSIAGSDLAMSLDECPPWPASSSELDQAVRRTVLWAARGKETWRRLRESCSGLPTPEAGLFAIVQGGGSAKLRGLCAEELGAIGFDGFAIGGVSVGEPVEEGLRAVAETVVHLDPGRPRYVMGVGEPWQIVEMVNLGVDLFDCVLPTRLARHGVAYTERGRLSLRNASFRLDTEPLSAECGCYTCRHFHRAYLRHLLKSEEILGVMLLTLHNLYFYLCLMRGIRRALETGRWDPFLAEQRRRRKEYKEGS

SEQ ID NO: 57515 - protein, 381 aa, unidentified
  source 1..381: note = Methylacidimicrobium tartarophylax
  REGION 1..381: note = tr|A0A5E6MJT2|A0A5E6MJT2_9BACT Queuine tRNA-ribosyltransferase OS=Methylacidimicrobium tartarophylax OX=1041768 GN=tgt PE=3 SV=1
MKFRVIGSAADQARVGELNTGHGLVRTPAFMPVGTRGTVKGVFPRDLLDLGAQVILCNTYHLLLRPGIDLLRDLGGLHRFLGWPGAILTDSGGYQVFSLSSLRRVDDHGVVFRSHLDGSPLFLSPELAVEFQLIAGSDLIMSLDECPPWPASPSELDQAVRRTVLWAARGKEAWERLQDSHASFPTPEAGLFGIVQGGGDARLRALCAEELGAIGFDGFAIGGVSVGEPPEEGLRAVAETVVHLDPARPRYVMGVGEPWQMVEMVNLGVDLFDCVLPTRLARHGVAYTGMGRISLRNSSFRLDPAPISSECGCYTCRNFSRAYLRHLLKSEEILGLMLLTLHNLYFYLCLMKEMRTALERGCWEAFLAEKRKRREEFEEGG

SEQ ID NO: 57516 - protein, 380 aa, unidentified
  source 1..380: note = Methylacidiphilum fumariolicum
  REGION 1..380: note = tr|I0JZ35|I0JZ35_METFB Queuine tRNA-ribosyltransferase OS=Methylacidiphilum fumariolicum (strain SolV) OX=1156937 GN=tgt PE=3 SV=1
MVMKFEVIKKVEGSKARLGRLFTPHGEVSTPCFMPVGTAATVRAVFPKDLEKDGVQMVLANVYHLILRPGIQIIKEAGGLHKFMGWEGAILTDSGGFQVFSLSSFCKILPEGVRFKSPIDGSSLLLTPESVIDAQMELGADIVMSLDHCPPWPSKEKDLVEATRRTIGWAKMGKERWEKHWGTKMVERSTNPMLFGIVQGGTKKELRQDCFEELLKIGFDGFAIGGLSVGEPQEESLKTIEALSPFMDSSYPKYVMGMGHPWQIIQMVDLGIDLFDCVLPTRLARHGSAYVEEGILHLKNARFKKDGLPIEEKCSCYACRKFSRAYIHHLLKSQEILGIMLLSMHNLSFYNRLMKEMRLSIGNGQWIDMLTRWKNKKITK

SEQ ID NO: 57517 - protein, 380 aa, unidentified; identical to SEQ ID NO: 57516
  source 1..380: note = Methylacidiphilum fumariolicum
  REGION 1..380: note = tr|A0A5F0I048|A0A5F0I048_9BACT Queuine tRNA-ribosyltransferase OS=Methylacidiphilum fumariolicum; OX = 591154 GN=tgt PE=3 SV=1

SEQ ID NO: 57518 - protein, 378 aa, unidentified
  source 1..378: note = Methylacidiphilum infernorum
  REGION 1..378: note = sp|B3DYE4|TGT_METI4 Queuine tRNA-ribosyltransferase; OS = Methylacidiphilum infernorum (isolate V4) OX=481448; GN = tgt PE=3 SV=1
MKFEVIQKSGGSRARLGRLLTPHGVVETPCFMPVGTSATVKAIFPKDLEEEGIKLILANAYHLLFRPGISVIKEFGGLHQFMGWNGAILTDSGGFQVFSLSPFCKIFPEGVRFKSPVDGSFLMLTPESAIHAQMELGSDIVMSLDHCPPWPSKEKDLLEATRRTIQWAKRGKETWMQQQEKLFSKPSASYSLFGIIQGGTDERLRLYCSEELMKIGFDGYAIGGLSVGEPHEESLAVVKTVSSFLDEKAPKYVMGMGQPWQIVQMVDLGIDLFDCVLPTRLARHGSAYVEEGIIHIKNARFRKDGSPLDSRCSCYACRKFSRGYIHHLLKSKEILGIMLLSMHNLLFYNRLMKEIRSFLAHGQWVDFLARWKDKKVTK

SEQ ID NO: 57519 - protein, 378 aa, unidentified
  source 1..378: note = Methylacidiphilum kamchatkense
  REGION 1..378: note = tr|A0A516TK41|A0A516TK41_9BACT Queuine tRNA-ribosyltransferase OS=Methylacidiphilum kamchatkense Kam1 OX=1202785 GN=tgt PE=3 SV=1
MKFKVIKEVEGSKARLGRLFTPHGEVDTPCFMPVGTAATVRAVFPKDLEKDGVQMVLANVYHLILRPGIQIIKEAGGLHKFMGWTGAILTDSGGFQVFSLSSFCKILPEGVRFKSPIDGSSLLLTPESVIDAQIELGADIVMSLDHCPPWPSKEKDLVEATRRTICWAKMGKERWEKHWGTEMVEGATNPLLFGIVQGGTKKELRQFCFEQLLKIGFDGFAIGGLSVGEPLEESLKTIEALTPFMDSSYPKYVMGMGHPWQIIQMVDLGIDLFDCVLPTRLARHGSAYVEEGILHLKNARFKTDGLPIDEKCSCYACRKFSRAYIHHLLKSQEILGIMLLSMHNLSFYNRLMKEMRLSIGNGQWIDFLTRWRNKKITK

SEQ ID NO: 57520 - protein, 379 aa, unidentified
  source 1..379: note = Methylacidiphilum sp.
  REGION 1..379: note = tr|A0A4Y8PA65|A0A4Y8PA65_9BACT Queuine tRNA-ribosyltransferase OS=Methylacidiphilum sp. Phi; OX = 1847729 GN=tgt PE=3 SV=1
MNFEIIQKSEGSRARLGRLLTPHGVVETPCFMPVGTAATVKAIFPKDLEEEGIKLVLANLYHLLLRPGISLIRDFGGLHQFMGWNGPILTDSGGFQVFSLSSFCKIFPEGVRFKSPINGSMLLLTPENAITTQLDLGSDIVMSLDQCPPWPSKEKDLLEATRRTIQWAKRGKETWLRHQQKGASSRCSLFSLFGIIQGGTDTRLRIYCAEELLNIGFDGYAIGGLCVGEPIEESFATIAAVSSFLDEAVPKYVMGMGHPWQIVQMVDLGIDLFDCVLPTRLARHGSAYVEEEGIIHIKNARFKKDGSPLDHRCCCYACQKFSRAYIHHLLKSKEILGIMLLSMHNLLFYNRLMKEIRLFLSHGQWNDFLGRWRNKKITK

SEQ ID NO: 57521 - protein, 380 aa, unidentified
  source 1..380: note = Methylacidiphilum sp.
  REGION 1..380: note = tr|A0A4Y8PCU7|A0A4Y8PCU7_9BACT Queuine tRNA-ribosyltransferase OS=Methylacidiphilum sp. Yel; OX = 1847730 GN=tgt PE=3 SV=1
MVMKFEVIKEVAGSKARLGRLFTPHGEVATPCFMPVGTAATVRAVFPKDLEKDGVQMVLANVYHLSLRPGIQIIKEAGGLHKFMGWEGAILTDSGGFQLFSLSSFCKILPEGVRFKSPIDGSSLLLTPESVIDAQIELGADIVMSLDHCPPWSSKEKDLVEATRRTICWAKMGKERWEKHWGTEMVERSTNPLLFGIVQGGTKKELRQYCFEELLKIGFDGFAIGGLSVGEPQEESLKTIEALSPFMDSSYPKYVMGMGHPWQIIQMVDLGIDLFDCVLPTRLARHGSAYVEEGILHLKNASFKKDGLPIEEKCSCYACRKFSRAYIHHLLKSQEILGIMLLSMHNLSFYNRLMKEMRLSIGNGQWMDLLTRWRNKKITK

SEQ ID NO: 57522 - protein, 376 aa, Methylarcula marina
  REGION 1..376: note = tr|A0A3R7LH28|A0A3R7LH28_9RHOB Queuine tRNA-ribosyltransferase OS=Methylarcula marina OX=72022; GN = tgt PE=3 SV=1
MSDRFSFTLNARDGHARSGIIHTPRGEIRTPAFMPVGTAATVKAMLPESVRETGADILLGNTYHLMLRPGAERVARLGGLHDFMNWQRPILTDSGGFQVMSLGPLRKLTEEGVTFASHIDGSRHVLTPERSMEIQNLLGSDIVMAFDECPALPATPEDVARSMRLSMRWAQRSRDAFGDRPGHALFGIMQGGVTRELREESAQALTGIGFDGYAIGGLAVGEGQEAMFGVLDYAPGLLPKDKPRYLMGVGKPDDIVGAVQRGVDMMDCVLPSRSGRTGQAWTRRGQINIKNARHQDDPRPLDENCSCPACRSYSRAYLHHVFRAGEMISGMLLTWHNLHYYQELMAGLRDAIAEGRLDDFVAGFHAMRAGGDIPPL

SEQ ID NO: 57523 - protein, 375 aa, Methylibium petroleiphilum
  REGION 1..375: note = sp|A2SM97|TGT_METPP Queuine tRNA-ribosyltransferase; OS = Methylibium petroleiphilum (strain ATCC BAA-1232 / LMG 22953 / PM1) OX=420662 GN=tgt PE=3 SV=1
MLRFDLLHTEGHARRGRLTLNHGVVETPIFMPVGTYGTVKGVMPASLEAMGAQIILGNTFHLWLRPGLDVLRQFGGLHRFENWQRPILTDSGGFQVWSLGAMRKISEEGVKFASPVNGDKLFLTPETSMQIQTVLNSDIVMQFDECTPYETSGHLTTEQEARASMELSLRWAARCKTEFARLENPNALFGIVQGGMFEPLRQASLDALVAMDFPGYAIGGVSVGEPKDEMLRIMAHTPHRLPAHKPRYLMGVGTPEDLVEGVTQGVDLFDCVMPTRNARNGHLFTRHGDLRLRNARYKTDERPIDESCTCTACNGFSRAYLHHLDRCGEMLGPMLTSIHNLHYFLNLMREVREALDAGRFEAFRAQFRADRARGV

SEQ ID NO: 57524 - protein, 375 aa, Methylibium sp.
  REGION 1..375: note = tr|A0A0Q7DDE7|A0A0Q7DDE7_9BURK Queuine tRNA-ribosyltransferase OS=Methylibium sp. Root1272; OX = 1736441 GN=tgt PE=3 SV=1
MLRFDLLHTEGHARRGRLTLNHGVVETPIFMPVGTYGTVKGVMPASLEAMGAQIILGNTFHLWLRPGLDVLRQFGGLHRFEHWPKPILTDSGGFQVWSLGAMRKISEEGVKFASPVNGDKLFLTPETSMQIQAVLNSDIVMQFDECTPYETAGHLTTEQEARASMELSLRWAARCKTEFARLENPNALFGIVQGGMFEPLRQESLDALVAMDFPGYAVGGVSVGEPKDEMLRIMAHTPHRLPAHKPRYLMGVGTPEDLVEGVAQGVDMFDCVMPTRNARNGHLFTRHGDLRLRNARYKTDERPIDESCACTACAGFSRAYLHHLDRCGEMLGPMLTSIHNLHYYVNLMREVREALDAGRFEAFRAQFRADRARGV

SEQ ID NO: 57525 - protein, 375 aa, Methylibium sp.; identical to SEQ ID NO: 57523
  REGION 1..375: note = tr|W7WQG5|W7WQG5_9BURK Queuine tRNA-ribosyltransferase OS=Methylibium sp. T29-B; OX = 1437443 GN=tgt PE=3 SV=1

SEQ ID NO: 57526 - protein, 370 aa, Methylobacillus flagellatus
  REGION 1..370: note = sp|Q1H403|TGT_METFK Queuine tRNA-ribosyltransferase; OS = Methylobacillus flagellatus (strain KT / ATCC 51484 / DSM 6875) OX=265072 GN=tgt PE=3 SV=1
MEFTLIKQDGAARRGTVSLAHGDVQTPAFMPVGTYGAVKSLSPVEVRDTGAHILLGNTFHLWLRPGLEVIGEFGGLHRFMGWNGPILTDSGGFQVWSLGDLRKITEEGVRFRSPINGDSCFLTPEESMRIQKVLNSDIVMIFDECTPYPATPADARDSMLLSLRWAARSKAAHQGNPNALFGIIQGGMYEDLRDESLAGLTEIGFDGYAIGGLSVGEPKEDMLRILAHTTPKMPQDKPRYLMGVGTPEDLVAAVSHGVDMFDCVMPTRNARNGWLFTRHGDIKLKNARHRKDTRPLDEHCQCYTCLNFSRAYLHHLHRSGEILGARLNTIHNLHYYQELMLGMRQAIEQGRFEAFATEFRQGRQMLQQSA

SEQ ID NO: 57527 - protein, 370 aa, unidentified
  source 1..370: note = Methylobacillus rhizosphaerae
  REGION 1..370: note = tr|A0A238ZWZ9|A0A238ZWZ9_9PROT Queuine tRNA-ribosyltransferase OS=Methylobacillus rhizosphaerae; OX = 551994 GN=tgt PE=3 SV=1
MEFTLIKQDGAARRGTVSLAHGDMQTPAFMPVGTYGSVKSLSPVEVRDTGAHILLGNTFHLWLRPGLEVISEFGGLHQFMGWDGPILTDSGGFQVWSLGDLRKITEEGVRFRSPINGDSCFLTPEESMRIQKALNSDIVMIFDECTPYPATHVEARDSMQLSLRWAARSKAAHQGNPNALFGIIQGGMYEDLRDESLAGLTEIDFDGYAIGGLSVGEPKEDMLRILAHTAPQMPKNKPRYLMGVGTPEDLVAAVSHGVDMFDCVMPTRNARNGWLFTRNGDIKLKNARHRKDTRPLDEACSCYTCRNFSRAYLHHLHRTGEILGARLNTIHNLHYYQELMAGMRNAIEQGQFSAFVTQFRQDRLKLQQST

SEQ ID NO: 57528 - protein, 365 aa, Methylobacillus sp.
  REGION 1..365: note = tr|A0A1A9NLF2|A0A1A9NLF2_9PROT Queuine tRNA-ribosyltransferase OS=Methylobacillus sp. MM3; OX = 1848039 GN=tgt PE=3 SV=1
MLYSVTHTDGAARRGTLTLAHGVVQTPAFMPVGTYGTVKTMSPDEIRDIGAHIVLGNTFHLWLRPGLEVIEAHGGLHRFMGWDGPILTDSGGFQVWSLGALRKITEEGVKFRSPINGDLCFLTPEESMRIQKVLNSDIVMIFDECTPYPATWTQARDSMELSLRWAERSKKAHEGNANALFGIIQGGMYEDLRDISLKGLSDIGFDGYAIGGLSVGEPKEDMLRILDHLPQRMPADKPRYLMGVGTPEDLVDAVQRGVDMFDCVMPTRNARNGWLFTRNGDIKLKNARYKTDTAPLDPECTCYTCRHFTRAYLHHLHRVGEILGSRLNTIHNLHYYQELMAGLRAAIEQGQLASFADEFRRRRQA

SEQ ID NO: 57529 - protein, 371 aa, Methylobacter sp.
  REGION 1..371: note = tr|A0A522WXE9|A0A522WXE9_9GAMM Queuine tRNA-ribosyltransferase OS=Methylobacter sp. OX=2051955; GN = tgt PE=3 SV=1
MDFKLINTDGHARRGQLNFARGIVETPIFMPVGTYGTVKSLTPDELTGIGAQIILGNTFHLMLRPGMDVVKAHGDLHDFMRWDKPILTDSGGFQVFSLGALRKITEQGVTFKSPINGSSIFMGPEESMQVQRDLGSDIVMIFDECTPYPATVHEAAESMRLSLRWAARSKAAHEGNASALFGIVQGGMYEHLRQESIAGLVDIGFDGYAIGGLSVGEPKEEMMATLDVVHTKMPTDKPRYLMGVGTPEDLVEAVRRGIDMFDCVMPTRNARNGHLFTTFGVVKIRNSQYEFDTGPLDESCGCYTCRNFSRAYLRHLDKCKEMLGSRLNTIHNLYYYLSLMQGLRDAIEKKELDIFVKQFYQQRGKAVPSVA

SEQ ID NO: 57530 - protein, 371 aa, Methylobacter sp.
  REGION 1..371: note = tr|A0A2P5M0F0|A0A2P5M0F0_9GAMM Queuine tRNA-ribosyltransferase OS=Methylobacter sp. OX=2051955; GN = tgt PE=3 SV=1
MEFNVLATDGSARRGRLSFARGTVETPIFMPVGTYGTVKALTPEELESLGAQIILGNTFHLMLRPGAEVIKAHGDLHDFMRWQKPVLTDSGGFQVFSLGALRKISEQGVSFKSPVDGSAIFMGPEESMLMQRDLGSDIVMIFDECTPYPASVQQAADSMRLSLRWAERSKRAHEGNASALFGIVQGGMYQHLRQESIAGLSEIGFDGYAIGGLSVGEPKAEMLATLDQVAPALPADKPRYLMGVGTPEDLVEGVRRGIDMFDCVMPTRNARNGHLFTRHGVIKIRNQQYQSDTRPLDEHCTCYTCRNYSRSYLKHLDKCQEMLGARLNTIHNLHYYLELMQDLRTAIEINALSTFVQQFYHQREKIIPVVA

SEQ ID NO: 57531 - protein, 371 aa, Methylobacter tundripaludum
  REGION 1..371: note = tr|A0A2S6H4F4|A0A2S6H4F4_9GAMM Queuine tRNA-ribosyltransferase OS=Methylobacter tundripaludum; OX = 173365 GN=tgt PE=3 SV=1
MDFKLINTDGHARRGQLKFARGIVETPIFMPVGTYGTVKALTPDELTGIGAQIILGNTFHLMLRPGMDVVKAHGDLHDFMRWDKPILTDSGGFQVFSLGALRKITEKGVTFKSPINGSSIFMGPEESMQVQRDLGSDIVMIFDECTPYPATVHEAAESMRLSLRWAARSKAAHEGNASALFGIVQGGMYEHLRKESIAGLVDIGFDGYAIGGLSVGEPKEEMMATLDVVHPKMPVDKPRYLMGVGTPEDLVEAVRRGIDMFDCVMPTRNARNGHLFTTFGVVKIRNSQYEFDTGPLDESCGCYTCRNFSRAYLRHLDKCKEMLGSRLNTIHNLYYYLNLMQGLRDAIERQELDIFVKQFYQQRGKAVPTVA

SEQ ID NO: 57532 - protein, 371 aa, Methylobacter tundripaludum
  REGION 1..371: note = tr|G3IS59|G3IS59_METTV Queuine tRNA-ribosyltransferase OS=Methylobacter tundripaludum (strain ATCC BAA-1195 / DSM 17260 / SV96) OX=697282 GN=tgt; PE = 3 SV=1
MDFKLINTDGHARRGQLTFARGIVETPIFMPVGTYGTVKSLTPDELTGIGAQIILGNTFHLMLRPGMDVVKAHGDLHDFMHWDKPILTDSGGFQVFSLGALRKITEKGVTFKSPINGSSIFMGPEESMQVQRDLGSDIVMIFDECTPYPATVHEAADSMRLSLRWAARSKAAHEGNDSALFGIVQGGMYEHLRQESIAGLVDIGFDGYAIGGLSVGEPKEEMMATLDVVHGKMPVDKPRYLMGVGTPEDLVEAVRRGIDMFDCVMPTRNARNGHLFTTFGVVKIRNSQYEFDTGPLDESCGCYTCRNYSRAYLRHLDKCKEMLGSRLNTIHNLYYYLSLMQGLRDAIERQELDIFVKQFYQQRGKAVPTVA

SEQ ID NO: 57533 - protein, 377 aa, Methylobacterium aquaticum
  REGION 1..377: note = tr|A0A0C6FBP4|A0A0C6FBP4_9RHIZ Queuine tRNA-ribosyltransferase OS=Methylobacterium aquaticum; OX = 270351 GN=tgt PE=3 SV=1
MTDHFTFTVAATDGPARTGEIRMPRGVIRTPAFMPVGTAGTVKAMYPEQVKALGADVVLGNTYHLMLRPGAERVARLGGLHTMMQWPYPILTDSGGFQVMSLSGLRKLDETGVRFQSHLDGSTHLLSPERSIEIQGLLGSDIQMQLDECVRLPAPESAIESAMRLSLRWAERCRIAFGDQPGKAMFGIVQGGDIPALRVESARALVDLDLKGYAVGGLAVGEPQATMLAMIETVEPHLPTHKPRYLMGVGTPDDIVQAVSRGIDMFDCVMPTRAGRHGMVYTRHGRLNLRNARFAEDNTPLDPESTCPAANLYSKAYLHHLVRAGEILGMMLLTWNNLSYYQDLMAGLRKAIAEGRLQDFIGETREGWRKAERDRAA

SEQ ID NO: 57534 - protein, 377 aa, Methylobacterium aquaticum
  REGION 1..377: note = tr|A0A0J6T4G6|A0A0J6T4G6_9RHIZ Queuine tRNA-ribosyltransferase OS=Methylobacterium aquaticum; OX = 270351 GN=tgt PE=3 SV=1
MTDHFTFTVAATDGPARTGEIRMPRGVIRTPAFMPVGTAGTVKAMYPEQVKALGADVVLGNTYHLMLRPGAERVARLGGLHAMMQWPYPILTDSGGFQVMSLAGLRKLDETGVRFQSHLDGSTHLLSPERSIEIQGLLGSDIQMQLDECVRLPAPEPAIESAMRLSLRWAERCRIAFGDQPGKAMFGIVQGGDIPGLRIESAKALVDLDLKGYAIGGLAVGEPQATMLSMIETVEPHLPTTKPRYLMGVGTPDDIVQAVSRGIDMFDCVMPTRAGRHGMVYTRHGRLNLRNARFAEDNTPLDPDSTCPAANQYSKAYLHHLVRAGEILGMMLLTWNNLSYYQDLMVGLRKAIAERRLHAFIGETREGWERAERDRAA

SEQ ID NO: 57535 - protein, 379 aa, Methylobacterium brachiatum
  REGION 1..379: note = tr|A0A3G2V2S5|A0A3G2V2S5_9RHIZ Queuine tRNA-ribosyltransferase OS=Methylobacterium brachiatum; OX = 269660 GN=tgt PE=3 SV=1
MTETVPFGFTLHGQDGTARTGEIATPRGNIRTPAFMPVGTAATVKAMYPGQVRELGADVVLGNTYHLMLRPGPERMARLGGLHTFMNWERPILTDSGGFQVMSLSALRKIDEQGVTFRSHIDGTAHHMSPERSIEIQGLLGSDIQMQLDECVRLPAEHKAIEKAMHLSLRWAERCRVAFGEQSGKALFGIVQGGDVPALRIESARALTDLDLKGYAVGGLAVGEPQAVMFAMIETVEPHLPEAKPRYLMGVGTPDDILGAVARGIDMFDCVMPTRAGRHGLAYTRNGRVNLRNARHAEDTAPLDETSTCPAARDYSRAYLHHLVRSNEILGMMLLTWNNLAYYQDLMAGARTAIREGRFADYCASTREGWVRAERAAAG

SEQ ID NO: 57536 - protein, 379 aa, Methylobacterium brachiatum
  REGION 1..379: note = tr|A0A1I3H064|A0A1I3H064_9RHIZ Queuine tRNA-ribosyltransferase OS=Methylobacterium brachiatum; OX = 269660 GN=tgt PE=3 SV=1
MTETVPFGFTLHGQDGTARTGEIATPRGNIRTPAFMPVGTAATVKAMYPGQVRELGADVVLGNTYHLMLRPGPERMARLGGLHTFMNWDRPILTDSGGFQVMSLSALRKIDEQGVTFRSHIDGTAHHMSPERSIEIQGLLGSDIQMQLDECVRLPAEHKAIEKAMHLSLRWAERCRVAFGEQPGKAMFGIVQGGDVPALRIESARALTDLDLKGYAVGGLAVGEPQAVMFAMIETVEPHLPQAKPRYLMGVGTPDDILGAVARGIDMFDCVMPTRAGRHGLAYTRNGRVNLRNARHAEDTAPLDETSSCPAARDYSRAYLHHLVRSNEILGMMLLTWNNLAYYQDLMAGARAAIREGRFADYCASTREGWVRAERAAAG

SEQ ID NO: 57537 - protein, 377 aa, unidentified
  source 1..377: note = Methylobacterium currus
  REGION 1..377: note = tr|A0A2R4WHD8|A0A2R4WHD8_9RHIZ Queuine tRNA-ribosyltransferase OS=Methylobacterium currus; OX = 2051553 GN=tgt PE=3 SV=1
MTDQFSFTVAATDGAARTGEIRMPRGVIRTPAFMPVGTAGTVKAMYPEQVKALGADVVLGNTYHLMLRPGAERVARLGGLHAMMQWPYPILTDSGGFQVMSLAGLRKLDETGVRFQSHLDGSTHLLSPERSIEIQGLLGSDIQMQLDECVRLPAPESAIESAMRLSLRWAERCRIAFGDQPGKAMFGIVQGGDIPALRVESAKALVGLDLKGYAIGGLAVGEPQATMLAMIETVEPHLPTHKPRYLMGVGTPDDIVQAVSRGIDMFDCVMPTRAGRHGMVYTRHGRLNLRNARFAEDNSPLDPDSTCPAANLYSKAYLHHLVRAGEILGMMLLTWNNLSYYQDLMAGLRKAIAAGRLADFIGETREGWEKAERDRAA

SEQ ID NO: 57538 - protein, 384 aa, unidentified
  source 1..384: note = Methylobacterium dankookense
  REGION 1..384: note = tr|A0A564G198|A0A564G198_9RHIZ Queuine tRNA-ribosyltransferase OS=Methylobacterium dankookense; OX = 560405 GN=tgt PE=3 SV=1
MTEPTATPEFRFALHATDGQARTGAITLPRGVIRTPAFMPVGTAATVKAMYADQVRDLGADVVLGNTYHLMLRPGPERMARLGGLHRFMRWDGPILTDSGGFQVMSLSALRKLDEDGVTFRSHVDGSAHRMSPERSIEIQGLLGSDIQMQLDECVRLPAPPEAIEKAMRLSLRWAERCRAAFGEQPGKAMFGIVQGGDVPELRVESARALVDLDLKGYAIGGLAVGEPQAVMLAMIETVEPHLPREKPRYLMGVGTPDDLLRAVERGVDMFDCVMPTRAGRHGLAYTRHGRVNLRNARHAEDVRPLDETSRCPAARDYSRAYLHHLVRSEEILGMMLLTWNNLAYYQDLMAGMRAAIREGRFAAFAEETRAGWAQAEAAAKAGA

SEQ ID NO: 57539 - protein, 377 aa, unidentified
  source 1..377: note = Methylobacterium frigidaeris
  REGION 1..377: note = tr|A0A2G8MNQ6|A0A2G8MNQ6_9RHIZ Queuine tRNA-ribosyltransferase OS=Methylobacterium frigidaeris; OX = 2038277 GN=tgt PE=3 SV=1
MTDQFSFTVAATDGPARTGEIRMPRGVIRTPAFMPVGTAGTVKAMYPEQVKALGADVVLGNTYHLMLRPGAERVARLGGLHAMMQWPYPILTDSGGFQVMSLAGLRKLDETGVRFQSHLDGSTHLLSPERSIEIQGLLGSDIQMQLDECVRLPAPESAIESAMRLSLRWAERCRIAFGDQPGKAMFGIVQGGDIPALRVESAKALVGLDLKGYAIGGLAVGEPQATMLAMIETVEPHLPTHKPRYLMGVGTPDDIVQAVSRGIDMFDCVMPTRAGRHGMVYTRHGRLNLRNARFAEDNSPLDPESTCPAANLYSKAYLHHLVRAGEILGMMLLTWNNLSYYQDLMAGLRKAIAAGRLADFIGETREGWQKAERDRAA

SEQ ID NO: 57540 - protein, 377 aa, unidentified
  source 1..377: note = Methylobacterium gnaphalii
  REGION 1..377: note = tr|A0A512JIY1|A0A512JIY1_9RHIZ Queuine tRNA-ribosyltransferase OS=Methylobacterium gnaphalii; OX = 1010610 GN=tgt PE=3 SV=1
MTDSFSFRVDATDGAARTGAITMPRGTIRTPAFMPVGTAATVKAMYPEQVRDLGADVVLGNTYHLMLRPGAERMAHLGGLHRFMRWDGPILTDSGGFQVMSLSALRKLDEQGVTFRSHIDGTAHHMSPERSIEIQSLLGSDIQMQLDECVRLPAERDEIEKAMRLSLRWAERCRMAFGEQPGKAMFGIVQGGDIPELRVESARALTDLDLKGYAIGGLAVGEPQAVMLAMIETVEPHLPTAKPRYLMGVGTPDDLMQSVSRGIDMFDCVMPTRAGRHGLAYTRHGRINLRNARHAEDTAPLDEASTCPATRDYSRAYLHHLVRSDEILGMMLLTWNNLAYYQELMADMRAAIAAGRLADFIGETKQEWARAEAARAA

SEQ ID NO: 57541 - protein, 385 aa, Methylobacterium gossipiicola
  REGION 1..385: note = tr|A0A1I2TI30|A0A1I2TI30_9RHIZ Queuine tRNA-ribosyltransferase OS=Methylobacterium gossipiicola; OX = 582675 GN=tgt PE=3 SV=1
MSEPAPAAFPQNFTFRVDATDGTARTGAISMPRGVIRTPAFMPVGTAATVKAMYPGQVRDLGADVVLGNTYHLMLRPGPERMARLGGLHHFMNWPHPILTDSGGFQVMSLSALRKLDEQGVTFRSHVDGSTHHMSPERSIEIQGLLGSDIQMQLDECVRLPADHDTIEKAMRLSLRWAERCRVQFGEQPGKAMFGIVQGGDVPALRVESARALVDLDLKGYAIGGLAVGEPQDVMLAMIETVAPHLPQAKPRYLMGVGTPDDLMRSVARGIDMFDCVMPTRAGRHGLAYTRHGRINLRNARHGEDTRPLDEASSCPAARDYSRAYLHHLVRTDEILGMMLLTWNNLAYYQELMAGMRAAIAAGRLADFCDETRDAWAKAEAERNA

SEQ ID NO: 57542 - protein, 380 aa, unidentified
  source 1..380: note = Methylobacterium haplocladii
  REGION 1..380: note = tr|A0A512IRC6|A0A512IRC6_9RHIZ Queuine tRNA-ribosyltransferase OS=Methylobacterium haplocladii; OX = 1176176 GN=tgt PE=3 SV=1
MSDLPTDFRFSVHATDGAARTGAISMPRGTIRTPAFMPVGTAATVKAMYPEQVRDLGADVVLGNTYHLMLRPGAERMERLGGLHRFMRWDGPILTDSGGFQVMSLSALRKLDEKGVTFRSHIDGTAHHMSPERSIEIQGLLGSDIQMQLDECVRLPAEREAIEKAMRLSLRWAERCRVTFGEQPGKALFGIVQGGDIPDLRVESARALTELDLKGYAIGGLAVGEPQAVMLAMIETVEPHLPSGKPRYLMGVGTPDDLMQAVSRGIDMFDCVMPTRAGRHGLAYTRHGRINLRNARHAEDTRPLDEQSTCPATRDYSRAYLHHLVRSDEILGMMLLTWNNLAYYQELMAGMRAAISAGRLADFIGETKAEWARAEAERAA

SEQ ID NO: 57543 - protein, 377 aa, unidentified
  source 1..377: note = Methylobacterium indicum
  REGION 1..377: note = tr|A0A0J6QKK8|A0A0J6QKK8_9RHIZ Queuine tRNA-ribosyltransferase OS=Methylobacterium indicum; OX = 1775910 GN=tgt PE=3 SV=1
MTDHFTFTVAATDGPARTGEIRMPRGVIRTPAFMPVGTAGTVKAMYPEQVKALGADVVLGNTYHLMLRPGAERVARLGGLHAMMQWPYPILTDSGGFQVMSLAGLRKLDETGVRFQSHLDGSTHLLSPERSIEIQGLLGSDIQMQLDECVRLPAPESAIESAMRLSLRWAERCRIAFGDQPGKAMFGIVQGGDIPALRVESAKALVDLDLKGYAVGGLAVGEPQATMLAMIETVEPHLPTAKPRYLMGVGTPDDIVQAVSRGIDMFDCVMPTRAGRHGMVYTRHGRLNLRNARFAEDNTPLDPESTCPAANLYSKAYLHHLVRAGEILGMMLLTWNNLSYYQDLMAGLRKAIAEGRLQDFIGETREGWQKAERDRAA

SEQ ID NO: 57544 - protein, 381 aa, Methylobacterium mesophilicum
  REGION 1..381: note = tr|M7Y526|M7Y526_9RHIZ Queuine tRNA-ribosyltransferase OS=Methylobacterium mesophilicum SR1.6/6 OX=908290 GN=tgt PE=3 SV=1
MTDPVPFGFTLRAQDGTARTGEIVTPRGTIRTPAFMPVGTAATVKAMYPEQVRELGADVVLGNTYHLMLRPGAERMARLGGLHRFMNWDRPILTDSGGFQVMSLSALRKIDEQGVTFRSHIDGTAHHMSPERSIEIQGLLGSDIQMQLDECVRLPAEHGAIEKAMHLSLRWAERCRVAFGEQPGRAMFGIVQGGDVPALRVESARALTDLDLKGYAVGGLAVGEPQAVMFAMIETVEPHLPQGKPRYLMGVGTPDDILGAVARGIDMFDCVMPTRAGRHGLAYTRHGRVNLRNARHAEDTAPLDDASSCPAARDYSRAYLHHLVRSNEILGMMLLTWNNLAYYQDLMAGARAAIRDGRFADYCGSTREGWARAERAASTTA

SEQ ID NO: 57545 - protein, 378 aa, Methylobacterium nodulans
  REGION 1..378: note = tr|B8IE72|B8IE72_METNO Queuine tRNA-ribosyltransferase OS=Methylobacterium nodulans (strain LMG 21967 / CNCM I-2342 / ORS 2060) OX=460265; GN = tgt PE=3 SV=1
MTDTFRFTVAATDGAARTGEIRMPRGVIRTPAFMPVGTAGTVKAMYPEQVKALGADVVLGNTYHLMLRPGAERVARLGGLHAFMQWPYPILTDSGGFQVMSLSGLRKLDETGVTFQSHIDGTPHVLTPERSIAIQGQLGSDIQMQLDECVRLPAEPAAIERAMRLSLRWAERCRVAFGEQPGKALFGIVQGGDSPALRVESAKALVGLDLKGYAIGGLAVGEPQGTMLAMIEAVEPHLPMAKPRYLMGVGTPDDIIEAVRRGIDMFDCVMPTRAGRHGMVYTRHGRMNLRNARFAEDNTPLDPESTCPAANLYTKAYLHHLVRAGEILGMMLLTWNNLSYYQDLMAGLRRAIGEGRLADFIGETREGWAKAERDRAQG

SEQ ID NO: 57546 - protein, 378 aa, Methylobacterium organophilum
  REGION 1..378: note = tr|A0A2U1F6H4|A0A2U1F6H4_METOR Queuine tRNA-ribosyltransferase OS=Methylobacterium organophilum; OX = 410 GN=tgt PE=3 SV=1
MTDSAPFRFDLLARDGTARTGMIATPRGEIRTPAFMPVGTAATVKAMYPGQVRDLGADVVLGNTYHLMLRPGPERMARLGGLHRFMNWDRPILTDSGGFQVMSLSALRKIDEQGVTFRSHIDGTAHHMSPERSIEIQGLLGSDIQMQLDECVRLPADHAAIEKAMHLSLRWAERCRVAFGEQPGRALFGIVQGGDVPALRVESARALTDLDLKGYAVGGLAVGEPQAVMFAMIETVEPHLPAAKPRYLMGVGTPDDILGAVGRGIDMFDCVMPTRAGRHGLAYTRHGRVNLRNARHAEDTAPLDVASTCPAARDYSRAYLHHLVRSNEILGMMLLTWNNLAYYQDLMAGARAAIRDGRYADYCAATRAGWASAERAAA

SEQ ID NO: 57547 - protein, 378 aa, Methylobacterium oryzae
  REGION 1..378: note = tr|A0A089NPH6|A0A089NPH6_9RHIZ Queuine tRNA-ribosyltransferase OS=Methylobacterium oryzae CBMB20; OX = 693986 GN=tgt PE=3 SV=1
MTDSVPFGFNLLAQDDTARTGVITTPRGTIRTPAFMPVGTAATVKAMYPDQVRDLGADVVLGNTYHLMLRPGPERMARLGGLHRFMNWDRPILTDSGGFQVMSLSALRKIDEQGVTFRSHIDGTAHHMSPERSIEIQGLLGSDIQMQLDECVRLPADHAAIEKAMRLSLRWAERCRVAFGEQPGRAMFGIVQGGDVPALRVESARALTDLDLKGYAVGGLAVGEPQEVMFAMIETVEPHLPAAKPRYLMGVGTPDDILGAVARGIDMFDCVMPTRAGRHGLAYTRHGRVNLRNARHAEDTAPLDEASTCPAARDYSRAYLHHLVRSNEILGMMLLTWNNLAYYQDLMAGARAAIRDGRYADYCTSTRAGWARSERAAA

SEQ ID NO: 57548 - protein, 393 aa, unidentified
  source 1..393: note = Methylobacterium oxalidis
  REGION 1..393: note = tr|A0A512JAD8|A0A512JAD8_9RHIZ Queuine tRNA-ribosyltransferase OS=Methylobacterium oxalidis; OX = 944322 GN=tgt PE=3 SV=1
MPPDPEPPMQDAARPEPTPDFAFRVDATDGAARTGAITMPRGAIRTPAFMPVGTAATVKAMYPEQVRDLGADVVLGNTYHLMLRPGPERMARLGGLHRFMRWDGPILTDSGGFQVMSLSALRKLDEEGVTFRSHIDGTAHHMSPERSIEIQGLLGSDIQMQLDECVRLPAEPEAIERAMRLSLRWAERCRAAFGEQPGKAMFGIVQGGDVPALRIESARALVDLDLKGYAIGGLAVGEPQAVMLAMIEAVEPHLPRAKPRYLMGVGTPDDLMRSVERGIDMFDCVMPTRAGRHGLAYTRHGRVNLRNARHAEDSRPLDETSACPAARDYSRAYLHHLVRSDEILGMMLLTWNNLAYYQELMAGLRAAIRTGRLADFAAETREAWARAEAERAE

SEQ ID NO: 57549 - protein, 378 aa, unidentified
  source 1..378: note = Methylobacterium phyllostachyos
  REGION 1..378: note = tr|A0A1G9VCX5|A0A1G9VCX5_9RHIZ Queuine tRNA-ribosyltransferase OS=Methylobacterium phyllostachyos; OX = 582672 GN=tgt PE=3 SV=1
MTDPVPFGFTLLAQDGTARSGTISTPRGEIRTPAFMPVGTAATVKAMYPQQVRDLGADVVLGNTYHLMLRPGPERMARLGGLHRFMNWDRPILTDSGGFQVMSLSALRKIDEQGVTFRSHIDGTAHHMSPERSIEIQGLLGSDIQMQLDECVRLPADHAAIEKAMQLSLRWAERCRVAFGEQPGRALFGIVQGGDVPALRVESSRALTDLGLKGYAIGGLAVGEPQAVMFSMIETVEPHLPPTKPRYLMGVGTPDDILGAVARGVDMFDCVMPTRAGRHGLAYTRHGRVNLRNARHAENTAPLDEASACPAARDYSRAYLHHLVRSNEILGMMLLTWNNLAYYQDLMAGARAAIREGRFADYCCATREGWAQAERASA

SEQ ID NO: 57550 - protein, 377 aa, Methylobacterium platani
  REGION 1..377: note = tr|A0A179S3U8|A0A179S3U8_9RHIZ Queuine tRNA-ribosyltransferase OS=Methylobacterium platani; OX = 427683 GN=tgt PE=3 SV=1
MTDLFTFTVAATDGAARTGEIRMPRGVIRTPAFMPVGTAGTVKAMYPEQVKALGADVVLGNTYHLMLRPGAERVARLGGLHAMMQWPYPILTDSGGFQVMSLAGLRKLDETGVRFQSHLDGSTHLLSPERSIEIQGLLGSDIQMQLDECVRLPAPESAIESAMRLSLRWAERCRIAFGDQPGKAMFGIVQGGDIPALRVESARALVDLDLKGYAVGGLAVGEPQATMLAMIETVEPHLPTAKPRYLMGVGTPDDIVQAVSRGIDMFDCVMPTRAGRHGMVYTRHGRLNLRNARFAEDNTPLDPESTCPAANLYSKAYLHHLVRAGEILGMMLLTWNNLSYYQDLMAGLRRAIAEGRLQDFIGETREGWQKAERDRAA

SEQ ID NO: 57551 - protein, 383 aa, unidentified
  source 1..383: note = Methylobacterium pseudosasicola
  REGION 1..383: note = tr|A0A1I4JPT3|A0A1I4JPT3_9RHIZ Queuine tRNA-ribosyltransferase OS=Methylobacterium pseudosasicola; OX = 582667 GN=tgt PE=3 SV=1
MTVPAMTETTPFGFTLHRQDGTARTGEIATPRGNIRTPAFMPVGTAATVKAMYPGQVRELGADVVLGNTYHLMLRPGPERMARLGGLHTFMNWDRPILTDSGGFQVMSLSALRKIDEQGVTFRSHIDGTAHHMSPERSIEIQGLLGSDIQMQLDECVRLPAEHKAIEKAMHLSLRWAERCRIAFGEQPGKAMFGIVQGGDVPALRVESARALTDLDLKGYAVGGLAVGEPQAVMFAMIETVEPHLPQAKPRYLMGVGTPDDILGAVARGIDMFDCVMPTRAGRHGLAYTRNGRVNLRNARHAEDTAPLDESSTCPAARDYSRAYLHHLVRSNEILGMMLLTWNNLAYYQDLMAGARAAIRDGRFADYCGATREGWARAERAAG

SEQ ID NO: 57552 - protein, 378 aa, Methylobacterium radiotolerans; identical to SEQ ID NO: 57546
  REGION 1..378: note = tr|A0A3S3BDR7|A0A3S3BDR7_9RHIZ Queuine tRNA-ribosyltransferase OS=Methylobacterium radiotolerans; OX = 31998 GN=tgt PE=3 SV=1

SEQ ID NO: 57553 - protein, 379 aa, Methylobacterium radiotolerans
  REGION 1..379: note = tr|B1M583|B1M583_METRJ Queuine tRNA-ribosyltransferase OS=Methylobacterium radiotolerans (strain ATCC 27329 / DSM 1819 / JCM 2831 / NBRC 15690 / NCIMB 10815 / 0-1) O X=426355 GN=tgt PE=3 SV=1
MTDSAPFRFDLLARDGTARTGMIATPRGEIRTPAFMPVGTAATVKAMYPGQVRDLGADVVLGNTYHLMLRPGPERMARLGGLHRFMNWDRPILTDSGGFQVMSLSALRKIDEQGVTFRSHIDGTAHHMSPERSIEIQGLLGSDIQMQLDECVRLPADHAAIEKAMHLSLRWAERCRVAFGEQPGRALFGIVQGGDVPALRVESARALTDLDLKGYAVGGLAVGEPQAVMFAMIETVEPHLPAAKPRYLMGVGTPDDILGAVGRGIDMFDCVMPTRAGRHGLAYTRHGRVNLRNARHAEDTAPLDVASTCPAARDYSRAYLHHLVRSNEILGMMLLTWNNLAYYQDLMAGARAAIRDGRYADYCAETRAGWASAERAAAA

SEQ ID NO: 57554 - protein, 392 aa, Methylobacterium sp.
  REGION 1..392: note = tr|A0A0Q4TZW6|A0A0Q4TZW6_9RHIZ Queuine tRNA-ribosyltransferase OS=Methylobacterium sp. Leaf85; OX = 1736241 GN=tgt PE=3 SV=1
MSETPSLRSNASEHFTFRVDATDGQARTGAISMPRGTIRTPAFMPVGTAATVKAMYPGQVRDLGADVVLGNTYHLMLRPGPERMERLGGLHHFMNWPHPILTDSGGFQVMSLSALRKLDEQGVTFRSHVDGSAHHMSPERSIEIQGLLGSDIQMQLDECVRLPAERPAIESAMRLSLRWAERCRLQFGEQPGKAMFGIVQGGDLADLRVESARGLVDLDLKGYAIGGLAVGEPQAVMLAMIETVEPHLPRDKPRYLMGVGTPDDLMRSVARGIDMFDCVMPTRAGRHGLAYTRFGRINLRNARFAEDTRPLDETSACPAARDYSRAYLHHLVRTDEILGMMLLTWNNLSYYQDLMSGMRGAIAAGRLADFAGETREAWARAEAERASANLAG

SEQ ID NO: 57555 - protein, 377 aa, Methylobacterium sp.
  REGION 1..377: note = tr|A0A4Z0NG89|A0A4Z0NG89_9RHIZ Queuine tRNA-ribosyltransferase OS=Methylobacterium sp. 6HR-1; OX = 1141884 GN=tgt PE=3 SV=1
MTDQFSFTVAATDGSARTGEIRMPRGVIRTPAFMPVGTAGTVKAMYPEQVKALGADVVLGNTYHLMLRPGAERVARLGGLHAMMQWPYPILTDSGGFQVMSLAGLRKLDETGVRFQSHLDGSTHLLSPERSIAIQGLLGADIQMQLDECVRLPAPESAIESAMRLSLRWAERCRIAFGDQPGRAMFGIVQGGDIPGLRVESAKALVELDLKGYAIGGLAVGEPQATMLAMIETVEPHLPTEKPRYLMGVGTPDDIVQAVSRGIDMFDCVMPTRAGRHGMVYTRHGRLNLRNARFAEDNAPLDPESTCPAANLYTKAYLHHLVRAGEILGMMLLTWNNLSYYQDLMAGLRRAIAAGRLSDFIGETREGWEKAERDRAA

SEQ ID NO: 57556 - protein, 377 aa, Methylobacterium variabile
  REGION 1..377: note = tr|A0A0J6SYF3|A0A0J6SYF3_9RHIZ Queuine tRNA-ribosyltransferase OS=Methylobacterium variabile; OX = 298794 GN=tgt PE=3 SV=1
MTDQFSFTVAATDGAARTGEIRMPRGVIRTPAFMPVGTAGTVKAMYPEQVKALGADVVLGNTYHLMLRPGAERVARLGGLHAMMQWPYPILTDSGGFQVMSLAGLRKLDETGVRFQSHIDGTAHLLSPERSIEIQGLLGSDIQMQLDECVRLPAPEAAIESAMRLSLRWAERCRIAFGDQPGRAMFGIVQGGDIPALRVESARALVGLDLKGYAIGGLAVGEPQATMLAMIETVEPHLPTTKPRYLMGVGTPDDIVQAVSRGIDMFDCVMPTRAGRHGMVYTRHGRLNLRNARFAEDNAPLDPESTCPAANQYSKAYLHHLVRAGEILGMMLLTWNNLSYYQDLMAGLRRAIAAGRLQDFIGETREGWEKAERDRAA

SEQ ID NO: 57557 - protein, 315 aa, unidentified
  source 1..315: note = Methylobrevis pamukkalensis
  REGION 1..315: note = tr|A0A1E3H4M0|A0A1E3H4M0_9RHIZ Queuine tRNA-ribosyltransferase OS=Methylobrevis pamukkalensis; OX = 1439726 GN=tgt_2 PE=3 SV=1
MLRPGAERVARLGGLHEFARWPHTILTDSGGFQVMSLAQIRKLTETGVTFRSHIDGSRHEMTPERSVEIQGLLGSDIQMQLDECIRLPAERKEIDRAMQLSLRWAARSRAKFEAMGGPGKGQGLYGIVQGGDDAELRATSARELAAMPFEGFSIGGLAVGEPQAVMLQMLDIVCPLLPQDRPRYLMGVGTPDDIVESVARGVDQFDCVMPTRAGRHGQVFTRFGRINLRNARHAEDPRPLDEASDCPAARDYSRAYLHHLVRAEEALGAMLLTWVNVAYYQSLMQGIRDAIEAGRYADFVAETKAGWARGDIAAV

SEQ ID NO: 57558 - protein, 64 aa, unidentified
  source 1..64: note = Methylobrevis pamukkalensis
  REGION 1..64: note = tr|A0A1E3H663|A0A1E3H663_9RHIZ Queuine tRNA-ribosyltransferase OS=Methylobrevis pamukkalensis; OX = 1439726 GN=tgt_1 PE=4 SV=1
MTAPFAFDLLATDGAARRGTITTPHGEVRTPAFMPVGTQGTVKAMFMDDVRATGATSSSATPIT

SEQ ID NO: 57559 - protein, 375 aa, unidentified
  source 1..375: note = Methylocaldum marinum
  REGION 1..375: note = tr|A0A250KQC5|A0A250KQC5_9GAMM Queuine tRNA-ribosyltransferase OS=Methylocaldum marinum; OX = 1432792 GN=tgt PE=3 SV=1
MEFNVSSTDGKARRGELIFSRGRVQTPAFMPVGTYGTVKAMTPEELKELGAEIVLGNTFHLMLRPGTDVIRSHGGLHDFMHWDRPILTDSGGFQVFSLGAMRKITEAGVLFRSPVDGSVTFLGPEESMAVQRELGSDIVMVFDECTPYPASYEQAADSMRLSLRWAERSKKAHDGNRSALFGIVQGGVYEALRSESVEGLKAIGFDGYAIGGLSVGESKEDRARVLNSLMPKMPFDKPRYLMGVGTPEDIVEAVRLGIDMFDCVMPTRNARNGHLFTRHGAIRIRNSCYQNDTRPLDDECRCYTCRNYSRSYLRHLDKCREILGARLNTIHNLFYYQELMAGLRRAIEERTFNDFVVRFYEQRGKGDVLCNNAAL

SEQ ID NO: 57560 - protein, 375 aa, Methylocaldum sp.
  REGION 1..375: note = tr|A0A4R6ZVW7|A0A4R6ZVW7_9GAMM Queuine tRNA-ribosyltransferase OS=Methylocaldum sp. 0917; OX = 2485163 GN=tgt PE=3 SV=1
MEFIVSSTDGRARRGELIFSRGNVRTPAFMPVGTYGTVKAMTPEELKELGAEIVLGNTFHLMLRPGTDVIRRHGDLHDFMHWDRPILTDSGGFQVFSLGAMRKITEAGVRFRSPVDGSVTFLGPEESMAVQRDLGSDIVMIFDECTPYPASYEQAADSMRLSLRWAERSKDAHEGNPSALFGIVQGGVYEELRFESVEGLKNIGFDGYAIGGLSVGEPKEDRARILNSLLPNMPSDRPRYLMGVGTPEDIVEAVRLGIDMFDCVLPTRNARNGHLFTRHGAIRIRNSCYQNDTRPLDDECRCYTCRNFSRSYLRHLDKCGEILGSRLNTIHNLYYYQELMAGLRQAIEDNRLSEFVARFYEQRGKGEVLCNNAAF

SEQ ID NO: 57561 - protein, 380 aa, unidentified
  source 1..380: note = Methylocapsa palsarum
  REGION 1..380: note = tr|A0A1I4C6X6|A0A1I4C6X6_9RHIZ Queuine tRNA-ribosyltransferase OS=Methylocapsa palsarum; OX = 1612308 GN=tgt PE=3 SV=1
MTGGFRFNVTRTDGQARTGVIATARGEIRTPAFMPVGTAATVKAMHPEAVKALGADIVLANTYHLMLRPGAERVAELGGLHRFMNWPWPILTDSGGFQVMSLAKLRKLDEDGVTFQSHIDGARHRLTPERAMEIQALLGSDIQMQFDECVRLPCEEDEARRAMLLSLRWAERSRAAFTPAPGRALFGIVQGGASPALRIESATALTGMDFHGYALGGLAVGEPQEIMLAMIETALPLLPAGKPRYLMGVGAPDDLLESVRRGIDMFDCVMPTRAGRHGLAYTRRGRLNLRNARHAGDPAPVDPLSASAAARTYSRAYLHHLVKSGEILGMMLLTEINLAYYEDLMEAARRAIAAGDYADFCARTKEDWALGEGEGQPKPS

SEQ ID NO: 57562 - protein, 376 aa, unidentified
  source 1..376: note = Methyloceanibacter caenitepidi
  REGION 1..376: note = tr|A0A0A8K3H3|A0A0A8K3H3_9RHIZ Queuine tRNA-ribosyltransferase OS=Methyloceanibacter caenitepidi; OX = 1384459 GN=tgt PE=3 SV=1
MTVPFTFALKATDGRARTGVIQTQRGEIRTPAFMPVGTQATVKAMFIEDVAAAGADIILGNTYHLMLRPGAERIAKLGGLHSFMHWDKPILTDSGGYQVMSLAKLRKITEEGVTFNSHLDGAPVFLTPERAVEVQCLLGADIQMALDECTPFPCSREEARVSLDLSMRWAERSKAAFETMSAPGQALFGIVQGSVFPDMREDSAKTLVGIGFPGYAVGGLAVGEGQEAMFDTLDATTPYLPEDKPRYLMGVGTPLDILGAVARGIDMFDCVMPTRSGRHGQAFTWGGRLNLRNAQYAEDLTPLDADSACPAAQYSRAYLHHLVKAGEMLGAMLVSYANIQFYQELMAGARAAIANGTFAAFADDIRRRYARADGTD

SEQ ID NO: 57563 - protein, 375 aa, unidentified
  source 1..375: note = Methyloceanibacter marginalis
  REGION 1..375: note = tr|A0A1E3W8V9|A0A1E3W8V9_9RHIZ Queuine tRNA-ribosyltransferase OS=Methyloceanibacter marginalis; OX = 1774971 GN=tgt PE=3 SV=1
MSAPFSFELKAKDGRARTGAINTPRGLIRTPAFMPVGTGATVKAMFPEDVAATGADIILGNTYHLMLRPGAERVARLGGLHKFMHWEKPILTDSGGYQVMSLAKLRKISEQGVTFQSHLDGATIELTPERAIEVQCLLGSDIQMVLDECTPFPATHEEAKRSLDLSMRWAERSKAAFETMSAPGQALFGIVQGSIYPDLREESARALTGIGFPGYAVGGLAVGEGQEAMFDTVEITTAFLPEDRPRYLMGVGTPQDMLGAIARGIDMFDCVMPTRSGRHGQAFTWGGRINLRNARYAEDATPLDAESKCPAARYERAYLHHLIKSGEMLGAMLISYANVQFYQELMAKARAAIGAGNFVAFAEDVARRYAVDDES

SEQ ID NO: 57564 - protein, 376 aa, unidentified
  source 1..376: note = Methyloceanibacter methanicus
  REGION 1..376: note = tr|A0A1E3W0E1|A0A1E3W0E1_9RHIZ Queuine tRNA-ribosyltransferase OS=Methyloceanibacter methanicus; OX = 1774968 GN=tgt PE=3 SV=1
MTRAFSFSVKAQDGAARTGVIATQRGDIRTPAFMPVGTQATVKAMFVEDVAAAGADIILGNTYHLMLRPGAERIAKLGGLHSFMHWDKPILTDSGGYQVMSLAKLRKISEEGVAFQSHLDGARVVLRPNRAIEVQCLLGADIQMALDECTPFPASRAEARVSLDLSMRWAERSKAAFEAMSAPGQALFGIVQGSVYPDLREDSAKTLEGIGFPGYAVGGLAVGEGHEAMLQTLEATTPFLPEDKPRYLMGVGTPLDILEAVAQGIDMFDCVMPTRSGRHGQAFTWGGRLNLRNAQYAEDLSPLDPESACPAAQYSRAYLHHLVKAGEILGAMLVSYANVQFYQELMARARTAIAGGTFADFVEDVRRRYAGPENTA

SEQ ID NO: 57565 - protein, 385 aa, unidentified
  source 1..385: note = Methyloceanibacter stevinii
  REGION 1..385: note = tr|A0A1E3VKL1|A0A1E3VKL1_9RHIZ Queuine tRNA-ribosyltransferase OS=Methyloceanibacter stevinii; OX = 1774970 GN=tgt PE=3 SV=1
MPADSERPGVTVPFSFALKAKDAGARTGVIETQRGEIRTPAFMPVGTQATVKAMFIEDVAAAGADIILGNTYHLMLRPGAERIAKLGGLHSFMHWDKPILTDSGGYQVMSLAKLRKITEEGVTFNSHLDGAPVFLTPERAVEVQCLLGADIQMALDECTPFPCSREEARVSLDLSMRWAERSKAAFETMSAPGQALFGIVQGSIFPDMREDSARTLVEIGFPGYAVGGLAVGEGQQAMFDTLDATTPYLPEDKPRYLMGVGTPLDILGAVARGIDMFDCVMPTRSGRHGQAFTWGGRLNLRNAQYAEDLTPLDADSACPAAQYSRAYLHHLVKAGEMLGAMLMSYANIQFYQELMAGARAAIANGTFADFADDIRRRYAKAEGTD

SEQ ID NO: 57566 - protein, 375 aa, unidentified
  source 1..375: note = Methyloceanibacter superfactus
  REGION 1..375: note = tr|A0A1E3VIV9|A0A1E3VIV9_9RHIZ Queuine tRNA-ribosyltransferase OS=Methyloceanibacter superfactus; OX = 1774969 GN=tgt PE=3 SV=1
MTELFSFELKRQDKAARTGVITTPRGQIRTPAFMPVGTGATVKAMFPEDVAATGADIILGNTYHLMLRPGAERVAKLGGLHRFMHWEKPILTDSGGYQVMSLAKLRRITEEGVTFQSHIDGATIHLTPERAIEVQCLLGADIQMVLDECTPFPATREEAKRSLDLSMRWAERSKAAFARLGAPGQALFGIVQGSTYPDLREQSARALMEIGFPGYAVGGLAVGEGQQSMLDMVEVTTAVLPEDRPRYLMGVGTPEDLLGAIARGIDMFDCVMPTRSGRHCQAFTWSGRLNLRNARHAEDTRPLDAESQCPAAQYSRAYLHHLVKSGETLGAMLLSYANVQFYQELMARSREAIAQGRFAAFAEDVLRRYQSGGED

SEQ ID NO: 57567 - protein, 378 aa, Methylocella silvestris
  REGION 1..378: note = tr|B8EIV2|B8EIV2_METSB Queuine tRNA-ribosyltransferase OS=Methylocella silvestris (strain DSM 15510 / CIP 108128 / LMG 27833 / NCIMB 13906 / BL2); OX = 395965 GN=tgt PE =3 SV=1
MSEEFAFAIFGVDGAARTGAISTSRGTIRTPAFMPVGTAATVKAMHPQAVKALGADIVLANTYHLMLRPGAERIAELGGLHRFMNWPGPILTDSGGFQVMSLAKLRKLDENGVTFQSHIDGSRHVLTPERSMQIQDLLGADIQMQFDECVKLPCTEAEARRAMELSLRWGERSKQAFARQPGRALFGIVQGGASESLRRESARALVEMEFDGYALGGLAVGEPQDVMLAMIDCTAPQLPSPKPRYLMGVGSPDDLIESVARGIDMFDCVMPTRAGRHGLAYTRAGKLNLRNARHAGDPAPVDANSPNEATRTYSRAYLHHLVKSGEILGMMLLTEINLAYYQELMAGMRAAIAAGCFDAFRAETKESWRGGMIAGEEF

SEQ ID NO: 57568 - protein, 378 aa, Methylocella silvestris
  REGION 1..378: note = tr|A0A2J7TLL9|A0A2J7TLL9_METSI Queuine tRNA-ribosyltransferase OS=Methylocella silvestris; OX = 199596 GN=tgt PE=3 SV=1
MSGEFAFRIFSVDGAARTGAISTSRGTIRTPAFMPVGTAATVKAMHPEAVRALGADIVLANTYHLMLRPGAERIAELGGLHRFMNWSGPILTDSGGFQVMSLAKLRKLDENGVTFQSHIDGSRHVLTPERSMQIQDLLGADIQMQFDECVKLPCTDAEARRAMELSLRWAERSRKAFAHQPGRALFGIVQGGASQALRLESARALVGMEFDGYALGGLAVGEPQDIMLAMIECTAPQLPLSKPRYLMGVGSPDDLIESVARGVDMFDCVMPTRAGRHGLAYTRAGKLNLRNARHANDPAPVDPGSTNEATRTYSRAYLHHLVKSGEILGMMLLTEINLAYYQELMAGMRAAIAAGSFDAFRAETKESWRGGMIAGEEF

SEQ ID NO: 57569 - protein, 371 aa, unidentified
  source 1..371: note = Methylococcaceae bacterium
  REGION 1..371: note = tr|A0A257MXA7|A0A257MXA7_9GAMM Queuine tRNA-ribosyltransferase OS=Methylococcaceae bacterium NSM2-1 OX=1917482 GN=tgt PE=3 SV=1
MEFNLINTDGHARRGRLTFARGVVETPIFMPVGTYGAVKSLTPEDLAGVGAQIILGNTFHLMLRPTTPVIKAHGDLHDFMRWDKPILTDSGGFQVFSLGALRKITEKGVTFKSPINGSSIFMGPEESMQVQRDLGSDIVMIFDECTPYPATVYEAADSMRLSLRWAERSKTAHGDNPSALFGIVQGGMYEHLRQESIDGLLDIGFDGYAIGGLSVGEPKDEMMATLDVIHSKMPVDKPRYLMGVGTPEDLVEAVRRGIDMFDCVMPTRNARNGHLFTRFGVIKIRNSQYEFDNKPLDESCGCYTCLNYSRAYLRHLDKCKEMLGSRLNTLHNLHYYLSLMQNLRDAIEKQELDVFVRQFYQQRGKAVPSMA

SEQ ID NO: 57570 - protein, 370 aa, unidentified
  source 1..370: note = Methylococcaceae bacterium
  REGION 1..370: note = tr|A0A1Z9UER1|A0A1Z9UER1_9GAMM Queuine tRNA-ribosyltransferase OS=Methylococcaceae bacterium TMED282 OX=1986758 GN=tgt PE=3 SV=1
  VARIANT 9: note = Xaa can be any naturally occurring amino acid
  VARIANT 13: note = Xaa can be any naturally occurring amino acid
  VARIANT 21: note = Xaa can be any naturally occurring amino acid
  VARIANT 27: note = Xaa can be any naturally occurring amino acid
  VARIANT 45: note = Xaa can be any naturally occurring amino acid
  VARIANT 50..51: note = Xaa can be any naturally occurring amino acid
  VARIANT 61: note = Xaa can be any naturally occurring amino acid
  VARIANT 99: note = Xaa can be any naturally occurring amino acid
  VARIANT 105: note = Xaa can be any naturally occurring amino acid
  VARIANT 130: note = Xaa can be any naturally occurring amino acid
  VARIANT 139..140: note = Xaa can be any naturally occurring amino acid
  VARIANT 187: note = Xaa can be any naturally occurring amino acid
  VARIANT 250: note = Xaa can be any naturally occurring amino acid
  VARIANT 252: note = Xaa can be any naturally occurring amino acid
  VARIANT 293: note = Xaa can be any naturally occurring amino acid
  VARIANT 296: note = Xaa can be any naturally occurring amino acid
  VARIANT 304: note = Xaa can be any naturally occurring amino acid
  VARIANT 359: note = Xaa can be any naturally occurring amino acid
MGANFSLIXTDKXARAGLLSXSHGVIXTPVFMPVGTYGTVKAMTXEELVXXGAQIVLGNTXHLMLRPGEKVIRNHGGLHDFMSWRKPILTDSGGYQVFXLGDLRXISEEGVTFRSPINGDKIFLSPERSXEVQKWLNSXXAMVFDECTPYPANEEMARISMEMSLRWAKRSKQAHEGSSNALFGIVXGGMHENLRSESAEKLRRLDFDGYAIGGLSVGEPKGDMLRIMTHTAALLPADKPRYLMGVGTPXDXLNAIGQGVDMFDCVLPTRNARNGHLYTSQGIVRIRNAEHRXSLXPLDESCAXSTCQNYSRAYLHHLQRSNEILGARLNTLHNLHFYQSLMSAAREAIQEDKFEIFKXSFLQKYKDSKQ

SEQ ID NO: 57571 - protein, 371 aa, unidentified
  source 1..371: note = Methylococcales bacterium
  REGION 1..371: note = tr|A0A418RG65|A0A418RG65_9GAMM Queuine tRNA-ribosyltransferase OS=Methylococcales bacterium; OX = 2304002 GN=tgt PE=3 SV=1
MEFNLLNTDGHARRGRLNFERGVVETPIFMPVGTYGAVKSLTPEDLIGVGAQIILGNTFHLMLRPTTAVIKAHGDLHDFMHWQKPILTDSGGFQVFSLGALRKITEKGVTFKSPLNGSAIFMGPEESMQVQRDLGSDIVMIFDECTPYPATVDEAAISMRLSLRWAQRSKDAHDDNPAALFGIVQGGMYEHLRKESIDGLLDIGFDGYAIGGLSVGEPKEEMMETLDVIHNKMPVDKPRYLMGVGTPEDLVEAVRRGIDMFDCVMPTRNARNGHLFTTFGVVKIRNSQYEFDNQPLDSDCACYTCQNYSRAYLRHLDRCKEMLGSRLNTIHNLYYYLSLMQGLRDAIEKQELDVFVKQFYHLRGKAMPSMA

SEQ ID NO: 57572 - protein, 371 aa, unidentified
  source 1..371: note = Methylococcales bacterium
  REGION 1..371: note = tr|A0A3A2J2Y7|A0A3A2J2Y7_9GAMM Queuine tRNA-ribosyltransferase OS=Methylococcales bacterium; OX = 2304002 GN=tgt PE=3 SV=1
MEFNLLNTDGHARRGRLNFARGVVETPIFMPVGTYGAVKSLTPEDLIGVGAQIILGNTFHLMLRPTTAVINAHGDLHDFMHWQKPILTDSGGFQVFSLGALRKITEQGVTFKSPLNGSAIFMGPEESMQVQRELGSDIVMIFDECTPYPATVEEADISMRLSLRWAQRSKDAHGDNPSALFGIVQGGMYEHLRKESIDGLLDIGFDGYAIGGLSVGEPKEEMMATLDVIHNKMPVDKPRYLMGVGTPEDLVEAVRRGIDMFDCVMPTRNARNGHLFTTFGVVKIRNSQYEFDSQSLDPDCACYTCQNYSRAYLRHLDKCKEMLGSRLNTIHNLYYYLSLMQGLRDAIEKQELDVFVRQFYQQRGKAMPSMA

SEQ ID NO: 57573 - protein, 370 aa, Methylococcus capsulatus
  REGION 1..370: note = tr|Q60B05|Q60B05_METCA Queuine tRNA-ribosyltransferase OS=Methylococcus capsulatus (strain ATCC 33009 / NCIMB 11132 / Bath) OX=243233 GN=tgt; PE = 3 SV=1
MEFAVKCCDGPARRGELSFPRGRVQTPAFMPVGTYGTVKAMTPEELRDSGAEIILGNTFHLMLRPGVDIIRAHGDLHGFMHWDGPILTDSGGFQVFSLGAMRKIGEQGVLFRSPIDGSPVFMGPEESMAVQRALGSDIVMVFDECTPYPAEYGEARASMELSLRWAERSKAAHADNPSALFGIVQGGMYEDLRARSIAGLQEIGFDGYAIGGLSVGEPKEDRHRVLEALMPQMPAERPRYLMGVGTPEDIVDAVTRGIDMFDCVLPTRNARNGHLFTRFGAVRIRNARYRDDLRPIDEECGCYTCRHYSRAYLRHLDRCGEILGARLNTIHNLFYYQELMAGLRAAIEEGTLERFVDRFHVLRSTGNAFM

SEQ ID NO: 57574 - protein, 371 aa, Methylococcus sp.
  REGION 1..371: note = tr|A0A3N9V7Q8|A0A3N9V7Q8_9GAMM Queuine tRNA-ribosyltransferase OS=Methylococcus sp. OX=39769; GN = tgt PE=3 SV=1
MQFRVFNADGRARRGEMAFPRGTLQTPAFMPVGTYGTVKAMTPEELRETGAEIILGNTFHLMLRPGTDIICRHGELHDFMHWDGPILTDSGGFQVFSLGDMRKITEAGVHFQSPVNGDRVFLGPEESMAVQRALGSDIVMIFDECTPYPATWQEARDSMRLSLRWAERSRAAHGDSAAALFAIVQGGVHEDLRAESARALQAIGFDGYAIGGLSVGEPKEDRARVLDAVVPGLPADKPRYLMGVGTPEDIVEAVRAGIDMFDCVMPTRNARNAHIFTRHGTLRLRNSGYQDDIRPLDENCRCYTCRHYSRAYLRHLDKCGEILGARLNTIHNLHYYQELMTGLRGAIAAGNIEGFVSEFYRLREGSPVFVA

SEQ ID NO: 57575 - protein, 371 aa, Methylococcus sp.
  REGION 1..371: note = tr|A0A432RNG7|A0A432RNG7_9GAMM Queuine tRNA-ribosyltransferase OS=Methylococcus sp. OX=39769; GN = tgt PE=3 SV=1
MQFSIKQTDGRARIGQMIFPRGTVNTPAFMPVGTYGTVKAMTPEELVASGTEIVLGNTFHLLLRPGTEIIRKHGGLHGFMQWNGPILTDSGGFQVFSLGKIRTITEQGVEFRSPINGSPVFMGPEESMKIQRDLGSDIVMIFDECTPYPATIEQARSSMELSLRWARRSKAAHGDNPNALFGIVQGGMYEDLRRESLDNLTSTGFDGYAIGGLSVGEPKEEMHRIINDLIPRMPADQPRYLMGVGTPEDLVEGVRRGIDMFDCVMPTRNARNGFLFVSNGILKIRNSQFADDTRPPDESCSCYTCQNFSRAYLRHLDKCGEMLGPRLNTIHNLHHYQKLMTDLRQAIHSQTLDSFVQSFYRQRRKTTPFMS

SEQ ID NO: 57576 - protein, 374 aa, unidentified
  source 1..374: note = Methylocystaceae bacterium
  REGION 1..374: note = tr|A0A5C9DBM0|A0A5C9DBM0_9RHIZ Queuine tRNA-ribosyltransferase OS=Methylocystaceae bacterium; OX = 2052174 GN=tgt PE=3 SV=1
MTQAFSFSVLATDGLARQGEIHTPRGIIRTPAFMPVGTAATVKAMFVEDVHAAGADILLGNVYHLMLRPGAERIARLGGLHEFMRWPYPILTDSGGFQVMSLAKLRKLDESGVTFQSHIDGSRHHLSPERSMEIQDLLGSDIQMQLDECVRLPCSESEAERAMRLSLRWAERSRKAFCERPGRAVFGIVQGGESKRLRIESAQALAGMDFHGIAVGGLAVGEPQDVMLDMLETTAPHLPESKPRYLMGVGAPDDIVQAVARGIDMFDCVMPTRAGRHGLAYTRHGRVTLRNARHADDPRPLDAQSSCPAARDYSRAYLHHLVKAGEILGMMLLTQANVAYYQELMAGLRAAIGAGRLADFIAETRANWIEGESA

SEQ ID NO: 57577 - protein, 371 aa, unidentified
  source 1..371: note = Methylocystaceae bacterium
  REGION 1..371: note = tr|A0A4P5SXG5|A0A4P5SXG5_9RHIZ Queuine tRNA-ribosyltransferase OS=Methylocystaceae bacterium; OX = 2052174 GN=tgt PE=3 SV=1
MSLKFTVQSTDKNARTGIITTSRGVIKTPVFMPVGTAATVKAMVLDDVRLAGADIILGNVYHLMLRPGAERIARLGGLHKFMNWPYPILTDSGGFQVMSLSKLRKLSEEGVVFQSHIDGSKHLLSPERSLEIQDLLGSDIQMQFDECIKLPCSDDEASRAMNLSLRWAARSREAFHNVDGRGIFGIVQGGSNKELRHQSAKFLAEMDFDGLAVGGLAVGEPQQIMLEMLESTLPHLPTNKPHYLMGVGTPDDIIKAVCRGIDMFDCVMPTRAGRHGLAYTRYGAINIRNAKYADDPRPLDPQSACVATNGYSRAYLHHLVRSHEILGMMLLTQSNIAYYLNLMQGIRDAITNKSFEEFALKTTEDWKTGDI

SEQ ID NO: 57578 - protein, 376 aa, unidentified
  source 1..376: note = Methylocystis bryophila
  REGION 1..376: note = tr|A0A1W6MSQ0|A0A1W6MSQ0_9RHIZ Queuine tRNA-ribosyltransferase OS=Methylocystis bryophila; OX = 655015 GN=tgt PE=3 SV=1
MTGRFAFEIDSGDGDARSGRIFTARGVVRTPAFMPVGTAATVKAMFPQDVRDAGADIVLGNVYHLMLRPGAERIASLGGLHEFMRWPGPILTDSGGFQVMSLSKLRKLDERGVAFQSHIDGSKHLLTPERSMEIQALLGSDIQMQLDECVPLPCTDAEAERAMRLSLRWAERSRKSFAEAPGRAIFGIVQGGAVKPLRIESAKALSSMDFHGLAIGGLAVGEPQDVMIDMIRTVMPHLPEHKPHYLMGVGTPDDIVEAVMRGVDMFDCVMPTRAGRHGLAYTRFGKVNLMNARHADDRAPLDPQSSCAAARDYSRAYLHHLFKAREILGMMLLTQVNIAYYQELMAGLREAIAMRRLADFVAEIKEGWARGLEASV

SEQ ID NO: 57579 - protein, 376 aa, Methylocystis heyeri
  REGION 1..376: note = tr|A0A4S4MGL8|A0A4S4MGL8_9RHIZ Queuine tRNA-ribosyltransferase OS=Methylocystis heyeri OX=391905; GN = tgt PE=3 SV=1
MTQGFSFEVQATDGAARKGEITTPRGVIRTPAFMPVGTAATVKAMFVEDVRAAGADILLGNVYHLMLRPGAERIARLGGLHHFMRWPYPILTDSGGFQVMSLAKLRKLNEDGVTFQSHIDGSKHVLTPERSMEIQALLGSDIQMQFDECVRLPCSDAEAERAMRLSLRWAERSRKAFDSARGQAVFGIVQGGAVKSLRIESARALSEMDFHGLAIGGLAVGEPQEVMLEMLETVMPYLPANKPHYLMGVGTPDDIVKAVARGVDMFDCVMPTRAGRHGLAYTRFGKINLMNARHAEDSSPLDPESSCPAARNYSRAYLHHLFKAGEILGMMLLTQINVAYYQELMAGLRAAIEAKRLADFIIQTSEAWARGSQSGD

SEQ ID NO: 57580 - protein, 375 aa, Methylocystis hirsuta
  REGION 1..375: note = tr|A0A3M9XTM4|A0A3M9XTM4_9RHIZ Queuine tRNA-ribosyltransferase OS=Methylocystis hirsuta OX=369798; GN = tgt PE=3 SV=1
MTQAFSFSVLATDGLARQGEIQTPRGIIRTPVFMPVGTAATVKAMFAEDVRAAGADILLGNVYHLMLRPGAERIARLGGLHEFMRWPYPILTDSGGFQVMSLAKLRKLDESGVTFQSHIDGSRHHLSPERSMEIQDLLGSDIQMQLDECVRLPCSESEAERAMRLSLRWAERSRKAFRERPGRAVFGIVQGGESKRLRIESAKALAGMEFHGIAVGGLAVGEPQDVMLDMLETTAPHLPESKPRYLMGVGAPDDIVQAVARGIDMFDCVMPTRAGRHGLAYTRHGRVTLRNARHADDPRPLDEQSSCPAARDYSRAYLHHLVKAGEILGMMLLTQANVAYYQELMAGLRAAIGAGRLADFIAETRAKWIEGESAS

SEQ ID NO: 57581 - protein, 374 aa, Methylocystis rosea
  REGION 1..374: note = tr|A0A3G8M6G7|A0A3G8M6G7_9RHIZ Queuine tRNA-ribosyltransferase OS=Methylocystis rosea OX=173366; GN = tgt PE=3 SV=1
MTQGFSFSVLATDDLARQGEIVTPRGTIRTPAFMPVGTAATVKAMFVEDVRAAGADVLLGNVYHLMLRPGAERIARLGGLHEFMRWPYPILTDSGGFQVMSLAKLRKLDESGVTFQSHIDGSRHHLSPERSMEIQDLLGSDIQMQLDECVRLPCSESEAERAMRLSLRWAERSRKAFCERPGRAVFGIVQGGESKRLRIESAQALAGMDFHGIAVGGLAVGEPQEVMLDMLETTAPHLPESKPRYLMGVGAPDDIVEAVARGIDMFDCVMPTRAGRHGLAYTRHGRVTLRNARHADDPRPLDAQSSCPAARDYSRAYLHHLVKAGEILGMMLLTQANVAYYQELMAGLRAAIGAGRLADFIAETRANWIEGESA

SEQ ID NO: 57582 - protein, 301 aa, Methylocystis sp.
  REGION 1..301: note = tr|A0A2S5LYL6|A0A2S5LYL6_9RHIZ Queuine tRNA-ribosyltransferase (Fragment) OS=Methylocystis sp.; OX = 1911079 GN=CTY36_12445 PE=3 SV=1
IARLGGLHEFMRWPYPILTDSGGFQVMSLAKLRKLDESGVTFQSHIDGSRHHLSPERSMEIQDLLGSDIQMQLDECVRLPCSESEAERAMRLSLRWAERSRKAFCERPGRAVFGIVQGGESKRLRIESAQALAGMDFHGIAVGGLAVGEPQDVMLDMLETTAPHLPESKPRYLMGVGAPDDIVQAVARGIDMFDCVMPTRAGRHGLAYTRHGRVTLRNARHADDLRPLDERSSCPAARDYSRAYLHHLVKAGEILGMMLLTQANVAYYQELMAGLRAAIGAGRLADFIAETRANWIEGESA

SEQ ID NO: 57583 - protein, 374 aa, Methylocystis sp.
  REGION 1..374: note = tr|A0A2U1SHB8|A0A2U1SHB8_9RHIZ Queuine tRNA-ribosyltransferase OS=Methylocystis sp. MitZ-2018; OX = 2127046 GN=tgt PE=3 SV=1
MTQAFSFSVLATDYLARQGEIVTPRGTIRTPAFMPVGTAATVKAMFVEDVRAAGADVLLGNVYHLMLRPGAERIARLGGLHEFMRWPYPILTDSGGFQVMSLAKLRKLDESGVTFQSHIDGSRHHLSPERSMEIQDLLGSDIQMQLDECVRLPCSESEAERAMRLSLRWAERSRKAFCERPGRAVFGIVQGGESKRLRIESAQALAGMDFHGIAVGGLAVGEPQDVMLDMLETTAPHLPESKPRYLMGVGAPDDIVQAVARGIDMFDCVMPTRAGRHGLAYTRHGRVTLRNARHADDPRPLDAQSSCPAARDYSRAYLHHLVKAGEILGMMLLTQANVAYYQELMAGLRAAIGVGRLADFIAETRANWIEGESA

SEQ ID NO: 57584 - protein, 371 aa, unidentified
  source 1..371: note = Methyloglobulus morosus
  REGION 1..371: note = tr|V5C015|V5C015_9GAMM Queuine tRNA-ribosyltransferase OS=Methyloglobulus morosus KoM1; OX = 1116472 GN=tgt PE=3 SV=1
MEFKLTTQDGYARRGQLTLTHGTVETPVFMPVGTYGTVKALTPDDLTSLGAQIILGNTFHLMLRPGTDVIRAHQDLHGFMNWQKPILTDSGGFQVFSLGDLRKITEEGVTFKSPINGSKIFMGPEESMQVQRDLGSDIVMIFDECTPYPATVDEAASSMRLSLRWAQRSKNAHGDNPNALFGIVQGGMYEHLRAESIDGLVDIGFDGYAIGGLSVGEPKEEMMQTLDAIHKLMPADKPRYLMGVGTPEDLVESVRRGIDMFDCVMPTRNARNGHLFTTFGVVKIRNSQYEFDTNPVDECCTCYTCRNYSRAYLRHLDKCKEMLGSRLNTLHNLHYYLNLMQELRDAIENKELEFFVKRFYQQRGKVAPVVA

SEQ ID NO: 57585 - protein, 378 aa, unidentified
  source 1..378: note = Methyloligella halotolerans
  REGION 1..378: note = tr|A0A1E2S2I8|A0A1E2S2I8_9RHIZ Queuine tRNA-ribosyltransferase OS=Methyloligella halotolerans; OX = 1177755 GN=tgt PE=3 SV=1
MTKDFTFRLLARDGAARRGEIATPRGPIRTPAFMPVGTAATVKAMFPETVEATGADIILGNTYHLMLRPGAERVARLGGLHRFMHWEKPILTDSGGYQVMSLSKLRKITEEGVAFQSHIDGSRHMLTPERAVEIQCLLGSDIQMVLDECTPFPATRDEAKRSLDLSMRWAARCKTAFAEMSKPGQALFGIVQGSTYPDLRKESAGALVEIGFPGYAIGGLAVGEGHETMVEMVGITTQFLPEDKPRYLMGVGTPQDLIAAIGQGVDMFDCVMPTRSGRHGQAFTWAGRCNLRNSQYAEDETPLDAESSCPAAQYSRAYLHHLVKSGEMLGAMLLSWANIHFYQELMARARTAIEVGEFDDFSKEMGRRYGDTGPKGSE

SEQ ID NO: 57586 - protein, 368 aa, unidentified
  source 1..368: note = Methylomagnum ishizawai
  REGION 1..368: note = tr|A0A1Y6CZW4|A0A1Y6CZW4_9GAMM Queuine tRNA-ribosyltransferase OS=Methylomagnum ishizawai; OX = 1760988 GN=tgt PE=3 SV=1
MEFNISSTCGAARRGELVFPRGRVRTPAFMPVGTYGTVKAMTPEELAGLGADIILGNTFHLMLRPGTEIIRLHGDLHGFMHWQGPILTDSGGFQVFSLGAMRKIGEAGVRFRSPVDGSEVFLGPEESMAVQRELGSDIVMIFDECTPYPATYEQAAQSMRLSLRWARRSREAHGDNPAALFGIVQGGVYEELRLESVEGLQAIGFDGYAIGGLSVGEPKEDRARVLDALMPRMPQGRPRYLMGVGTPEDIVEAVRVGIDMFDCVMPTRNARNGHLFTRNGAIRIRNSPYQRDTRPLDEECGCYTCRHYSRSYLRHLDKCGEILGARLNTIHNLFYYQELMAGLRAAIEAGNLDGFVADFYARQRNGGA

SEQ ID NO: 57587 - protein, 371 aa, Methylomicrobium album
  REGION 1..371: note = tr|H8GPB1|H8GPB1_METAL Queuine tRNA-ribosyltransferase OS=Methylomicrobium album BG8; OX = 686340 GN=tgt PE=3 SV=1
MEFNLIATDGAARRGQLTFARGTVETPIFMPVGTYGAVKSLTPEDLVGIGAQIILGNTFHLMLRPGMDVIRAHGSLHEFMRWDRPILTDSGGFQVFSLGALRKITEQGVTFRSPVDGSRIFMGPEESMQVQMGLGSDIVMIFDECTPYPATVQQAADSMRLSLRWAERSKKAHGGNPSALFGIVQGGMYEHLRRESLAGLVDIGFDGYAIGGLSVGEPKEEMLAALDFIAPQMPADKPRYLMGVGTPEDLVEAVRRGVDMFDCVMPTRNARNGHLFTRFGVVKIRNSRYQADTRPLDEACGCYTCRNYSRAYLRHLDKCGEMLGSRLNTIHNLYYYLSLMREIREAIENRDFDRFAHEFYRQRGKVAPDMA

SEQ ID NO: 57588 - protein, 371 aa, Methylomicrobium alcaliphilum
  REGION 1..371: note = tr|G4SZ42|G4SZ42_META2 Queuine tRNA-ribosyltransferase OS=Methylomicrobium alcaliphilum (strain DSM 19304 / NCIMB 14124 / VKM B-2133 / 20Z); OX = 1091494 GN=tgt PE=3 SV =1
MQFDLLNTDGLARRGRLTFARGVVETPVFMPVGTYGSVKAMTPEELNDVGAQIILGNTFHLMLRPGVEVMNAHGDLHDFMHWDKPILTDSGGFQVFSLGALRKITEQGVTFKSPINGSSIFMGPEESMSVQRHLGSDIVMIFDECTPYPASVDQAADSMRLSLRWAERSKKAHGDNPSALFGIVQGGMYEHLRRESLAGLVDIGFDGYAIGGLSVGEPKEEMLAMLDAVQPMMPSDKPRYLMGVGTPEDLVEAVRRGVDMFDCVMPTRNARNGHLFTRSGVIKIRNSRYQFDTGPLDENCGCYTCRHYSRSYLRHLDKCGEMLGSRLNTIHNLYYYLQLMQELRQAIETRSLDDYVKQFYQQRGKNVPDVA

SEQ ID NO: 57589 - protein, 371 aa, Methylomicrobium buryatense
  REGION 1..371: note = tr|A0A4P9URN4|A0A4P9URN4_9GAMM Queuine tRNA-ribosyltransferase OS=Methylomicrobium buryatense; OX = 95641 GN=tgt PE=3 SV=1
MQFDLLNTDGLARRGRLTFARGVVETPVFMPVGTYGSVKAMTPEELNDVGAQIILGNTFHLMLRPGVEVMNAHGDLHDFMHWDKPILTDSGGFQVFSLGALRKITEQGVTFKSPINGSSIFMGPEESMSVQRHLGSDIVMIFDECTPYPASVDQAADSMRLSLRWAERSKKAHGENPSALFGIVQGGMYEHLRRESLAGLVDIGFDGYAIGGLSVGEPKEEMLAMLDVVQPMMPSDKPRYLMGVGTPEDLVEAVRRGVDMFDCVMPTRNARNGHLFTRSGVIKIRNSRYQFDTGPLDENCGCYTCRHYSRSYLRHLDKCGEMLGSRLNTIHNLFYYLQLMQELRQAIETRSLDDYVKQFYQQRGKNVPDVA

SEQ ID NO: 57590 - protein, 371 aa, Methylomicrobium kenyense
  REGION 1..371: note = tr|A0A543VBW5|A0A543VBW5_9GAMM Queuine tRNA-ribosyltransferase OS=Methylomicrobium kenyense; OX = 269709 GN=tgt PE=3 SV=1
MQFDLLNTDGLARRGRLTFARGVVETPIFMPVGTYGSVKAMTPEELNDVGAQIILGNTFHLMLRPGIEVMNAHGDLHDFMHWDKPILTDSGGFQVFSLGALRKITEQGVTFKSPVNGSTIFMGPEESMAVQRHLGSDIVMIFDECTPYPASVDQAADSMRLSLRWAERSKQAHGDNPSALFGIVQGGMYEHLRQESLAGLVDIGFDGYAIGGLSVGEPKTEMLAMLDVVQPMMPTDKPRYLMGVGTPEDLVEAVRRGVDMFDCVMPTRNARNGHLFTRNGVIKIRNSRYQFDTGPLDENCGCYTCRHYSRSYLRHLDKCGEMLGSRLNTIHNLFYYLQLMQELRGAIETRSLDDYVKQFYQQRGKNVPDVA

SEQ ID NO: 57591 - protein, 369 aa, unidentified
  source 1..369: note = Methylomonas denitrificans
  REGION 1..369: note = tr|A0A140E4H5|A0A140E4H5_9GAMM Queuine tRNA-ribosyltransferase OS=Methylomonas denitrificans; OX = 1538553 GN=tgt PE=3 SV=1
MEFKLKATDGHARRGQLTFARGVVETPIFMPVGTYGTVKSLTPEDLTELGAQIILGNTFHLLLRPGMDVMKAHGDLHDFMRWQKPILTDSGGFQVFSLGALRKISEQGVTFKSPVNGSKIFMGPEESMQVQRDLGSDIVMIFDECTPYPATYQEAADSMRLSLRWAERSKRAHEGNSSALFGIVQGGMYPQLREESIAGLTDIGFDGYAIGGLSVGEPKHEMLATLDAIHQKMPVDKPRYLMGVGTPEDLVEGVRRGIDMFDCVMPTRNARNGHLFTRHGVIKIRNQQYQYDTRPLDEDCSCYTCRNYSRSYLKHLDKCKEMLGSRLNTIHNLHYYLELMQGLRDAIDEQRFDTFVAEFYDLRGSREPI

SEQ ID NO: 57592 - protein, 370 aa, unidentified
  source 1..370: note = Methylomonas koyamae
  REGION 1..370: note = tr|A0A177NP75|A0A177NP75_9GAMM Queuine tRNA-ribosyltransferase OS=Methylomonas koyamae OX=702114; GN = tgt PE=3 SV=1
MQFTLKSADGFARRGQLSFARGVVETPIFMPVGTYGTVKSLTPEDLEALGAQIILGNTFHLLLRPGMEVMKAHGDLHDFMRWQKPILTDSGGFQVFSLGALRKINEQGVTFKSPVNGSKIFMGPEESMQVQRDLGSDIVMIFDECTPYPATFQEAADSMRLSLRWAERSKRAHEGNDSALFGIVQGGMYPQLREESIAGLTGIGFDGYAIGGLSVGEPKHEMLATLDAIHQKMPADKPRYLMGVGTPEDLVESVRRGIDMFDCVMPTRNARNGHLFTRHGTIKIRNQQYQFDTRPLDENCACYTCRNYSRSYLKHLDKCKEMLGSRLNTIHNLHYYLELMAGIRAAIEAGRFAQFAEEFYALRGMRPPAA

SEQ ID NO: 57593 - protein, 369 aa, unidentified
  source 1..369: note = Methylomonas koyamae
  REGION 1..369: note = tr|A0A177P044|A0A177P044_9GAMM Queuine tRNA-ribosyltransferase OS=Methylomonas koyamae OX=702114; GN = tgt PE=3 SV=1
MEFKLKTHDGQARRGQLTFARGVVETPIFMPVGTYGTVKALTPEDLEALGAQIILGNTFHLLLRPGMEVMKAHGDLHDFMRWQKPILTDSGGFQVFSLGALRKISEQGVTFKSPVNGSKIFMGPEESMQVQRDLGSDIVMIFDECTPYPATYQQAADSMRLSLRWAERSKRAHEGNDSALFGIVQGGMFPELRRESINGLTNIGFDGYAIGGLSVGEPKHEMLATLDAIMPNMPQDTPRYLMGVGTPEDLVEAVRRGVDMFDCVMPTRNARNGHLFTRYGVIKIRNQQYQFDTRPLDENCNCYTCRNYSRSYLKHLDKCKEMLGARLNTIHNLHYYLELMQGIRDAIEAGRFDEFVRAFYELRGVTMPH

SEQ ID NO: 57594 - protein, 369 aa, unidentified
  source 1..369: note = Methylomonas lenta
  REGION 1..369: note = tr|A0A177N7L2|A0A177N7L2_9GAMM Queuine tRNA-ribosyltransferase OS=Methylomonas lenta OX=980561; GN = tgt PE=3 SV=1
MEFKLKTRDGQARRGQLTFSRGVVETPIFMPVGTYGTVKSLTPEDLDELGAQIILGNTFHLMLRPGMDVMKAHGDLHDFMRWQKPILTDSGGFQVFSLGALRKISEQGVTFKSPVNGSKIFMGPEESMQVQRDLGSDIVMIFDECTPYPATFQQAADSMRLSLRWAERSKRAHEGNPSALFGIVQGGMYPELRRESINGLTNIGFDGYAIGGLSVGEPKHEMLSTLDAIMPDMPQDKPRYLMGVGTPEDLVEGVRRGVDMFDCVMPTRNARNAHLFTRHGVIKIRNNQYQFDTRPLDEDCSCYTCRNYSRSYLKHLDKCKEMLGSRLNTIHNLHYYLELMQGIRDAIEAQRLDEFVREFYDLRGVSMPD

SEQ ID NO: 57595 - protein, 369 aa, Methylomonas methanica; identical to SEQ ID NO: 57591
  REGION 1..369: note = tr|A0A4R3Y3P4|A0A4R3Y3P4_METMH Queuine tRNA-ribosyltransferase OS=Methylomonas methanica OX=421; GN = tgt PE=3 SV=1

SEQ ID NO: 57596 - protein, 369 aa, Methylomonas methanica
  REGION 1..369: note = tr|A0A177MRJ0|A0A177MRJ0_METMH Queuine tRNA-ribosyltransferase OS=Methylomonas methanica OX=421; GN = tgt PE=3 SV=1
MEFKLKATDGHARRGQLTFARGVVETPIFMPVGTYGTVKSLTPEDLNELGAQIILGNTFHLLLRPGMEVMKAHGDLHDFMRWQKPILTDSGGFQVFSLGALRKISEQGVTFKSPVNGSKIFMGPEESMQVQRDLGSDIVMIFDECTPYPATYQEAADSMRLSLRWAERSKRAHEGNSSALFGIVQGGMYPQLREESIAGLTDIGFDGYAIGGLSVGEPKHEMLATLDAIHQKMPVDKPRYLMGVGTPEDLVEGVRRGIDMFDCVMPTRNARNGHLFTRHGVIKIRNQQYQFDTRPLDEDCSCYTCRNYSRSYLKHLDKCKEMLGSRLNTIHNLHYYLELMQGLRDAIENQTFDTFVAAFYDQRDSRSPV

SEQ ID NO: 57597 - protein, 369 aa, Methylomonas sp.
  REGION 1..369: note = tr|A0A2P5MWE0|A0A2P5MWE0_METSP Queuine tRNA-ribosyltransferase OS=Methylomonas sp. OX=418 GN=tgt; PE = 3 SV=1
MEFKLSTTDDQARRGQLIFARGVVETPIFMPVGTYGTVKALTPEDLEALGAQIILGNTFHLMLRPGMDVMKAHGDLHDFMRWQKPILTDSGGFQVFSLGALRKISEQGVTFKSPVNGSKIFMGPEESMQVQRDLGSDIVMIFDECTPYPATYQQAADSMRLSLRWAERSKRAHDGNPSALFGIVQGGMYPELRRESINGLTNIGFDGYAIGGLSVGEPKHEMLATLDAIMPQMPQDKPRYLMGVGTPEDLVEAVRRGVDMFDCVMPTRNARNGHLFTRYGVIKIRNNQYQFDTRPLDENCSCYTCRNYSRAYLKHLDKCREMLGSRLNTIHNLHYYLELMQGLRDAIEAQRLHEFVSEFYALRGTNMPN

SEQ ID NO: 57598 - protein, 369 aa, Methylomonas sp.
  REGION 1..369: note = tr|A0A2P5N1W5|A0A2P5N1W5_METSP Queuine tRNA-ribosyltransferase OS=Methylomonas sp. OX=418 GN=tgt; PE = 3 SV=1
MQFKLDTTDGQARRGQLSFARGVVETPIFMPVGTYGAVKSLTPDDLNELGAQIILGNTFHLLLRPGMEVMKAHGDLHDFMRWQKPILTDSGGFQVFSLGALRKISEQGVTFKSPIDGSTIFMGPEQSMQVQRDLGSDIVMIFDECTPYPATYSQAADSMRLSLRWAERSKRAHAGNESALFGIVQGGMYADLRHESITGLTSIGFDGYAIGGLSVGEPKHEMLATLDALMPAMPVDKPRYLMGVGTPEDLVEAVRRGVDMFDCVMPTRNARNGHLFTRHGVIKIRNKQYQFDTRPLDEQCSCYTCRNYSRSYLKHLDKCQEMLGSRLNTIHNLHYYLELMQAMRDAIEAQRFDDFVREFYELRGMTMPT

SEQ ID NO: 57599 - protein, 370 aa, unidentified
  source 1..370: note = Methylomusa anaerophila
  REGION 1..370: note = tr|A0A348AP67|A0A348AP67_9FIRM Queuine tRNA-ribosyltransferase OS=Methylomusa anaerophila; OX = 1930071 GN=tgt PE=3 SV=1
MAITYELIKRCSQTGARVGKLYTPHGVFDTPIFMPVGTQATVKSMSPRELKDMGTGIILSNTYHLYLRPGHQLIAEAGGLHTFMHWDGGILTDSGGFQVFSLGPLRKITEDGVTFRSHIDGSKHFLSPEKATEVQMALGADIIMAFDECVPYPADYEYARLSTARTSRWAERCKAAHTRKDQGLFGIVQGGMHKDLRRISVSDLVSLDFPGYAIGGLSVGEPKPLMYEMLAYTVPLLPEKKPRYLMGVGTPDCLVEGVMYGIDMFDCVFPTRVARNGTVMTSRGRLVVKNAEYARDFQPIDPDCGCYTCRNFTRAYIRHLLKAEEIFGLRLTTIHNLYFLLSFMKNMRKAILEDKFLAFREEFWSHYRRQ

SEQ ID NO: 57600 - protein, 368 aa, Methylophaga aminisulfidivorans
  REGION 1..368: note = tr|F5SZX7|F5SZX7_9GAMM Queuine tRNA-ribosyltransferase OS=Methylophaga aminisulfidivorans MP OX=1026882 GN=tgt PE=3 SV=1
MKFDLLAQDGFARRGRLTFERGTIETPAFMPVGTYGSVKSMTPEEVKATGAEIILGNTFHLMLRPGTEIISAHGDLHDFMQWQGPILTDSGGFQVFSLGELRKITEQGVHFSSPVNGSKVFLGPEESMAVQRALGSDIVMIFDECTPYPADVDTAAKSMELSLRWAKRSKEAHGDNPSALFGIVQGGMHEQLRHISLDGLMEIGFDGYAIGGLSVGEPKEDMLRILDFLAPVMPQDKPHYLMGVGRPEDLVEGVMRGVDMFDCVMPTRNARNGHLFVHQGVIKIRNSRFKSDTKPLDPYCDCYTCQNYSRAYLHHLDKTGEMLGPRLNTIHNLHYYQTLMSGLRQAIENNTLTQFREEFYALRETEIV

SEQ ID NO: 57601 - protein, 369 aa, unidentified
  source 1..369: note = Methylophaga frappieri
  REGION 1..369: note = tr|I1YKQ2|I1YKQ2_METFJ Queuine tRNA-ribosyltransferase OS=Methylophaga frappieri (strain ATCC BAA-2434 / DSM 25690 / JAM7) OX=754477 GN=tgt PE=3; SV = 1
MQFEQFAQDGLARRGRLTFARGSIETPAFMPVGTYGSVKSMTPEEVRKTGAEIILGNTFHLMLRPGTEVISAHGDLHDFMQWSGPILTDSGGFQVFSLGDLRKITEQGVHFRSPISGDKVFMGPEESMAVQRALGSDIVMIFDECTPYPADEHTAAKSMQLSLRWAQRSKAAHGDNPSALFGIVQGGMHETLRTVSLQGLVEIGFDGYAIGGLSVGEPKEDMLRILQHLSDKMPVDKPRYLMGVGRPEDLIEAVRLGVDMFDCVMPTRNARNGHLFVHDGVIKIRNSRFKYDTSPLDPECDCETCQNYSRAYLHHMDKTGEILGPRLNTIHNLHYYQKLMRDIRQSIVDGQFADYRQQFYAKRGQSLPD

SEQ ID NO: 57602 - protein, 368 aa, unidentified
  source 1..368: note = Methylophaga lonarensis
  REGION 1..368: note = tr|M7PS51|M7PS51_9GAMM Queuine tRNA-ribosyltransferase OS=Methylophaga lonarensis MPL; OX = 1286106 GN=tgt PE=3 SV=1
MKFEHFSSDGFARRGRITFSRGSIETPAFMPVGTYGSVKSMTPEEVADTGAEILLGNTFHLMLRPGTDVISAHGDLHDFMRWQKPILTDSGGFQVFSLGDLRKITEQGVHFRSPVNGDKVFMGPEESMAVQRALGSDIVMIFDECTPYPADEGTAAESMRLSLRWAERSKQAHGDNQSALFGIVQGGMHEALRDESLAGLKKIGFDGYAIGGLSVGEPKEDMLRILTHLADKMPTDKPRYLMGVGRPEDLVEAVCLGVDMFDCVMPTRNARNGHLFVHEGVIKIRNSRFKDDTSALDPYCDCYTCQNYSRAYLHHLDRTGEMLGPRLNTIHNLHYYQTLMRGLREAIASGSLQAFRQQFYALRGQSVE

SEQ ID NO: 57603 - protein, 368 aa, Methylophaga muralis
  REGION 1..368: note = tr|A0A1E3GPS7|A0A1E3GPS7_9GAMM Queuine tRNA-ribosyltransferase OS=Methylophaga muralis OX=291169; GN = tgt PE=3 SV=1
MKFATSAQDGLARRGQLSFDRGTIETPAFMPVGTYGSVKAMTPEEVKATGAEIILGNTFHLMLRPGTDVIQRHGDLHDFMRWDKPILTDSGGFQVFSLGDLRKITEQGVHFRSPVSGDKVFMGPEESMAVQRALGSDIVMIFDECTPYPADEKTAAISMRLSLRWAARSKIAHGDNPSALFGIVQGGMHEALRDESLAGLTEIGFDGYAIGGLSVGEPKEDMLRILHHLSDKMPTDKPRYLMGVGRPEDLVEAVCLGVDMFDCVMPTRNARNGHLFVHEGVIKIRNSRHKTDTGPLDPYCDCYTCKNYSRAYLHHLDRTGEMLGPRLNTIHNLHYYQRLMQQLRTAIESGTLQQFRQSFYAMRQQQPQ

SEQ ID NO: 57604 - protein, 368 aa, unidentified
  source 1..368: note = Methylophaga nitratireducenticrescens
  REGION 1..368: note = tr|I1XL88|I1XL88_METNJ Queuine tRNA-ribosyltransferase OS=Methylophaga nitratireducenticrescens OX=754476 GN=tgt PE=3 SV=1
MKFATSAQDGLARRGQLSFDRGTIETPAFMPVGTYGSVKAMTPEEVKATGAEIILGNTFHLMLRPGTDIIQRHGDLHDFMRWDKPILTDSGGFQVFSLGELRKITEQGVHFRSPVSGDKVFMGPEESMAVQRALGSDIVMIFDECTPYPADEKTAAISMRLSLRWAARSKAAHGNNPSALFGIVQGGMHEALRDESLAGLTEIGFDGYAIGGLSVGEPKEDMLRILNHLSEKMPTDKPRYLMGVGRPEDLVEAVCLGVDMFDCVMPTRNARNGHLFVHEGVIKIRNSRHKTDIGPLDPYCDCYTCKNYSRAYLHHLDRTGEMLGPRLNTIHNLHYYQRLMQQLRDAIAAGNLQQFRQSFYAMRQDRAD

SEQ ID NO: 57605 - protein, 366 aa, Methylophaga sp.
  REGION 1..366: note = tr|A0A1Y5EXC4|A0A1Y5EXC4_9GAMM Queuine tRNA-ribosyltransferase OS=Methylophaga sp. 42_8_T64; OX = 1856286 GN=tgt PE=3 SV=1
MKFDVLAQDGVARRGQLTFPRGTIETPAFMPVGTYGSVKSMTPEEVTATGAEIILGNTFHLMLRPGTEIISLHGDLHDFMHWQGPILTDSGGFQVFSLGELRKITEQGVHFKSPINGSKIFLGPEESMEVQRALGSDIVMIFDECTPYPADVATAEKSMQLSLRWAQRSKDAHGDNPSALFGIVQGGMHEELRDESLAGLTEIGFDGYAIGGLSVGEPKEDMLRILDHLSTRLPQDKPHYLMGVGRPEDLVEAVNLGIDMFDCVMPTRNARNGHLFVHHGVIKIRNSRYKNDTGTLDPMCDCYTCQNYSRAYLHHLDRTGEMLGPRLNTIHNLHYYQTLMQGIRDAIEAGNLAQFTRDFYALRATN

SEQ ID NO: 57606 - protein, 368 aa, Methylophaga sp.
  REGION 1..368: note = tr|A0A2G2ELT5|A0A2G2ELT5_9GAMM Queuine tRNA-ribosyltransferase OS=Methylophaga sp. OX=2024840; GN = tgt PE=3 SV=1
MKFATSAQDGLARRGQLSFDRGTIETPAFMPVGTYGSVKAMTPEEVKATGAEIILGNTFHLMLRPGTDIIQRHGDLHDFMRWDKPILTDSGGFQVFSLGELRKITEQGVHFRSPVSGDKVFMGPEESMAVQRALGSDIVMIFDECTPYPADEKTAAISMRLSLRWAARSKAAHGDNPSALFGIVQGGMHEDLRDESLAGLTEIGFDGYAIGGLSVGEPKADMLRILNHLSEKMPTDKPRYLMGVGRPEDLVEAVCLGVDMFDCVMPTRNARNGHLFVHEGVIKIRNSRHKTDTGPLDPYCDCYTCKNYSRAYLHHLDRTGEMLGPRLNTIHNLHYYQRLMQQLRDAIAAGNLQQFRQSFYAMRQDRAD

SEQ ID NO: 57607 - protein, 368 aa, Methylophaga sulfidovorans
  REGION 1..368: note = tr|A0A1I3WQX6|A0A1I3WQX6_9GAMM Queuine tRNA-ribosyltransferase OS=Methylophaga sulfidovorans; OX = 45496 GN=tgt PE=3 SV=1
MKFDLLAQDGFARRGRLTFERGTIETPAFMPVGTYGSVKSMTPEEVKATGAEIILGNTFHLMLRPGTEIISAHGDLHDFMQWQGPILTDSGGFQVFSLGELRKITEQGVHFSSPVNGSKVFLGPEESMAVQRALGSDIVMIFDECTPYPADVDTAANSMELSLRWAKRSKEAHGDNPSALFGIVQGGMHEQLRQISLDGLMDIGFDGYAIGGLSVGEPKEDMLRILDFLAPVMPQDKPHYLMGVGRPEDLVEGVMRGVDMFDCVMPTRNARNGHLFVHQGVIKIRNSRFKTDTKPLDPYCDCYTCQNYSRAYLHHLDKTGEMLGPRLNTIHNLHYYQTLMNGLRQAIENNTLTQFRQEFYALRETEIV

SEQ ID NO: 57608 - protein, 368 aa, Methylophaga thiooxydans
  REGION 1..368: note = tr|C0N4C0|C0N4C0_9GAMM Queuine tRNA-ribosyltransferase OS=Methylophaga thiooxydans DMS010; OX = 637616 GN=tgt PE=3 SV=1
MKFDLLAQDGHARRGRLTFDRGTIETPAFMPVGTYGSVKSMTPEEVADTGAEIILGNTFHLMLRPGTEIIAAHGDLHDFMRWQGPILTDSGGFQVFSLGELRKITEEGVHFRSPVNGNKVFLGPEESMAVQRELGSDIVMIFDECTPYPADERTAAKSMALSLRWAKRSKEAHADNPSALFGIVQGGMHESLRDESLAGLTDIGFDGYAIGGLSVGEPKEDMLRILDHLATKMPTDKPHYLMGVGRPEDLVEAVMLGVDMFDCVMPTRNARNGHLFVHQGVIKIRNSRFKHDTGPLDPYCDCYTCQNYSRAYLHHLDRTGEMLGPRLNTIHNLHYYQTLMQGLRQAIENQSLAQFRKEFYALRETPIS

SEQ ID NO: 57609 - protein, 368 aa, Methylophaga thiooxydans
  REGION 1..368: note = tr|A0A0A0BMF8|A0A0A0BMF8_9GAMM Queuine tRNA-ribosyltransferase OS=Methylophaga thiooxydans; OX = 392484 GN=tgt PE=3 SV=1
MKFDLLAQDGHARRGRLTFDRGTIETPAFMPVGTYGSVKSMTPEEVADTGAEIILGNTFHLMLRPSTEIIAAHGDLHDFMRWQGPILTDSGGFQVFSLGELRKITEEGVHFRSPVNGNKVFLGPEESMAVQRELGSDIVMIFDECTPYPADERTAAKSMALSLRWAKRSKEAHADNSSALFGIVQGGMHESLRDESLAGLTDIGFDGYAIGGLSVGEPKEDMLRILDHLATKMPTDKPHYLMGVGRPEDLVEAVMLGVDMFDCVMPTRNARNGHLFVHQGVIKIRNSRFKHDTGSLDPYCDCYTCKNYSRAYLHHLDRTGEMLGPRLNTIHNLHYYQTLMQGLRQAIENQSLAQFRKEFYALRETPIS

SEQ ID NO: 57610 - protein, 368 aa, unidentified
  source 1..368: note = Methylophilaceae bacterium
  REGION 1..368: note = tr|Y0KF43|Y0KF43_9PROT Queuine tRNA-ribosyltransferase OS=Methylophilaceae bacterium 11; OX = 1101195 GN=tgt PE=3 SV=1
MQFTLHQQDGRARRGTVHLAHGDVQTPAFMPVGTYGTVKAMSPQELNEIDAHIVLGNTFHLWLRPGLEVVAAHGGLHTFMGWDKPILTDSGGFQVWSLGDLRKISEEGVKFRSPINGDSCFLTPEESMRIQKVLNSDIVMIFDECTPYPATHQEANDSMQLSLRWAKRSKQAHQGNPNALFGIIQGGMYEDLRDISLNGLVDIDFDGFAIGGLSVGEPKEDMLRILAHTAPQMPAHKPRYLMGVGTPEDLVAAVSQGVDMFDCVMPTRNARNGWLFTQYGDVKIKNAFYKQDTAPLDADCACYTCQHFTRAYLHHLHKVGEILGARLNTIHNLHYYQVLMQSMRSAIENATFEAFKLEFARKRAQLNG

SEQ ID NO: 57611 - protein, 368 aa, unidentified
  source 1..368: note = Methylophilaceae bacterium
  REGION 1..368: note = tr|A0A388PUG5|A0A388PUG5_9PROT Queuine tRNA-ribosyltransferase OS=Methylophilaceae bacterium; OX = 2030816 GN=tgt PE=3 SV=1
MQFKLIQKDGEARRGELKLQHGTVQTPVFMPVGTYGAVKSLSPQDLESIGFEIILGNTFHLWLRPGLDTISAFKGLHDFIQWHRSMLTDSGGFQVWSLGKMRKITEEGVEFKSPINGDTCFLSPEESMRIQKTLNSDIVMIFDECTPYPASHEEAKASMELSLKWAYRSKVAHATNKNALFGIIQGGMFEDLREHSLDELKKINFDGYAIGGLSVGEPKEEMRKVIDFIAPKMPEDKPRYLMGVGTPEDIIEAIAHGIDMFDCVMPTRNARNGWLFTKYGDLKLKNTQYKNDTNPIDSDCGCYTCQNYSRAYLHHLFRIGEMLGSRLNTIHNLFYYQKIIQEARLAIENGTFETFRKIFHQNRQRGIQ

SEQ ID NO: 57612 - protein, 367 aa, unidentified
  source 1..367: note = Methylophilales bacterium
  REGION 1..367: note = tr|A0A0R2VES1|A0A0R2VES1_9PROT Queuine tRNA-ribosyltransferase OS=Methylophilales bacterium BACL14 MAG-120920-bin58 OX=1655631 GN=tgt PE=3 SV=1
MKFNLLAQDGEARLGSIKTKHSTIQTPVFMPVGTYGAVKSLTPDHLHNIQFDVILGNTFHLWLRPGLEVIESHEGLHKFINWNKSILTDSGGFQVWSLGKLRKITQEGVTFQSPINGDSCFLSPEISMEIQKKLNSDIAMIFDECTPYPASFEEAKKSMQLSEDWAYRSKVTFQDSNNALFGIVQGGMHEELRDQSLKTLTNIGFDGYAIGGLSVGEPKQDMHRIVKYIAPRMPADKPRYLMGVGTPEDLINSIEHGVDMFDCVMPTRNARNGWLFTRYGDIKIKNARYRNDLSPIDPTCQCHTCQNYTRAYLHHLFKIGEMLASTLHTIHNLYFYKQMMLEIGEGIKNQSFQTYKSNFLKERKTNE

SEQ ID NO: 57613 - protein, 367 aa, unidentified
  source 1..367: note = Methylophilales bacterium
  REGION 1..367: note = tr|A0P5Q3|A0P5Q3_9PROT Queuine tRNA-ribosyltransferase OS=Methylophilales bacterium HTCC2181 OX=383631 GN=tgt PE=3 SV=1
MKFNLLAQDGEARLGLIHTNHSTIQTPVFMPVGTYGAVKSLTPDHLHSIKFDVILGNTFHLWLRPGLEVIGNHGGLHQFINWNKSILTDSGGFQVWSLGKLRKITTEGVTFQSPINGDSCFLSPEISMEIQKKLNSDIAMIFDECTPYPASFEEAKNSMQLSEEWAYRSRVTFQGSNNALFGIIQGGMHEELRDQSLKTLVDIGFDGYAIGGLSVGEPKHDMHRIVKHIAPKMPADKPRYLMGVGTPEDLINSIEQGVDMFDCVMPTRNARNGWLFTRYGDIKIKNSRYRNDLSPIDATCKCHTCQNFTRAYLHHLFKIGEMLASTLHTIHNLYFYKQMMLEIGAAIKSQTFQTYKSNFLKERKTNE

SEQ ID NO: 57614 - protein, 396 aa, unidentified
  source 1..396: note = Methylophilus medardicus
  REGION 1..396: note = tr|A0A5B8CQG0|A0A5B8CQG0_9PROT Queuine tRNA-ribosyltransferase OS=Methylophilus medardicus; OX = 2588534 GN=tgt PE=3 SV=1
MQFSLHNTDGLARRGTVSLPHGEVQTPAFMPVGTYGTVKAMSPQELQEIQAHIVLGNTFHLWLRPGLEVIAAHEGLHQFMGWQQPILTDSGGFQVWSLGDLRKITEEGVKFQSPINGDRCFLTPEESMRIQRVLNSDIVMIFDECTPYPASHDQARVSMALSLRWAQRSRDAFNVYQTHTIQETLSMQGGPAQIQQLHTDQPPSNGNALFGIIQGGMFEDLRDVSRQGLEAIGFDGYAIGGLSVGEPKEDMLRILAHTAPQMPKDKPRYLMGVGTPEDLVDAVSYGIDMFDCVMPTRNARNGWLFTQYGDVKIKNASYKTDIRPLDDECACYTCQHFSRAYLHHLHRIGEILGARLNTIHNLHYYQVLMQGMRAAIEENRFAAFKDEFAKKRAEKR

SEQ ID NO: 57615 - protein, 396 aa, Methylophilus methylotrophus
  REGION 1..396: note = tr|A0A5C7WLF7|A0A5C7WLF7_METME Queuine tRNA-ribosyltransferase OS=Methylophilus methylotrophus; OX = 17 GN=tgt PE=3 SV=1
MQFSLHNTDGLARRGTVSLPHGEVQTPAFMPVGTYGTVKAMSPQELNDIQAHIVLGNTFHLWLRPGLDVIAAHDGLHQFMGWNNPILTDSGGFQVWSLGELRKITEEGVKFQSPINGDRCFLTPEESMRIQRVLNSDIVMIFDECTPYPASHDQARRSMELSLRWAQRSRDAFNVYQTQTITHTLTMVGGPAEVNQLRSDNTPTNGNALFGIIQGGMYEDLRDISRQGLEAIGFDGYAIGGLSVGEPKEDMLRILAHTAPQMPKDKPRYLMGVGTPEDLVDAVSYGIDMFDCVMPTRNARNGWLFTQYGDVKIKNASYKTDTRPLDDECECYTCQNFSRAYLHHLHRIGEILGARLNTIHNLHYYQVLMQGMRAAIEENRFEAFKGEFARKRAEKR

SEQ ID NO: 57616 - protein, 396 aa, Methylophilus rhizosphaerae
  REGION 1..396: note = tr|A0A1G9EXZ1|A0A1G9EXZ1_9PROT Queuine tRNA-ribosyltransferase OS=Methylophilus rhizosphaerae; OX = 492660 GN=tgt PE=3 SV=1
MQFSLHNTDGLARRGTVHLPHGDVQTPAFMPVGTYGTVKAMSPQELNDIQAHIVLGNTFHLWLRPGLEVIAAHEGLHKFMGWENPILTDSGGFQVWSLGDLRKITEAGVKFKSPINGDSCFLTPEESMRIQRVLNSDIVMIFDECTPYPASHDQAQKSMELSLRWAQRSRDAFNVYQTQTIAHTLTMQGGPEEVGQLRSGNAPTNGNALFGIIQGGMYEDLRDISRLGLETIGFDGYAIGGLSVGEPKEDMLRILAHTAPQMPKDKPRYLMGVGTPEDLVDAVSYGIDMFDCVMPTRNARNGWLFTQYGDVKIKNASYKTDTRPLDDECVCYTCQNFSRAYLHHLHRIGEILSARLNTIHNLHYYQVLMQGIRAAIEENRFEAFKVEFARKRAEKR

SEQ ID NO: 57617 - protein, 396 aa, Methylophilus sp.
  REGION 1..396: note = tr|A0A2S5N3X8|A0A2S5N3X8_9PROT Queuine tRNA-ribosyltransferase OS=Methylophilus sp. OX=29541; GN = tgt PE=3 SV=1
MQFSLHNTDGLARRGTVSLPHGEVQTPAFMPVGTYGTVKAMSPQELNDIQAHIVLGNTFHLWLRPGLDVIAAHDGLHQFMGWNNPILTDSGGFQVWSLGELRKITEEGVKFQSPINGDRCFLTPEESMRIQRVLNSDIVMIFDECTPYPASHDQARRSMELSLRWAQRSRDAFNVYQTQTITHTLTMVGGPAEVNQLRSDNRPTNGNALFGIIQGGMYEDLRDISRQGLEAIGFDGYAIGGLSVGEPKEDMLRILAHTAPQMPKDKPRYLMGVGTPEDLVDAVSYGIDMFDCVMPTRNARNGWLFTQYGDVKIKNASYKTDTRPLDDECECYTCQNFSRAYLHHLHRIGEILGARLNTIHNLHYYQVLMQGMRAAIEENRFEAFKAEFARKRAEKR

SEQ ID NO: 57618 - protein, 407 aa, Methylophilus sp.
  REGION 1..407: note = tr|A0A0Q6BN41|A0A0Q6BN41_9PROT Queuine tRNA-ribosyltransferase OS=Methylophilus sp. Leaf416; OX = 1736373 GN=tgt PE=3 SV=1
MQFSLHNTDDLARRGTVYLPHGEVQTPAFMPVGTYGTVKAMSPLELNEIQAHIVLGNTFHLWLRPGLEVVAAHEGLHKFMGWNKPILTDSGGFQVWSLGELRKISEAGVKFKSPINGDSCFLTPEESMRIQRVLNSDIVMIFDECTPYPATHHEARQSMELSLRWAQRSRDAFNVYQNQTIPQAMALQGGEDELRQLVQHSEQANDNGNAVTTSQEKNALFGIIQGGMFEDLRDISRQGLEKIGFDGYAIGGLSVGEPKEDMLRILAHTAPQMPKYKPRYLMGVGTPEDLVDAVSYGIDMFDCVMPTRNARNGWLFTQYGDVKIKNATYKTDTRPLDEECECYTCRNFSRSYLHHLYRIGEILGARLNTIHNLHYYQFLMQGMRAAIEENRFETFKLEFAKKRAEKR

SEQ ID NO: 57619 - protein, 374 aa, Methylopila sp.
  REGION 1..374: note = tr|A0A2H6BFI3|A0A2H6BFI3_9RHIZ Queuine tRNA-ribosyltransferase OS=Methylopila sp. Yamaguchi; OX = 1437817 GN=tgt PE=3 SV=1
MNLIPFTVSATDGAARTGALVFPRGTIRTPAFMPVGTAATVKAMYADQVRDTGADVVLGNVYHLMLRPGAERVAALGGLHKFMGWSGPILTDSGGFQVMSLSALRKLDPDGVTFRSHIDGSQHRLTPERSIEIQRLLGADVSMQFDECVRLPATPEEVERAMRLSIAWGERSKAAFGAPEGRALFGIVQGGDVAELRRQSARALVGIGFDGYAIGGLAVGEPQATMLAMLEETTPELPADRPRYLMGVGSPDDLLKSVARGVDMFDCVMPTRAGRHGLAYTRFGRINLKNARHADDPRPLDPESDCPAARDYSRAYLHHLVKAGEILGMMLLTWANVAYYQRLMAGARAAIAEGRFADYALETSKGWADGDRGS

SEQ ID NO: 57620 - protein, 369 aa, unidentified
  source 1..369: note = Methyloprofundus sedimenti
  REGION 1..369: note = tr|A0A1V8M3H9|A0A1V8M3H9_9GAMM Queuine tRNA-ribosyltransferase OS=Methyloprofundus sedimenti; OX = 1420851 GN=tgt PE=3 SV=1
MQFDLLNNDGQARRGRLTFDRGVVETPIFMPVGTYGSVKSLTPHELTDIGAQIILGNTFHLMLRPTTDVIKAHGDLHDFMNWQGPILTDSGGFQVFSLGELRKITEAGVTFKSPIDGSKIFMGPEESMQVQRELGSDIVMIFDECTPYPATVQEAADSMRLSLRWAERSKKAHADNPSALFGIVQGGMYEHLRHESIAGLVDIGFDGYAIGGLSVGEPKDEMMATLDVVHPQLPVDKPRYLMGVGTPEDLIEAVRRGIDMFDCVMPTRNARNGHIFTTTGVIKIRNSQYQFDTRPLDENCACYTCQNFSRSYLRHLDKCHEILGARLNTIHNLYYYLNLMQEVREAIENKVFTQYVSLFYTQRGKVVPE

SEQ ID NO: 57621 - protein, 383 aa, unidentified
  source 1..383: note = Methylorubrum extorquens
  REGION 1..383: note = tr|H1KMJ2|H1KMJ2_METEX Queuine tRNA-ribosyltransferase OS=Methylorubrum extorquens DSM 13060 OX=882800 GN=tgt PE=3 SV=1
MTEPLDPPTDFSFTVSATDGQARTGHIAMPRGKIRTPAFMPVGTAATVKAMYPEQVRDLGADVVLGNTYHLMLRPGAERMARLGGLHRFMRWEGPILTDSGGFQVMSLSALRKIDEEGVTFRSHIDGTAHRMSPERSIEIQGLLGSDIQMQLDECVRLPAERPEIEKAMHLSLRWAERCRVAFGEQPGKALFGIVQGGDVPELRVESARALTDLGLKGYAIGGLAVGEPQAVMLAMIETVEPHLPAGKPRYLMGVGTPDDLMQSVMRGIDMFDCVMPTRAGRHGLAYTRHGRINLRNARHAEDTRPLDEASDCPAARDYSRAYLHHLVRSDEILGMMLLTWNNLAYYQALMAGMRAAIAAGRLADFVAETKDGWARAEAAAKG

SEQ ID NO: 57622 - protein, 383 aa, unidentified
  source 1..383: note = Methylorubrum extorquens
  REGION 1..383: note = tr|B7KTS3|B7KTS3_METC4 Queuine tRNA-ribosyltransferase OS=Methylorubrum extorquens (strain CM4 / NCIMB 13688) OX=440085 GN=tgt PE=3 SV=1
MTEPLDPPTDFSFTVSATDGQARTGHIAMPRGKIRTPAFMPVGTAATVKAMYPEQVRDLGADVVLGNTYHLMLRPGAERMARLGGLHRFMRWDGPILTDSGGFQVMSLSALRKIDEEGVTFRSHIDGTAHRMSPERSIEIQGLLGSDIQMQLDECVRLPAERPEIEKAMHLSLRWAERCRVAFGEQSGKAMFGIVQGGDVPELRVESARALTDLGLKGYAIGGLAVGEPQAVMLAMIETVEPHLPAGKPRYLMGVGTPDDLMQSVMRGIDMFDCVMPTRAGRHGLAYTRHGRINLRNARHAEDTRPLDEASDCPAARDYSRAYLHHLVRSDEILGMMLLTWNNLAYYQALMAGMRAAIAAGRLADFVAETKDGWARAEAAAKG

SEQ ID NO: 57623 - protein, 379 aa, unidentified
  source 1..379: note = Methylorubrum populi
  REGION 1..379: note = tr|B1ZIL4|B1ZIL4_METPB Queuine tRNA-ribosyltransferase OS=Methylorubrum populi (strain ATCC BAA-705 / NCIMB 13946 / BJ001) OX=441620 GN=tgt PE=3; SV = 1
MTDPLDFSFTVSATDGQARTGHIAMPRGNIRTPAFMPVGTAATVKAMYPEQVRDLGADVVLGNTYHLMLRPGAERMARLGGLHRFMRWDGPILTDSGGFQVMSLSALRKIDEEGVTFRSHIDGTAHRMSPERSIEIQGLLGSDIQMQLDECVRLPAERPEIEKAMHLSLRWAERCRVAFGEQPGKAMFGIVQGGDVPELRVESARALTDLGLKGYAIGGLAVGEPQAVMLAMIETVEPHLPSTKPRYLMGVGTPDDLMQSVMRGIDMFDCVMPTRAGRHGLAYTRHGRINLRNARHAEDTRPLDEASDCPAARDYSRAYLHHLVRSDEILGMMLLTWNNLAYYQALMAGMRAAIAAGRLADFVAETKDGWARAESAAKA

SEQ ID NO: 57624 - protein, 379 aa, unidentified; identical to SEQ ID NO: 57623
  source 1..379: note = Methylorubrum populi
  REGION 1..379: note = tr|A0A177J1L2|A0A177J1L2_9RHIZ Queuine tRNA-ribosyltransferase OS=Methylorubrum populi OX=223967; GN = tgt PE=3 SV=1

SEQ ID NO: 57625 - protein, 383 aa, unidentified
  source 1..383: note = Methylorubrum salsuginis
  REGION 1..383: note = tr|A0A1I4D3K2|A0A1I4D3K2_9RHIZ Queuine tRNA-ribosyltransferase OS=Methylorubrum salsuginis; OX = 414703 GN=tgt PE=3 SV=1
MTDPRSTSPDFNFAIHARDGQARTGAIAMPRGTIRTPAFMPVGTAATVKAMYPEQVRELGADVVLGNTYHLMLRPGPERMERLGGLHKFMRWDGPILTDSGGFQVMSLSALRKIDEDGVTFRSHVDGSAHRMSPERSIEIQGLLGSDIQMQLDECVRLPAERPAIEKAMHLSLRWAERCRVAFGEQPGKALFGIVQGGDVPELRVESARALTDLGLKGYAIGGLAVGEPQAVMLAMIETVEPHLPADKPRYLMGVGTPDDLMQSVLRGIDMFDCVMPTRAGRHGLAYTRHGRINLRNARHAEDVRPLDEASDCPAARDYSRAYLHHLVRSDEILGMMLLTWNNLAYYQALMAGMRAAIAEGRLVDFVGETKEGWARAEAAEKA

SEQ ID NO: 57626 - protein, 383 aa, unidentified
  source 1..383: note = Methylorubrum sp.
  REGION 1..383: note = tr|A0A4Z0E6N7|A0A4Z0E6N7_9RHIZ Queuine tRNA-ribosyltransferase OS=Methylorubrum sp. Q1 OX=2562453; GN = tgt PE=3 SV=1
MTEPLDPPTDFSFTVSATDGQARTGHIAMPRGKIRTPAFMPVGTAATVKAMYPEQVRDLGADVVLGNTYHLMLRPGAERMARLGGLHRFMRWDGPILTDSGGFQVMSLSALRKIDEAGVTFRSHIDGTAHRMSPQRSIEIQGLLGSDIQMQLDECVRLPAERLEIEKAMHLSLRWAERCRVAFGEQPGKALFGIVQGGDVPEFRVESARALTELDLKGYAIGGLAVGEPQAVMLAMIETVEPHLPAGKPRYLMGVGTPDDLMQSVMRGIDMFDCVMPTRAGRHGLAYTRHGRINLRNARHAEDTRPLDEASDCPAARDYSRAYLHHLVRSDEILGMMLLTWNNLAYYQALMAGMRAAIAAGRLADFVAETKDGWARAEAAAKA

SEQ ID NO: 57627 - protein, 383 aa, unidentified
  source 1..383: note = Methylorubrum zatmanii
  REGION 1..383: note = tr|A0A1W6RPA9|A0A1W6RPA9_9RHIZ Queuine tRNA-ribosyltransferase OS=Methylorubrum zatmanii OX=29429; GN = tgt PE=3 SV=1
MTEPLDPPTDFSFTVSATDGQARTGHIAMPRGKIRTPAFMPVGTAATVKAMYPEQVRDLGADVVLGNTYHLMLRPGAERMARLGGLHRFMRWDGPILTDSGGFQVMSLSALRKIDEEGVTFRSHIDGTAHRMSPERSIEIQGLLGSDIQMQLDECVRLPAERPEIEKAMHLSLRWAERCRVAFGEQPGKALFGIVQGGDVPELRVESARALTDLGLKGYAIGGLAVGEPQAVMLAMIETVEPHLPAGKPRYLMGVGTPDDLMQSVMRGIDMFDCVMPTRAGRHGLAYTRHGRINLRNARHAEDTRPLDEASDCPAARDYSRAYLHHLVRSDEILGMMLLTWNNLAYYQALMAGMRAAIAAGRLADFVAETKDGWARAEAAAKA

SEQ ID NO: 57628 - protein, 376 aa, Methylosinus sp.
  REGION 1..376: note = tr|A0A177PN41|A0A177PN41_9RHIZ Queuine tRNA-ribosyltransferase OS=Methylosinus sp. R-45379; OX = 980563 GN=tgt PE=3 SV=1
MTEQFEFRLLAKDGAARRGLVSTPRGEIRTPAFMPVGTAATVKAMFPQDVRATGADIVLGNVYHLMLRPGAERVAALGGLHKFMNWPHPILTDSGGFQVMSLSKLRKLNEEGVAFQSHIDGSRHMLTPERSMEIQRLLDSDIHMQFDECVRLPCTDAEAERAMRLSLRWAERSRKAFGDAKGKALFGIVQGGASPPLRIESAKALAGMDFHGLAIGGLAVGEPQDVMLAMLDIVIPHLPEEKPRYLMGVGTPDDIVQSVLRGVDMFDCVMPTRAGRHGLAYTRFGRVNLRNARHADDAAPLDEGAACASARDYSRAYLHHLVKAQEILGMMLLTEINVAYYQELMAGLREAIEQGRLADFIAETKEGWARGEAKAL

SEQ ID NO: 57629 - protein, 384 aa, Methylosinus sp.
  REGION 1..384: note = tr|A0A1A6FP53|A0A1A6FP53_9RHIZ Queuine tRNA-ribosyltransferase OS=Methylosinus sp. 3S-1; OX = 1849840 GN=tgt PE=3 SV=1
MTAGSSNASPQAFAFRVLSRDGAARRGLVSTPRGEIRTPAFMPVGTAATVKAMFPQDVRATGADIVLGNVYHLMLRPGAERVAALGGLHDFMNWPHPILTDSGGFQVMSLAKLRKLDEQGVAFQSHIDGSRHLLTPERSMEIQRLLDSDIHMQLDECVRLPCTEQEAERAMRLSLRWAERSRKAFGDQTGKAIFGIVQGGETPALRVESARALAAMDFHGLAIGGLAVGEPQEVMLAMLETVMPHLPESKPRYLMGVGTPDDIVQSVARGVDMFDCVMPTRAGRHGLAYTRFGRVNLRNARHAGDPAPLDAESPCESARIYSRAYLHHLMKAGEILGMMLLTEINVAYYQQLMAGLRGAIEAGRLADFIGATKEGWARGEGARS

SEQ ID NO: 57630 - protein, 376 aa, Methylosinus sporium
  REGION 1..376: note = tr|A0A2U1SNM3|A0A2U1SNM3_METSR Queuine tRNA-ribosyltransferase OS=Methylosinus sporium OX=428; GN = tgt PE=3 SV=1
MTEQFSFRLLAKDGAARRGLVSTPRGDIRTPAFMPVGTAATVKAMFPQDVRATGADIVLGNVYHLMLRPGAERVAALGGLHKFMNWPHPILTDSGGFQVMSLSKLRKLNEEGVAFQSHIDGSRHMLTPERSMEIQRLLDSDIHMQFDECVRLPCTDAEAERAMRLSLRWAERSRKAFGDAKGKALFGIVQGGASEPLRIESAKALAGMDFHGLAIGGLAVGEPQDVMLAMLDIVIPHLPEEKPRYLMGVGTPDDIVQSVLRGVDMFDCVMPTRAGRHGLAYTRFGRVNLRNARHADDAAPLDEGAACASARDYSRAYLHHLVKAQEILGMMLLTEINVAYYQELMAGLREAIEQGRLADFIAETKEGWARGEAKAL

SEQ ID NO: 57631 - protein, 375 aa, Methylosinus sporium
  REGION 1..375: note = tr|A0A549T1J3|A0A549T1J3_METSR Queuine tRNA-ribosyltransferase OS=Methylosinus sporium OX=428; GN = tgt PE=3 SV=1
MTEQFSFRLLAKDGAARRGLVSTPRGDIRTPAFMPVGTAATVKAMFPQDVRATGADIVLGNVYHLMLRPGAERVAALGGLHKFMNWPHPILTDSGGFQVMSLSKLRKLNEEGVAFQSHIDGSRHMLTPERSMEIQRLLDSDIHMQFDECVRLPCTDAETERAMRLSLRWAERSRKAFGDAKGKALFGIVQGGASPPLRIESAKALAGMDFHGLAIGGLAVGEPQDVMLAMLDIVIPHLPEEKPRYLMGVGTPDDIVQSVLRGVDMFDCVMPTRAGRHGLAYTRFGRVNLRNARHADDAAPLDEGAACASARDYSRAYLHHLVKAQEILGMMLLTEINVAYYQELMAGLREAIEQGRLADFIAETKEGWARGEARP

SEQ ID NO: 57632 - protein, 384 aa, Methylosinus trichosporium; identical to SEQ ID NO: 57629
  REGION 1..384: note = tr|A0A2D2CVF6|A0A2D2CVF6_METTR Queuine tRNA-ribosyltransferase OS=Methylosinus trichosporium OB3b; OX = 595536 GN=tgt PE=3 SV=1

SEQ ID NO: 57633 - protein, 396 aa, Methylotenera mobilis
  REGION 1..396: note = tr|C6WYB9|C6WYB9_METML Queuine tRNA-ribosyltransferase OS=Methylotenera mobilis (strain JLW8 / ATCC BAA-1282 / DSM 17540) OX=583345 GN=tgt PE=3; SV = 1
MQQHASASLADKYKHIMLVSRHSKYYCFSMQFTLQTQDGLARRGTLELAHGKVETPAFMPVGTYGTVKAMSPLELTEIDAHIVLGNTFHLWLRPGLEVIAAHGGLHKFMGWNKPILTDSGGFQVWSLGDLRKITEEGVKFRSPINGDSCFLTPEESMRIQRVLNSDIVMIFDECTPYPATLKEASDSMQLSLRWAKRSKQAHEGNPNALFGIIQGGMHEELRDVSREGLEQIGFDGYAIGGLSVGEPKEDMLRILAHTAPKMPQDKPRYLMGVGTPEDLVAAVSQGVDMFDCVMPTRNARNGWLFTQYGDVKIKNASYKNDTNPLDTDCSCYTCRNFTRAYLHHLHRIGEILGSRLNTIHNLHYYQQLMSGMRNAIEAGTFETFKQEFAAKRKSLS

SEQ ID NO: 57634 - protein, 229 aa, Methylotenera mobilis
  REGION 1..229: note = tr|A0A351RAQ2|A0A351RAQ2_9PROT Queuine tRNA-ribosyltransferase (Fragment) OS=Methylotenera mobilis OX=359408 GN=tgt PE=3 SV=1
MQFTLHKQDGLARRGTLELAHGKVETPAFMPVGTYGTVKAMSPLELTEIDAHIVLGNTFHLWLRPGLEVIAAHGGLHKFMGWDKPILTDSGGFQVWSLGDLRKISEEGVKFRSPINGDSCFLTPEESMKIQRVLNSDIVMIFDECTPYPATLKEADISMQLSLRWAKRSKQAHEGNPNALFGIIQGGMHEELRDISREGLEQIGFDGYAIGGLSVGEPKEDMLRILAHT

SEQ ID NO: 57635 - protein, 367 aa, Methylotenera sp.
  REGION 1..367: note = tr|A0A2S5L2M5|A0A2S5L2M5_9PROT Queuine tRNA-ribosyltransferase OS=Methylotenera sp. OX=2051956; GN = tgt PE=3 SV=1
MKFTLHKQDGLARRGTLELTHGKVETPAFMPVGTYGTVKAMSPLELTEIDAHIVLGNTFHLWLRPGLEIIAAHGGLHKFMGWDKPILTDSGGFQVWSLGDLRKITEEGVKFRSPINGDSCFLTPEESMRIQRVLNSDIVMIFDECTPYPATLKEANDSMQLSLRWAKRSKQAHEGNPNALFGIIQGGMHEELRDVSREGLEQIGFDGYAIGGLSVGEPKEDMLRILAHTAPKMPQDKPRYLMGVGTPEDLVAAVSQGVDMFDCVMPTRNARNGWLFTQYGDVKIKNASYKNDTNPLDADCNCYTCRNFTRAYLHHLHRIGEILGSRLNTIHNLHYYQQLMRGMREAIEAGTFETFKQAFAANRSRLS

SEQ ID NO: 57636 - protein, 368 aa, Methylotenera sp.
  REGION 1..368: note = tr|A0A2S5R616|A0A2S5R616_9PROT Queuine tRNA-ribosyltransferase OS=Methylotenera sp. OX=2051956; GN = tgt PE=3 SV=1
MQFTLHRTDGQARRGTVHLAHGDVQTPAFMPVGTYGTVKAMSPLELAEIDAHIVLGNTFHLWLRPGLEVVAAHGGLHKFMGWDKPILTDSGGFQVWSLGAMRKISEEGVKFKSPINGDTCFLTPEESMRIQKVLNSDIVMIFDECTPYPATHKEANDSMQLSLRWAKRSKDAHQGNPNALFGIIQGGMFEDLRDVSLAGLVDIDFDGFAIGGLSVGEPKEDMLRILAHTAPKMPQNKPRYLMGVGTPEDLVAAVSNGVDMFDCVMPTRNARNGWLFTQYGDIKIKNAFYKQDTKPLDDDCACYTCRNFTRAYLHHLHKVGEILGARLNTIHNLHYYQVLMQGMRSAIENGSFEQFKSEFSAKRARLSS

SEQ ID NO: 57637 - protein, 368 aa, Methylotenera versatilis
  REGION 1..368: note = tr|D7DM22|D7DM22_METV0 Queuine tRNA-ribosyltransferase OS=Methylotenera versatilis (strain 301) OX=666681 GN=tgt PE=3 SV=1
MQFTLHKQDGLARRGTVHLAHGDVQTPAFMPVGTYGTVKAMSPLELKEIDAHIVLGNTFHLWLRPGLEVIAAHGGLHKFMGWDGPILTDSGGFQVFSLGAMRKISEEGVKFKSPINGDTCFLTPEESMRIQKVLNSDIVMIFDECTPFPATLKEANDSMQLSLRWAKRSKDAHQGNSNALFGIIQGGMFEELRDVSLAGLTEIDFDGFAIGGLSVGEPKEDMLRILAHTAPKMPQNKPRYLMGVGTPEDLVAAVSQGIDMFDCVMPTRNARNGWLFTQYGDVKIKNTRYKTDIQPLDADCACYTCQNFSRAYLHHLHRVGEILGARLNTIHNLHYYQVLMASMRSAIEAGTFEAFKTEFAIKRTQLNT

SEQ ID NO: 57638 - protein, 371 aa, unidentified
  source 1..371: note = Methylothermaceae bacteria
  REGION 1..371: note = tr|A0A148NAN3|A0A148NAN3_9GAMM Queuine tRNA-ribosyltransferase OS=Methylothermaceae bacteria B42; OX = 1798802 GN=tgt PE=3 SV=1
MQFRLFRTDQSARRGRLEFPRGRVETPAFMPVGTYGTVKAMTTEEVRESGAEILLGNTFHLMLRPGVEIIRAHGGLHSFMHWLGPILTDSGGFQVFSLGKIRKIREEGVYFRSPINGDEIFMGPEESMAVQRGLGSDIVMIFDECTPYPAEFEQARLSMKLSLRWAERSKVAHGDNSAALFGIVQGGVYESLREQSLQGLVSIGFDGYAIGGLSVGEPKEDRYRILDALLPQMPEDKPRYLMGVGTPEDIVECVRRGVDMFDCVLPTRNARNGHLFTREGVVKIRNSRFKEDTLPLDEACECYTCRHYSRAYLHHLDRCGEILGARLNTTHNLHYYQQLMRGLREAIEAGALEDFVQQFYLQRGKQAPLMA

SEQ ID NO: 57639 - protein, 369 aa, Methyloversatilis sp.
  REGION 1..369: note = tr|A0A1B3LIT8|A0A1B3LIT8_9PROT Queuine tRNA-ribosyltransferase OS=Methyloversatilis sp. RAC08; OX = 1842540 GN=tgt PE=3 SV=1
MKFDLLARDGLARRGRLTLAHGTVDTPVFMPVGTYGTVKGMDPAELKDMGAKIVLGNTFHLWLRPGTEVIRKHGGLHRFMGWDRPILTDSGGFQVFSLDALRKISEDGVRFSSPINGDKLLLTPEESMRIQHDLNSDVVMIFDECTPYPADLEQAATSMRLSLRWAQRSRDAHDALGNANALFGIVQGGMHESLRDESLAALTGIGFDGYAIGGLSVGEPKDDMQRILAHTAPRLPENAPHYLMGVGTPEDLINAIAHGIDMFDCVMPTRNARNGWLFTRYGDIKLKNARYKDDTGPVDPSCECHTCAHYTRAYLHHLHRCNEMLGARLNTLHNLHFYQQFTREAREAIETGRYAPWSAAFLADRQRGV

SEQ ID NO: 57640 - protein, 369 aa, Methyloversatilis universalis
  REGION 1..369: note = tr|F5R7F9|F5R7F9_METUF Queuine tRNA-ribosyltransferase OS=Methyloversatilis universalis (strain ATCC BAA-1314 / JCM 13912 / FAM5) OX=1000565; GN = tgt PE=3 SV=1
MKFDLLARDGLARRGRLTLAHGTVDTPVFMPVGTYGTVKGMDPVELEDMGARIVLGNTFHLWLRPGTDIVRRHGGLHRFMGWERPILTDSGGFQVFSLGALRKISEEGVRFASPINGDRLMLTPEESMRIQHDLNSDVVMIFDECTPYPADHPTAAESMRLSLRWARRSRDAHDSLGNTNALFAIVQGGMHEDLRDESLAGLKDIGFDGYAIGGLSVGEPKEDMQRILAHTGPKLPEGAPHYLMGVGTPEDIVHAIAHGIDMFDCVMPTRNARNGWLFTRYGDLKLKNARYKDDTGPVDASCECHTCSRYTRAYLHHLHRCNEMLGARLNTLHNLHFYQQFTREAREAIEAGRYAEWSAAFLADRQRGV

SEQ ID NO: 57641 - protein, 377 aa, Methylovirgula ligni
  REGION 1..377: note = tr|A0A3D9Z208|A0A3D9Z208_9RHIZ Queuine tRNA-ribosyltransferase OS=Methylovirgula ligni OX=569860; GN = tgt PE=3 SV=1
MTELTFDIHAKDGDARTGTITLPRGRIRTPAFMPVGTAATVKAMYPQDVHALGADVVLANTYHLMLRPGAERIDALGGLHKFMNWPWPILTDSGGFQVMSLAKLRKLDESGVTFQSHIDGARHHLTPERAMEIQRLLGSDIQMQLDECVRLPAPEADVERAMRLSLRWAERCKAAFGTQPGHALFGIVQGGESPALRRASAEALVGIGFDGYALGGLAVGEPQDVMLAMIEASAAYLPAARPRYLMGVGSPDDLIESVRRGIDMFDCVMPTRAGRHGLVYSRHGRINLRNAKHADDPRPIDPESSCEAARIYSRAYLHHLVKAGEILAMMLLTTINLAYYETLMTDIRAAIAAGRYADFCAETKARWARGEGPESRA

SEQ ID NO: 57642 - protein, 379 aa, Methylovirgula sp.
  REGION 1..379: note = tr|A0A371WUL4|A0A371WUL4_9RHIZ Queuine tRNA-ribosyltransferase OS=Methylovirgula sp. 4M-Z18; OX = 2293567 GN=tgt PE=3 SV=1
MTDPLFSFSVHKTDGAARTGAISTPRGTIRTPAFMPVGTAATVKAMHPEEVRQLGADVVLGNVYHLMLRPGAERVAALGGLHTFMNWQQPILTDSGGFQVMSLAKLRKLDENGVTFQSHIDGRKFELTPERSIEIQRLLGSDIQMQLDECVKLPCSDEEAARAMRLSLRWAERSLKAFGHQPGRAIHGIVQGGAVRTLRVESAKALSDMPFHGYSIGGLAVGEPQDVMLAMIEEVMPHLPEDKQRYLMGVGTPDDLLESVARGVDMFDCVMPTRAGRHGLAYSRYGKINLLNARHADDPRPIDEESRWAATRTYSRAYLHHLMKAGEILGMMLLTSINLAYYQDLMAGARAAIAAGTYKQYVADTKAGWERGDLTPLQP

SEQ ID NO: 57643 - protein, 376 aa, unidentified
  source 1..376: note = Methylovorus glucosetrophus
  REGION 1..376: note = tr|C6X9T2|C6X9T2_METGS Queuine tRNA-ribosyltransferase OS=Methylovorus glucosetrophus (strain SIP3-4) OX=582744 GN=tgt PE=3 SV=1
MQFTLHKQDGAARRGTVSLAHGEVQTPAFMPVGTYGSVKTLSPQEVHDIGAHILLGNTFHLWLRPGLDVIEAHGGLHGFMGWDGPILTDSGGFQVWSLGDLRKISEEGVKFRSPINGDSCFLTPEESMRIQRVLNSDIVMIFDECTPYPATHEQAMTSMQLSLRWARRSKDAHAGNPNALFGIIQGGMYEDLRDISLAGLTDIEFDGYAIGGLSVGEPKEDMLRILAHTTPQMPQDKPRYLMGVGTPEDLVDAVSHGVDMFDCVMPTRNARNGWLFTQYGDIKLKNARYKLDTGPLDADCSCYTCRHFSRAYLHHLHRTGEILGARLNTLHNLHYYQQLMAGMRKAIENGTLSSFVAEFKAKRQQLKAESLATASN

SEQ ID NO: 57644 - protein, 370 aa, Methylovorus sp.
  REGION 1..370: note = tr|A0A1A9T0I9|A0A1A9T0I9_9PROT Queuine tRNA-ribosyltransferase OS=Methylovorus sp. MM2 OX=1848038; GN = tgt PE=3 SV=1
MDFTLIKQDGAARRGTVSLAHGDVQTPAFMPVGTYGSVKTLSPVEVRDIGAHILLGNTFHLWLRPGLDVIEAHGGLHQFMGWDGPILTDSGGFQVWSLGKLRKITEEGVKFRSPINGDSCFLTPEESMRIQKVLNSDIVMIFDECTPYPATHDEAKDSMRLSKRWAARSKVAHAGNPNALFGIIQGGMYEDLRDESLAGLVDIGFDGYAIGGLSVGEPKEDMLRILAHTAPKMPQDKPRYLMGVGTPEDLVAAVSRGVDMFDCVMPTRNARNGWLFTQHGDVKLKNARHRSDTSPLDADCSCYTCRNFSRAYLHHLFRTGEILGARLNTIHNLHYYQELMAGMRLAIEQGNFAGFVAEFAQKREGIKAAA

SEQ ID NO: 57645 - protein, 370 aa, unidentified
  source 1..370: note = Methylovulum psychrotolerans
  REGION 1..370: note = tr|A0A1Z4C4M7|A0A1Z4C4M7_9GAMM Queuine tRNA-ribosyltransferase OS=Methylovulum psychrotolerans; OX = 1704499 GN=tgt PE=3 SV=1
MEFNLLNTDGYARRGRLTFARGVVETPIFMPVGTYGTVKSLTPEELTGIGAQIILGNTFHLMLRPTTAVIQAHGDLHDFMRWQKPILTDSGGFQVFSLGALRKISEQGVTFQSPINGSKIFMGPEESMQVQRELGSDIVMIFDECTPYPATVDEAAASMRLSLRWAARSKAAHGDNPSALFGIVQGGMYPQLRQESINGLVDIGFDGYAIGGLSVGEPKDEMMATLDAIHTQMPSDKPRYLMGVGTPEDLVEAVQRGIDMFDCVMPTRNARNGHLFTRFGVIKIRNSQYEFDNRPLDEECPCYTCQNYSRAYLRHLDKCQEMLGPRLNTIHNLYYYLSLMQGLRDAIERQELTAFVKEFYRLREPANRPA

SEQ ID NO: 57646 - protein, 370 aa, unidentified
  source 1..370: note = Methylovulum psychrotolerans
  REGION 1..370: note = tr|A0A2S5CP01|A0A2S5CP01_9GAMM Queuine tRNA-ribosyltransferase OS=Methylovulum psychrotolerans; OX = 1704499 GN=tgt PE=3 SV=1
MEFNLLNTDGYARRGRLTFARGVVETPIFMPVGTYGTVKSLTPEELTGIGAQIILGNTFHLMLRPTTAVIQAHGDLHDFMRWQKPILTDSGGFQVFSLGALRKISEQGVTFQSPINGSKIFMGPEESMQVQRELGSDIVMIFDECTPYPATVDEAAASMRLSLRWAARSKAAHGDNPSALFGIVQGGMYPQLRQESINGLVDIGFDGYAIGGLSVGEPKDEMMATLDAIHTQMPSDKPRYLMGVGTPEDLVEAVQRGIDMFDCVMPTRNARNGHLFTRFGVIKIRNSQYEFDNRPLDEECPCYTCRNYSRAYLRHLDKCQEMLGPRLNTIHNLYYYLSLMQGLRDAIERQELTAFVKEFYRQREPANRPA

SEQ ID NO: 57647 - protein, 370 aa, Methylovulum sp.
  REGION 1..370: note = tr|A0A522DVH4|A0A522DVH4_9GAMM Queuine tRNA-ribosyltransferase OS=Methylovulum sp. OX=1916980; GN = tgt PE=3 SV=1
MKFNLLNTDGHARRGRLHFARGVVETPIFMPVGTYGAVKSLTPDDLMSIGAQIILGNTFHLMLRPSTAVIKAHGDLHDFMRWEKPILTDSGGFQVFSLGALRKISEQGVTFQSPVNGSKIFMGPEESMQVQRELGSDIVMIFDECTPYPATIDEAADSMRLSLRWAERSKKAHDDNPSALFGIVQGGMYEHLRQESIDGLVDIGFDGYAIGGLSVGEPKDEMMATLDAVHPKMPADKPRYLMGVGTPEDLVEAVSRGIDMFDCVMPTRNARNGHLFTRFGVIKIRNSQYEFDNRPLDEECACYTCRNYSRAYLRHLDKCKEMLGCRLSTIHNLYYYLSLMQGLRDAIEKRELSAFIKQFYRQREAGNASQ

SEQ ID NO: 57648 - protein, 394 aa, unidentified
  source 1..394: note = Micavibrio aeruginosavorus
  REGION 1..394: note = tr|M4VF46|M4VF46_9PROT Queuine tRNA-ribosyltransferase OS=Micavibrio aeruginosavorus EPB; OX = 349215 GN=tgt PE=3 SV=1
MLTYPNFAFDVLHRDQNGTRARIGRLVTPHGTIETPNYIFCGTKGAIKNLSPMQMREAGADIILGNTYHLMIQPGADLIERMGGLHEFNRWDGPMMTDSGGFQIFSMGHGGVADEIKGRSNNKGRGKSLLEISEEGARFKSYWDGSILNLTPEESISIQRKVGADLIYQFDECTAYHVERSYTEESMYRSHRWGERSIAEFERGHDGRQALYGIVQGGVYKDLRDISCEWTAEKPFFGTAIGGCLGGSTEEFYEITGWCVEKIHPDRPVHLLGIGAIRDIFTCVRLGIDTFDCVSPTRIARHGWALTKGGSGRMNLRNAQYREDKEPLDASLGIPASAHFSRAYIHHLLKAGELLASQLIAQHNVAVMTRLMREIRAAIKNGTLDSLEREWIED

SEQ ID NO: 57649 - protein, 412 aa, unidentified
  source 1..412: note = Micavibrio aeruginosavorus
  REGION 1..412: note = tr|A0A2W5A4U4|A0A2W5A4U4_9PROT Queuine tRNA-ribosyltransferase OS=Micavibrio aeruginosavorus; OX = 349221 GN=tgt PE=3 SV=1
MTRAKKKKLPTPVLAATFDTKIEYPNHKFEVTFKDPKSGARLGKLTTPHGTIETPNYIFCGTKASIKNLSPYQMREAKTDIILANTYHLMIQPGADLVEKMGGLHKFTGWNGPMLTDSGGFQVFSMGNGSCADEIKGRNRQQRENLLKINEEGAFFRSYLDGRKLCLNPEISMDIQRKLGADLIVQMDECTAYQVTKDYTARSMEMSMRWGDRSLHAFNAMHDGKQALYGVVQGGVYDDLRKQSADYVRSRPFFGTAIGGCLGGSDDEMYGILEVSQPHNHPDRPIHFLGIGRMKDVFRSVRYGIDTFDCVMPTRIARHGMALMKGAPNERINLLNAKYRDDPTPLDETLDLPMSRDFSKAYIHHLLKAGELLAYQILSQHNVAVINRLMRDVRAAIANGTLDQLEKEYLVD

SEQ ID NO: 57650 - protein, 402 aa, Micavibrio sp.
  REGION 1..402: note = tr|A0A2E0Q882|A0A2E0Q882_9PROT Queuine tRNA-ribosyltransferase OS=Micavibrio sp. OX=2024841; GN = tgt PE=3 SV=1
MTNLYPNHSFEILKKAPDSRARLGKIHTPHGVIETPNYIFCGTKGAIRCATPREVKEAGAQIILSNTYHMMLQPGADLVAEMGGLHKFIGWDGPMLTDSGGFQIFAMGEGTVADEIKGRRNEAKPKMLEKITEEGAIFRSYTDGTKQMLSPERAMDVQHKLGADLIMPLDECPPYHLDREYSAKSMEMSHRWELRSLEKFKELNNGTQGLYGIVQGGVYEDLRLQSAEFVSSHPFFGTAIGGSLGVTIDQIYDEVVSWCMHNVPEERPVHLLGIGMIRDIFAGVRYGIDTFDCVIPTRIARHGWALVKGEPRERINLRNAQFKNDPTPLDETQDCYYSQFSRGYLNHLIRANEALAMHILSLHNIATMTRLMREVREAIADNSLDALEMVWRGEVTKIKMAA

SEQ ID NO: 57651 - protein, 417 aa, Micavibrio sp.
  REGION 1..417: note = tr|A0A2E2WIS8|A0A2E2WIS8_9PROT Queuine tRNA-ribosyltransferase OS=Micavibrio sp. OX=2024841; GN = tgt PE=3 SV=1
MAKSSTAKSAAPKGTSGLFDSNYNPDLKYPGFGFDITHKDPNSRARVGKLKTPHGTIETPNYIFCGTKASVKNLSPIQMKEAQTDIILANTYHLMIQPGADLVQKMGGLHKFMNWNGPMLTDSGGFQVFSMGHGTCADEIKGRNINNKESLLKITEEGAFFKSYHDGKTLMLNPEVSMELQHKLGADLIMQMDECTAYQVTKDYTAKSMEMSMRWGDRSLTAFEKHHNGTQALYGIVQGGVYEDLRKISAEYVASRPFFGTAMGGCLGGSDEEMYGILDWCQNYNHPDRPIHFLGIGRLKDVITSVRYGIDTFDCVMPTRIARHGMALMKGAPNERINLLNKRYKDDPEPLDPSLDIPCSRDYSKAYIHHLFKAKEMLAYQIVSQHNVAVINKLMREVREAIKNDTLHQLEKEWLVD

SEQ ID NO: 57652 - protein, 379 aa, Microbacterium sp.; identical to SEQ ID NO: 52091
  REGION 1..379: note = tr|A0A542GXG9|A0A542GXG9_9BACI Queuine tRNA-ribosyltransferase OS=Microbacterium sp. SLBN-1; OX = 1489561 GN=tgt PE=3 SV=1

SEQ ID NO: 57653 - protein, 377 aa, Microbulbifer agarilyticus
  REGION 1..377: note = tr|A0A1Q2MA30|A0A1Q2MA30_9GAMM Queuine tRNA-ribosyltransferase OS=Microbulbifer agarilyticus; OX = 260552 GN=tgt PE=3 SV=1
MSRECFMKFELDTTDGKARRGRLHFPRGTVETPAFMPVGTYGTVKGMLPRDVEDIGAHIILGNTFHLMLRPGTEVIKAHGSLHEFMQWKGPILTDSGGFQVFSLGKMRKISEEGVSFKSPVDGSPVFVGPEESMQVQKDLGSDVVMIFDECTPYPATTDEARKSMELSLRWAKRSKDAHGDSPSALFGIVQGGMYPELRDVSLAGLTDIGFDGYAIGGLSVGEPKEEMIKVLDHLAHKMPADKPRYLMGVGKPEDLVEGVRRGVDMFDCVMPTRNARNGHLFTFEGVVKIRNAKHRHDTGPLEEGCDCYTCENFSRSYLHHLDKCGEILGSQLNTIHNLRHYQRLMQRLRDAIAAGTLEEYVASFYAGLGRPVPPLD

SEQ ID NO: 57654 - protein, 377 aa, unidentified
  source 1..377: note = Microbulbifer aggregans
  REGION 1..377: note = tr|A0A1C9W853|A0A1C9W853_9GAMM Queuine tRNA-ribosyltransferase OS=Microbulbifer aggregans; OX = 1769779 GN=tgt PE=3 SV=1
MSRECFMQFELDTSDGKARRGRLRFPRGVVETPAFMPVGTYGTVKGMLPRDVEAIGAHIILGNTFHLMLRPGTEVIEEHGDLHDFMQWQGPILTDSGGFQVFSLGKMRKITEEGVSFKSPVDGSPVFMDPEESMRVQRSLGSDIVMIFDECTPYPATPEEARKSMELSLRWADRSKKAHGDSPSALFGIVQGGMYPELRDVSLRGLTEIGFDGYAIGGLSVGEPKDEMIKVLDHLAHKMPADKPRYLMGVGKPEDIVEAVRRGVDMFDCVMPTRNARNGHLFTFEGVVKIRNAKHRHDTRPLEEDCDCYTCEHFSRSYLHHLDRCGEILGSQLNTIHNLRHYQRLMQNLRDAIAAGELETYVAAFYERLGREVPPLD

SEQ ID NO: 57655 - protein, 378 aa, Microbulbifer donghaiensis
  REGION 1..378: note = tr|A0A1M5I230|A0A1M5I230_9GAMM Queuine tRNA-ribosyltransferase OS=Microbulbifer donghaiensis; OX = 494016 GN=tgt PE=3 SV=1
MSRQCFMQFELDTTDGKARRGRLRFPRGVVETPAFMPVGTYGTVKGMLPRDVEAIGAHIILGNTFHLMLRPGTQVIEEHGDLHDFMQWSGPILTDSGGFQVFSLGDLRKITEEGVSFRSPIDGSPVFMGPEESMQVQKSLGSDIVMIFDECTPYPATTDEARKSMELSLRWAERSKKAHGDSPSALFGIVQGGMYPELRDVSLRGLTEIGFDGYAIGGLSVGEPKDEMIKVLDHLAYKMPADKPRYLMGVGKPEDIVEGVRRGVDMFDCVMPTRNARNGHLFTAEGVVKIRNARHRHDTGPLEEGCDCYTCENFSRAYLHHLDRCGEILGAQLNTIHNLRHYQRLMQGLRDAIAAGELDAFVAEFYRRLGREVPPLAA

SEQ ID NO: 57656 - protein, 378 aa, Microbulbifer marinus
  REGION 1..378: note = tr|A0A1H4A7Z7|A0A1H4A7Z7_9GAMM Queuine tRNA-ribosyltransferase OS=Microbulbifer marinus OX=658218; GN = tgt PE=3 SV=1
MSRQCFMQFELDTTDGKARRGRLRFPRGVVETPAFMPVGTYGTVKGMLPRDVEAIGAHIILGNTFHLMLRPGTEVIEEHGDLHDFMQWSGPILTDSGGFQVFSLGDLRKITEEGVSFRSPIDGSPVFMGPEESMQVQKSLGSDIVMIFDECTPYPATTDEARKSMELSLRWAERSKKAHGDSPSALFGIVQGGMYPELRDISMRGLTEIGFDGYAIGGLSVGEPKDEMIKVLDHLAHKMPADKPRYLMGVGKPEDIVEAVRRGVDMFDCVMPTRNARNGHLFTAEGVVKIRNARHRHDTGPLEEGCDCYTCENFSRAYLHHLDRCGEILGSQLNTIHNLRHYQRLMQGLRDAIAAGELETFVAEFYRRLGREVPPLEG

SEQ ID NO: 57657 - protein, 372 aa, Microbulbifer sp.
  REGION 1..372: note = tr|A0A2S1JY74|A0A2S1JY74_9GAMM Queuine tRNA-ribosyltransferase OS=Microbulbifer sp. A4B17; OX = 359370 GN=tgt PE=3 SV=1
MQFEVDTTDGKARRGRLRFPRGVVETPAFMPVGTYGTVKGMLPRDIEGIGAQIILGNTFHLMLRPGTEVVKAHGDLHDFTQWSGPILTDSGGFQVFSLGELRKITEEGVSFRSPIDGSPVFLDPEESMRVQRDLGSDIVMIFDECTPYPATTDEARKSMELSLRWAERSKKAHGDSPSALFGIVQGGMYPELRDVSLRGLTEIGFDGYAIGGLSVGEPKEEMIKVLDHLAHKMPEDKPRYLMGVGKPEDIVEAVRRGVDMFDCVMPTRNARNGHLFTFEGVVKIRNARHRHDTGPLEEECDCYTCENFSRAYLHHLDRCGEILGAQLNTIHNLRHYQRLMQKLRDAIAANELEAYVAEFYRGLGREVPVLEA

SEQ ID NO: 57658 - protein, 371 aa, Microbulbifer sp.
  REGION 1..371: note = tr|A0A0X3U3Z0|A0A0X3U3Z0_9GAMM Queuine tRNA-ribosyltransferase OS=Microbulbifer sp. ZGT114; OX = 1685377 GN=tgt PE=3 SV=1
MQFELDTSDGKARRGRLRFPRGVVETPAFMPVGTYGTVKGMLPRDVEAIGAHIILGNTFHLMLRPGTEVIEEHGDLHDFMQWQGPILTDSGGFQVFSLGKMRKITEEGVSFKSPVDGSPVFMDPEESMRVQRSLGSDIVMIFDECTPYPATPDEASKSMELSLRWAERSKNAHGDSPSALFGIVQGGMYPELRDVSLRGLTEIGFDGYAIGGLSVGEPKDEMIKVLDHLAHKMPADKPRYLMGVGKPEDIVEAVRRGVDMFDCVMPTRNARNGHLFTFEGVVKIRNAKHRHDTRPLEEDCDCYTCQHFSRSYLHHLDRCGEILGSQLNTIHNLRHYQRLMQHLRDAIAAGELETYVAAFYKRLGREVPPLG

SEQ ID NO: 57659 - protein, 378 aa, Microbulbifer thermotolerans
  REGION 1..378: note = tr|A0A1I1L805|A0A1I1L805_9GAMM Queuine tRNA-ribosyltransferase OS=Microbulbifer thermotolerans; OX = 252514 GN=tgt PE=3 SV=1
MSRQCFMQFELDTTDGKARRGRLRFPRGVVETPAFMPVGTYGTVKGMLPRDIEAIGAQIILGNTFHLMLRPGAQVVQEHGDLHDFMQWQGPILTDSGGFQVFSLGDLRKITEEGVSFRSPVDGSPVFMGPEESMQVQRALGSDIVMIFDECTPYPATPEEARKSMELSLRWAERSKRAHGDSPSALFGIVQGGMYPELRDISLRGLTDIGFDGYAIGGLSVGEPKEEMIRVLDHLAHRMPADRPRYLMGVGKPEDIVEAVRRGVDMFDCVMPTRNARNGHLFTAEGVVKIRNARHRHDTGPLEADCDCYTCKNFSRAYLHHLDRCGEMLGAQLNTIHNLRHYQRLMQGLREAIAAGALETFVIDFYRRLGRDVPPLSS

SEQ ID NO: 57660 - protein, 372 aa, Microbulbifer thermotolerans
  REGION 1..372: note = tr|A0A143HMT5|A0A143HMT5_9GAMM Queuine tRNA-ribosyltransferase OS=Microbulbifer thermotolerans; OX = 252514 GN=tgt PE=3 SV=1
MQFELDTTDGKARRGRLRFPRGVVETPAFMPVGTYGTVKGMLPRDIEAIGAQIILGNTFHLMLRPGAQVVQEHGDLHDFMQWQGPILTDSGGFQVFSLGDLRKITEEGVSFRSPVDGSPVFMGPEESMQVQRALGSDIVMIFDECTPYPATPEEARKSMELSLRWAERSKRAHGDSPSALFGIVQGGMYPELRDISLRGLTDIGFDGYAIGGLSVGEPKEEMIRVLDHLAHRMPADRPRYLMGVGKPEDIVEAVRRGVDMFDCVMPTRNARNGHLFTAEGVVKIRNARHRHDTGPLEADCDCYTCKNFSRAYLHHLDRCGEMLGAQLNTIHNLRHYQRLMQGLREAIAAGALETFVIDFYRRLGRDVPPLSS

SEQ ID NO: 57661 - protein, 378 aa, Microbulbifer yueqingensis
  REGION 1..378: note = tr|A0A1G8WUG2|A0A1G8WUG2_9GAMM Queuine tRNA-ribosyltransferase OS=Microbulbifer yueqingensis; OX = 658219 GN=tgt PE=3 SV=1
MSRQCFMEFELDTSDGKARRGRLRFPRGVVETPAFMPVGTYGTVKGMLPRDVEAIGAHIILGNTFHLMLRPGTQVIEEHGDLHDFMQWQGPILTDSGGFQVFSLGKMRKITEEGVSFKSPVDGSPVFMDPEESIRVQRSLGSDIVMIFDECTPYPATPEEARKSMELSLRWAERSKKAHGDSPSALFGIVQGGMYPELRDISLRGLTEIGFDGYAIGGLSVGEPKDEMIKVLDHLAHKMPADRPRYLMGVGKPEDIVEAVRRGVDMFDCVMPTRNARNGHLFTFEGVVKIRNAKHRHETGPLEADCDCYTCQHFSRSYLHHLDRCGEILGSQLNTIHNLRHYQRLMQQLRDAIAGGDLEGYVAKFYAGLGREVPPLEA

SEQ ID NO: 57662 - protein, 447 aa, unidentified
  source 1..447: note = Micrococcaceae bacterium
  REGION 1..447: note = tr|A0A2A9K5Z0|A0A2A9K5Z0_9MICC Queuine tRNA-ribosyltransferase OS=Micrococcaceae bacterium JKS001869 OX=1938872 GN=tgt PE=3 SV=1
MPETPAAPTPQPASGAPAHPSQFGFEVTHRLETGGADGAPLGRTGVITTPHGRIQTPAFIPVATQASVKAVLPESMADLGAQALLANAYHLYLQPGDDLLDEAGGLGAFMNWPGPTFTDSGGFQVMSLGSGFKKVIDMKGPGAPEGQGADDAVAPGKERLANVDDDGVWFKSHLTGDRHRFTPEVSVGIQHNLGADIMFAFDELTTLHNSRGYQEEALERTRRWAQRCLDEHARLTGVRASRPYQALFGVIQGAQYEDLRRKACRDLAGMRAEFPAAGELDGVASGFDGYGVGGALEKENLGTIVGWCAQELPEDKPRHLLGISEPDDLFTAVENGADTFDCVSPTRVARTGAFYTRDGRYNLPGAKYRRDFGPLDPECDCYTCAHYSRAYLRHLFKAKEMVAHTLLSIHNERFTVSLVDRIRAAMQDGTLAELKAETLGRYYAPKG

SEQ ID NO: 57663 - protein, 430 aa, unidentified; identical to SEQ ID NO: 55722
  source 1..430: note = Micrococcaceae bacterium
  REGION 1..430: note = tr|A0A358IUU7|A0A358IUU7_9MICC Queuine tRNA-ribosyltransferase OS=Micrococcaceae bacterium; OX = 1904863 GN=tgt PE=3 SV=1

SEQ ID NO: 57664 - protein, 410 aa, unidentified
  source 1..410: note = Micrococcales bacterium
  REGION 1..410: note = tr|A0A2G6JWD9|A0A2G6JWD9_9MICO Queuine tRNA-ribosyltransferase OS=Micrococcales bacterium; OX = 2026762 GN=tgt PE=3 SV=1
MSAPAGDFGFTVTSGLTGRPGRAGVIRTPHGRIRTPAFVAVGTKATVKAVLPEMLAQHGAQAVLANAYHLYLQPGADVVEEAGGLAAFMNWPGPTFTDSGGFQVLSLGAGFKKMLAMSSEQLTSDDVIAAGKDRLATVDEDGVTFKSHLDGSMHRFTPEVSMRIQHRLGADIIFAFDECTTLLNSRRYQEAAVRRTEDWAARCLAEHDLLSRQRADRPYQALFGVIQGAQYEDLRRNAARGLLELDSDRGGFDGYGIGGALEKENLGTIVGWCAQELPADKPRHLLGISEPDDIITAVANGADTFDCVSPSRVARNGAVYSPDGRFNITRAQHKRQHMPVDEHCDCYTCAHYTRAYLHHLFKANERIAATLATIHNERFVIRLVDSLREAIETGTFDTVAAGIRSRYYGT

SEQ ID NO: 57665 - protein, 406 aa, unidentified
  source 1..406: note = Micrococcales bacterium
  REGION 1..406: note = tr|A0A2E0W9T3|A0A2E0W9T3_9MICO Queuine tRNA-ribosyltransferase OS=Micrococcales bacterium; OX = 2026762 GN=tgt PE=3 SV=1
MFAFEVVDSLPGPDGLPTLGRTGTITTPHGEIKTPAFIPVGTKATLKALTPADLAASESQAVLANAYHLYLQPGSDLIDQAGGLGQFMGWDGPTFTDSGGFQVMSLGVGFKKVLAMDAKGIANDEVIAKGKDRLAHVDDDGVTFKSHLDGSMHRFTPEVSMQVQHQIGADIIFAFDECTTLMNTRAYQEQSLDRTAAWARRCILEHERLTEQRADHPYQALFGVIQGAQYEDLRRAAARDLAGLGFDGFGIGGALEKERLGEIVGWVNQELPRDKPRHLLGIGEPDDLFVAIEQGADTFDCVTPSRVARNASLFTDTGRFNITSAINRRTFEPVQDDCDCYTCTHFTRAYLHHLFKAKEMLASTLATIHNVRYIVRLVDRIRQAISDGHFYPFRDEFLGQFYSTRA

SEQ ID NO: 57666 - protein, 421 aa, unidentified
  source 1..421: note = Micrococcus aloeverae
  REGION 1..421: note = tr|A0A5F0UKK0|A0A5F0UKK0_9MICC Queuine tRNA-ribosyltransferase OS=Micrococcus aloeverae; OX = 1391911 GN=tgt PE=3 SV=1
MTHRLETPGHDGAPLGRTGVITTPHGRIQTPAFIPVATQATVKAVLPESMKDLGAQALLANAYHLYLQPGDDLLDEAGGLGAFMNWPGPTFTDSGGFQVMSLGSGFKKVIDMKGPGAPEGQGADDAVAPGKERLANVDDDGVWFKSHLTGDRHRFTPEVSVGIQHNLGADIMFAFDELTTLHNSRGYQEEALERTRRWAQRCLDEHARLTGVRAARPYQALFGVIQGAQYEDLRRKACRDLAGMRAEFPAAGELDGVTSGFDGYGVGGALEKENLGTIVGWCAQELPEDKPRHLLGISEPDDLFTAVENGADTFDCVSPTRVARTGAFYTRDGRYNLPGAKYRRDFGPLDPECDCYTCAHYSRAYLRHLFKAKEMVAHTLLSIHNERFTVSLVDRIRAAMQDGTLAELKAETLGRYYAPKG

SEQ ID NO: 57667 - protein, 447 aa, unidentified
  source 1..447: note = Micrococcus aloeverae
  REGION 1..447: note = tr|A0A5F0IB52|A0A5F0IB52_9MICC Queuine tRNA-ribosyltransferase OS=Micrococcus aloeverae; OX = 1391911 GN=tgt PE=3 SV=1
MPETPAAPTPQPASGAPAHPSQFGFEVTHRLETGGADGAPLGRTGVITTPHGRIQTPAFIPVATQATVKAVLPESMAELGAQALLANAYHLYLQPGDDLLDEAGGLGAFMNWPGPTFTDSGGFQVMSLGSGFKKVIDMKGPGAPEGQGADDAVAPGKERLANVDDDGVWFKSHLTGDRHRFTPEVSVGIQHNLGADIMFAFDELTTLHNSRGYQEEALERTRRWAQRCLDEHARLTGVRAARPYQALFGVIQGAQYEDLRRKACRDLAAMRAEFPAAGELDGVTSGFDGYGVGGALEKEILGTIVGWCAQELPEDKPRHLLGISEPDDLFTAVENGADTFDCVSPTRVARTGAFYTRDGRYNLPGAKYRRDFGPLDPECDCYTCAHYSRAYLRHLFKAKEMVAHTLLSIHNERFTVSLVDRIRAAMQDGTLAELKAETLGRYYAPKG

SEQ ID NO: 57668 - protein, 404 aa, Micrococcus endophyticus
  REGION 1..404: note = tr|A0A4Y8ZI47|A0A4Y8ZI47_9MICC Queuine tRNA-ribosyltransferase (Fragment) OS=Micrococcus endophyticus OX=455343 GN=tgt PE=3 SV=1
TGVISTPHGQIQTPAFIPVATQATVKAVLPESMAELGAQALLANAYHLYLQPGDDLLDEAGGLGAFMNWPGPTFTDSGGFQVMSLGSGFKKVIDMKGPSAPDGQGADDAVAPGKERLANVDDDGVWFKSHLTGDRHRFTPEVSVGIQHRLGADVMFAFDELTTLHNSRGYQEEALERTRRWAQRCLAEHARLTRERADRPYQALFGVIQGAQYEDLRRKACRDLAGMRTEFAGGGDVDGVSTGFDGYGVGGALEKENLGTIVGWCAQELPEDRPRHLLGISEPDDLFTAVENGADTFDCVSPTRVARTGAFYTRDGRYNLPGAKYKRDFGPLDPECDCYTCAHYSRAYIRHLFKAKEMVAHTLISIHNERFTVSLVDRIRASMQDGTFADLKAETLGRYYAPKG

SEQ ID NO: 57669 - protein, 438 aa, Micrococcus flavus
  REGION 1..438: note = tr|A0A4Y8WW58|A0A4Y8WW58_9MICC Queuine tRNA-ribosyltransferase OS=Micrococcus flavus OX=384602; GN = tgt PE=3 SV=1
MPDTPQPPAAPAHPDHFGFEVTHRLETSGHDGAGLGRTGVITTPHGTIQTPAFIPVATQATVKAVLPESMADLGAQALLANAYHLYLQPGDDLLDEAGGLGAFMNWPGPTFTDSGGFQVMSLGSGFKKVIDMQGPAAPEGAGADDAVAPGKERLANVDDDGVWFKSHLTGDRHRFTPERSLQIQHNLGADVMFAFDELTTLHNSRGYQEEALERTRRWAQRCLDEHARLTAARAHRPYQALFGVVQGAQYEDLRRKACRDLAAMDTEFAGDDAVRRGFDGYGIGGAIEKANLGTIVGWCAQELPEDRPRHLLGISEPDDLFLAVENGADTFDCVSPTRVARTGAFYTRDGRFNLPGAKYKRDFGPLDPECDCYTCAHYSRAYIRHLYKAKEMVSHTLISIHNERFTVSLVDRIRAAMQDGTYAELKAETLGRYYAPKG

SEQ ID NO: 57670 - protein, 441 aa, Micrococcus luteus
  REGION 1..441: note = tr|C5C8R3|C5C8R3_MICLC Queuine tRNA-ribosyltransferase OS=Micrococcus luteus (strain ATCC 4698 / DSM 20030 / JCM 1464 / NBRC 3333 / NCIMB 9278 / NCTC 2665 / VKM Ac-2 230) OX=465515 GN=tgt PE=3 SV=1
MPDTPQPPAVPAHPDHFGFEVTHRLETPGHDGAPLGRTGVITTPHGRIQTPAFIPVATQATVKAVLPESMAELGAQALLANAYHLYLQPGDDLLDEAGGLGAFMNWPGPTFTDSGGFQVMSLGSGFKKVIDMKGPGAPEGQGADDAVAPGKERLANVDDDGVWFKSHLTGDRHRFTPEVSVGIQHNLGADIMFAFDELTTLHNSRGYQEEALERTRRWAQRCLDEHARLTGVRAARPYQALFGVIQGAQYEDLRRKACRDLAAMRAEFPAAGELNGVASGFDGYGVGGALEKENLGTIVGWCAQELPEDKPRHLLGISEPDDLFTAVENGADTFDCVSPTRVARTGAFYTRDGRFNLPGAKYRRDFGPLDPECDCYTCAHYSRAYLRHLFKAKEMVAHTLLSIHNERFTVSLVDRIRAAMQDGTLAELKAETLGRYYAPKG

SEQ ID NO: 57671 - protein, 445 aa, Micrococcus luteus
  REGION 1..445: note = tr|A0A378NND2|A0A378NND2_MICLU Queuine tRNA-ribosyltransferase OS=Micrococcus luteus OX=1270; GN = tgt PE=3 SV=1
MPSPESPSSPSQQAPAHPSQFGFEVTHRLETGGADGAPLGRTGVITTPHGRIQTPAFIPVATQASVKAVLPESMAELGAQALLANAYHLYLQPGDDLLDEAGGLGAFMNWPGPTFTDSGGFQVMSLGSGFKKVIDMKGPGAPEGQGADDAVAPGKERLANVDDDGVWFKSHLTGDRHRFTPEVSVGIQHNLGADIMFAFDELTTLHNSRGYQEEALERTRRWAQRCLDEHARLTGVRAARPYQALFGVIQGAQYEDLRRKACRDLAAMWAEFPAAGELDGVTSGFDGYGVGGALEKENLGTIVGWCAQELPEDKPRHLLGISEPDDLFTAVENGADTFDCVSPTRVARTGAFYTRDGRFNLPGAKYRRDFGPLDPECDCYTCAHYSRAYLRHLFKAKEMVAHTLLSIHNERFTVSLVDRIRAAMQDGTLAELKAETLGRYYAPKG

SEQ ID NO: 57672 - protein, 437 aa, Micrococcus lylae
  REGION 1..437: note = tr|A0A4Y8WW93|A0A4Y8WW93_9MICC Queuine tRNA-ribosyltransferase OS=Micrococcus lylae OX=1273; GN = tgt PE=3 SV=1
MDPMPHHDAETPAPQPAHPSHFGYEVTGRLEDGPGHGRTGVITTPHGQIQTPAFIPVATQATVKAVLPESMEDLGAQALLANAYHLYLQPGDELLDEAGGLGRFMNWGGPTFTDSGGFQVMSLGSGFKKVIDMKGPSAPDGQGADDAVAPGKERLANVDDDGVWFKSHLTGDRHRFTPERSVQIQHNLGADIMFAFDELTTLHNSRGYQEEALERTRRWAQRCLDEHARLTAERADRPYQALFGVIQGAQYEDLRRKACADLSAMTTRYADGTEAGFDGYGVGGALEKENLGTIVGWCAEVLPEDRPRHLLGISEPDDLFTAVENGADTFDCVSPTRVARTGAFYTRDGRYNLPGAKYRRDWGPLDPECDCYTCAHYSRAYIRHLMKAKEMVAHTLVSIHNERFTVSLVDRIRASIGDGTFAELKTETLGRYYAGKK

SEQ ID NO: 57673 - protein, 379 aa, Micrococcus lylae; identical to SEQ ID NO: 57164
  REGION 1..379: note = tr|A0A378NZY1|A0A378NZY1_9MICC Queuine tRNA-ribosyltransferase OS=Micrococcus lylae OX=1273; GN = tgt PE=3 SV=1

SEQ ID NO: 57674 - protein, 445 aa, Micrococcus sp.
  REGION 1..445: note = tr|A0A1F1TI32|A0A1F1TI32_9MICC Queuine tRNA-ribosyltransferase OS=Micrococcus sp. HMSC30C05; OX = 1581070 GN=tgt PE=3 SV=1
MPSPESPSPPSQQAPAHPSQFGFEVTHRLETGGADGAPLGRTGVITTPHGRIQTPAFIPVATQASVKAVLPESMAELGAQALLANAYHLYLQPGDDLLDEAGGLGAFMNWPGPTFTDSGGFQVMSLGSGFKKVIDMKGPGAPEGQGADDAVAPGKERLANVDDDGVWFKSHLTGDRHRFTPEVSVGIQHNLGADIMFAFDELTTLHNSRGYQEEALERTRRWAQRCLDEHARLTGVRASRPYQALFGVIQGAQYEDLRRKACRDLAAMRAEFPAAGELDGVTSGFDGYGVGGALEKENLGTIVGWCAQELPEDKPRHLLGISEPDDLFTAVENGADTFDCVSPTRVARTGAFYTRDGRYNLPGAKYRRDFGPLDPECDCYTCAHYSRAYLRHLFKAKEMVAHTLLSIHNERFTVSLVDRIRAAMQDGTFAELKAETLGRYYAPKG

SEQ ID NO: 57675 - protein, 447 aa, Micrococcus sp.
  REGION 1..447: note = tr|A0A151CX02|A0A151CX02_9MICC Queuine tRNA-ribosyltransferase OS=Micrococcus sp. CH7 OX=1770210; GN = tgt PE=3 SV=1
MPETPAAPTPQPASGAPAHPSQFGFEVTHRLETGGADGAPLGRTGVITTPHGRIQTPAFIPVATQASVKAVLPESMAELGAQALLANAYHLYLQPGDDLLDEAGGLGAFMNWPGPTFTDSGGFQVMSLGSGFKKVIDMKGPGAPEGQGADDAVAPGKERLANVDDDGVWFKSHLTGERHRFTPEVSVGIQHNLGADIMFAFDELTTLHNSRGYQEEALERTRRWAQRCLDEHARLTGVRAARPYQALFGVIQGAQYEDLRRKACRDLAGMRAEFPAAGELDGVTSGFDGYGVGGALEKENLGTIVGWCAQELPEDKPRHLLGISEPDDLFTAVENGADTFDCVSPTRVARTGAFYTRDGRYNLPGAKYRRDFGPLDPECDCYTCAHYSRAYLRHLFKAKEMVAHTLLSIHNERFTVSLVDRIRAAMQDGTLAELKAETLGRYYAPKG

SEQ ID NO: 57676 - protein, 471 aa, Micrococcus terreus
  REGION 1..471: note = tr|A0A1I7MN64|A0A1I7MN64_9MICC Queuine tRNA-ribosyltransferase OS=Micrococcus terreus OX=574650; GN = tgt PE=3 SV=1
MPSEQPSAPTVTDQTPGSTLGEPGPAPAAASPRDFSFAVGKRLTGPDGSPRLGRTGTITTPHGQIQTPAFIPVATQATVKAVLPEAMSALGAQALLANAYHLYLQPGADLLDEAGGLGAFMNWRGPTFTDSGGFQVMSLGSGFKKVIDMSGPKAPEGQGADDAVAPGKERLANVDEDGVWFTSHLNGDRHRFTPEVSVGIQHQLGADIMFAFDELTTLHNSRGYQEEALERTRKWAQRCLDEHARLTQERAGKPYQALFGVIQGAQYEDLRRKACQDLAGMRTEFSVDQAGLPDDGQSTPSAASGTLENGFDGYGIGGALEKENLGTIVGWCCQELPEDKPKHLLGISEPDDIFTAVENGADTFDCVSPTRVARTGAFYTWDGRFNLPGAKYKRDFGPLMEGCDCYTCAHYSRAYIHHLIKAKEMVAHTLMSIHNERFTVNLVDRVRASIQDGTFYELKDEVLGRYYAAKA

SEQ ID NO: 57677 - protein, 447 aa, Micrococcus yunnanensis
  REGION 1..447: note = tr|A0A4Y8PMR7|A0A4Y8PMR7_9MICC Queuine tRNA-ribosyltransferase OS=Micrococcus yunnanensis; OX = 566027 GN=tgt PE=3 SV=1
MPETPAAPTPQPASGAPAHPSQFGFEVTHRLETGGADGAPLGRTGVITTPHGRIQTPAFIPVATQASVKAVLPESMAELGAQALLANAYHLYLQPGDDLLDEAGGLGAFMNWPGPTFTDSGGFQVMSLGSGFKKVIDMKGPGAPEGQGADDAVAPGKERLANVDDDGVWFKSHLTGDRHRFTPEVSVGIQHNLGADIMFAFDELTTLHNSRGYQEEALERTRRWAQRCLDEHARLTGVRAARPYQALFGVIQGAQYEDLRRKACRDLAAMRAEFPAAGELDGVTSGFDGYGVGGALEKENLGTIVGWCAQELPEDKPRHLLGISEPDDLFTAVENGADTFDCVSPTRVARTGAFYTRDGRYNLPGAKYRRDFGPLDPECDCYTCAHYSRAYLRHLFKAKEMVAHTLLSIHNERFTVSLVDRIRAAMQDGTFAELKAETLGRYYAPKG

SEQ ID NO: 57678 - protein, 373 aa, unidentified
  source 1..373: note = Microcoleaceae bacterium
  REGION 1..373: note = tr|A0A349JGQ1|A0A349JGQ1_9CYAN Queuine tRNA-ribosyltransferase OS=Microcoleaceae bacterium UBA11344 OX=2055792 GN=tgt PE=3 SV=1
MSEKFSFQCQANCSHTQARAGVFHTPHGVVETPKFMPVGTLANVKTLTPAHLKDAGSQMVLANTYHLHLQPGEAIVAGAGGLHKFMAWPGPILTDSGGFQVFSLSQMRTISDQGVTFRSPRDGRMINLTPERSIQIQNELGADVIMAFDECPPYPATREAVEAATDRTYRWLKRCIQAHSRPDQALFGIVQGGVFPDLRSRAANQLVDLDLPGYAIGGVSVGESGDLIAEIVKVTAPLLPANKPRYLMGIGTYREMALAVASGVDLFDCVIPTRLARHGTALVGGGRLNLKNSRFREDFSPLDESCPCYTCQNFSRAYLAHLARANEVLGYTLLAIHNVTELIRFTRRMREAIFADRFTEEFAHWLAPMVDRS

SEQ ID NO: 57679 - protein, 373 aa, unidentified
  source 1..373: note = Microcoleaceae bacterium
  REGION 1..373: note = tr|A0A3D5GA90|A0A3D5GA90_9CYAN Queuine tRNA-ribosyltransferase OS=Microcoleaceae bacterium UBA9251 OX=2055794 GN=tgt PE=3 SV=1
MSEKFSFQCQAHCSHTKARAGVFHTPHGVVETPKFMPVGTLANVKTLTPAHLKDAGSQMVLANTYHLHLQPGEAIVAGAGGLHKFMAWPGPILTDSGGFQVFSLSQMRTISDEGVTFRSPRDGRMINLTPERSIQIQNELGADVIMAFDECPPYPATRQEVEAATDRTYRWLKRCIQAHSRPDQALFGIVQGGVYPDLRSRAANQLVDLDLPGYAIGGVSVGESGDLIAEIVKVTAPLLPANKPRYLMGIGTYREMALAVASGVDMFDCVIPTRLARHGTAFVGGGRLNLKNSRFREDFSPLDESCPCYTCQNFSRAYLAHLARANEVLGYTLLAIHNVTELIRFTGRMREAIFADRFTEEFGHWLAPAVDRS

SEQ ID NO: 57680 - protein, 377 aa, Microcoleus sp.
  REGION 1..377: note = tr|K9WGR2|K9WGR2_9CYAN Queuine tRNA-ribosyltransferase OS=Microcoleus sp. PCC 7113; OX = 1173027 GN=tgt PE=3 SV=1
MEQQTIQFSFKCQASCSQTKARAGVFVTPHGLVETPKFMPVGTLATVKTLTPAQLETAGAQMVLANTYHLHLQPGEGIVNQAGGLHRFMGWKGPMLTDSGGFQVFSLSKIRTISEEGVTFRSPRDGRMINLTPERSIEIQNTLGADVIMAFDECPPYPAERSEVEAATERTYRWLKRCIDAHARPTEQALFGIVQGGVYLDLRRAAAESLVSLDLPGYAIGGVSVGEPAELIHEIVDATAPYLPVDKPRYLMGVGTYREMVRAIAAGVDLFDCVIPTRLGRHGAALVQGERWNLKNARFREDFTPLDATCPCYGCQNFTRAYLNHLVRCKEVLGFMLLSLHNVTELIRFTQHIREAILSDRFTTEFAHWLNRETGQP

SEQ ID NO: 57681 - protein, 374 aa, Microcoleus vaginatus
  REGION 1..374: note = tr|F5ULP6|F5ULP6_9CYAN Queuine tRNA-ribosyltransferase OS=Microcoleus vaginatus FGP-2; OX = 756067 GN=tgt PE=3 SV=1
MTEDNARFSFKCQANCSHTQARAGVFTTPHGVVETPKFMPVGTLANVKTLTPAHLEAAGSQMVLANTYHLHLQPGEAIVAGAGGLHKFMAWPGPMLTDSGGFQVFSLSQMRTISENGVTFRSPRDGRMINLTPERSIEIQNELGADVIMAFDECPPYPATREEVEAATNRTYRWLQRCIQAHSRPDQALFGIVQGGVFPDLRSRAANQLVDLDLPGYAIGGVSVGESGDLIAEIVKVTAPLLPANKPRYLMGIGTYREMALAVASGVDMFDCVIPTRLARHGTAFVGGERWNLKNARFREDFAPLDESCPCYTCQKFSRAYLAHLARANEVLGYTLLAIHNVTELIRFTGRMREAIFADRFTEEFAHWLAPRVD

SEQ ID NO: 57682 - protein, 374 aa, Microcystis aeruginosa
  REGION 1..374: note = tr|A0A552D7V8|A0A552D7V8_MICAE Queuine tRNA-ribosyltransferase OS=Microcystis aeruginosa Ma_QC_B_20070730_S2 OX=2486256 GN=tgt PE=3 SV=1
MGFSFELIAQCPQTGARVGVWHTPHGLVETPRFMPVGTLATVKGLTPAQIASTGAQMILANTYHLHLQPGESIIEKAGGLHDFMAWNQPILTDSGGFQVFSLSQLRQIKESGVTFRSPRDGRIIEITPEKSIQIQNALGADVIMAFDECPPTGVSHETMKASIERTYRWLERCLTAHQRPQEQALFAIVQGGIYEDLRAAAAQSLVKLDLPGYAIGGVSVGEETSLIHRIVQITAPLLPENKPRYLMGVGTYREMAKAIASGIDLFDCVIPTRFGRHGTALVRGERWNLKNARFKEDFAPLDETCPCYTCQHFSRAYLNHLIKSGEMLGYILLSLHNIAELIRFTREIRQSILGGTFAQDFAPWLEDAVDVTPT

SEQ ID NO: 57683 - protein, 374 aa, Microcystis aeruginosa
  REGION 1..374: note = tr|A0A5J5LTY3|A0A5J5LTY3_MICAE tRNA guanosine(34) transglycosylase Tgt OS=Microcystis aeruginosa EAWAG127a; OX = 2529855 GN=tgt PE=4 SV=1
MGFSFELIAQCPQTGARVGVWHTPHGPVETPRFMPVGTLATVKGLTPAQIASTGAQMILANTYHLHLQPGESIIEKAGGLHGFMAWNQPILTDSGGFQVFSLSQLRQIKESGVTFRSPRDGRIIEITPEKSIQIQNALGADVIMAFDECPPTGVSHETMKASIERTYRWLERCLGAHQRPQEQALFAIVQGGIYEDLRTTAAQSLVKLDLPGYAIGGVSVGEETSLIHRIVQITAPLLPENKPRYLMGVGTYREIAKAIASGIDLFDCVIPTRFGRHGTALVRGERWNLKNARFKEDFAPLDETCPCYTCQHFSRAYLNHLIKSGEMLGYILLSLHNIAELIRFTREIRQSILGGTFAQDFAPWLEDAVDVTPT

SEQ ID NO: 57684 - protein, 374 aa, Microcystis flosaquae
  REGION 1..374: note = tr|A0A552KWP2|A0A552KWP2_9CHRO Queuine tRNA-ribosyltransferase OS=Microcystis flos-aquae Mf_QC_C_20070823_S10D OX=2486236 GN=tgt PE=3 SV=1
MGFSFELIAQCPQTGARVGVWHTPHGPVETPRFMPVGTLATVKGLTPAQIASTGAQMILANTYHLHLQPGESIIEKAGGLHDFMAWNQPILTDSGGFQVFSLSQLRQIKESGVTFRSPRDGRIIEITPEKSIQIQNALGADVIMAFDECPPTGVSHETMKASIERTYRWLERCLGAHQRPQEQALFAIVQGGIYEDLRAAAAESLVKLDLPGYAIGGVSVGEETSLIHRIVQITAPLLPENKPRYLMGVGTYGEMAKAIASGIDLFDCVIPTRFGRHGTALVRGERWNLKNARFKEDFAPLDETCPCYTCQHFSRAYLNHLIKSGEMLGYILLSLHNIAELIRFTREIRQSILGGTFTQDFAPWLEDAVDVTPT

SEQ ID NO: 57685 - protein, 374 aa, Microcystis flosaquae
  REGION 1..374: note = tr|A0A552LSJ0|A0A552LSJ0_9CHRO Queuine tRNA-ribosyltransferase OS=Microcystis flos-aquae Mf_WU_F_19750830_S460 OX=2486237 GN=tgt PE=3 SV=1
MGFSFELIAQCPQTGARVGVWHTPHGPVETPRFMPVGTLATVKGLTPAQIASTGAQMILANTYHLHLQPGESIIERAGGLHDFMAWNQPILTDSGGFQVFSLSQLRQIKESGVTFRSPRDGRIIEITPEKSIQIQNALGADVIMAFDECPPTGVSHETMKASIERTYRWLERCLGAHQRPQEQALFAIVQGGIYEDLRAAAAESLVKLDLPGYAIGGVSVGEETTLIHRIVQITAPLLPENKPRYLMGVGTYGEMAKAIASGIDLFDCVIPTRFGRHGTALVRGERWNLKNARFKEDFAPLDETCPCYTCQHFSRAYLNHLIKSGEMLGYILLSLHNIAELIRFTREIRQSILGGTFAQDFAPWLEDAVDVTPT

SEQ ID NO: 57686 - protein, 374 aa, unidentified
  source 1..374: note = Microcystis novacekii
  REGION 1..374: note = tr|A0A552ILF6|A0A552ILF6_9CHRO Queuine tRNA-ribosyltransferase OS=Microcystis novacekii Mn_MB_F_20050700_S1D OX=2486266 GN=tgt PE=3 SV=1
MGFSFELIAQCPQTGARVGVWHTPHGPVETPRFMPVGTLATVKGLTPAQIASTGAQMILANTYHLHLQPGESIIEKAGGLHEFMAWNQPILTDSGGFQVFSLSQLRQIKESGVTFRSPRDGRIIEITPEKSIQIQNALGADVIMAFDECPPTGVSHETMKASIERTYRWLERCLTAHQRPQEQALFAIVQGGIYEDLRAAAAQSLVKLDLPGYAIGGVSVGEETSLIHRIVQITAPLLPENKPRYLMGVGTYREMAKAIASGIDLFDCVIPTRFGRHGTALVRGERWNLKNARFKEDFAPLDETCPCYTCQHFSRAYLNHLIKSGEMLGYILLSLHNIAELIRFTREIRQSILGGTFAQDFAPWLEDAVDVTPT

SEQ ID NO: 57687 - protein, 341 aa, unidentified
  source 1..341: note = Microcystis panniformis
  REGION 1..341: note = tr|A0A0K1S9L3|A0A0K1S9L3_9CHRO Queuine tRNA-ribosyltransferase OS=Microcystis panniformis FACHB-1757 OX=1638788 GN=tgt PE=3 SV=1
MPVGTLATVKGLTPAQIASTGAQMILANTYHLHLQPGESIIEKAGGLHEFMAWNQPILTDSGGFQVFSLSQLRQIKESGVTFRSPRDGRIIEITPEKSIQIQNALGADVIMAFDECPPTGVSHETMKASIERTYRWLERCLTAHQRPQEQALFAIVQGGIYEDLRAAAAESLVKLDLPGYAIGGVSVGEETSLIHRIVQITAPLLPENKPRYLMGVGTYREMAKAIASGIDLFDCVIPTRFGRHGTALVRGERWNLKNARFKEDFAPLDETCPCYTCQHFSRAYLNHLIKSGEMLGYILLSLHNIAELIRFTREIRQSILGGTFAQDFAPWLEDAVDVTPT

SEQ ID NO: 57688 - protein, 374 aa, unidentified
  source 1..374: note = Microcystis panniformis
  REGION 1..374: note = tr|A0A552Q265|A0A552Q265_9CHRO Queuine tRNA-ribosyltransferase OS=Microcystis panniformis Mp_MB_F_20051200_S9 OX=2486223 GN=tgt PE=3 SV=1
MGFSFELIAQCPQTGARVGVWHTPHGPVETPRFMPVGTLATVKGLTPAQIASTGAQMILANTYHLHLQPGESIIEKAGGLHEFMAWNQPILTDSGGFQVFSLSQLRQIKESGVTFRSPRDGRIIEITPEKSIQIQNALGADVIMAFDECPPTGVSYETMKASIERTYRWLERCLTAHQRPQQQALFAIVQGGIYEDLRAAAAQSLVKLDLPGYAIGGVSVGEETSLIHRIVQITAPLLPENKPRYLMGVGTYREMAKAIASGIDLFDCVIPTRFGRHGTALVRGERWNLKNARFKEDFAPLDETCACYTCQHFSRAYLNHLIKSGEMLGYILLSLHNIAELIRFTREIRQSILGGTFAQDFAPWLEDAVDVTPT

SEQ ID NO: 57689 - protein, 374 aa, Microcystis sp.
  REGION 1..374: note = tr|A0A2P1UI00|A0A2P1UI00_9CHRO Queuine tRNA-ribosyltransferase OS=Microcystis sp. MC19 OX=1967666; GN = tgt PE=3 SV=1
MGFSFELIARCPQTGARVGVWHTPHGPVETPRFMPVGTLATVKGLTPAQIASTGAQMILANTYHLHLQPGESIIEKAGGLHDFMAWNQPILTDSGGFQVFSLSQLRQIKESGVTFRSPRDGRIIEITPEKSIQIQNALGADVIMAFDECPPTGVSHETMKASIERTYRWLERCLGAHQRPQEQALFAIVQGGIYEDLRAAAAESLVKLDLPGYAIGGVSVGEETSLIHRIVQITAPLLPENKPRYLMGVGTYGEMAKAIASGIDLFDCVIPTRFGRHGTALVRGERWNLKNARFKEDFAPLDETCPCYTCQHFSRAYLNHLIKSGEMLGYILLSLHNIAELIRFTREIRQSILGGTFAQDFAPWLEDAADVTPT

SEQ ID NO: 57690 - protein, 374 aa, Microcystis sp.
  REGION 1..374: note = tr|A0A552C160|A0A552C160_9CHRO Queuine tRNA-ribosyltransferase OS=Microcystis sp. Msp_OC_L_20101000_S702 OX=2486218 GN=tgt PE=3 SV=1
MGFSFELIAQCPQTGARVGVWHTPHGPVETPRFMPVGTLATVKGLTPAQIASTGAQMILANTYHLHLQPGESIIEKAGGLHDFMAWNQPILTDSGGFQVFSLSQLRQIKESGVTFRSPRDGRIIEITPEKSIQIQNALGADVIMAFDECPPTGVSHETMKASIERTYRWLERCLTAHQRPQEQALFAIVQGGIYEDLRAAAAQSLVKLDLPGYAIGGVSVGEETSLIHRIVQITAPLLPENKPRYLMGVGTYREMAKAIASGIDLFDCVIPTRFGRHGTALVRGERWNLKNARFKEDFAPLDETCPCYTCQHFSRAYLNHLIKSGEMLGYILLSLHNIAELIRFTREIRQSILGGTFAQDFAPWLEDAVDVTPT

SEQ ID NO: 57691 - protein, 374 aa, unidentified
  source 1..374: note = Microcystis viridis
  REGION 1..374: note = tr|A0A3G9K2Y8|A0A3G9K2Y8_MICVR Queuine tRNA-ribosyltransferase OS=Microcystis viridis NIES-102; OX = 213615 GN=tgt PE=3 SV=1
MGFSFELIARCPQTGARVGVWHTPHGPVETPRFMPVGTLATVKGLTPAQIASTGAQMILANTYHLHLQPGESIIEKAGGLHEFMAWNQPILTDSGGFQVFSLSQLRQIKESGVTFRSPRDGRIIEITPEKSIQIQNALGADVIMAFDECPPTGVSHETMKASIERTYRWLERCLRAHQRPQQQALFAIVQGGIYEDLRAAAAESLVKLDLPGYAIGGVSVGEETSLIHRIVQITAPLLPENKPRYLMGVGTYREMAKAIASGIDLFDCVIPTRFGRHGTALVRGERWNLKNARFKEDFAPLDETCPCYTCQHFSRAYLNHLIKSGEMLGYILLSLHNIAELIRFTREIRQSILGGTFAQDFAPWLEDALDVTPT

SEQ ID NO: 57692 - protein, 374 aa, unidentified
  source 1..374: note = Microcystis viridis
  REGION 1..374: note = tr|A0A552HFG0|A0A552HFG0_MICVR Queuine tRNA-ribosyltransferase OS=Microcystis viridis Mv_BB_P_19951000_S68D OX=2486270 GN=tgt PE=3 SV=1
MGFSFELIARCPQTGARVGVWHTPHGPVETPRFMPVGTLATVKGLTPAQIASTGAQMILANTYHLHLQPGESIIEKAGGLHEFMAWNQPILTDSGGFQVFSLSQLRQIKESGVTFRSPRDGRIIEITPEKSIQIQNALGADVIMAFDECPPTGVSHETMKASIERTYRWLERCLRAHQRPQEQALFAIVQGGIYEDLRAAAAESLVKLDLPGYAIGGVSVGEETSLIHRIVQITAPLLPENKPRYLMGVGTYREMAKAIASGIDLFDCVIPTRFGRHGTALVRGERWNLKNARFKEDFAPLDETCPCYTCQQFSRAYLNHLIKSGEMLGYILLSLHNIAELIRFTREIRQSILGGTFAQDFAPWLEDAVDVTPT

SEQ ID NO: 57693 - protein, 374 aa, unidentified
  source 1..374: note = Microcystis wesenbergii
  REGION 1..374: note = tr|A0A552LUQ8|A0A552LUQ8_9CHRO Queuine tRNA-ribosyltransferase OS=Microcystis wesenbergii Mw_MB_S_20031200_S109D OX=2486241 GN=tgt PE=3 SV=1
MGFSFELIAQCPQTGARVGVWHTPHGPVETPRFMPVGTLATVKGLTPAQIASTGAQMILANTYHLHLQPGESIIEKAGGLHEFMAWNQPILTDSGGFQVFSLSQLRQIKESGVTFRSPRDGRIIEITPEKSIQIQNALGADVIMAFDECPPTGVSHETMKASIERTYRWLERCLRAHQRPQQQALFAIVQGGIYEDLRVTAAESLVKLDLPGYAIGGVSVGEETSLIHRIVQITAPLLPENKPRYLMGVGTYREMAKAIASGIDLFDCVIPTRFGRHGTALVRGERWNLKNARFKEDFAPLDETCPCYTCQHFSRAYLNHLIKSGEMLGYILLSLHNIAELIRFTCEIRQSILGGTFAQDFAPWLEDAVDVTPT

SEQ ID NO: 57694 - protein, 374 aa, unidentified
  source 1..374: note = Microcystis wesenbergii
  REGION 1..374: note = tr|A0A3E0LUP4|A0A3E0LUP4_9CHRO Queuine tRNA-ribosyltransferase OS=Microcystis wesenbergii TW10; OX = 2060474 GN=tgt PE=3 SV=1
MGFSFELIAQCPRTGARVGVWHTPHGPVETPRFMPVGTLATVKGLTPAQIASTGAQMILANTYHLHLQPGESIIEKAGGLHEFMAWNQPILTDSGGFQVFSLSQLRQIKESGVTFRSPRDGRIIEITPEKSIQIQNALGADVIMAFDECPPTGVSHETMKASIERTYRWLERCLRAHQRPQEQALFAIVQGGIYEDLRAAAAESLVKLDLPGYAIGGVSVGEETSLIHRIVQITAPLLPENKPRYLMGVGTYREMAKAIASGIDLFDCVIPTRFGRHGTALVRGERWNLKNARFKQDFAPLDDTCPCYTCQQFSRAYLNHLIKSGEMLGYILLSLHNIAELIRFTREIRQSILGGTFAQDFAPWLEDAVDVTPT

SEQ ID NO: 57695 - protein, 266 aa, unidentified
  source 1..266: note = Microgenomates bacterium
  REGION 1..266: note = tr|A0A136KHW3|A0A136KHW3_9BACT Queuine tRNA-ribosyltransferase OS=Microgenomates bacterium OLB22; OX = 1617428 GN=tgt_2 PE=4 SV=1
MEFRSHIDGRKVLFTPEFSISAQKKIGADFIVAFDEDILNKASEKYTKESTERTHRWALRSLAEFEKKKDAPPHRQRMYGVLHGGRYEDLRKWSAQTIAAMPFECLALGGVSVGIENKELREEVSWVSDVLHSDPRPRHLLGISTLPDVLFGVKLGFDTFDCVLPTRYARMGRLYDADYSSLELYERPRRDVDFTLDILSKKYKRDMGHISSHCDCYVCKTYTRAYLHHLFTQRELLAYRLGTIHNLFWIEQFFAEIRRSVEGGKM

SEQ ID NO: 57696 - protein, 399 aa, unidentified
  source 1..399: note = Microgenomates bacterium
  REGION 1..399: note = tr|A0A136KNX9|A0A136KNX9_9BACT Queuine tRNA-ribosyltransferase OS=Microgenomates bacterium OLB23; OX = 1617429 GN=tgt PE=3 SV=1
MKEFVFDVLHKSSMSRARRGKIVTPHGVVETPAFVTVGTKGTVKALAPEDLEKTGTQFVFANTYHLVLSPGAEMVHKLGGVHSMSGISKPMITDSGGFQAFSLAFPDRKNMYELLPQHDDGSAEEMKRKPMAKITDDGVEFTSHIDGKKYLFTPESSIQAQQHIGADFVVAFDECIYNGATKEYTKRSTERTHEWALRSLATLAGPGLKKVVPGRQQQMYGVIQGGKFKDLREMSTNFIAAQAFFGIALGGVSVGETNAELRDEITWMMDVLHQDARPRHLLGISTLDDVLFSVKHGVDTFDCILPTRDARIGRLYIHTPGTQQDPLKGYEAIDILKSSFKTNTEPINPHILGSVTYAYLHHLFKQRELLAYRLASMNNLYMIEQFFAEIRKAIEEDRL

SEQ ID NO: 57697 - protein, 388 aa, unidentified
  source 1..388: note = Microgenomates group
  REGION 1..388: note = tr|A0A0G1J8W9|A0A0G1J8W9_9BACT Queuine tRNA-ribosyltransferase OS=Microgenomates group bacterium GW2011_GWF1_44_10 OX=1618537 GN=tgt PE=3 SV=1
MFSFRVLATKGRARAGEFVTEHGVVKTPIYMPVGTRGTVKALSSEDVAQTQAQILLGNTYHLYLKPRLDVIREAGGLHEFMRWDRPILTDSGGFQVFSLGEQIVRKGGVRTTHISENGVEFTSIYDGSKHLFTPERAVEIQQVIGADIMMCFDQLSHDSASVEEVEEAVDRTTRWAERCVNTWENAQRKTAYGKYQSLFGIIQGGMVRALRERSAREISALPFDGIAVGGETVGYNMEGTVELMEWIESMLPKDKPRYAMGLGHDPQNIIDAVRAGFDMFDCVAPTRIARNGALYVGELVGDADPESWRFSSPYPNGRLQIGNATFTHDHAVIDQTCDCATCVAGYSRAYLRHLFYAKELAYYRLASIHNVRSMIRLCEQLRERMLRV

SEQ ID NO: 57698 - protein, 389 aa, unidentified
  source 1..389: note = Microgenomates group
  REGION 1..389: note = tr|A0A1G1CNE8|A0A1G1CNE8_9BACT Queuine tRNA-ribosyltransferase OS=Microgenomates group bacterium RBG_16_45_19 OX=1817747 GN=A2W24_04540 PE=3 SV=1
MRAKAWRGLGQQGLARAGELITSHGVVPTPVFMPVGTQATVKALAPADLERAGASLILANTYHLHLRPGEQVISQFKGLHRFMNWPGAILTDSGGYQVSSLGWFKKAGTDRLVKITDEGADFVSHLDGSKHFLSPEKAIQIQLQLGADIIMAFDEATPNKGKDYARAALRRTNRWLTQSVQTWRASQPGQGKRPHLFGIIQGGNYPELRREAAKWVIQSGVAGVALGGATIGQSVTQTQTNAAWVMEIIRQTTLPLYLMGVGVAPSHLIGAVQAGADMVDCVAPTKLARCGLLYVGQLVIPAGQVKRARFESEYRQERLDISKKGFETDQRPVEAKCDCDTCQQGFSRAYLHHLFKARELLYYRLASIHNVRMMIRTAELLRQAILCED

SEQ ID NO: 57699 - protein, 424 aa, Microlunatus phosphovorus
  REGION 1..424: note = tr|F5XMH3|F5XMH3_MICPN Queuine tRNA-ribosyltransferase OS=Microlunatus phosphovorus (strain ATCC 700054 / DSM 10555 / JCM 9379 / NBRC 101784 / NCIMB 13414 / VKM Ac-1 990 / NM-1) OX=1032480 GN=tgt PE=3; SV = 1
MLDQRQQARGFGFEIGDRLPDALGRTGRITTPHGVIETPAFVVVGTKATVKTVLPESVAQLGAQAVLANAYHLYLQPGSELIEEAGGLGRFMNWPGPTYTDSGGFQVMSLGVGFKKVLAMDTTGLRSDEVVAEGKSRLARVDDDGVTFTSHLDGSRHRFTPEVSMQVQHQLGADIIFAFDELTTLMNTRGYQESSVERTHAWAIRCLREHRRLTEERVGRPYQALFGVVQGAQYEDLRRRAARGLAELEVDGQTFDGFGIGGALEKENLGTITGWVSSELPENKPRHMLGISEPDDLFTCVENGADTFDCVSPSRVARNSAVYSRDGRYNVSAATSRRAFEPIDPECDCYTCANYTRAYLHHLFKAKEMLAATLCTIHNERFVISLVDRIRSSIGDGTYAELKAETLGRYYAGRSLSVSSGTTR

SEQ ID NO: 57700 - protein, 433 aa, Microlunatus soli
  REGION 1..433: note = tr|A0A1H1YRN1|A0A1H1YRN1_9ACTN Queuine tRNA-ribosyltransferase OS=Microlunatus soli OX=630515; GN = tgt PE=3 SV=1
MDSNDRGPVNGPAGFSFDVADEIPGGLGRTGVLHTPHGDIVTPAFTPVGTKATIKSVLPESMAELGAQALLANAYHLFLQPGSDIVDEAGGLGAFMNWPGPTFTDSGGFQVMSLGSGHKKVISMSLVDKGSGASGAGQQLPKEVYTSSGKSGKLVQVDDDGVTFTSHIDGSRHRFTPEVSMGIQHQLGADVMFAFDELTTLSDPRSYQELSLDRTTAWAQRCLDEHERLTAERSHRPYQALFGVIQGAQYEDLRRKAVRDLLALRSPADRPFDGYGIGGALEKENLGTIVGWVCSELPVEAPRHLLGISEPDDFFAAIENGADTFDCVSPARVARNAALYTRDGRFNVNTAAQRRNFTPVDEDCDCYTCTHYTRAYLHHLFKAHEMLANTLATIHNERFIVRLVDDIRASITAGDFAELKADFLGRYYAGRRG

SEQ ID NO: 57701 - protein, 415 aa, Microlunatus sp.
  REGION 1..415: note = tr|A0A516PYB9|A0A516PYB9_9ACTN Queuine tRNA-ribosyltransferase OS=Microlunatus sp. KUDC0627; OX = 2596828 GN=tgt PE=3 SV=1
MTETVPFSFTPQAELPDSQGRTGVIHTPHGDISTPAFTPVGTKATIKAVLPESMAELGAQALLANAYHLFLQPGSDIVDEAGGLGVFMNWPGPTYTDSGGFQVMSLGSGHKKVISMNLPGSTDRPQEVFSSSGKSGKLVKIDDDGVTFTSHIDGSKHRFTPEISMRIQHQLGADVMFCFDELTTLSDPREYQELSLDRTLAWAQRCLDEHVRLTAERSHRPYQALFGVVQGAHYEDLRRKATRDLVALRSADDQQRPFDGYGIGGALEKENLGTIVGWVCSELPAEAPRHLLGISEPDDFFAAVENGADTFDCVSPARVARNAALYSRDGRFNVNTAANRRNFAPVDEDCDCYTCTHYTRAYLHHLFKAHEMLANTLATIHNERFIVRLVDDIRGAIAGGYFADFKIEFLGRYYG

SEQ ID NO: 57702 - protein, 405 aa, Micropruina glycogenica
  REGION 1..405: note = tr|A0A2N9JDB1|A0A2N9JDB1_9ACTN Queuine tRNA-ribosyltransferase OS=Micropruina glycogenica; OX = 75385 GN=tgt PE=3 SV=1
MSDFGFEVTATLPDGRGRAGTIHTPHGTINTPAFVAVGTKATVKAVLPEAVRDLGAQAVLANAYHLYLQPGSDIVDAAGGLGAFMNWPGPTFTDSGGFQVMSLGAGFKKVLAMDTVGLADDDVIAEGKTRLAHVDDDGVTFTSHLNGDRHRFTPEVSMRIQHELGADIMFAFDELTTLMNTRGYQEQSVARTQAWAVRCLAAHAELTRSRADKPYQALFGVVQGAQYEDLRRRAARDLAALEVDGASFDGFGIGGALEKENLGTIVGWVADELPRDKPRHLLGISEPDDFFAAVAAGADTFDCVMPSRVARNAALYTRDGRFNVNTAAHRRAFEPIEPGCDCYTCAHYTRAYLHHLFKAKEMLASTLATIHNERFTVRLVDDIRASIEAGDFDAFRTEFLGRFYR

SEQ ID NO: 57703 - protein, 376 aa, Microscilla marina
  REGION 1..376: note = tr|A1ZXQ7|A1ZXQ7_9BACT Queuine tRNA-ribosyltransferase OS=Microscilla marina ATCC 23134; OX = 313606 GN=tgt PE=3 SV=1
MKFELKATDPNSSARAGVMTTAHGDIQTPIFMPVGTAGTVKAVHQREIKEDINAQIILGNTYHLYLRPGLDILKKFGGLHKFNGWDRPILTDSGGYQVYSLAGIRKIKEEGVTFQSHIDGSKHHFSPETVMDIQRAIGADIMMAFDECTPYPCEYDYAKKSMEMTHRWLKRCCDRFDATQPLYGYDQTLFPIVQGSTYKDLRKQSAEVIASFERDGNAIGGLSVGEPHELMYESTELVCSILPKDKPRYLMGVGTPENILEGIALGVDMFDCVMPTRNARNGMLFTTQGVINIKNKKWEDDQTPIDEHLGGYVSTFYSKGYLRHLVHCKEMLGAQIASVHNLTFYLWLVKQAREQILAGTFLEWKNKMVKHLMQRL

SEQ ID NO: 57704 - protein, 376 aa, unidentified
  source 1..376: note = Microscillaceae bacterium
  REGION 1..376: note = tr|A0A3C0I8N3|A0A3C0I8N3_9BACT Queuine tRNA-ribosyltransferase OS=Microscillaceae bacterium; OX = 2053581 GN=tgt PE=3 SV=1
MFFELKAQDTQTAARAGQITIDHGIIETPIFMPVGTVGSVKAVHPRELAQDIEAQIILGNTYHLYLRPGLPVLEKFGGLHRFNQWNKPILTDSGGYQVYSLAGRRKITEEGVVFQSHIDGSRHTFTPERVMDIQRSIGADIVMAFDECPPFPAEYGYVEKSMHLTHRWLKRCLTHFAQSPPRYGYQQWLFPIVQGGTYKDLRQASAQFVAEQNCAGNAIGGLSVGEPAELMYEMTEWVCQFLPTDRPRYLMGVGTPANILEAIALGVDMFDCVMPTRNGRNGMLFTTQGIINIKNEKWKTDTSPLDPGLASYASQTYSKGYLRHLIVSQEILGLQIATLQNLSLYLWLVKQARLHIQQGDFGAWKKTMVEQLMQRL

SEQ ID NO: 57705 - protein, 289 aa, unidentified
  source 1..289: note = Microscillaceae bacterium
  REGION 1..289: note = tr|A0A349DVA1|A0A349DVA1_9BACT Queuine tRNA-ribosyltransferase (Fragment) OS=Microscillaceae bacterium OX=2053581 GN=DCS93_27295 PE=3 SV=1
PILTDSGGYQVYSLSEMRKIKEEGVTFQSHIDGSKHQFSPEIVMDIQRTIGADIIMAFDECTPYPCEYDYAKKSMEMTHRWLKRCCDRFDSTEPLYGYEQTLFPIVQGSTYKDLRKQSAEVIASFERDGNAIGGLSVGEPHEMMYESTELVCGILPKDKPRYLMGVGTPENILECIALGVDMFDCVMPTRNARNGMLFTTQGIINIKNKKWENDDTPIDPVLGGYASTFYSKGYLRHLVQSKEILAAQIASIHNLSFYLWLVGQAREQILAGTFLPWKNKMVKQVMQRL

SEQ ID NO: 57706 - protein, 393 aa, Microvirga aerophila
  REGION 1..393: note = tr|A0A512BZP7|A0A512BZP7_9RHIZ Queuine tRNA-ribosyltransferase OS=Microvirga aerophila OX=670291; GN = tgt PE=3 SV=1
MTTDQFTFTVNKTDGAARTGEIRMPRGVIRTPAFMPVGTAATVKAMYPDQVKALGADVVLGNTYHLMLRPGAERVARLGGLHQFMNWPYPILTDSGGFQVMSLSALRKIDETGVTFQSHIDGSTHVLTPERSIEIQGLLGSDIQMQLDECVKLPCPDEVAEKAMRLSLRWAERCKVAFGEQPGKAMFGIVQGGAVEHLRIESARELAALDLKGYAIGGLAVGEPQDVMLRMIETVEPHMPKEKPRYLMGVGTPDDIVEAVRRGVDMFDCVMPTRAGRHGQVFTRHGRMNLRNAKFAEDTSPLDPESKCTASNTYSRAYLHHLVRSNEILGMMLLTWNNLAYYQDLMAGLRKAIAEGRLEDYVGEVKEGWSKGERDSKAEVGEHADNTAMAVED

SEQ ID NO: 57707 - protein, 393 aa, Microvirga guangxiensis
  REGION 1..393: note = tr|A0A1G5AYY6|A0A1G5AYY6_9RHIZ Queuine tRNA-ribosyltransferase OS=Microvirga guangxiensis; OX = 549386 GN=tgt PE=3 SV=1
MTTDQFTFTVNKTDGMARTGEIRMPRGVIRTPAFMPVGTAATVKAMYPDQVKALGADVVLGNTYHLMLRPGAERVARLGGLHKFMNWPYPILTDSGGFQVMSLAALRKVDETGVTFQSHIDGSKHFMSPERSIEIQGLLGSDIQMQLDECVRLPCSDEEAERAMRLSLRWAERCRIAFGEQPGKAMFGIVQGGAVERLRIESARELAALDLKGYAIGGLAVGEPQDVMLRMIETVEPHMPKEKPRYLMGVGTPDDIVEAVRRGVDMFDCVMPTRAGRHGQVFTKHGRMNLRNARFAEDTRPLDESSKCTASNTYSRAYLHHLVRSNEILGMMLLTWNNLAYYQELMAGLRKAIAEGRLEDHIGEIKEGWAKGERDGKAEIGHHADNIATPAEG

SEQ ID NO: 57708 - protein, 393 aa, unidentified
  source 1..393: note = Microvirga lotononidis
  REGION 1..393: note = tr|I4YMX8|I4YMX8_9RHIZ Queuine tRNA-ribosyltransferase OS=Microvirga lotononidis; OX = 864069 GN=tgt PE=3 SV=1
MTTDTFSFTVNKTDGAARTGEIRMPRGVIRTPAFMPVGTAATVKAMYPDQVKALGADVVLGNTYHLMLRPGAERVARLGGLHQFMNWPYPILTDSGGFQVMSLSALRKIDETGVTFQSHIDGSTHVLTPERSIEIQGLLDSDIQMQLDECVKLPCSDDVAEKAMRLSLRWAERCRVAFGEQPGKAMFGIVQGGAVERLRIESAKELATLDLKGYAIGGLAVGEPQDVMLRMIETVEPHMPREKPRYLMGVGTPDDIVEAVRRGVDMFDCVMPTRAGRHGQVFTRHGRMNLRNARFAEDTGPLDPESKCTASNTYSRAYLHHLVRSNEILGMMLLTWNNLAYYQELMAGLRKAIAEGRLEDHIGEVKEGWAKGERDSKADIGRHADNIAMADEA

SEQ ID NO: 57709 - protein, 393 aa, unidentified
  source 1..393: note = Microvirga ossetica
  REGION 1..393: note = tr|A0A1B2EKM2|A0A1B2EKM2_9RHIZ Queuine tRNA-ribosyltransferase OS=Microvirga ossetica OX=1882682; GN = tgt PE=3 SV=1
MTTETFTFTVNKTDGAARTGEIRMPRGVIRTPAFMPVGTAATVKAMYPDQVKALGADVVLGNTYHLMLRPGAERVAKLGGLHQFMNWPYPILTDSGGFQVMSLSALRKIDETGVTFQSHIDGSTHVLTPERSIEIQGLLGSDIQMQLDECVKLPCTDEVAEKAMRLSLRWAERCRIAFGEQPGKAMFGIVQGGAVERLRVESAKELAGLDLKGYAIGGLAVGEPQEVMLRMIETVEPHMPKEKPRYLMGVGTPDDIVEAVRRGVDMFDCVMPTRAGRHGQVFTRNGRMNLRNARFAEDTSPLDESSKCTASNTYSRAYLHHLVRSNEILGMMLLTWNNLAYYQDLMAGLRKAIAEGRLEDYVGEVKEGWARGERDSKAEIGHHADNIAMVAEG

SEQ ID NO: 57710 - protein, 393 aa, Microvirga sp.
  REGION 1..393: note = tr|A0A2T7U4T9|A0A2T7U4T9_9RHIZ Queuine tRNA-ribosyltransferase OS=Microvirga sp. KLBC 81; OX = 1862707 GN=tgt PE=3 SV=1
MTTDQFTFTVTKSDGTARTGEIRMPRGVIRTPAFMPVGTAATVKAMYPDQVKALGADVVLGNTYHLMLRPGAERVARLGGLHQFMNWPYPILTDSGGFQVMSLSALRKVDESGVTFQSHIDGSKHFMSPERSIEIQGLLGSDIQMQLDECVRLPCSDEEAERAMRLSLRWAERCRIAFGDQPGKAMFGIVQGGAVERLRIESARELAVMDLKGYAIGGLAVGEPQDVMLRMIETVEPHMPKEKPRYLMGVGTPDDIVEAVRRGVDMFDCVMPTRAGRHGQVFTKHGRMNLRNARFAEDTRPLDESSKCTASNTYSRAYLHHLVRSNEILGMMLLTWNNLAYYQELMAGLRKAIAEGRLEDHIGEIKEAWAKGERDSKPEIGHHADNIAMPAEG

SEQ ID NO: 57711 - protein, 393 aa, Microvirga sp.
  REGION 1..393: note = tr|A0A086MIW3|A0A086MIW3_9RHIZ Queuine tRNA-ribosyltransferase OS=Microvirga sp. BSC39 OX=1549810; GN = tgt PE=3 SV=1
MTTETFTFSVNKTDGTARTGEIRMPRGVIRTPAFMPVGTAATVKAMYPDQVKALGADVVLGNTYHLMLRPGAERVARLGGLHHFMNWPYPILTDSGGFQVMSLSALRKIDETGVTFQSHIDGSTHVLTPERSIEIQGLLGSDIQMQLDECVKLPCSDEVAEKAMRLSLRWAERCRVAFGEQPGKAMFGIVQGGAVERLRIESARELAALDLKGYAIGGLAVGEPQEVMLRMIETVEPHMPKEKPRYLMGVGTPDDIVEAVRRGVDMFDCVMPTRAGRHGQVFTRHGRMNLRNARFAEDTAPLDPESKCTASNTYSRAYLHHLVRSNEILGMMLLTWNNLAYYQELMAGLRKAIADGRLESYIGEVKEGWAKGERDSKAEAGQHADNTAMVTEG

SEQ ID NO: 57712 - protein, 393 aa, Microvirga subterranea
  REGION 1..393: note = tr|A0A370HND7|A0A370HND7_9RHIZ Queuine tRNA-ribosyltransferase OS=Microvirga subterranea; OX = 186651 GN=tgt PE=3 SV=1
MTTDTFTFTVSKTDGAARTGEIRMPRGVIRTPAFMPVGTAATVKAMYPDQVKALGADVVLGNTYHLMLRPGAERVARLGGLHQFMNWPYPILTDSGGFQVMSLSALRKIDETGVTFQSHIDGSTHVLTPERSIEIQGLLGSDIQMQLDECVKLPCSDEIAEKAMHLSLRWAERCRVAFGEQPGKAMFGIVQGGAVERLRIESARELADLGLKGYAIGGLAVGEPQDVMLRMIETVEPHMPKEKPRYLMGVGTPDDIVEAVRRGVDMFDCVMPTRAGRHGQVFTRHGRMNLRNARFAEDTRPLDPESKCTASNTYSRAYLHHLVRSNEILGMMLLTWNNLAYYQELMAGLRKAIAEGRLETYVGEVKEGWAKGERDGKAEIGHHADNTSMTAEG

SEQ ID NO: 57713 - protein, 393 aa, unidentified
  source 1..393: note = Microvirga vignae
  REGION 1..393: note = tr|A0A0H1R3Q8|A0A0H1R3Q8_9RHIZ Queuine tRNA-ribosyltransferase OS=Microvirga vignae OX=1225564; GN = tgt PE=3 SV=1
MTTDQFTFTVTKTDGTARTGEIRMPRGVIRTPAFMPVGTAATVKAMYPDQVKALGADVVLGNTYHLMLRPGAERVARLGGLHKFMNWPYPILTDSGGFQVMSLAALRKVDESGVTFQSHIDGSKHFMSPERSIEIQGLLGSDIQMQLDECVRLPCSDEEAERAMRLSLRWAERCRIAFGDQPGKAMFGIVQGGAVERLRIESARELAAMNLKGYAIGGLAVGEPQDVMLRMIETVEPYMPKDKPRYLMGVGTPDDIVEAVRRGVDMFDCVMPTRAGRHGQVFTKHGRMNLRNARFAEDTRPLDESSKCTASNTYSRSYLHHLVRSNEILGMMLLTWNNLAYYQELMAGLRKAIAEGRLEDHIGEIKEGWAKGERDSKTEIGHHADNIAMPAEG

SEQ ID NO: 57714 - protein, 370 aa, Microvirgula aerodenitrificans
  REGION 1..370: note = tr|A0A2S0P763|A0A2S0P763_9NEIS Queuine tRNA-ribosyltransferase OS=Microvirgula aerodenitrificans; OX = 57480 GN=tgt PE=3 SV=1
MLEFKLLKQSGAARRGELTLNHGVVQTPVFMPVGTYGSVKAMTPDNLHDIGAQIILGNTFHLWLRPGLDIVGKFGGLHDFIGWQKPILTDSGGFQVFSLGQLRKITEEGVTFQSPINGDKLFLSPEVSMQIQTVLNSDIVMQLDECTPGQVDHRTAGESMRMSLRWAERSRNAFNDLKNPNALFGIVQGNLYTDLRQESLEGLMKIGFDGIAIGGLSVGEPKPEMYRMMRELQPMLPADKPHYLMGVGTPEDLVHGVANGIDMFDCVMPTRNARNGWLFTQWGDIKIKNARHRDDKRPLDEQCDCYACRHFSRAYLHHLHRAGEILGAQLNTIHNLHYYQQLMAEMRQAIEDDRFADYEAGFHERRARGA

SEQ ID NO: 57715 - protein, 370 aa, Microvirgula sp.; identical to SEQ ID NO: 57714
  REGION 1..370: note = tr|A0A329B4S8|A0A329B4S8_9NEIS Queuine tRNA-ribosyltransferase OS=Microvirgula sp. AG722; OX = 2183901 GN=tgt PE=3 SV=1

SEQ ID NO: 57716 - protein, 353 aa, unidentified
  source 1..353: note = Midichloria mitochondrii
  REGION 1..353: note = tr|F7XV01|F7XV01_MIDMI Queuine tRNA-ribosyltransferase OS=Midichloria mitochondrii (strain IricVA) OX=696127 GN=tgt PE=3 SV=1
MAVKFTLIKEVGKTRVGFIETAHGVINTPAFMPVGTLAAVKAMTPDAISSTGTEIVLSNTYHLMLRPGEDRIERLGGLHKFMNWQKPILTDSGGFQVMSLASLRKVTEEGVMFRSHIDGHKYNLTPEYSIQIQHKLGSTITMAFDECIPYPATFQEAKRAMELSMRWALRSKNSYQNKDGYGIFAIVQGSAYQELRESSANFLSAIDFDGYAIGGLAVGEPQAVMFDVLDYTIPLLPKFKPRYLMGVGKPSDVVGAVERGVDMFDCVIPTRSGRNGQAFVRNGTINIRNAQYVEDIRPLDSECSCYTCSNFHRAYLRHLVRAKEILGSILMTWHNIHYYQDLMKELREKIIRS

SEQ ID NO: 57717 - protein, 377 aa, unidentified
  source 1..377: note = Minicystis rosea
  REGION 1..377: note = tr|A0A1L6KZL2|A0A1L6KZL2_9DELT Queuine tRNA-ribosyltransferase OS=Minicystis rosea OX=888845; GN = tgt PE=3 SV=1
MSALVTSGYAFTVHERDGNARTGVLVTPHGEVPTPTFMPVGTQGSVKTLTPGEVAATGARIVLGNTYHLWLRPGPEIVALTGGLHKFTQWPHSMLTDSGGFQAFSLAERRSVGPDGFVFRSHLDGSKRALSPEVAMQVQGALGADIAMQLDVCPPGESPRAEIEQACRMTTIWAKRCLAAKRVDQAVFGIVQGGTHADLRRAHADELGAMPFDGLALGGFSVGEPIERMHEVVGEVASHLDPARPRYLMGVGTPRDLVVAIGAGVDMFDCVLPTRNARNGQALLKRGKVVIKQARYREDLSPLDPTCDCPTCTGGYTRAYLRHLFLAGEILVLRLFTQHNLHLYGQLVREAREAIARGAYAAFARDWAEAGSASVTA

SEQ ID NO: 57718 - protein, 375 aa, unidentified
  source 1..375: note = Minwuia thermotolerans
  REGION 1..375: note = tr|A0A2M9G163|A0A2M9G163_9PROT Queuine tRNA-ribosyltransferase OS=Minwuia thermotolerans; OX = 2056226 GN=tgt PE=3 SV=1
MSAFGFRLEAQDGRARAGRLETAHGPVETPVFMPVGTAGTVKAMLPESVKATGASIILGNTYHLMLRPGAERVAALGGLHRFMNWPGPILTDSGGFQVMSLAGLRKLDEDGVTFASHIDGAKVRLTPEGSTEIQDLLDATITMAFDECTEYPASHEAAARSMRLSMRWAERCRTAFRRREGYGQFGIVQGGTFEDLRGESVEALTAIDFEGYAIGGLAVGEGQPEMFRVLDFTAPALPADRPRYLMGVGKPDDLVGGVERGVDMFDCVAPTRSGRNGQAFTRRGTVNIRNSRHRDDPRPLDEACGCPACRDYSRAYLHHLVKAKEILAAMLLTWHNLHYYQELMRGMRAAILAGAFADFAAAFRRELAQGDIAPL

SEQ ID NO: 57719 - protein, 375 aa, Mitsuaria sp.
  REGION 1..375: note = tr|A0A1A9HQM8|A0A1A9HQM8_9BURK Queuine tRNA-ribosyltransferase OS=Mitsuaria sp. 7 OX=1658665; GN = tgt PE=3 SV=1
MLKFELLKTEGRARRGVMTLNHGVVQTPIFMPVGTYGTVKGVMPRSLEEMGAQIILGNTFHLWMRPGLDIMKQFGGLHRFESWNKPILTDSGGFQVWSLGEMRKITEEGVKFASPVNGDKLFLTPEISMQIQTVLNSDIVMQFDECTPYESKGQLTTEKEARLSMEMSLRWARRCQDEFTKLQNPNALFGIVQGGMFENLRDVSLAGLKDLDLPGYAIGGLSVGEPKTDMLRILDHIAHQLPADKPRYLMGVGTPEDLVEGVRQGVDMFDCVMPTRNARNGHMFTRFGDLRLRNARYKSDEKPVDETCTCYCCQNFSRAYLHHLDRCGEMLGPMLTSVHNLHYYLNLMKEVRESLDAGDFEGFRQRFAADRARGV

SEQ ID NO: 57720 - protein, 375 aa, Mitsuaria sp.
  REGION 1..375: note = tr|A0A1I6KRQ0|A0A1I6KRQ0_9BURK Queuine tRNA-ribosyltransferase OS=Mitsuaria sp. PDC51 OX=1881035; GN = tgt PE=3 SV=1
MLKFELLKTEGRARRGVVTLNHGVVQTPIFMPVGTYGTVKGVMPRSLEEMGAQIILGNTFHLWMRPGLDIMKQFGGLHKFESWNKPILTDSGGFQVWSLGEMRKISEEGVKFASPVNGDKLFLTPEISMQIQTILNSDIVMQFDECTPYETKGQLTTEKEARLSMEMSLRWAKRCQDEFARLQNPNALFGIVQGGMFEQLRDVSLAGLKDLDLPGYAIGGLSVGEPKADMLRILDHIAHQLPDNKPRYLMGVGTPEDLVEGVRQGVDMFDCVMPTRNARNGHLFTRFGDLRLRNARYKADEKPVDETCSCYCCQNFSRAYLHHLDRCGEMLGPMLTSVHNLHYYLNLMKEVRESLDAGDFEGFRTRFLADRARGI

SEQ ID NO: 57721 - protein, 375 aa, Mitsuokella jalaludinii
  REGION 1..375: note = tr|A0A174BPA0|A0A174BPA0_9FIRM Queuine tRNA-ribosyltransferase OS=Mitsuokella jalaludinii; OX = 187979 GN=tgt PE=3 SV=1
MTAITYELVKKDERTGARAGIIHTPHDSFPTPIFMPVGTQASVKGVSPDELRDLGAGIILSNTYHLFLRPGMDLIREAGGLHKFMHWDRAILTDSGGFQVFSLGDLRKITEEGVTFRSHIDGSKKFLSPEVSMEVQMALGSDIVMAFDECVPYPADYNYAKQSTERTIRWLQRCKEAMTAPNQGLFGIVQGGMYKDLREWSARETTAMDLPGYAVGGLSVGEPKELMYEMLEYSTSLLPQDKPRYLMGVGTPDCLVEGVQRGIDMFDCVYPTRVARNGMAMTWTGRLVMKNAQFTHDHTVLEEGCGCYACRNGYTRAYIRHLVRANEIFGLRLLSLHNLYFLQEFMRRMRQAILDDRFTEFRSDFFNHYQMHGKQ

SEQ ID NO: 57722 - protein, 375 aa, Mitsuokella multacida
  REGION 1..375: note = tr|A0A414NZM2|A0A414NZM2_9FIRM Queuine tRNA-ribosyltransferase OS=Mitsuokella multacida OX=52226; GN = tgt PE=3 SV=1
MTAITYELVKKDERTGARAGIIHTPHGSFPTPIFMPVGTQASVKGVSPDELRDLGAGIILSNTYHLFLRPGMDLIREAGGLHKFMHWDGAILTDSGGFQVFSLGDLRKITEEGVTFRSHIDGSKKFLSPEVSMEVQMALGSDIVMAFDECVPYPADYDYAKKSTERTIRWLKRCKEAMTAPNQGLFGIVQGGMYKELREWSARETTAMDLPGYAVGGLSVGEPKELMYEMLEYSTSLLPQDKPRYLMGVGTPDCLVEGVQRGIDMFDCVYPTRVARNGMAMTWTGRLVMKNAQFTHDHHVLEEGCGCYACRNGYTRAYIRHLVRANEIFGLRLLSLHNLYFLQDFMRRMRQAILDDRFTEFRSDFFNHYQMHGKQ

SEQ ID NO: 57723 - protein, 375 aa, Mitsuokella multacida
  REGION 1..375: note = tr|C9KKG5|C9KKG5_9FIRM Queuine tRNA-ribosyltransferase OS=Mitsuokella multacida DSM 20544; OX = 500635 GN=tgt PE=3 SV=1
MTAITYELVKKDERTGARAGIIHTPHGSFPTPIFMPVGTQASVKGVSPDELRDLGAGIILSNTYHLFLRPGMDLIREAGGLHKFMHWDRAILTDSGGFQVFSLGDLRKITEEGVTFRSHIDGSKKFLSPEVSMEVQMALGSDIVMAFDECVPYPADYDYAKKSTERTIRWLKRCKEAMTAPNQGLFGIVQGGMYKELREWSARETTAMDLPGYAVGGLSVGEPKELMYEMLEYSTSLLPQDKPRYLMGVGTPDCLVEGVQRGIDMFDCVYPTRVARNGMAMTWTGRLVMKNAQFTHDHHVLEEGCGCYACRNGYTRAYIRHLVRANEIFGLRLLSLHNLYFLQDFMRRMRQAILDDRFTEFRSDFFNHYQMHGKQ

SEQ ID NO: 57724 - protein, 375 aa, Mitsuokella sp.
  REGION 1..375: note = tr|A0A415RBJ2|A0A415RBJ2_9FIRM Queuine tRNA-ribosyltransferase OS=Mitsuokella sp. AF33-22; OX = 2292047 GN=tgt PE=3 SV=1
MTAITYELVKKDAATGARAGIIHTPHGSFPTPIFMPVGTQASVKGVSPDELKDLGAGIILSNTYHLFLRPGMDLVREAGGLHKFMHWDRAILTDSGGFQVFSLGDLRKITEEGVTFRSHIDGSKKFLSPEVSMDVQMALGSDIVMAFDECVPYPADFQYAKQSTERTLRWLKRCKQAMTAPNQGLFGIVQGGMYKELREWSARETVALDLPGYAVGGLSVGEPKELMYEMLEYSTSLLPENKPRYLMGVGTPDCLVEGVQRGIDMFDCVYPTRVARNGMAMTWTGRLVMKNAQFTHDHHVLEEGCGCYACRNGYTRAYIRHLVRAGEIFGLRLLSLHNLWFLQEFMRRMRQAILEDRFGAFREEFLAHYVMHGKQ

SEQ ID NO: 57725 - protein, 343 aa, Mitsuokella sp.
  REGION 1..343: note = tr|U2TGB2|U2TGB2_9FIRM Queuine tRNA-ribosyltransferase OS=Mitsuokella sp. oral taxon 131 str. W9106 OX=1321781 GN=tgt PE=3 SV=1
MPVGTQATVKGVSPDELKDLGAGIVLSNTYHLFLRPGMDLVREAGGLHAFMHWDRAILTDSGGFQVFSLGDLREITEEGVTFRSHIDGSKKFLSPEVSMEVQKCLGADIVMAFDECVPYPADFAYAKASTERTIRWLERCKSVLGKSDRQGLFGIVQGGMYKELRAWSAKKTTSLDLPGYAIGGLSVGEPKELMYEMLAYTTDYLPKQKPRYLMGVGTPDCLVEGVARGIDMFDCVFPTRVARNGMAMTHIGRLVMKNAVFTHDHHVLEEGCGCYACRNGYTRAYIRHLIRAGEIFGLRLLSLHNLWFLQVFMRRMREAILADSFVSFCKEFMRGYQPHGQIN

SEQ ID NO: 57726 - protein, 374 aa, unidentified
  source 1..374: note = Mixta gaviniae
  REGION 1..374: note = tr|A0A1X1DT82|A0A1X1DT82_9GAMM Queuine tRNA-ribosyltransferase OS=Mixta gaviniae OX=665914 GN=tgt; PE = 3 SV=1
MKFELDTKDGRARRGRLVFDRGVVETPAFMPVGTYGTVKGMTPEEVKETGAQILLGNTFHLWLRPGQEIMKLHGDLHDFMQWHGPILTDSGGFQVFSLGDIRKITEAGVHFRNPINGDAIFLDPEKSMEIQYDLGSDIVMIFDECTPYPADWDYAKRSMEMSLRWAKRSRDHFDKLGNKNALFGIIQGSVYEDLRDVSVKGLVDIGFDGYAVGGLAVGEPKEDMHRILEHVCPQIPEDKPRYLMGVGKPEDLVEGVRRGIDMFDCVMPTRNARNGHLFVTDGVVKIRNAKHKDDTSPLDAECDCYTCRNYSRAYLHHLDRCNEILGARLNTIHNLRYYQRVMAGLRQAIEEGKLERFVSDFYTRKGKAVPPLNA

SEQ ID NO: 57727 - protein, 374 aa, unidentified
  source 1..374: note = Mixta sp.
  REGION 1..374: note = tr|A0A506V7B6|A0A506V7B6_9GAMM Queuine tRNA-ribosyltransferase OS=Mixta sp. BIT-26 OX=2562439; GN = tgt PE=3 SV=1
MKFELDTKDGRARRGRLIFERGVVETPAFMPVGTYGTVKGMTPEEVKETGAQILLGNTFHLWLRPGQEIMKLHGDLHDFMQWQGPILTDSGGFQVFSLGDIRKITEAGVHFRNPINGDAIFLDPEKSMEIQYDLGSDIVMIFDECTPYPADWDYAKRSMEMSLRWAKRSREHFDKLGNKNALFGIIQGSVYEDLRDVSVKGLVEIGFDGYAVGGLAVGEPKEDMHRILEHVCPQIPEDKPRYLMGVGKPEDLVEGVRRGIDMFDCVMPTRNARNGHLFVTDGVVKIRNAKHKDDTSPLDAECDCYTCRNYSRAYLHHLDRCNEILGARLNTIHNLRYYQRVMAGLRKAIEEGKLEHFVSDFYTRKGKAVPPLND

SEQ ID NO: 57728 - protein, 374 aa, unidentified
  source 1..374: note = Mixta theicola
  REGION 1..374: note = tr|A0A2K1QC68|A0A2K1QC68_9GAMM Queuine tRNA-ribosyltransferase OS=Mixta theicola OX=1458355; GN = tgt PE=3 SV=1
MKFELDTKDGRARRGRLVFDRGVVETPAFMPVGTYGTVKGMTPEEVKETGAQILLGNTFHLWLRPGQEIMKLHGDLHDFMQWKGPILTDSGGFQVFSLGDIRKITEAGVHFRNPINGDAIFLDPEKSMEIQYDLGSDIVMIFDECTPYPADWDYAKRSMEMSLRWAKRSRDHFDKLGNKNALFGIIQGSVYEDLRDVSVKGLVEIGFDGYAVGGLAVGEPKEDMHRILEHVCPQIPEDKPRYLMGVGKPEDLVEGVRRGIDMFDCVMPTRNARNGHLFVTDGVVKIRNAKHKDDTSPLDAECDCYTCRNYSRAYLHHLDRCNEILGARLNTIHNLRYYQRLMAGLRKAIEEGKLECFVSEFYTRTGKAVPPLNA

SEQ ID NO: 57729 - protein, 376 aa, unidentified
  source 1..376: note = Mizugakiibacter sediminis
  REGION 1..376: note = tr|A0A0K8QQQ7|A0A0K8QQQ7_9GAMM Queuine tRNA-ribosyltransferase OS=Mizugakiibacter sediminis; OX = 1475481 GN=tgt PE=3 SV=1
MQFDLLATDGAARRGRLTFPRGTIETPAFMPVGTYGSVKAMTPRDLREVGAEIILGNTFHLWLRPGLDVIGAFGGLHRFIGWDGPILTDSGGFQVFSLAHKRKITEEGVAFASPVDGARVFLSPEESMRIQRVLDSDIAMIFDECTPYLIDGAPASEAEARRSMELSLRWAERSRLAFDALGNPNALFGIVQGGVHEELRRRSAEGLCAIGFDGYAVGGLAVGEPEEARNRTLDATVPLLPAERPRYLMGVGRPQDIVEAVRRGIDMFDCVMPTRNARNGFLFTRRGTLRIRNAKYERDTRPIEEGCTCYACRSGFSRAYLRHLDRCNEILGAQLATIHNLHHYQRLMADLRAAIAAGTLEDFAAAFHAGLAAGVD

SEQ ID NO: 57730 - protein, 379 aa, unidentified
  source 1..379: note = Mobilisporobacter senegalensis
  REGION 1..379: note = tr|A0A3N1XEV5|A0A3N1XEV5_9FIRM Queuine tRNA-ribosyltransferase OS=Mobilisporobacter senegalensis; OX = 1329262 GN=tgt PE=3 SV=1
MYKLINKDGNAKRGEFKTVHGTIQTPVFMNVGTAAAIKGAVSTMDLHEIKTQVELSNTYHLHVRPGDKVIKQLGGLHKFMVWDKPILTDSGGFQVFSLAKLRKIKEEGVYFNSHIDGRKIFMGPEESMQIQSHLASTIAMAFDECPPHPATREYMQNSVDRTTRWLKRCKIEMNRLNSLDDTINKNQMLFGINQGGTFEDIRIEHAKKISDLELDGYALGGLAVGESHEEMYHIIEKTIPYLPLEKPTYLMGVGTPENILEAVERGVDFFDCVYPARNGRHGHAYTNKGKMNLLNAKYELDSGPIEENCGCPACKHYSRAYIRHLLKAKEMLGLRLLVMHNLYFYNTMMEEIRDAIEKNCYQEYKKVKLEGFKEYNSKS

SEQ ID NO: 57731 - protein, 437 aa, Mobiluncus curtisii
  REGION 1..437: note = tr|A0A2X2YP98|A0A2X2YP98_9ACTO Queuine tRNA-ribosyltransferase OS=Mobiluncus curtisii OX=2051; GN = tgt PE=3 SV=1
MSENFEVVARLGQLGRAGVIHTPHGDIPTPAFVPVGTKATVKALIPEMIRELGASAVLANAYHLYLQPGPELVDKAGGLAAFMHWDGPTFTDSGGFQVLSLGAGYKKVLSQEFAASSRERTASREHGNHERSGDKRKLLEQAEESAELTPPDKRQAHPGLARVDDDGVNFRSHLDGTKHRFTPEISMQIQHHLGADIIFAFDELTSLLHSYDYQVISLERTRRWAERCLAEHERLTVERAGKPYQMLFGVIQGAQWEDLRRKAAHDLGKMEISGRHFDGFGIGGALEKENLGLICSWVCQELPEDRPRHLLGISEPEDFFAGIENGADTFDCVSPSRVARTGAAYLPTGRTNMARAAFREDFSPLQEGCGCYTCTNYTRAYLHHLLKAKEMLASTLLTIHNEYYTVHLVDSIRQAIIAGEDAYQDFKHRTLIQLGRA

SEQ ID NO: 57732 - protein, 437 aa, Mobiluncus curtisii
  REGION 1..437: note = tr|E6LYR5|E6LYR5_9ACTO Queuine tRNA-ribosyltransferase OS=Mobiluncus curtisii ATCC 51333; OX = 887326 GN=tgt PE=3 SV=1
MSENFEVVARLGQLGRAGVIHTPHGDIPTPAFVPVGTKATVKALIPEMIRELGASAVLANAYHLHLQPGPELVDKAGGLAAFMHWDGPTFTDSGGFQVLSLGAGYKKVLSQEFAASSRERTASREHGNHERSGDKRKLLEQAEESAELAPPDKRQAHPGLARVDDDGVNFRSHLDGTKHRFTPEISMQIQHHLGADIIFAFDELTSLLHSYDYQVISLERTRRWAERCLAEHERLTVERAGKPYQMLFGVIQGAQWEDLRRKAAHDLGKMEISGRHFDGFGIGGALEKENLGLICSWVCQELPEDRPRHLLGISEPEDFFAGIENGADTFDCVSPSRVARTGAAYLPTGRTNMARAAFREDFSPLQEGCGCYTCTNYTRAYLHHLLKAKEMLASTLLTIHNEYYTVHLVDSIRQAIIAGEDAYQDFKHQTLSQLGRA

SEQ ID NO: 57733 - protein, 441 aa, unidentified
  source 1..441: note = Mobiluncus holmesii
  REGION 1..441: note = tr|E6M3A2|E6M3A2_9ACTO Queuine tRNA-ribosyltransferase OS=Mobiluncus holmesii ATCC 35242; OX = 887899 GN=tgt PE=3 SV=1
MSENFEVVARLGQLGRAGVIHTPHGDIPTPAFVPVGTKATVKALIPEMIRELGASAVLANAYHLYLQPGPELVDKAGGLAAFMHWDGPTFTDSGGFQVLSLGAGYKKVLSQEFAASSRERTASREHGNHERSGDKRKLLEQAEESAELAPPDKRQAHPGLARVDDDGVNFRSHLDGTKHRFTPEISMQIQHHLGADIIFAFDELTSLLHSYDYQVISLERTRRWAERCLAEHERLTVERADKPYQMLFGVIQGAQWEDLRRKAAHDLGKMEISGRHFDGFGIGGALEKENLGLIGSWVCQELPEDRPRHLLGISEPEDFFAGIENGADTFDCVSPSRVARTGAAYLPTGRTNMARAAFREDFSPLQEGCGCYTCTNYTRAYLHHLLKAKEMLASTLLTIHNEYYTVHLVDSIRQAIIAGEDAYQDFKHQTLSQLGRACLPR

SEQ ID NO: 57734 - protein, 447 aa, Mobiluncus mulieris
  REGION 1..447: note = tr|A0A2J9KRT9|A0A2J9KRT9_9ACTO Queuine tRNA-ribosyltransferase OS=Mobiluncus mulieris OX=2052; GN = tgt PE=3 SV=1
MNAKFEICARLGALGRAGVIHTPHGDIPTPAFVPVGTKATVKALVPEQVRDLGASAVLANAYHLYLQPGPELVDRAGGLGAFMNWDGPTFTDSGGFQVLSLGAGYKKVLSQEFAGKVKSGGNPDSGMAPHEPADPGNRHDRSGQKRNELEESEENAQLAEPNRNKAHPGLARVDEDGVNFRSHLDGTHHRFSPEISMQIQHLLGADIIFAFDELTSLLHSYDYQVESLERTRRWAERCLREHRRLTEVREGKPYQMLFGVIQGAQWEDLRRKAARDLGLMCVDGQAFDGFGIGGALEKENLGRICAWVAEELPEDRPRHLLGISEPEDFFAGIEAGADTFDCVSPSRVARNGAAYLETGRTNMSRAAFREDFSPVQPGCGCYTCRNYTRAYIHHLLKAKEILASTLLTIHNEYYTVHLVQNIRAAILAGEDAYREFKQETLGKLGRL

SEQ ID NO: 57735 - protein, 447 aa, Mobiluncus mulieris
  REGION 1..447: note = tr|E0QQL4|E0QQL4_9ACTO Queuine tRNA-ribosyltransferase OS=Mobiluncus mulieris ATCC 35239; OX = 871571 GN=tgt PE=3 SV=1
MNAKFEICARLGALGRAGVIHTPHGDIPTPAFVPVGTKATVKALVPEQVRDLGASAVLANAYHLYLQPGPELVDRAGGLGAFMNWDGPTFTDSGGFQVLSLGAGYKKVLSQEFAGKVKSGGNPDSGMTPHEPADPGNRHDQSGQKRNELEESEENAQLAEPNRNKAHPGLARVDEDGVNFRSHLDGTHHRFSPEISMQIQHLLGADIIFAFDELTSLLHSYDYQVESLERTRRWAERCLREHRRLTEVREGKPYQMLFGVIQGAQWEDLRRKAARDLGLMCVDGQAFDGFGIGGALEKENLGRICAWVAEELPEDRPRHLLGISEPEDFFAGIEAGADTFDCVSPSRVARNGAAYLETGRTNMSRAAFREDFSPVQPGCGCYTCRNYTRAYIHHLLKAKEILASTLLTIHNEYYTVHMVQNIRAAILAGEDAYREFKQETLGKLGRL

SEQ ID NO: 57736 - protein, 375 aa, Moellerella wisconsensis
  REGION 1..375: note = tr|A0A0N1KI74|A0A0N1KI74_9GAMM Queuine tRNA-ribosyltransferase OS=Moellerella wisconsensis ATCC 35017 OX=1354267 GN=tgt PE=3 SV=1
MKYELQTTDGNARRGRLIFERGTVETPAFMPVGTYGTVKGMTPEEVKETGAEILLGNTFHLWLRPGQEIMKLHGDLHDFMQWQGPILTDSGGFQVFSLGATRKIKEEGVHFRNPINGEKIFLSPEKSMEIQYDLGSDIVMIFDECTPYPADWDYAKNSMEMSLRWAARSRQRFDELKNKNSLFGIIQGGIYEDLRDISVKGLVEIGFDGYAVGGLAVGEPKEDMHRILEHVCPQIPQDKPRYLMGVGKPEDLVEGVRRGIDMFDCVMPTRNARNGHLFVTTGVVKIRNAKYKSDTATLDDECDCYTCRHYSRAYLHHLDRCNEILGARLNTIHNLRYYQRLMSGIRSAIEAGNFDQFVQDFYQRIGKPVPPIKGE

SEQ ID NO: 57737 - protein, 375 aa, Moellerella wisconsensis; identical to SEQ ID NO: 57736
  REGION 1..375: note = tr|A0A0H2QT42|A0A0H2QT42_9GAMM Queuine tRNA-ribosyltransferase OS=Moellerella wisconsensis; OX = 158849 GN=tgt PE=3 SV=1

SEQ ID NO: 57738 - protein, 385 aa, Mogibacterium diversum
  REGION 1..385: note = tr|A0A2S0L324|A0A2S0L324_9FIRM Queuine tRNA-ribosyltransferase OS=Mogibacterium diversum; OX = 114527 GN=tgt PE=3 SV=1
MKESLSFELIKKDARTGARRGRITTPHGTIETPVFMPVGTQATVKAMKPEDVEKTGAEIILGNTYHLYLRPGEDIVREAGGLHKFMNWHRPILTDSGGFQVFSLGKFRKITEEGAKFKSYIDGSSHMMTPESSVEVQTALGSDIMMAFDECVAYPAEKKYVARSLERTTRWLRRCDDHHRRLEAKSAMETGADTMKQALFGIMQGGMFKDLRELSAKQITEIDLPGYAIGGLSVGEPKEIMLDVLDDCVDLLPEDKPRYLMGVGTPDYLFESVERGVDMFDCVLPTRLARHGMAMTSRGKINIKNAAFARDFSTLDPDCDCYCCRNYSRAYLRHLFKNDEILCSMLLSEHNIHFLVNMMKNIRKAIEEDRFLEYKREFYNKYGEF

SEQ ID NO: 57739 - protein, 385 aa, Mogibacterium pumilum
  REGION 1..385: note = tr|A0A223ASF3|A0A223ASF3_9FIRM Queuine tRNA-ribosyltransferase OS=Mogibacterium pumilum OX=86332; GN = tgt PE=3 SV=1
MKESLSFELIKKDSRTGARRGRITTPHGTIETPVFMPVGTQATVKAMKPEDVEKTGAEIILGNTYHLYLRPGEDIVREAGGLHKFMNWHRPILTDSGGFQVFSLGKFRKITEEGAKFKSYIDGSSHMMTPESSIEVQTALGSDIMMAFDECVAYPAEKKYVERSLERTTRWLKRCDDHHKRLETKAAMESGSDTMKQALFGIMQGGMFKDLREISAKQITEIDLPGYAIGGLSVGEPKEIMLDILDDCVDLLPEDKPRYLMGVGTPDYLFESVERGVDMFDCVLPTRLARHGMAMTSRGKINIKNAVFARDFSTLDPDCDCYCCRNYSRAYLRHLFKNDEILCSMLLSEHNIHFLVNMMKNIRKAIEEDRFLEYKRKFYNKYGEF

SEQ ID NO: 57740 - protein, 385 aa, Mogibacterium sp.
  REGION 1..385: note = tr|J5U883|J5U883_9FIRM Queuine tRNA-ribosyltransferase OS=Mogibacterium sp. CM50; OX = 936375 GN=tgt PE=3 SV=1
MKESLSFELLKRDYRTRARRGRITTPHGTIETPVFMPVGTQATVKAMKPEDVEKTGAEIILGNTYHLYLRPGEEIIREAGGLHKFMNWHRPILTDSGGFQVFSLGKFRKITEEGAKFKSYIDGSSHMMTPESSVEVQRALGSDIMMAFDECVAYPAERKYVERSLARTTRWLKRCDDHHRRLETKAATESGSDTMKQALFGIMQGGMYKELREASAKQITEFDLPGYAIGGLSVGEPKDIMLDVLDECTDLLPEDKPRYLMGVGTPDYLFEGVERGVDMFDCVLPTRLARHGVAMTSRGNINIKNAAFARDFRTLDHDCECYCCSNYSRAYLRHLFKNEEILCSMLLSEHNIHFLVNMMKNIRKAIEEDRFLEYKREFYNKYGEF

SEQ ID NO: 57741 - protein, 385 aa, Mogibacterium timidum
  REGION 1..385: note = tr|X8INY7|X8INY7_9FIRM Queuine tRNA-ribosyltransferase OS=Mogibacterium timidum ATCC 33093 OX=1401079 GN=tgt PE=3 SV=1
MKESLSFELLKRDYRTRARRGRITTPHGTIETPVFMPVGTQATVKAMKPEDVEKTGAEIILGNTYHLYLRPGEEIIREAGGLHKFMNWHRPILTDSGGFQVFSLGKFRKITEEGAKFKSYIDGSSHMMTPESSVEVQRALGSDIIMAFDECVAYPAERKYVERSLARTTRWLKRCDDHHRRLETKAATESGSDTMKQALFGIMQGGMYKELREASAKQITEFDLPGYAIGGLSVGEPKDIMLDVLDECTDLLPEDKPRYLMGVGTPDYLFEGVERGVDMFDCVLPTRLARHGVAMTSRGNINIKNAAFARDFRTLDHDCECYCCSNYSRAYLRHLFKNEEILCSMLLSEHNIHFLVNMMKNIRKAIEEDRFLEYKREFYNKYGEF

SEQ ID NO: 57742 - protein, 376 aa, unidentified
  source 1..376: note = Moheibacter sediminis
  REGION 1..376: note = tr|A0A1W1YAX1|A0A1W1YAX1_9FLAO Queuine tRNA-ribosyltransferase OS=Moheibacter sediminis; OX = 1434700 GN=tgt PE=3 SV=1
MNFQIEQSDTHSKARAGEITTAHGKIQTPIFMPVGTVASVKSVHQRELRDDIKAQIILGNTYHLYLRPGIEILNKAGGLHKFMNWDLPILTDSGGFQVYSLSDRRKVSEEGVRFKSHIDGSYHMFSPEYSMEIQRNIGADIIMAFDELTGIPAQYKDAKRAMNVTHRWLERCKTWLNENPSLYGYEQTLYPIVQGNSFHDLRKESAEYIANFGAEGNAIGGLSVGEPEDVMYEITDLVTEILPKEKPRYLMGVGTPWNILECIALGIDQFDCVMPTRNARNGMLFTWNGVMNMKNAKWKDDFTPLDELGTSYVDSEYSKAYVRHLFISDEYLGKQIASVHNLAFYLDLVRTARKHILDGDFTQWKNQVVPKLRQRL

SEQ ID NO: 57743 - protein, 375 aa, unidentified
  source 1..375: note = Monaibacterium marinum
  REGION 1..375: note = tr|A0A2C9CW79|A0A2C9CW79_9RHOB Queuine tRNA-ribosyltransferase OS=Monaibacterium marinum; OX = 1690039 GN=tgt PE=3 SV=1
MSRFSFTIAATDGKARTGQIDTPRGEIRTPAFMPVGTAATVKAMMPENVRATGADILLGNTYHLMLRPGAERVANLGGLHKFMNWDRPILTDSGGFQVMSLADLRKMSEDGVRFKSHIDGSEHFLSPERSMEIQKLLGSDIVMCFDECPALPADRAAITKSMELSMRWAQRSRDAFGDRPGHALFGIQQGGLEEDLRGKSAEALTSIGFDGYAVGGLAVGEGQEAMFGCLDYAPDQLPQDKPRYLMGVGKPDDIVGAVQRGIDMFDCVLPSRSGRTGQAQTRFGQVNIRNARHADDPRPLDPECTCPACSNYSRAYLHHVNKAQEIIASMLLTWHNLHYYQELMQGLRDAISVGQLDQFVAAFHAKRAEGDMERL

SEQ ID NO: 57744 - protein, 376 aa, unidentified
  source 1..376: note = Mongoliibacter ruber
  REGION 1..376: note = tr|A0A2T0WQJ9|A0A2T0WQJ9_9BACT Queuine tRNA-ribosyltransferase OS=Mongoliibacter ruber OX=1750599; GN = tgt PE=3 SV=1
MKFNLEATDPKSKARAGVIKTDHGDIATPIFMPVGTAGSVKAVHQRELTYDVKAQIILGNTYHLYLRPGLDILERAGGLHKFNGWSKPILTDSGGYQVFSLAENRKLTEEGAVFKSHIDGSKHLFSPEGVMDIQRIIGADIIMAFDECPPYPCTHDYARNSMELTHRWLKRCIQRFDTTEGKYGYSQALFPIVQGSVFKDLRRQSAEFVASCDREGNAIGGLSVGEPVEDMYEMTDMVTDILPADKPRYLMGVGTPANILEGIALGVDMFDCVMPTRNARNGMLFTSEGIMNMRNEKWKDDFSPIDPHINSYVSSFYSKAYLRHLVISKEILAAQIASIHNLSFYLWLVTQAREHIIAGDFAVWKNQMVEKVSRRL

SEQ ID NO: 57745 - protein, 376 aa, unidentified
  source 1..376: note = Monoglobus pectinilyticus
  REGION 1..376: note = tr|A0A2K9P123|A0A2K9P123_9FIRM Queuine tRNA-ribosyltransferase OS=Monoglobus pectinilyticus; OX = 1981510 GN=tgt PE=3 SV=1
MYRLISKHGRARRGEFKTVHGTIQTPVFMNVGTAAAIKGALDTFDLKDIGCQVELSNTYHLHLRPGDEVIRDMGGLHKFMNWDRPILTDSGGFQVFSLAKLRNIKEEGVYFSSHIDGHKIFMGPEESMRIQSNLASTIAMAFDECVENPCERQYAQDSADMTVRWLKRCKDELARLNSLDNTINKNQMLFGINQGSTYRDIRIEHMKQIVDLDLNGYAIGGLAVGESTEDMYNIIEAVEPYMPEDKPRYLMGVGTPINIIEAVYRGVDFFDCVMPSRNARHGTIFTSEGILNIRNAKYERDDRPVDPNCGCHTCRNFSRAYFRHLFKANEMLAMRLAVIHNLYFYNNLMAEIRSALDNGKFSEYRQSKLGVLDRHI

SEQ ID NO: 57746 - protein, 369 aa, unidentified
  source 1..369: note = Moorea bouillonii
  REGION 1..369: note = tr|A0A1U7N7M2|A0A1U7N7M2_9CYAN Queuine tRNA-ribosyltransferase OS=Moorea bouillonii PNG OX=568701; GN = tgt PE=3 SV=1
MNQQKNNFSFQCQASCSHTKARAGVFVTPHGVVETPRFMPVGTLATVKTLTPAQLEVAGAQMVLANTYHLHLQPGEAIIKQAGGLHRFMGWHGPILTDSGGFQVFSLSQLCTITEEGVTFRSPRDGRMIDLTPERCMEIQHALGADVIMAFDECPPYPAERTEVELATQRTYRWLKRCIVAHNRPDQQALFGIVQGGVYLDLRQKAAESLVELDLPGYAIGGVSVGEPAELIHQIVQTTAPLLPWHKPRYLMGVGTYREMVLAIASGIDLFDCVIPTRLGRHGTALVQGERWNLKNARFREDFSPLDASCPCYCCQNFSRAYLNHLVRSRESLGYMLLSHHNVTELIRFTQAIRAAILSDQFTTQFAHP

SEQ ID NO: 57747 - protein, 374 aa, unidentified
  source 1..374: note = Moorea producens
  REGION 1..374: note = tr|A0A1D8TZD3|A0A1D8TZD3_9CYAN Queuine tRNA-ribosyltransferase OS=Moorea producens PAL-8-15-08-1; OX = 1458985 GN=tgt PE=3 SV=1
MNQQKINFSFQCQASCSHTKARAGVFVTPHGVVETPRFMPVGTLATVKTLTPAQLEVAGAQMVLANTYHLHLQPGEAIIKKAGGLHRFMGWNGPILTDSGGFQVFSLSQLRTITEEGVRFKSPRDGRMIDITPERCMEIQHALGADVIMAFDECPPYPAERTEVELATQRTYRWLKRCIVAHNRPNAQALFGIVQGGVYLDLRQKAAESLVELDLPGYAIGGVSVGEPAELIHQIVETTAPLLPWHKPRYLMGVGTYREMVLAIASGIDLFDCVIPTRLGRHGTALVQGERWNLKNARFREDFSPLDASCPCYCCQNFSRAYLNHLVRSRESLGYMLLSHHNVTELIRFTQAIRAAILSDQFTTQFARWLFTSC

SEQ ID NO: 57748 - protein, 374 aa, unidentified
  source 1..374: note = Moorea producens
  REGION 1..374: note = tr|A0A1D9G6E8|A0A1D9G6E8_9CYAN Queuine tRNA-ribosyltransferase OS=Moorea producens JHB OX=1454205; GN = tgt PE=3 SV=1
MNQQKINFSFQCQASCSHTKARAGVFVTPHGVVETPRFMPVGTLATVKTLTPAQLEVAGAQMVLANTYHLHLQPGEAIIKQAGGLHRFMGWYGPILTDSGGFQVFSLSQLRTITEEGVTFRSPRDGRMINLTPERCMEIQNALGADVIMAFDECPPYPAERTEVELATQRTYRWLKRCIVAHNRSDQQALFGIVQGGVYLDLRQRAAESLVELDLPGYAIGGVSVGEPAELIHQIVQTTAPLLPWHKPRYLMGVGTYREMVLAIASGIDLFDCVIPTRLGRHGTALVQGERWNLKNAQFREDFSPLDASCPCYCCQNFSRAYLNHLVRSRESLGYMLLSQHNVTELIRFTQAIRAAILSDQFTTQFAHWLSTSC

SEQ ID NO: 57749 - protein, 373 aa, Moorella glycerini
  REGION 1..373: note = tr|A0A0C7N259|A0A0C7N259_9THEO Queuine tRNA-ribosyltransferase OS=Moorella glycerini OX=55779; GN = tgt PE=3 SV=1
MPAVTFTVLKRDRATGARLGRLKTPHGTIETPIFMPVGTQATVKTMTPEEVAGVGAQIILANTYHLYLRPGADIIREAGGLHNFMHWEKPILTDSGGFQVFSLADLREISDAGVTFRSHLDGSTHFMGPAESMAVQEALGSDIAMAFDECVAYPASREEVEAGVERTSRWAEICLQVHRREDQAVFGIIQGGVIPELRRRSAREITALDFPGYGIGGLSVGEPKELMYSILEDLQGYLPENKPRYLMGVGSPDCLIEGVKRGVDMFDCVLPTRIARNGTVMTTYGKLVVRNAAYARDFRPLDPECDCYTCRHYSRAYIRHLLKVDEILGLRLTTIHNLYFLLKLMHRIRQAIASNDLEAFEADFYAKYNSGKI

SEQ ID NO: 57750 - protein, 373 aa, Moorella humiferrea
  REGION 1..373: note = tr|A0A2T0AY51|A0A2T0AY51_9THEO Queuine tRNA-ribosyltransferase OS=Moorella humiferrea OX=676965; GN = tgt PE=3 SV=1
MPPVTFTLQKKDRNTGARLGLLQTPHGTVKTPVFMPVGTQATVKTMTPEEVAEVGAEIILANTYHLYLRPGADVVREAGGLHKFMHWERPILTDSGGFQVFSLAGLREISDDGVTFRSHLDGSTHFMGPKESMAVQEALGSDIAMAFDECVAYPAGREEVEAGVKRTSRWAEICLEVHQREDQAVFGIIQGGVFPDLRRRSAREITALDFPGYGIGGLSVGEPKELMYSVLDELQEYLPENKPRYLMGVGSPDCLIEGVKRGVDMFDCVLPTRIARNGTVMTTYGKLVVRNAAYARDFRPLDPECACYTCRNYTRAYIRHLLKAGEILGLRLTTIHNLYFLLKLMERIRRAIEANDLEAMAAEFYAKYNSGKI

SEQ ID NO: 57751 - protein, 373 aa, Moorella mulderi
  REGION 1..373: note = tr|A0A151AXR7|A0A151AXR7_9THEO Queuine tRNA-ribosyltransferase OS=Moorella mulderi DSM 14980; OX = 1122241 GN=tgt PE=3 SV=1
MPAVTFTVLKRDRATGARLGRLKTPHGTIETPVFMPVGTQATVKTMTPEEVAGVGAQIILANTYHLYLRPGADIIREAGGLHNFMHWEKPILTDSGGFQIFSLADLREISDAGVTFRSHLDGSTHFMGPVESMAVQESLGSDIAMAFDECVAYPASREEVEAGVERTSRWAEICLEVHRREDQAVFGIIQGGVIPELRRRSAREITALDFPGYGIGGLSVGEPKELMYSILEDLQGYLPENKPRYLMGVGSPDCLIEGVKRGVDMFDCVLPTRIARNGTVMTTYGKLVVRNAAYARDFRPLDPECDCYTCRHYSRAYIRHLLKADEILGLRLTTIHNLYFLLKLMHRIRQAIANNDLEAFEADFYAKYNSGKI

SEQ ID NO: 57752 - protein, 375 aa, Moorella sp.
  REGION 1..375: note = tr|A0A101EBW7|A0A101EBW7_9THEO Queuine tRNA-ribosyltransferase OS=Moorella sp. 60_41 OX=1635264; GN = tgt PE=3 SV=1
MAAVTFEVLKEEKTFGARLGRLLTPHGVVHTPVFMPVGTQATVKTMTPEEVEELGAEIILSNTYHLYLRPGAEIIREAGGLHKFMNWHRPILTDSGGFQVFSLSPLREVRPEGVVFRSHLDGSTHFMGPEESIAVQEALGSDIAMAFDECVAYPATYEEVAAGVERTTRWAERCLTVHSRKDQALFGIIQGGTFPELRRRSAREITSLDFPGYGIGGLSVGEPKDVMYRILEELRALLPEDRPRYLMGVGSPDCLIEGVKRGIDMFDCVLPTRIARNGTVLTSRGKLVVRNAAYARDFRPLDPECDCYACRNFSRAYIRHLLKANEVLGLRLTTIHNLHFSLRLMERIRRAIADNCLEEMAREFYARYNSPGENL

SEQ ID NO: 57753 - protein, 373 aa, Moorella sp.
  REGION 1..373: note = tr|A0A4P6B879|A0A4P6B879_9THEO Queuine tRNA-ribosyltransferase OS=Moorella sp. E306M OX=2572683; GN = tgt PE=3 SV=1
MPAVTFTVLKRDRATGARLGRLKTPHGTVETPVFMPVGTQATVKTMTPEEVAGVGAEIILANTYHLYLRPGADIIREAGGLHKFMHWDKPILTDSGGFQVFSLADLREISDAGVTFRSHLDGSTHFMGPAESMAVQEALGSDIAMAFDECVAYPASREEVEAGVERTSRWAEICLEVHRREDQAVFGIIQGGVIPELRRRSAREITALDFPGYGIGGLSVGEPKELMYSILEDLQGYLPEGKPRYLMGVGSPDCLIEGVKRGVDMFDCVLPTRIARNGTVMTTYGKLVVRNAAYARDFRPLDPECECYTCRHYTRAYIRHLLKADEILGLRLTTIHNLYFLLKLMHQIRQAIANNDLEAMAAEFYAKYNSGKI

SEQ ID NO: 57754 - protein, 373 aa, Moorella thermoacetica
  REGION 1..373: note = sp|Q2RHU3|TGT_MOOTA Queuine tRNA-ribosyltransferase; OS = Moorella thermoacetica (strain ATCC 39073 / JCM 9320); OX = 264732 GN=tgt PE=3 SV=1
MPAVTFTVLKRDRSTGARLGRLTTPHGTIETPVFMPVGTQATVKTMTPEEVAGLGAEIILANTYHLYLRPGADIIREAGGLHRFMHWERPILTDSGGFQVFSLADLREISDEGVTFRSHLDGSIHFLGPAESMAVQEALGSDIAMAFDECVAYPASPEEVAAGVERTSRWAEACLRAHRREDQAVFGIIQGGTIPELRRRSAREITALDFPGYGIGGLSVGEPKELMYSILEELQGYLPENKPRYLMGVGSPDCLIEGVKRGVDMFDCVLPTRIARNGTVMTTYGKLVVRNAAYARDFRPLDPECDCYTCRNYTRAYIRHLLKAEEILGLRLTTIHNLHFLIKLMQRLRQAIAEGRLEEVAADFYERYNSGKI

SEQ ID NO: 57755 - protein, 373 aa, Moorella thermoacetica; identical to SEQ ID NO: 57754
  REGION 1..373: note = tr|A0A1J5P764|A0A1J5P764_MOOTH Queuine tRNA-ribosyltransferase OS=Moorella thermoacetica OX=1525; GN = tgt PE=3 SV=1

SEQ ID NO: 57756 - protein, 377 aa, unidentified
  source 1..377: note = Moranella endobia
  REGION 1..377: note = tr|F7XY24|F7XY24_MOREP Queuine tRNA-ribosyltransferase OS=Moranella endobia (strain PCIT); OX = 903503 GN=tgt PE=3 SV=1
MEYQLLNTDSKARRGRLVFDRGVVETPAFMPVGTYGTVKGMTPTEITETGTQILLGNTFHLWLRPGQAVIKLHGDLHNFMQWHGPILTDSGGFQVFSLSNIRNITEAGVHFRNLINGNDIFLSPEKSMEIQYDLGSDIVMIFDECTPYPSTWDYAKRSMEMSLRWAVRSRQRFDELENTNALFGIIQGGIYEQLRYASINKLVEIGFDGYAIGGLAVGETKADMHRILAHLCPQIPADKPRYLMGVGKPEDLVEGVRHGIDMFDCVIPTRNARNGQLFVTNGVVKIRNARYKDDVAPPDAECDCYTCRNYSRAYLHHLDSCKEILGARLNTIHNLYYYQHLLNILRQAIADGKLEQVVGEFYRRTKISSTNGSNDTN

SEQ ID NO: 57757 - protein, 378 aa, Moraxella atlantae
  REGION 1..378: note = tr|A0A1B8QG67|A0A1B8QG67_9GAMM Queuine tRNA-ribosyltransferase OS=Moraxella atlantae OX=34059; GN = tgt PE=3 SV=1
MQFTLHKTATGESRARRGTLKLAHGEVQTPVFMPVGTYGTVKGMLPRDLHAIEAQIILGNTFHLWLRPTPAVIEQFGGLHDFMGWDKPILTDSGGFQVFSLGAMRKIREEGVYFRSPIDGARVFLSPEVSMQIQHSLNSDIVMQFDECTPYPATRTEAEASLQLSLRWGKRCRDEHHRLGNHNALFGIIQGSMYADLRAQSLAGLLEIGFDGYAIGGLSVGEPKEEMRAVLSYLPHQMPAERPRYLMGVGTPADIVEAVRCGVDMFDCVMPTRNARNGHYFTSTGVVKIKNAANRFDESPLDAECDCYTCQNFSRAYLHHLFKCGEMLSAQLGTIHNLRYYQNLMQHIRTAIEQDRFDEFVSEFYAKQGLLAPELVLA

SEQ ID NO: 57758 - protein, 378 aa, Moraxella atlantae
  REGION 1..378: note = tr|A0A1B8Q8K7|A0A1B8Q8K7_9GAMM Queuine tRNA-ribosyltransferase OS=Moraxella atlantae OX=34059; GN = tgt PE=3 SV=1
MQFTLHKTATGESRARRGTLKLAHGEVQTPVFMPVGTYGTVKGMLPRDLHAIEAQIILGNTFHLWLRPTPAVIEQFGGLHGFMGWDKPILTDSGGFQVFSLGAMRKIREEGVYFRSPIDGARVFLSPEVSMQIQHSLNSDIVMQFDECTPYPATRTEAEASLQLSLRWGKRCRDEHHRLGNHNALFGIIQGSMYADLRAQSLAGLLEIGFDGYAIGGLSVGEPKEEMRAVLSYLPHQMPADRPRYLMGVGTPADIVEAVRCGVDMFDCVMPTRNARNGHYFTSTGVVKIKNAANRFDESPLDAECDCYTCQNFSRAYLHHLFKCGEMLSAQLGTIHNLRYYQNLMQHIRTAIEQDRFDEFVSEFYAKQGLLAPELVLA

SEQ ID NO: 57759 - protein, 377 aa, Moraxella bovis
  REGION 1..377: note = tr|A0A378PXL1|A0A378PXL1_MORBO Queuine tRNA-ribosyltransferase OS=Moraxella bovis OX=476 GN=tgt; PE = 3 SV=1
MKFTLHKTDTKTRARRGTVHLAHGDVATPAFMPVGTYGTVKSMLPRDIHAIGADIILGNTFHLWLRPTTSVIDEFGGLHEFIGWDKPILTDSGGFQVFSLGAMRKITEEGVHFRSPVDGSKVFLSPEISMQIQHSLNSDIVMQFDECTPYPTTHTDAQKSLELSLRWGQRCLDEHHKLGNKNALFGIVQGSMYEDLRMQSLTALTDMHFDGYAIGGLSVGEPKDEMIKVLNYLPNRMPSDKPRYLMGVGTPSDIVEAVRRGVDMFDCVMPTRNARNGHLFTRTGAVKIKNAVHRHDKNPLDSECDCYTCQNFSRAYLHHLHKCGEMLSAQLNTIHNLRYYQNLMKGIRESLENETFDEFVATFYAKQGLDVPELGLV

SEQ ID NO: 57760 - protein, 377 aa, Moraxella bovis
  REGION 1..377: note = tr|A0A2Z4R613|A0A2Z4R613_MORBO Queuine tRNA-ribosyltransferase OS=Moraxella bovis OX=476 GN=tgt; PE = 3 SV=1
MKFTLYKTDTKTRARRGTVHLAHGDVATPAFMPVGTYGTVKSMLPRDIHAIGADIILGNTFHLWLRPTTSVIDEFGGLHEFIGWDKPILTDSGGFQVFSLGAMRKITEEGVHFRSPVDGSKVFLSPEISMQIQHSLNSDIVMQFDECTPYPTTHTDAQKSLELSLRWGQRCLDEHHKLGNKNALFGIVQGSMYEDLRMQSLTALTDMHFDGYAIGGLSVGEPKDEMIKVLNYLPNRMPSDKPRYLMGVGTPSDIVEAVRRGVDMFDCVMPTRNARNGHLFTRTGAVKIKNAVHRHDKNPLDSECDCYTCQNFSRAYLHHLHKCGEMLSAQLNTIHNLRYYQNLMKGIRESLENETFDEFVATFYAKQGLDVPELGLV

SEQ ID NO: 57761 - protein, 377 aa, Moraxella bovoculi
  REGION 1..377: note = tr|A0A3F3A812|A0A3F3A812_9GAMM Queuine tRNA-ribosyltransferase OS=Moraxella bovoculi OX=386891; GN = tgt PE=3 SV=1
MKFTLHKTDTKTRARRGTVHLAHGEVQTPAFMPVGTYGTVKGMLPRDIHAIGADIILGNTFHLWLRPTTSVIDEFGGLHEFIGWDKPILTDSGGFQVFSLGAMRKITEEGVHFRSPVDGSKVFLSPEISMQIQNSLNSDIVMQFDECTPYPATYTDAQKSLELSLRWGQRCLDEHQKLGNKNALFGIVQGSMYEDLRMQSLTALTDMPFDGYAIGGLSVGEPKDEMIKVLNYLPNRMPSDKPRYLMGVGTPSDIVEAVRRGVDMFDCVMPTRNARNGHLFTSTGAVKIKNAVHRHDKNPLDSECDCYTCQNFSRAYLHHLHKCGEMLSAQLNTIHNLRYYQNLMKGIRESLENETFDEFVATFYAKQGLQAPALSLK

SEQ ID NO: 57762 - protein, 377 aa, Moraxella bovoculi
  REGION 1..377: note = tr|A0A066UEA5|A0A066UEA5_9GAMM Queuine tRNA-ribosyltransferase OS=Moraxella bovoculi 237; OX = 743974 GN=tgt PE=3 SV=1
MKFTLHKTDTKTRARRGTVHLAHGEVQTPAFMPVGTYGTVKGMLPRDIHAIGADIILGNTFHLWLRPTTSVIDEFGGLHEFIGWDKPILTDSGGFQVFSLGAMRKITEEGVHFRSPVDGSKVFLSPEISMQIQHSLNSDIVMQFDECTPYPATYTDARKSLELSLRWGQRCLEEHHKLGNKNALFGIVQGSMYEDLRMQSLTALTDMPFDGYAIGGLSVGEPKDEMIKVLNYLPNRMPSDKPRYLMGVGTPSDIVEAVRRGVDMFDCVMPTRNARNGHLFTSTGAVKIKNAVHRHDKNPLDSECDCYTCQNFSRAYLHHLHKCGEMLSAQLNTIHNLRYYQNLMKGIRESLENETFDEFVATFYAKQGLQAPALSLK

SEQ ID NO: 57763 - protein, 385 aa, Moraxella canis
  REGION 1..385: note = tr|A0A1S9ZMI3|A0A1S9ZMI3_9GAMM Queuine tRNA-ribosyltransferase OS=Moraxella canis OX=90239 GN=tgt; PE = 3 SV=1
MKFTLHNTDGGNNHARRGTVSLAHGEVQTPAFMPVGTYGTVKGMLPRDIEGIGADIILGNTFHLWLRPGMEVVREFGGLHDFMGWNKPILTDSGGFQVFSLGAMRKITEEGVAFRSPVDGAKVFLSPETSMQIQNDLNSDIVMQFDECTPYPATHEDAKKSLELSLRWGQRCIDEHQRLGNKNALFGIIQGSMYQDLRMQSLDGLLKMPFDGYAIGGLSVGEPKEEMIKVLNYLPNAMPHDKPRYLMGVGKPADIVEAVRRGVDMFDCVMPTRNARNGHYFVTGNSDNKGVIRIKNSQYRTDTAPLDEHCDCYTCQNFSRAYLYHLHKCKEMLSAQLATIHNLRYYQRLMADIRQAIENNRFDEFVAQFYANWGMQVPDFDKNAD

SEQ ID NO: 57764 - protein, 377 aa, Moraxella caprae
  REGION 1..377: note = tr|A0A378R1R5|A0A378R1R5_9GAMM Queuine tRNA-ribosyltransferase OS=Moraxella caprae OX=90240; GN = tgt PE=3 SV=1
MKFTLHKTDTKTRARRGTVHLAHGDVATPAFMPVGTYGTVKGMLPRDIHTIGADIILGNTFHLWLRPTTSVIDEFGGLHEFIGWDKPILTDSGGFQVFSLGAMRKITEEGVHFRSPVDGSKVFLSPEISMQIQHSLNSDIVMQFDECTPYPATHTDAQKSLELSLRWGQRCLDEHHKLGNKNALFGIVQGSMYEDLRMQSLTALTDMPFDGYAIGGLSVGEPKDEMIKVLNYLPNRMPSDKPRYLMGVGTPSDIVEAVRRGVDMFDCVMPTRNARNGHLFTSTGAVKIKNAVHRHDKNPLDSECDCYTCQNFSRAYLHHLHKCGEMLSAQLNTIHNLRYYQNLMKGIRESLENETFDEFVVTFYAKQGLDVPELGLV

SEQ ID NO: 57765 - protein, 382 aa, Moraxella catarrhalis
  REGION 1..382: note = tr|A0A3A9LH00|A0A3A9LH00_MORCA Queuine tRNA-ribosyltransferase OS=Moraxella catarrhalis OX=480; GN = tgt PE=3 SV=1
MKFTLHHTDGGNNHARRGTVSLAHGNVQTPAFMPVGTYGTVKGMLPRDIHGIGADIILGNTFHLWLRPGMEVIRHFGGLHHFIGWDKPILTDSGGFQVFSLGAMRKISEEGVAFRSPVDGAKVFLSPETSMQIQNDLNSDIIMQFDECTPYPATHDDAKKSLELSLRWGQRCLDEHHRLGNKNALFGIIQGSMYKDLRMQSLQGLLKMPFDGYAIGGLSVGEPKEEMIKVLDYLPCAMPNDKPRYLMGVGKPADIVEAVRRGVDMFDCVMPTRNARNGHYFVTGNHDNKGVIRIKNSQYRTDDTPLDEHCDCYTCQNFSRAYLYHLHKCKEMLSAQLATIHNLRYYQRLMVDIRQAIEHHAFDEFVVQFYARWGMVVPPFNS

SEQ ID NO: 57766 - protein, 382 aa, Moraxella catarrhalis
  REGION 1..382: note = tr|A0A3A9P4B8|A0A3A9P4B8_MORCA Queuine tRNA-ribosyltransferase OS=Moraxella catarrhalis OX=480; GN = tgt PE=3 SV=1
MKFTLHHTDGGNNHARRGTVSLAHGNVQTPAFMPVGTYGTVKGMLPRDIHGIGADIILGNTFHLWLRPGMEVIRHFGGLHHFIGWDKPILTDSGGFQVFSLGAMRKISEEGVAFRSPVDGAKVFLSPETSMQIQNDLNSDIVMQFDECTPYPATHDDAKKSLELSLRWGQRCLDEHHRLGNKNALFGIIQGSMYKDLRMQSLQGLLKMPFDGYAIGGLSVGEPKEEMIKVLDYLPCAMPNDKPRYLMGVGKPADIVEAVRRGVDMFDCVMPTRNARNGHYFVTGNHDNKGVIRIKNSQYRTDDTPLDEHCDCYTCQNFSRAYLYHLHKCKEMLSAQLATIHNLRYYQRLMVDIRQAIEHHAFDEFVVQFYARWGMAVPPFNS

SEQ ID NO: 57767 - protein, 385 aa, Moraxella caviae
  REGION 1..385: note = tr|A0A1T0A2G7|A0A1T0A2G7_9GAMM Queuine tRNA-ribosyltransferase OS=Moraxella caviae OX=34060; GN = tgt PE=3 SV=1
MKFTLHNTDNGNNHARRGTVHLAHGDVQTPAFMPVGTYGTVKGMLPRDIHGIGADIILGNTFHLWLRPGMEVIREFGGLHQFIGWDKPMLTDSGGFQVFSLGAMRKISEEGVAFRSPVDGAKVFLSPETSMQIQHTLNSDIVMQFDECTPYPATHLEAQKSLELSLRWGQRCLDEHHKLGNKNALFGIVQGSMYKDLRMQSLEGLLAMPFDGYAIGGLSVGEPKDEMIGVLNYLPKAMPADKPRYLMGVGKPADIVEAVRRGVDMFDCVMPTRNARNGHYFVTGSTENKGVVRIKNSQYRTDHAPLDEHCDCYTCQNFSRAYLYHLHKCGEMLSAQLATIHNLHYYQRLMADIRSSIEQGKFDEFVSEFYGRWGIDVPAYDKNAH

SEQ ID NO: 57768 - protein, 382 aa, Moraxella cuniculi
  REGION 1..382: note = tr|A0A448GYM2|A0A448GYM2_9GAMM Queuine tRNA-ribosyltransferase OS=Moraxella cuniculi OX=34061; GN = tgt PE=3 SV=1
MKFTLHNVDGGNNHARRGTVSLAHGQVQTPAFMPVGTYGTVKGMLPRDIEGIGADIILGNTFHLWLRPGMEVIREFGGLHNFAQWHKPILTDSGGFQVFSLGAMRKISEEGVAFRSPVDGAKVFLSPETSMQIQKDLNSDIVMQFDECTPYPATHEAAKASLELSLRWGQRCLDEHQRLGNKNALFGIIQGSMYQDLRMQSLEGLLAMPFDGYAIGGLSVGEPKEEMIQVLNYLPNAMPSDKPRYLMGVGKPADIVEAVRRGVDMFDCVMPTRNARNGHYFVTGDASNKGVVRIKNSQYRTDTAPLDSQCDCYTCQNFSRAYLYHLHKCKEMLSAQLATIHNLRYYQRLMAQIRTAIEQQQFDKFLSEFYGNWGMAVPEFDK

SEQ ID NO: 57769 - protein, 382 aa, Moraxella cuniculi
  REGION 1..382: note = tr|A0A1N7FZB3|A0A1N7FZB3_9GAMM Queuine tRNA-ribosyltransferase OS=Moraxella cuniculi DSM 21768; OX = 1122245 GN=tgt PE=3 SV=1
MKFTLHNVDGGNNHARRGTVSLAHGQVQTPAFMPVGTYGTVKGMLPRDIEGIGADIILGNTFHLWLRPGMEVIREFGGLHNFAQWHKPILTDSGGFQVFSLGAMRKISEEGVAFRSPVDGAKVFLSPETSMQIQKDLNSDIVMQFDECTPYPATHEAAKASLELSLRWGQRCLDEHQRLGNKNALFGIIQGSMYQDLRMQSLEGLLAMPFDGYAIGGLSVGEPKEEMIQVLNYLPNAMPSDKPRYLMGVGKPADIVEAVRRGVDMFDCVMPTRNARNGHYFVTGDANNKGVVRIKNSQYRTDTAPLDSQCDCYTCQNFSRAYLYHLHKCKEMLSAQLATIHNLRYYQRLMAQIRTAIEQQQFDKFLSEFYGNWGMAVPEFDK

SEQ ID NO: 57770 - protein, 377 aa, Moraxella equi
  REGION 1..377: note = tr|A0A378QPW9|A0A378QPW9_9GAMM Queuine tRNA-ribosyltransferase OS=Moraxella equi OX=60442 GN=tgt; PE = 3 SV=1
MKFTLHKTDTKTRARRGTVHLAHGDVATPAFMPVGTYGTVKGMLPRDIHAIGADIILGNTFHLWLRPTTSVIDEFGGLHEFIGWDKPILTDSGGFQVFSLGAMRKITEEGVHFRSPVDGSKVFLSPEISMQIQHSLNSDIVMQFDECTPYPATHTDAQKSLELSLRWGQRCLDEHHKLGNKNALFGIVQGSMYEDLRMQSLTALTQMPFDGYAIGGLSVGEPKDEMIKVLNYLPNRMPSDKPRYLMGVGTPSDIVEAVRRGVDMFDCVMPTRNARNGHLFTSTGAVKIKNAVHRHDKNPLDGECDCYTCQNFSRAYLHHLHKCGEMLSAQLNTIHNLRYYQNLMKGIRESLENETFDEFVATFYAKQGLDVPELGLV

SEQ ID NO: 57771 - protein, 377 aa, Moraxella lacunata
  REGION 1..377: note = tr|A0A378TSN9|A0A378TSN9_MORLA Queuine tRNA-ribosyltransferase OS=Moraxella lacunata OX=477; GN = tgt PE=3 SV=1
MKFTLHKTDTKTRARRGTVHLAHGDVATPAFMPVGTYGTVKGMLPRDIHAIGADIILGNTFHLWLRPTTSVIDEFGGLHDFIGWDKPILTDSGGFQVFSLGAMRKITEEGVHFRSPVDGSKVFLSPEISMQIQHSLNSDIVMQFDECTPYPATHTDAQKSLELSLRWGQRCLDEHHKLGNKNALFGIVQGSMYEDLRMQSLTALTEMPFDGYAIGGLSVGEPKDEMIKVLNYLPNRMPSDKPRYLMGVGTPSDIVEAVRRGVDMFDCVMPTRNARNGHLFTSTGAVKIKNAVHRHDKNPLDSECDCYTCQNFSRAYLHHLHKCGEMLSAQLNTIHNLRYYQNLMKGIRESLENETFDEFVATFYAKQGLDVPELGVC

SEQ ID NO: 57772 - protein, 377 aa, Moraxella lacunata
  REGION 1..377: note = tr|A0A1V4H0P8|A0A1V4H0P8_MORLA Queuine tRNA-ribosyltransferase OS=Moraxella lacunata OX=477; GN = tgt PE=3 SV=1
MKFTLHKTDTKTRARRGTVHLAHGDVATPAFMPVGTYGTVKGMLPRDIHAIGADIILGNTFHLWLRPTTSVIDEFGGLHDFIGWDKPILTDSGGFQVFSLGAMRKITEEGVHFRSPVDGSKVFLSPEISMQIQHSLNSDIVMQFDECTPYPATHTDAQKSLELSLRWGQRCLDEHHKLGNKNALFGIVQGSMYEDLRMQSLTALTDMPFDGYAIGGLSVGEPKDEMIKVLNYLPNRMPSDKPRYLMGVGTPSDIVEAVRRGVDMFDCVMPTRNARNGHLFTSTGAVKIKNAVHRHDKNPLDSECDCYTCQNFSRAYLHHLHKCGEMLSAQLNTIHNLRYYQNLMKGIRESLENDTFDEFVATFYAKQELEVPELGLV

SEQ ID NO: 57773 - protein, 383 aa, Moraxella lincolnii
  REGION 1..383: note = tr|A0A1T0CKM6|A0A1T0CKM6_9GAMM Queuine tRNA-ribosyltransferase OS=Moraxella lincolnii OX=90241; GN = tgt PE=3 SV=1
MQFTLHKTATGNSRARRGTVHLNHGDVQTPAFMPVGTYGTVKGMLPRDIHDIGADIILGNTFHLWLRPGTDVIDQFGGLHSFIHWDKPILTDSGGFQVFSLGQMRKITEEGVYFKSPIDGAKVFLSPEKSMQIQYSLNSDIVMQFDECTPYPASHDEAKKSLELSLRWGQRCVDEHRKLGNDNALFGIIQGSMYPDLRRTSLDGLLNIGFDGYAIGGLSVGEPKEEMMAVLNYLPNDMPSDKPRYLMGVGKPEDILEAVRRGVDMFDCVMPTRNARNGHYFVTGNPDNQGVVRIRNSQYRTDERPLDPECDCHTCQNFSRAYLYHLNKCKEMLGAQLATIHNLRYYQRLMAGIRQSIEENRFDAFVTAFYAKRGQSVPKLMLK

SEQ ID NO: 57774 - protein, 369 aa, unidentified
  source 1..369: note = Moraxella macacae
  REGION 1..369: note = tr|L2F6X7|L2F6X7_9GAMM Queuine tRNA-ribosyltransferase OS=Moraxella macacae 0408225; OX = 1230338 GN=tgt PE=3 SV=1
MKFTLHTTDKSSLARRGTVHLAHGDVQTPAFMPVGTYGTVKGMLPRDIHAIGAEIILGNTFHLWLRPTTAVIDKFGGLHDFIGWHKPILTDSGGFQVFSLGAMRKIKEEGVYFRSPIDGAKVFLSPEISMQIQNSLNSDIVMQFDECTPYPATHLEADKSLELSLRWGERCINEHQKLGNKNALFGIIQGSMYRDLREKSLNGLLAMPFDGYAIGGLSVGEPKDEMTCVLNYLPNMMPTDKPRYLMGVGTPTDIVEAVRRGVDMFDCVMPTRNARNGHLFVSTGVVKIKNAMHRFDDSPLDNECDCYTCQNFSRSYLHHLHKCGEMLSAQLNTIHNLRFYQNLMQNIRDSLDNGMFDKFVNEFYQKQSV

SEQ ID NO: 57775 - protein, 377 aa, Moraxella nonliquefaciens
  REGION 1..377: note = tr|A0A1B8QJ46|A0A1B8QJ46_MORNO Queuine tRNA-ribosyltransferase OS=Moraxella nonliquefaciens; OX = 478 GN=tgt PE=3 SV=1
MKFTLHKTDKNTHARRGTVHLAHGDVATPAFMPVGTYGTVKGMLPRDIHATGADIILGNTFHLWLRPTTSVIDEFGGLHDFIGWDKPILTDSGGFQVFSLGAMRKITEEGVHFRSPVDGRGVFLSPEISMQIQKSLNSDIVMQFDECTPYPATHTESQKSLELSIRWGQRCLDEHHKLGNKNALFGIVQGSMYEDLRMQSLTDLMQMPFDGYAIGGLSVGEPKDEMMKVLNYLPNRMPSDKPRYLMGVGTPSDIVEAVKRGVDMFDCVMPTRNARNGHLFTSTGVVKIKNAAHRHDKNPPDGECDCHTCQNFSRAYLHHLHKCGEMLSAQLNTIHNLHYYQNLMKGIRKSLENDTFDEFVATFYAKQGLDVPKFGAC

SEQ ID NO: 57776 - protein, 377 aa, Moraxella nonliquefaciens
  REGION 1..377: note = tr|A0A1B8PML2|A0A1B8PML2_MORNO Queuine tRNA-ribosyltransferase OS=Moraxella nonliquefaciens; OX = 478 GN=tgt PE=3 SV=1
MKFTLHKTDTKTRARRGTVHLAHGDVATPAFMPVGTYGTVKGMLPRDIHATGADIILGNTFHLWLRPTTSVIDEFGGLHDFIGWDKPILTDSGGFQVFSLGAMRKITEEGVHFRSPVDGRGVFLSPEISMQIQKSLNSDIVMQFDECTPYPATHTESQKSLELSIRWGQRCLDEHHKLGNKNALFGIVQGSMYEDLRMQSLMALMQMPFDGYAIGGLSVGEPKDEMMKVLNYLPNRMPSDKPRYLMGVGTPSDIVEAVKRGVDMFDCVMPTRNARNGHLFTSTGVVKIKNAAHRHDKNPPDGECDCHTCQNFSRAYLHHLHKCGEMLSAQLNTIHNLHYYQNLMKGIRKSLENDTFDEFVATFYAKQGLDVPKFGAC

SEQ ID NO: 57777 - protein, 378 aa, Moraxella osloensis
  REGION 1..378: note = tr|A0A173MVI5|A0A173MVI5_9GAMM Queuine tRNA-ribosyltransferase OS=Moraxella osloensis OX=34062; GN = tgt PE=3 SV=1
MQFTLHKNATGESRARRGTVHLAHGDVQTPAFMPVGTYGTVKGMLPRDIHEIGAEIILGNTFHLWLRPTTDVIDKFGGLHDFIGWNKPILTDSGGFQVFSLGAMRKIVEEGVHFRSPIDGAKVFLSPEISMQIQYSLNSDIVMQFDECTPYPATPSEADTSLELSLRWGERCKNAHEKLGNKNALFGIIQGSMYRNLREKSLEGLLAIGFDGYAIGGLSVGEPKEEMMAVLDYLPDDMPADKPRYLMGVGKPEDIVEAVRRGVDMFDCVMPTRNARNGHYFTTFGAVKIKNAVHRFDQSPLDSECDCYTCQNFSRAYLHHLFKCNEMLSAQLGTIHNLRYYQRLMADIRQSIEDDKFDAFVDTFYQQQNLPKPDLHLT

SEQ ID NO: 57778 - protein, 378 aa, Moraxella osloensis
  REGION 1..378: note = tr|A0A1B8Q0M6|A0A1B8Q0M6_9GAMM Queuine tRNA-ribosyltransferase OS=Moraxella osloensis OX=34062; GN = tgt PE=3 SV=1
MQFTLHKNALGESRARRGTVHLAHGDVQTPAFMPVGTYGTVKGMLPRDIHEIGAEIILGNTFHLWLRPTTDVIDKFGGLHDFIGWNKPILTDSGGFQVFSLGAMRKIKEEGVHFRSPIDGAKVFLSPEISMQIQYSLNSDIVMQFDECTPYPATPSEADTSLELSLRWGERCKNAHEKLGNQNALFGIIQGSMYRNLREKSLEGLLAIGFDGYAIGGLSVGEPKEEMMAVLDYLPDDMPADKPRYLMGVGKPEDIVEAVRRGVDMFDCVMPTRNARNGHYFTTFGAVKIKNAVHRFDQSPLDSACDCYTCQNFSRAYLHHLFKCNEMLSAQLGTIHNLRYYQRLMADIRQSIEDDKFDVFVDTFYQQQNLPKPDLHLT

SEQ ID NO: 57779 - protein, 377 aa, Moraxella ovis
  REGION 1..377: note = tr|A0A378PJC1|A0A378PJC1_9GAMM Queuine tRNA-ribosyltransferase OS=Moraxella ovis OX=29433 GN=tgt; PE = 3 SV=1
MKFTLHKTDTKTRARRGTVHLAHGEVQTPAFMPVGTYGTVKGMLPRDIHAIGADIILGNTFHLWLRPTTSVIDEFGGLHEFIGWDKPILTDSGGFQVFSLGAMRKITEEGVHFRSPVDGSKVFLSPEISMQIQNSLNSDIVMQFDECTPYPATYKEAQKSLELSLRWGQRCLDEHHKLGNKNALFGIVQGSMYEDLRMQSLTALTDMPFDGYAIGGLSVGEPKDEMIKVLDYLPNRMPSDKPRYLMGVGTPSDIVEAVRRGVDMFDCVMPTRNARNGHLFTSTGAVKIKNAVHRHDKNPLDSECDCYTCQNFSRAYLHHLHKCGEMLSAQLNTIHNLRYYQNLMKGIRESLENGTFDEFVATFYAKQGLEAPALSLK

SEQ ID NO: 57780 - protein, 387 aa, Moraxella pluranimalium
  REGION 1..387: note = tr|A0A1T0CVB8|A0A1T0CVB8_9GAMM Queuine tRNA-ribosyltransferase OS=Moraxella pluranimalium; OX = 470453 GN=tgt PE=3 SV=1
MKFTLHNTDGGNNHARRGTVHLAHGDVQTPAFMPVGTYGTVKGMLPRDIHGIGADIILGNTFHLWLRPGMDVIREFGGLHKFINWDKPILTDSGGFQVFSLGAMRKISEEGVAFRSPVDGAKVFLSPETSMQIQNDLNSDIVMQFDECTPYPATHSDAQKSLELSLRWGQRCIDEHQRLGNKNALFGIIQGSMYKDLRAQSLKGLLEMPFDGYAIGGLSVGEPKEEMIGVLNYLPNAMPSDKPRYLMGVGKPADIVEAVRRGVDMFDCVMPTRNARNGHYFVTGNSENKGIVRIKNSQYRNDLAPLDEHCDCYTCQNFSRAYLYHLHKCKEMLSAQLATIHNLRYYQRLMADIRKAIEENRFDEFVAEFYANWGMAVPEYDKDQHSL

SEQ ID NO: 57781 - protein, 387 aa, Moraxella porci
  REGION 1..387: note = tr|A0A1T0CSX2|A0A1T0CSX2_9GAMM Queuine tRNA-ribosyltransferase OS=Moraxella porci DSM 25326; OX = 573983 GN=tgt PE=3 SV=1
MKFTLHNTDGGNNHARRGTVHLAHGDVQTPAFMPVGTYGTVKGMLPRDIHGIGADIILGNTFHLWLRPGMDVIREFGGLHKFINWDKPILTDSGGFQVFSLGAMRKISEEGVAFRSPVDGAKVFLSPETSMQIQHDLNSDIVMQFDECTPYPATHIDAQKSLELSLRWGQRCIDEHQRLGNKNALFGIIQGSMYKDLRAQSLKGLLDMPFDGYAIGGLSVGEPKDEMIGVLNYLPKAMPSDKPRYLMGVGKPADIVEAVRRGVDMFDCVMPTRNARNGHYFVTGNSENKGIVRIKNSQYRTDLAPLDEHCDCYTCQNFSRAYLYHLHKCKEMLSAQLATIHNLRYYQRLMADIRKAIEENRFDEFVAEFYANWGMAVPEYDKDAHQL

SEQ ID NO: 57782 - protein, 380 aa, Moraxella sp.
  REGION 1..380: note = tr|A0A496NDH8|A0A496NDH8_MORSP Queuine tRNA-ribosyltransferase OS=Moraxella sp. OX=479 GN=tgt; PE = 3 SV=1
MKFSLHNTDNGNNHARRGTVHLAHGDVQTPAFMPVGTYGTVKGMLPRDIHAIGADIILGNTFHLWLRPTTAVIKEFGGLHSFIGWNKPILTDSGGFQVFSLGAMRKISEEGVAFRSPVDGQKVFLSPEVSMQIQYDLNSDIVMQFDECTPYPATHDEAKNSLELSLRWGQRCLDEHHKLGNKNALFGIIQGGMYQDLRMQSLSGLLDMPFDGYAIGGLSVGEPKEMMMQVLDYLPKTMPNDKPRYLMGVGKPEDIVEAVRRGVDMFDCVMPTRNARNGHYFTSSGVVKIKNASHRYNHEPLDKECDCYTCQNFSLAYLHHLHKCGEMLSAQLGTIHNLAYYQKLMKDIRASIENQKFDEFVALFYQKRGMSVPDFDKHKS

SEQ ID NO: 57783 - protein, 387 aa, Moraxella sp.
  REGION 1..387: note = tr|A0A2K0XU63|A0A2K0XU63_9GAMM Queuine tRNA-ribosyltransferase OS=Moraxella sp. RCAD0137; OX = 1775913 GN=tgt PE=3 SV=1
MKFTLHNTDGGNNHARRGTVHLAHGDVQTPAFMPVGTYGTVKGMLPRDIHGIGADIILGNTFHLWLRPGMDVIREFGGLHKFINWDKPILTDSGGFQVFSLGAMRKISEEGVAFRSPVDGAKVFLSPETSMQIQNDLNSDIVMQFDECTPYPATHLDAQKSLELSLRWGQRCIDEHQRLGNKNALFGIIQGSMYKDLREQSLKGLLDMPFDGYAIGGLSVGEPKDEMIGVLNYLPSAMPSDKPRYLMGVGKPADIVEAVRRGVDMFDCVMPTRNARNGHYFVTGNSENKGIVRIKNSQYRTDLAPLDEHCDCYTCQNFSRAYLYHLHKCKEMLSAQLATIHNLRYYQRLMADIRKAIEENRFDEFVADFYANWGMAVPEYDKDAHQL

SEQ ID NO: 57784 - protein, 387 aa, unidentified
  source 1..387: note = Moraxellaceae bacterium
  REGION 1..387: note = tr|A0A345P7Q9|A0A345P7Q9_9GAMM Queuine tRNA-ribosyltransferase OS=Moraxellaceae bacterium HYN0046; OX = 2283318 GN=tgt PE=3 SV=1
MTAATPAQPALNATDKPLIFEKLAQDGLARRGRVTLAHGVVETPAFMPVGTYGTVKGMLPRDVEEIGAHIVLGNTFHLYLRPGLEVIAEHGGLHNFMQWNKPILTDSGGFQVFSLGAKIKEEGVTFRSPIDGSKVFLSPEKSMEIQKTLNSDIVMIFDECTPYPATYSQARMSLQLSLRWAKRCKVAHEGNPNALFGIVQGGMYPELRDESLEGLTDIGFDGYAIGGLSVGEPKEEMIKILDYLPRKLPADKPRYLMGVGKPEDIVEAVRRGVDMFDCVMPTRNARNGHYFISTGIVRIRNSQYRHDMRPLDANCSCYTCKNFTRSYLYHLDKTGEMLGAMLGTIHNLAYYQTLMQGLRSAIEQGQLESFVQAFYAAREMEVPAFAG

SEQ ID NO: 57785 - protein, 238 aa, unidentified
  source 1..238: note = Moraxellaceae bacterium
  REGION 1..238: note = tr|A0A2A5C0P3|A0A2A5C0P3_9GAMM Queuine tRNA-ribosyltransferase (Fragment) OS=Moraxellaceae bacterium OX=1889775 GN=tgt PE=3 SV=1
MKFEKFAEDGLARRGRLEFDRGTVETPAFMPVGTYGTVKGMSPKDVEEIGADIILGNTFHLMLRPGTEVIKQHGGLHDFMGWKGPILTDSGGFQVFSLGKMRTITEDGVIFQSPINGDKVSLNPESSMQVQRDLGSDIVMIFDECTPFPATETEARDSMELSMRWAKRSKTAHGDNPNALFGIVQGGMYENLRVESIQGLAEIGFDGYAIGGLSVGEPKEEMMAVLDYLSPHMPQDKP

SEQ ID NO: 57786 - protein, 374 aa, Morganella morganii
  REGION 1..374: note = tr|M7CFA9|M7CFA9_MORMO Queuine tRNA-ribosyltransferase OS=Morganella morganii SC01; OX = 1239989 GN=tgt PE=3 SV=1
MKYELQTTDGRARRGRLIFDRGVVETPAFMPVGTYGTVKGMTPEEVKETGAQILLGNTFHLWLRPGQEIMKLHGDLHDFMQWKGPILTDSGGFQVFSLGAMRKIKEEGVHFRNPINGEKIFLSPEKSMEIQYDLGSDIVMIFDECTPYPADWDYAKKSMEMSLRWAKRSRDRFDELGNPNALFGIIQGSVYEDLRDVSVKGLVEIGFDGYAVGGLAVGEPKEDMHRILEHVCPQIPEDKPRYLMGVGKPEDLVEGVRRGIDMFDCVMPTRNARNGHLFVTDGVVKIRNAKYKSDTSPLDAECDCYTCRNYTRAYLHHLDRCNEILGARLNTIHNLRYYQRLMAGIRQAIEEGRLEAFAAEFYQRIGKPVPPLSE

SEQ ID NO: 57787 - protein, 374 aa, Morganella morganii; identical to SEQ ID NO: 57786
  REGION 1..374: note = tr|M1SD06|M1SD06_MORMO Queuine tRNA-ribosyltransferase OS=Morganella morganii subsp. morganii KT OX=1124991 GN=tgt PE=3 SV=1

SEQ ID NO: 57788 - protein, 374 aa, Morganella psychrotolerans
  REGION 1..374: note = tr|A0A1B8HTA3|A0A1B8HTA3_9GAMM Queuine tRNA-ribosyltransferase OS=Morganella psychrotolerans; OX = 368603 GN=tgt PE=3 SV=1
MKYELQTTDGRARRGRLIFDRGVVETPAFMPVGTYGTVKGMTPEEVKETGAQILLGNTFHLWLRPGQEIMKLHGDLHDFMQWKGPILTDSGGFQVFSLGAMRKIKEEGVHFRNPINGEKIFLSPEKSMEIQYDLGSDIVMIFDECTPYPADWDYAKQSMEMSLRWAQRSRQRFDELENPNALFGIIQGSVYEDLRDVSVKGLVEIGFDGYAVGGLAVGEPKEDMHRILEHVCPQIPEDKPRYLMGVGKPEDLVEGVRRGIDMFDCVMPTRNARNGHLFVTDGVVKIRNARYKSDVSTLDAECDCYTCRNYTRAYLHHLDRCNEILGARLNTIHNLRYYQRLMAGIRQAIEEGRLEAFAAEFYQRIGKPVPPLSA

SEQ ID NO: 57789 - protein, 374 aa, Morganella psychrotolerans
  REGION 1..374: note = tr|A0A1B8H199|A0A1B8H199_9GAMM Queuine tRNA-ribosyltransferase OS=Morganella psychrotolerans; OX = 368603 GN=tgt PE=3 SV=1
MKYELQTTDGRARRGRLIFDRGVVETPAFMPVGTYGTVKGMTPEEVKETGAQILLGNTFHLWLRPGQEVMKLHGDLHDFMQWKGPILTDSGGFQVFSLGATRKIKEEGVHFRNPINGEKIFLSPEKSMEIQYDLGSDIVMIFDECTPYPADWDYAKQSMEMSLRWAQRSRQRFDELENPNALFGIIQGSVYEDLRDVSVKGLVEIGFDGYAVGGLAVGEPKEDMHRILEHVCPQIPEDKPRYLMGVGKPEDLVEGVRRGIDMFDCVMPTRNARNGHLFVTDGVVKIRNARYKSDVSTLDAECDCYTCRNYTRAYLHHLDRCNEILGARLNTIHNLRYYQRLMAGIRQAIEEGRLEAFAAEFYQRIGKPVPPLSA

SEQ ID NO: 57790 - protein, 374 aa, Morganella sp.; identical to SEQ ID NO: 57788
  REGION 1..374: note = tr|A0A3D3HTF2|A0A3D3HTF2_9GAMM Queuine tRNA-ribosyltransferase OS=Morganella sp. (in: Bacteria); OX = 1912315 GN=tgt PE=3 SV=1

SEQ ID NO: 57791 - protein, 379 aa, Moritella marina
  REGION 1..379: note = tr|A0A5J6WPM6|A0A5J6WPM6_MORMI tRNA guanosine(34) transglycosylase Tgt OS=Moritella marina ATCC 15381; OX = 1202962 GN=tgt PE=4 SV=1
MKLKYELDKTTGNARRGRLIFERGVVETPAFMPVGTYGTVKGMTPEEVDATGADILLGNTFHLWLRPGQEVMKQHGGLHNFMNWQGPILTDSGGFQVFSLGKMRKITEAGVHFRHPVNGSKIFLDPETSMEIQDDLGSDVVMIFDECTPYPATESEAEKSMRMSLRWAQRSRDHFDKLDNKNNLFGIIQGGVYEHLRDISVKGLLDIGFDGYAVGGLAVGEPKEDMHRILEHTCPQIPEDKPRYLMGVGKPEDLVEGVRRGVDMFDCVMPTRNARNGHLFTSEGVIKIRNAKHKTDTSTLDPECDCYTCKNYTRSYLNHLDKCNEILGARLNTMHNLRYYQNLMQGIRDAIDSDTFEEFVTDFYAKQGREVPPLAKADA

SEQ ID NO: 57792 - protein, 379 aa, Moritella sp.
  REGION 1..379: note = tr|A0A2I0F395|A0A2I0F395_9GAMM Queuine tRNA-ribosyltransferase OS=Moritella sp. Urea-trap-13; OX = 2058327 GN=tgt PE=3 SV=1
MKLKYELDKTIGNARRGRLIFERGVVETPAFMPVGTYGTVKGMTPEEVDDTGADILLGNTFHLWLRPGQEVMKLHGGLHNFMNWQGPILTDSGGFQVFSLGKMRKITEAGVHFRHPINGSKIFLDPETSMEIQDDLGSDVVMIFDECTPYPATESEAEKSMSMSLRWAQRSRDHFDKLENKNNLFGIIQGGVYEHLRDISVKGLLDIGFDGYAVGGLAVGEPKEDMHRILEHTCPQIPEDKPRYLMGVGKPEDLVEGVRRGVDMFDCVMPTRNARNGHLFTSEGVIKIRNAKHKTDTSTLDPECDCYTCKNYTRSYLNHLDKCNEILGARLNTMHNLRYYQNLMQGIRDAIDSDTFEQFVTDFYTKQGREVPPLAKSDA

SEQ ID NO: 57793 - protein, 379 aa, Moritella sp.
  REGION 1..379: note = tr|A6F9N0|A6F9N0_9GAMM Queuine tRNA-ribosyltransferase OS=Moritella sp. PE36 OX=58051; GN = tgt PE=3 SV=1
MKLKYELDKTNGNARRGRLIFERGVVETPAFMPVGTYGTVKGMTPEEVDDTGADILLGNTFHLWLRPGQEVMKLHGGLHNFMNWQGPILTDSGGFQVFSLGKTRKITEAGVHFRHPVNGSKIFLDPEISMEIQDDLGSDVVMIFDECTPYPATESEAEKSMRMSLRWAQRSRDHFDKLENKNNLFGIIQGGVYEHLRDISVKGLLDIGFDGYAVGGLAVGEPKEDMHRILEHTCPQLPEDKPRYLMGVGKPEDLIEGVRRGVDMFDCVMPTRNARNGHLFTSEGVIKIRNAKHKTDTGTLDPECDCYTCKNYSRSYLNHLDKCNEILGARLNTMHNLRYYQNLMQSIRDAIDSDTFEQFVTDFYAKQGREVPPLAKSDA

SEQ ID NO: 57794 - protein, 379 aa, Moritella viscosa
  REGION 1..379: note = tr|A0A090IAK9|A0A090IAK9_9GAMM Queuine tRNA-ribosyltransferase OS=Moritella viscosa OX=80854; GN = tgt PE=3 SV=1
MKLKYELDKTTGNARRGRLIFERGVVETPAFMPVGTYGTVKGMTPEEVDATGADILLGNTFHLWLRPGQEVMKQHGGLHNFMNWQGPILTDSGGFQVFSLGKMRKITEAGVHFRHPVNGSKIFLDPETSMEIQDDLGSDVVMIFDECTPYPATESEAEKSMRMSLRWAQRSRDHFDKLDNKNNLFGIIQGGVYEHLRDISVKGLLDIGFDGYAVGGLAVGEPKEDMHRILEHTCPQIPEDKPRYLMGVGKPEDLIEGVRRGVDMFDCVMPTRNARNGHLFTSEGVIKIRNAKHKTDTGTLDPECDCYTCKNYSRSYLNHLDKCNEILGARLNTMHNLRYYQNLMQGIRDAIDSDTFEEFVTDFYTKQGREVPPLAKSGA

SEQ ID NO: 57795 - protein, 379 aa, Moritella yayanosii
  REGION 1..379: note = tr|A0A330LQB6|A0A330LQB6_9GAMM Queuine tRNA-ribosyltransferase OS=Moritella yayanosii OX=69539; GN = tgt PE=3 SV=1
MKLKYELDKTNGNARRGRLIFERGVVETPAFMPVGTYGTVKGMTPEEVDATGADILLGNTFHLWLRPGQEVMKLHGGLHNFMNWQGPILTDSGGFQVFSLGKTRKITEAGVHFRHPVNGSKIFLDPETSMEIQDDLGSDVVMIFDECTPYPATESEAEKSMRMSLRWAQRSRDHFDKLENKNNLFGIIQGGVYEHLRDISVKGLLDIGFDGYAIGGLAVGEPKEDMHRILEHTCPQIPEDKPRYLMGVGKPEDLIEGVRRGVDMFDCVMPTRNARNGHLFTSEGVIKIRNAKHKTDTGTLDPECDCYTCKNYSRSYLNHLDKCNEILGARLNTMHNLRYYQNLMQGIRDAIDSDTFEQFVTDFYTKQGREVPPLAKSDA

SEQ ID NO: 57796 - protein, 371 aa, Morococcus cerebrosus
  REGION 1..371: note = tr|A0A0C1EV51|A0A0C1EV51_9NEIS Queuine tRNA-ribosyltransferase OS=Morococcus cerebrosus; OX = 1056807 GN=tgt PE=3 SV=1
MLKFTLHKKDGHARRGTLELNHGKIETPVFMPVGTYGSVKAMNPQNLHDIKAQIILGNTYHLWLRPGLEVIEQFGGLHDFIGWNKPILTDSGGFQVFSLSDMRKLTEEGCTFQSPINGDRLFLSPEISMKIQTVLNSDIVMQLDECTPGEATHEQAQKSLQMSLRWAERSKKAFEDLKNPNALFGIVQGAMYEDLREESLRGLEQFDFPGLAIGGLSVGEPKPEMYRMLRTVGPMLPEHKPHYLMGVGTPEDLVYGVAHGVDMFDCVMPTRNARNGWLFTRFGDLKIKNAKHKLDKRPIDESCTCYACQNFSRAYLHHLHRAGEILGAQLNTIHNLHFYQVIMAEMREAIEQGKFADWQAQFHENRARGVD

SEQ ID NO: 57797 - protein, 375 aa, unidentified
  source 1..375: note = Motilimonas sp.
  REGION 1..375: note = tr|A0A418YEK7|A0A418YEK7_9GAMM Queuine tRNA-ribosyltransferase OS=Motilimonas sp. PLHSC7-2; OX = 2303987 GN=tgt PE=3 SV=1
MKYELLNTDGRARRGRLVFERGTVETPAFMPVGTYGTVKGMTPEEVASIGAEIILGNTFHLWLRPGQEIMRQHGDLHDFMNWHGPILTDSGGFQVFSLGHIRKITEEGVHFRNPVNGDKIFLSPEGSMDIQYDLGSDIVMIFDECTPYPATEAEAEKSMQMSLRWAKRSRQQFEQKQNPNALFGIIQGGVYEHLRDVSLAGLMDIGFDGYAIGGLAVGEPKEDMHRILEHITPKIPADKPRYLMGVGKPEDLVEGVRRGVDMFDCVMPTRNARNGHLFTSEGVIKIRNAKHRDDTNTLDAECDCYTCKNYSRSYLHHLDKCNEILGARLNTIHNLRHYQRVMQGLRNAIEQGKLDDFVTEFYGKLGKPVPPLDEK

SEQ ID NO: 57798 - protein, 373 aa, unidentified
  source 1..373: note = Motiliproteus coralliicola
  REGION 1..373: note = tr|A0A369W9T1|A0A369W9T1_9GAMM Queuine tRNA-ribosyltransferase OS=Motiliproteus coralliicola; OX = 2283196 GN=tgt PE=3 SV=1
MDYELLATDGKARRGRLSFPRGDVETPAFMPVGTYGTVKGMLPRDIEESGAHIILGNTFHLMLRPGTQVVQEHGDLHGFVQWKGPILTDSGGFQVFSLGAMRKITEHGVKFQSPVDGSKVELTPERSMEVQRELGSDIVMIFDECTPYPATEQQAAESMRLSLRWAKRSKDAHGDNPSALFGIVQGGMYEALRDESLAGLTEIGFDGYAIGGLSVGEPKDEMMKVLDYTTPKMPEDKPRYLMGVGKPEDLVEGVRRGVDMFDCVMPTRNARNGHLFTSEGVIKIRNATHRHDTRPLDPECDCYTCQNFSRAYLYHLDKCKEMLGAQLNTIHNLRYYQNLMSGLRSAIEQGKLSDFVTDFYRKRGQDVPALAQD

SEQ ID NO: 57799 - protein, 371 aa, unidentified
  source 1..371: note = Motiliproteus sp.
  REGION 1..371: note = tr|A0A1R1LLU9|A0A1R1LLU9_9GAMM Queuine tRNA-ribosyltransferase OS=Motiliproteus sp. MSK22-1; OX = 1897630 GN=tgt PE=3 SV=1
MSYELLATDGKARRGRLTFPRGEVETPAFMPVGTYGTVKGMLPRDIEEIGAHMILGNTFHLMLRPGTEVVKAHGDLHDFVQWKGPILTDSGGFQVFSLGDMRKITEAGVNFQSPVDGSPVTLNPEISMQVQKDLGSDVVMIFDECTPYPATETQSAESMRLSLRWAKRSKEAHGDSPAALFGIVQGGMFPELRDESLAGLTEIGFDGYAIGGLSVGEPKDEMMKILDHTTPKMPEDRPRYLMGVGRPEDLVEGVKRGVDMFDCVMPTRNARNGHLFVSTGVVKIRNAAHKHDDGPLDRECDCYTCKNFSRAYLHHLDKCKEMLGAQLNTIHNLRHYQNLMSGLRTAIEQGRLGDFVEEFYKKRGQETPALD

SEQ ID NO: 57800 - protein, 376 aa, unidentified
  source 1..376: note = Mucilaginibacter auburnensis
  REGION 1..376: note = tr|A0A2H9VUC7|A0A2H9VUC7_9SPHI Queuine tRNA-ribosyltransferase OS=Mucilaginibacter auburnensis; OX = 1457233 GN=tgt PE=3 SV=1
MKFNLTAQDPLSKARAGEITTDHGTIPTPIFMPVGTAGTVKAVHQRELKDDIEAKIILGNTYHLYLRPGLDVLERAGGLHKFNGWEGPILTDSGGYQVYSLSEVRKIKEEGVTFRSHIDGSKHLFTPENVMDIQRVIGADIIMAFDECTPYPCDYNYAKRSIEMTHRWLKRCCDRFDSTGPKYGYSQTLFPIVQGSVYKDLRVRSAEVIASFEREGNAIGGLSVGEPAEEMYAMTEIVCNILPQQKPRYLMGVGTPINLLENIALGIDMFDCVMPTRNARNGMLFTKNGVINIKNEKWKDDFSPIEEDSTLFADKQYTKAYLRHLIHSGEMLGAQIATLHNLHFYLWLVAEARAKIISGEFSSWKNTMVNRLGQRL

SEQ ID NO: 57801 - protein, 376 aa, Mucilaginibacter frigoritolerans
  REGION 1..376: note = tr|A0A562UG45|A0A562UG45_9SPHI Queuine tRNA-ribosyltransferase OS=Mucilaginibacter frigoritolerans OX=652788 GN=tgt PE=3 SV=1
MKFNLTAKDPLSKARAGEIVTDHGTIQTPIFMPVGTAGTVKAVHQHELKNDIKAQIILGNTYHLYLRPGLHTLESAGGLHRFNGWEGPILTDSGGYQVYSLTEVRKIKEEGVTFRSHIDGSKHLFTPENVMDIQRIIGADIIMAFDECTPYPCEYGYARKSIEMTHRWLKRCCDRFDSTEPKYGYNQTLFPIVQGSVYKDLRIKSAEVIASYEREGNAIGGLSVGEPAEEMYAMTEVVCNILPEQKPRYLMGVGTPVNILENIALGIDMFDCVMPTRNARNGMLFTKDGIINIKNEKWKNDFSAIEENSELFSDKVYSKAYLRHLIHSGEILGAQIATLHNLHFYLWLVKEARGKIIAGEFYNWKKIMVNRLGQRL

SEQ ID NO: 57802 - protein, 376 aa, unidentified
  source 1..376: note = Mucilaginibacter ginsenosidivorans
  REGION 1..376: note = tr|A0A5B8V039|A0A5B8V039_9SPHI Queuine tRNA-ribosyltransferase OS=Mucilaginibacter ginsenosidivorans OX=398053 GN=tgt PE=3 SV=1
MKFNLTAQDPLSKARAGEITTDHGAIQTPIFMPVGTAGTVKAVHQRELKNDIEAQIILGNTYHLYLRPGLDTLEKAGGLHKFNGWDGPILTDSGGYQVYSLTDVRKIKEEGVTFRSHIDGSKHLFTPENVMDTQRIIGADIIMALDECTPYPCEYGYARKSIEMTHRWLKRCCDRFDSTEPKYGYSQTLFPIVQGSVYKDLRVRSAEVIASFEREGNAIGGLSVGEPAEEMYAMTEVVCDILPKQKPRYLMGVGTPVNILENIALGIDMFDCVMPTRNARNGMLFTKEGIINIRNEKWKNDFTPIEADSDLFADVCYTKAYLRHLVHSGEILGAQIATLHNLHFYLWLVKEARKKIIAGEFYDWKEKMVKRLGQRL

SEQ ID NO: 57803 - protein, 376 aa, unidentified
  source 1..376: note = Mucilaginibacter ginsenosidivorax
  REGION 1..376: note = tr|A0A5B8VUT0|A0A5B8VUT0_9SPHI Queuine tRNA-ribosyltransferase OS=Mucilaginibacter ginsenosidivorax OX=862126 GN=tgt PE=3 SV=1
MKFKLAAQDPLSKARAGEITTDHGTIETPIFMPVGTAGTVKAVHQRELKTDIQAQIILGNTYHLYLRPGLNTLESAGGLHKFNGWDGPILTDSGGYQVYSLTEVRKIKEEGVTFRSHIDGSKHLFTPENVMDIQRVIGADIIMAFDECTPYPCEYGYARRSIEMTHRWLKRCCDRFDSTEPKYGYNQTLFPIVQGSVYKDLRVKSAEVIASFEREGNAIGGLSVGEPAEEMYAMTEIVCNILPEHKPRYLMGVGTPINLLENIALGIDMFDCVMPTRNARNGMLFTKNGIINIKNEKWKNDLSPIEDDSDLFADKEYSKAYLRHLIHSGEMLGAQIATLHNLHFYLWLVKEARKKIISGEFYAWKNVMVGRLGQRL

SEQ ID NO: 57804 - protein, 376 aa, Mucilaginibacter gossypii
  REGION 1..376: note = tr|A0A1G7N348|A0A1G7N348_9SPHI Queuine tRNA-ribosyltransferase OS=Mucilaginibacter gossypii; OX = 551996 GN=tgt PE=3 SV=1
MKFNLTAQDPLSKARAGEITTDHGTIQTPIFMPVGTAGTVKAVHQHELKQDISAQIILGNTYHLYLRPGLNTLESVGGLHKFNGWDGPILTDSGGYQVYSLTEVRKIKEEGVTFRSHIDGSKHLFTPENVMDIQRIIGADIIMAFDECTPYPCDYNYAKRSIEMTHRWLKRCCDRFDSTGPKYGYSQTLFPIVQGSVYKDLRVRSAEVIASYEREGNAIGGLSVGEPAEEMYAMTEIVCNILPQQKPRYLMGVGTPVNILENIALGIDMFDCVMPTRNARNGMLFTKNGIINIKNEKWKNDFSAIEDDSDLFADRDYSKAYLRHLIHSGEMLGAQIATLHNLHFYLWLVKEARKKIIAGEFYDWKNMMVKRLGQRL

SEQ ID NO: 57805 - protein, 376 aa, Mucilaginibacter gossypii
  REGION 1..376: note = tr|A0A5C1ID31|A0A5C1ID31_9SPHI Queuine tRNA-ribosyltransferase OS=Mucilaginibacter gossypii; OX = 551996 GN=tgt PE=3 SV=1
MKFNLTAQDPLSKARAGEITTDHGTIQTPIFMPVGTAGTVKAVHQHELKQDISAQIILGNTYHLYLRPGLNTLESVGGLHKFNGWDGPILTDSGGYQVYSLTEVRKIKEEGVTFRSHIDGSKHLFTPENVMDIQRIIGADIIMAFDECTPYPCDYNYAKRSIEMTHRWLKRCCDRFDSTGPKYGYSQTLFPIVQGSVYKDLRVRSAEVIASYEREGNAIGGLSVGEPAEEMYAMTEIVCNILPQQKPRYLMGVGTPVNILENIALGIDMFDCVMPTRNARNGMLFTKNGIINIKNEKWKNDFSAIEDDSDLFADRDYSKAYLRHLIHSGEMLGAQIATLHNLHFYLWLVKEARKKIIAGEFYDWKNMMAKRLGQRL

SEQ ID NO: 57806 - protein, 376 aa, Mucilaginibacter gossypiicola
  REGION 1..376: note = tr|A0A1H8H1K6|A0A1H8H1K6_9SPHI Queuine tRNA-ribosyltransferase OS=Mucilaginibacter gossypiicola; OX = 551995 GN=tgt PE=3 SV=1
MKFNLTAQDPLSKARAGEITTDHGTIQTPIFMPVGTAGTVKAVHQHELKQDISAQIILGNTYHLYLRPGLNTLESAGGLHKFNGWDGPILTDSGGYQVYSLTEVRKIKEEGVTFRSHIDGSKHLFTPENVMDIQRIIGADIIMAFDECTPYPCDYNYAKRSIEMTHRWLKRCCDRFDSTEPKYGYSQTLFPIVQGSVYKDLRVRSAEVIASYEREGNAIGGLSVGEPAEEMYAMTEVVCNILPEQKPRYLMGVGTPVNILENIALGIDMFDCVMPTRNARNGMLFTKNGIINIKNEKWKNDFSAIEDDSDLFADRDYSKAYLRHLIHSGEMLGAQIATLHNLHFYLWLVKEARKKIIAGEFYNWKNIMVKRLGQRL

SEQ ID NO: 57807 - protein, 376 aa, unidentified
  source 1..376: note = Mucilaginibacter gotjawali
  REGION 1..376: note = tr|A0A0X8X3Z5|A0A0X8X3Z5_9SPHI Queuine tRNA-ribosyltransferase OS=Mucilaginibacter gotjawali; OX = 1550579 GN=tgt PE=3 SV=1
MKFNLTAQDPHSKARAGELITDHGTIQTPIFMPVGTAGTVKAVHQRELRDDIKAQIILGNTYHLYLRPGLDTIEKAGGLHKFNGWEKPILTDSGGYQVYSLTDVRKIKEEGVTFRSHIDGSKHLFTPENVMDIQRIIGADIIMAFDECTPYPCDYNYAKRSIEMTHRWLKRCCDRFDSTEPKYGYSQTLFPIVQGSVYKDLRIRSAEFIASMDREGNAIGGLSVGEPAEEMYAMTEIVCNILPEQKPRYLMGVGTPVNILENIALGIDMFDCVMPTRNARNGMLFTKNGIINIKNEKWKNDFSAIEEDSDLFSDTAYSKSYLRHLIHSGEMLGAQIATLHNLHFYLWLVTEARNKIIAGEFYNWKNIMVNRLGQRL

SEQ ID NO: 57808 - protein, 383 aa, Mucilaginibacter gracilis
  REGION 1..383: note = tr|A0A495J982|A0A495J982_9SPHI Queuine tRNA-ribosyltransferase OS=Mucilaginibacter gracilis; OX = 423350 GN=tgt PE=3 SV=1
MLILPFQMKFKLTANDPLSKARAGEITTDHGTIQTPIFMPVGTAGTVKAVHQRELKNDIEAQIILGNTYHLYLRPGLDTLEKAGGLHKFNGWDGPILTDSGGYQVYSLTEVRKIKEEGVTFRSHIDGSKHLFTPENVMDIQRTIGADIIMAFDECTPYPCEYGYARRSLDMTHRWLKRCCDRFDSTEPKYGYSQTFFPIVQGSVYKDLRMKSAEVIASFEREGNAIGGLSVGEPAEEMYAMTEVVCDILPKEKPRYLMGVGTPVNLLENIALGIDMFDCVMPTRNGRNGMLFTKNGIINIKNEKWKNDFSPVDEDSDLFADISYSKAYLRHLIHSGEMLGAQIATLHNLHFYLWLVKQAREKIIAGNFYDWKNSMVKSLAQRL

SEQ ID NO: 57809 - protein, 376 aa, Mucilaginibacter lappiensis
  REGION 1..376: note = tr|A0A1N7CTU8|A0A1N7CTU8_9SPHI Queuine tRNA-ribosyltransferase OS=Mucilaginibacter lappiensis; OX = 354630 GN=tgt PE=3 SV=1
MKFNLTAQDPLSKARAGEITTDHGTIQTPIFMPVGTAGTVKAVHQHELKNDIEAQIILGNTYHLYLRPGLNTLEQAGGLHKFNGWDGPILTDSGGYQVYSLTEVRKIKEEGVTFRSHIDGSKHLFTPENVMDIQRIIGADIIMAFDECTPYPCDYHYARRSIDMTHRWLKRCCDRFDSTEAKYGYSQTLFPIVQGSVYKDLRVKSAEVIASFEREGNAIGGLSVGEPAEEMYAMTEIVCNILPEQKPRYLMGVGTPINILENIALGIDMFDCVMPTRNARNGMLFTKNGIINIKNEKWKNDFSVIEDDSDLFADKNYTKAYLRHLIHSGEMLGAQIATLHNLHFYLWLVKEARKKIISGEFYNWKNIMVKQLGQRL

SEQ ID NO: 57810 - protein, 376 aa, Mucilaginibacter mallensis
  REGION 1..376: note = tr|A0A1H1YJV3|A0A1H1YJV3_9SPHI Queuine tRNA-ribosyltransferase OS=Mucilaginibacter mallensis; OX = 652787 GN=tgt PE=3 SV=1
MKFNLKAQDPLSKARAGEITTDHGTIQTPIFMPVGTAGTVKAVHQHELKNDIKAQIILGNTYHLYLRPGLDTIEKAGGLHKFNGWDGPILTDSGGYQVYSLTEVRKIKEEGVTFRSHIDGSKHLFTPENVMDIQRTIGADIIMAFDECTPYPCEYNYAKRSIEMTHRWLKRCCDRFDSTQPKYGYDQTFFPIVQGSVYKDLRVRSAEVIASFEREGNAIGGLSVGEPAEEMYAMTEIVCDILPEQKPRYLMGVGTPVNILENIALGIDMFDCVMPTRNARNGMLFTKDGIINIKNEKWKNDFSPIEADSDLFADTAYTKAYLRHLIHSGEMLGAQIATLHNLHFYLWLVAEAREKIIAGEFYNWKKIMVNRLGQRL

SEQ ID NO: 57811 - protein, 376 aa, Mucilaginibacter oryzae
  REGION 1..376: note = tr|A0A316HC87|A0A316HC87_9SPHI Queuine tRNA-ribosyltransferase OS=Mucilaginibacter oryzae; OX = 468058 GN=tgt PE=3 SV=1
MKFTLTTQDPLSKARAGEITTDHGSIQTPIFMPVGTAGTVKAVHQHELKNDIEAQIILGNTYHLYLRPGLNTLESAGGLHKFNGWDGPILTDSGGYQVYSLTEVRKIKEEGVTFRSHIDGSKHLFTPENVMDIQRVIGADIIMAFDECTPYPCDYNYAKRSIEMTHRWLKRCCDRFDSTAPKYGYSQTLFPIVQGSVYKDLRVRSAEVIASFEREGNAIGGLSVGEPAEEMYAMTEIVCNILPEQKPRYLMGVGTPVNILENIALGIDMFDCVMPTRNARNGMLFTKNGIINIKNEKWKNDFSAIEDDSDLFADKAYTKAYLRHLIHSGEMLGAQIATLHNLHFYLWLVKEARKKIIAGEFYDWKNTMVKRFGQRL

SEQ ID NO: 57812 - protein, 376 aa, Mucilaginibacter paludis
  REGION 1..376: note = tr|H1YDZ6|H1YDZ6_9SPHI Queuine tRNA-ribosyltransferase OS=Mucilaginibacter paludis DSM 18603 OX=714943 GN=tgt PE=3 SV=1
MKFKLTATDPSSKARAGEITTDHGTIQTPIFMPVGTAGTVKAVHQRELKQDIEAQIILGNTYHLYLRPGLDTLERAGGLHKFNGWDGPILTDSGGYQVYSLTEVRKIKEEGVTFRSHIDGSKHLFTPENVMDIQRTIGADIIMAFDECTPYPCDYGYARRSIEMTHRWLQRCCTRFDETEPKYGYNQTLFPIVQGSVYKDLRVKSAEVIASFEREGNAIGGLSVGEPAEEMYAMTEVVCNILPEEKPRYLMGVGTPVNLLENIALGIDMFDCVMPTRNGRNGMLFTKNGIINIKNEKWKNDFSAIDEDSDLFADISYSKAYLRHLIHSGEMLGAQIATLHNLHFYLWLVKQAREKIISGEFYNWKNTMVKSLSQRL

SEQ ID NO: 57813 - protein, 376 aa, unidentified
  source 1..376: note = Mucilaginibacter pedocola
  REGION 1..376: note = tr|A0A1S9P7H9|A0A1S9P7H9_9SPHI Queuine tRNA-ribosyltransferase OS=Mucilaginibacter pedocola; OX = 1792845 GN=tgt PE=3 SV=1
MKFTLKAQDPLSKARAGELVTDHGVIQTPIFMPVGTAGTVKAVHQRELKDDIKAQIILGNTYHLYLRPGLDIIESAGGLHKFNGWNGPILTDSGGYQVYSLTDVRKIKEEGVTFRSHVDGSKHLFTPENVMDIQRTIGADIIMAFDECTPYPCEYNYAKRSIEMTHRWLKRCCDRFDSTEPKYGYNQTLFPIVQGSVYKDLRIRSAEVIASFEREGNAIGGLSVGEPAEEMYAMTEIVCDILPQNKPRYLMGVGTPVNILENIALGIDMFDCVMPTRNARNGMLFTKNGIINMRNKKWENDFSPIEADSDLYADTQYSKAYLRHLIHSGEMLGAQIATLHNLHFYLWLVTEARNKIISGEFYEWKKTMVNRLGQRL

SEQ ID NO: 57814 - protein, 376 aa, unidentified
  source 1..376: note = Mucilaginibacter phyllosphaerae
  REGION 1..376: note = tr|A0A4Y8A8D6|A0A4Y8A8D6_9SPHI Queuine tRNA-ribosyltransferase OS=Mucilaginibacter phyllosphaerae; OX = 1812349 GN=tgt PE=3 SV=1
MKFNLTAQDPLSKARAGELTTDHGVIQTPIFMPVGTAGTVKAVHQRELKDDIKAQIILGNTYHLYLRPGLNTIEQAGGLHKFNGWDGPILTDSGGYQVYSLSEVRKIKEEGVTFRSHVDGSKHLFTPENVMDIQRTIGADIIMAFDECTPYPCDYNYAKRSIEMTHRWLKRCCDRFDTTEPKYGYSQTFFPIVQGSVYKDLRVRSAEVIASFEREGNAIGGLSVGEPAEEMYAMTEVVCNILPEHKPRYLMGVGTPINLLENIALGIDMFDCVMPTRNARNGMLFTKNGIINMRNEKWKNDFSPIEADSDLYADVCYTKAYLRHLIHSGEMLGAQIATLHNLHFYLWLVKEARNKIISGEFYDWKKVMVNRLGQRL

SEQ ID NO: 57815 - protein, 376 aa, unidentified
  source 1..376: note = Mucilaginibacter pineti
  REGION 1..376: note = tr|A0A1G7HZ84|A0A1G7HZ84_9SPHI Queuine tRNA-ribosyltransferase OS=Mucilaginibacter pineti; OX = 1391627 GN=tgt PE=3 SV=1
MKFKLTAQDPLSKARAGEMTTDHGVIETPIFMPVGTAGTVKAVHQRELKTDIEAQIILGNTYHLYLRPGLDTIERAGGLHKFNGWDGPILTDSGGYQVYSLAEVRKIKEEGVTFRSHIDGSKHLFTPENVMDIQRTIGADIIMAFDECTPYPCEYGYARRSIDMTHRWLKRCCDRFDSTEPKYGYNQTFFPIVQGSVYKDLRVKSAEAIASFEREGNAIGGLSVGEPAEEMYAMTEIVCNILPEQKPRYLMGVGTPINILENIALGIDMFDCVMPTRNARNGMLFTKNGIINIKNEKWKNDFSAIEDDSDLFADKEYSKSYLRHLIHSGEMLGAQIATLHNLHFYLWLVKEARKKIIAGEFYDWKNKMVKLLGQRL

SEQ ID NO: 57816 - protein, 376 aa, unidentified
  source 1..376: note = Mucilaginibacter polytrichastri
  REGION 1..376: note = tr|A0A1Q5ZUM8|A0A1Q5ZUM8_9SPHI Queuine tRNA-ribosyltransferase OS=Mucilaginibacter polytrichastri; OX = 1302689 GN=tgt PE=3 SV=1
MKFNLTAQDPLSKARAGEITTDHGTIKTPIFMPVGTAGTVKAVHQHELRDDIKAQIILGNTYHLYLRPGLDTLEKAGGLHKFIGWDRPILTDSGGYQVYSLSDVRKIKEEGVTFRSHIDGSKHLFTPENAIDTQRTIGGDIIMAFDECTPYPCEYNYARRSIEMTHRWLKRCCDRFDTTEPKYGYNQTFFPIVQGSVYKDLRVKSAEVIASFEREGNAIGGLSVGEPAEEMYAMTELVCNILPTDKPRYLMGVGTPVNILENIALGIDMFDCVMPTRNARNGMLFTKDGILNMRNEKWKNDFSPIEADSDLWSDREYSKGYLRHLMTSKEILGAQIATLHNLHFYLWLVTTAREKIISGEFYDWKNIMVKRLAQRL

SEQ ID NO: 57817 - protein, 376 aa, unidentified
  source 1..376: note = Mucilaginibacter psychrotolerans
  REGION 1..376: note = tr|A0A4Y8SBX9|A0A4Y8SBX9_9SPHI Queuine tRNA-ribosyltransferase OS=Mucilaginibacter psychrotolerans OX=1524096 GN=tgt PE=3 SV=1
MEFTLTAQDPLSKARAGELVTDHGVIQTPIFMPVGTAGTVKAVHQRELKNDIKAQIILGNTYHLYLRPGLDIIESAGGLHKFNGWEGPILTDSGGYQVYSLTDVRKIKEEGVTFRSHVDGSKHLFTPENVMDIQRVIGADIIMAFDECTPYPCDYNYAKRSIEMTHRWLKRCCDRFDNTQPKYDYNQTLFPIVQGSVYKDLRVRSAEVIASFEREGNAIGGLSVGEPAEEMYAMTEIVCDILPQSKPRYLMGVGTPVNILENIALGIDMFDCVMPTRNARNGMLFTKNGILNMRNKKWENDFSPIEADSDLYADTQYTKAYLRHLIHSGEMLGAQIATLHNLHFYLWLVTEARNKIISGEFYHWKKIMVSRLGQRL

SEQ ID NO: 57818 - protein, 376 aa, unidentified
  source 1..376: note = Mucilaginibacter rubeus
  REGION 1..376: note = tr|A0A364WKF8|A0A364WKF8_9SPHI Queuine tRNA-ribosyltransferase OS=Mucilaginibacter rubeus; OX = 2027860 GN=tgt PE=3 SV=1
MKFNLTAQDPLSKARAGEITTDHGTIQTPIFMPVGTAGTVKAVHQHELKQDISAQIILGNTYHLYLRPGLNTLESAGGLHKFNGWDGPILTDSGGYQVYSLTEVRKIKEEGVTFRSHIDGSKHLFTPENVMDIQRIIGADIIMAFDECTPYPCDYNYAKRSIEMTHRWLKRCCDRFDSTGPKYGYSQTLFPIVQGSVYKDLRVRSAEVIASYEREGNAIGGLSVGEPAEEMYAMTEIVCNILPQQKPRYLMGVGTPVNILENIALGIDMFDCVMPTRNARNGMLFTKNGIINIKNEKWKNDFSAIEDDSDLFADRDYSKAYLRHLIHSGEMLGAQIATLHNLHFYLWLVKEARKKIIAGEFYDWKSMMVKRLGQRL

SEQ ID NO: 57819 - protein, 376 aa, unidentified
  source 1..376: note = Mucilaginibacter rubeus
  REGION 1..376: note = tr|A0A5C1HWF4|A0A5C1HWF4_9SPHI Queuine tRNA-ribosyltransferase OS=Mucilaginibacter rubeus; OX = 2027860 GN=tgt PE=3 SV=1
MKFNLTAQDPLSKARAGEITTDHGTIQTPIFMPVGTAGTVKAVHQHELKQDISAQIILGNTYHLYLRPGLNTLESAGGLHKFNGWDGPILTDSGGYQVYSLTEVRKIKEEGVTFRSHIDGSKHLFTPENVMDIQRIIGADIIMAFDECTPYPCDYNYAKRSIEMTHRWLKRCCDRFDSTEPKYGYSQTLFPIVQGSVYKDLRVRSAEVIASYEREGNAIGGLSVGEPAEEMYAMTEIVCNILPQQKPRYLMGVGTPVNILENIALGIDMFDCVMPTRNARNGMLFTKNGIINIKNEKWKNDFSAIEDDSDLFSDRDYSKAYLRHLIHSGEMLGAQIATLHNLHFYLWLVKEARKKIIAGEFYDWKNMMVKRLGQRL

SEQ ID NO: 57820 - protein, 376 aa, Mucilaginibacter sp.
  REGION 1..376: note = tr|A0A556ML64|A0A556ML64_9SPHI Queuine tRNA-ribosyltransferase OS=Mucilaginibacter sp. MAH-19; OX = 2597670 GN=tgt PE=3 SV=1
MKFNLTVQDPNSKARAGEITTDHGTIQTPIFMPVGTAGTVKAVHQHELKNDIQAQIILGNTYHLYLRPGLDVLEGAGGLHKFNGWEGPILTDSGGYQVYSLSEVRKIKEEGVTFRSHIDGSKHLFTPENVMDIQRVIGADIIMAFDECTPYPCDYIYAKKSIEMTHRWLKRCCDRFDSTEPKYGYSQTLFPIVQGSVYKDLRVRSAEVIASFEREGNAIGGLSVGEPAEEMYAMTELVCDILPEQKPRYLMGVGTPINLLENIALGVDMFDCVMPTRNARNGMLFTKNGVINIKNEKWKNDFSAIEDDSDLYADKVYTKAYLRHLIHSGEMLGAQIATLHNLHFYLWLVKEARNKIIEGEFYNWKKVMVNRLGQRL

SEQ ID NO: 57821 - protein, 376 aa, Mucilaginibacter sp.
  REGION 1..376: note = tr|A0A1C2GJG0|A0A1C2GJG0_9SPHI Queuine tRNA-ribosyltransferase OS=Mucilaginibacter sp. PPCGB 2223; OX = 1886027 GN=tgt PE=3 SV=1
MQFKLTTTDPLSKARAGEITTDHGTIQTPIFMPVGTAGTVKAVHQRELRDDIKAQIILGNTYHLYLRPGLDTLEKAGGLHKFNGWDRPILTDSGGYQVYSLTEVRKIKEEGVTFRSHIDGSKHLFTPEGVMDIQRTIGADIIMAFDECTPYPCDYGYARRSLDMTHRWLKRCCDRFDSTEPKYGYSQTLFPIVQGSVYKDLRIKSAETIAGFGREGNAIGGLSVGEPAEEMYAMTEVVCDILPGDKPRYLMGVGTPVNILENIALGVDMFDCVMPTRNGRNGMLFTRNGIINIKNEKWKNDFSAIDEESDLYADTCYSKAYLRHLIHSGEMLGAQIATLHNLHFYLWLVKQAREKIISGEFYDWKNKMVKTLAQRL

SEQ ID NO: 57822 - protein, 376 aa, unidentified
  source 1..376: note = Mucilaginibacter yixingensis
  REGION 1..376: note = tr|A0A2T5JG12|A0A2T5JG12_9SPHI Queuine tRNA-ribosyltransferase OS=Mucilaginibacter yixingensis; OX = 1295612 GN=tgt PE=3 SV=1
MNFKLQAQDPLSKARAGEITTDHGTIQTPIFMPVGTAGTVKAVHQHELLNDVNAQIILGNTYHLYLRPGLNTLEQAGGLHKFNGWDKPILTDSGGYQVYSLTEVRKIKEEGVTFRSHIDGSKHLFTPENVMDTQRTIGADIIMAFDECTPYPCDYNYARRSLDMTHRWLKRCCDRFDSTEPKYGYSQTLFPIVQGSVYKDLRIKSAETIASFEREGNAIGGLSVGEPAEEMYAMTEVVCNILPEQKPRYLMGVGTPVNILENIALGIDMFDCVMPTRNARNGMLFTKDGIINIRNEKWKNDFSAIEANSDLHVDRHHTKAYLRHLITSGEILGAQIASLHNLHFYLWLVNTAREKIIAGEFYEWKKTMVNRLGQRL

SEQ ID NO: 57823 - protein, 374 aa, unidentified
  source 1..374: note = Mucinivorans hirudinis
  REGION 1..374: note = tr|A0A060RAR0|A0A060RAR0_9BACT Queuine tRNA-ribosyltransferase OS=Mucinivorans hirudinis; OX = 1433126 GN=tgt PE=3 SV=1
MKFTIEKVCGKARAARFSTDHGVVQTPIFMPVGTLGSVKGVFHNQLAEDIKAQIILGNTYHLYLRPGRETLEMAGGLHKFSAWDRPILTDSGGFQVFSLADCRKITEEGCRFSSHIDGSKHLFTPENVVDTQRIIGADIMMAFDECPPGTAEYKYAEKSLDLTNRWLERCFNQYEKSAPKYGHYQSLFPIVQGVTYPDLRVKSAEFVQQFGADGYAIGGLAVGEPAPMMYEMIEVVNGVLPEDKPRYLMGVGTPVNLLEAIERGVDMFDCVMPTRNGRNGMLFTSEGIINIRNEKWKNDFTPIDTAGVSFVDCTYTKAYLRHLSIAGEMLASQIASIHNLAFYLWLVGEARNQIICGTFAEWKTVMVEKLQRRL

SEQ ID NO: 57824 - protein, 370 aa, Mucispirillum schaedleri
  REGION 1..370: note = tr|V2Q1M0|V2Q1M0_9BACT Queuine tRNA-ribosyltransferase OS=Mucispirillum schaedleri ASF457; OX = 1379858 GN=tgt PE=3 SV=1
MFSFDIEYKDSETSARAGRIKTPHGEIETPIFMPVGTVGSVKALSPEDLNNAGAQIILGNTYHLYLRPGTEVLKHFGGLAAFSSWNKPTLTDSGGFQVFSLAELNKITEDGVSFKSHLDGSSLYLNPEKSIEIQEAIGSDIIMSFDECIPYPATYEYVKNSVDRTARWALRGKNAKKRDEQALFGIVQGGIYEDMRKRSAEQLTSIGFDGYSIGGLSVGEEISTMYEICGYTASLLPQDKPRYLMGVGTPEDILTCIGLGVDMFDCVMPTRNARNGTLFTSSGKFSIKRADLAFSDEKIDENCSCYTCRNFSRGYLRHLYKAGEILALRLNSIHNISFYLSIVKNSRNAVKEGKFKSFQQEMLYRLKNNN

SEQ ID NO: 57825 - protein, 402 aa, unidentified
  source 1..402: note = Mumia flava
  REGION 1..402: note = tr|A0A2M9BDA4|A0A2M9BDA4_9ACTN Queuine tRNA-ribosyltransferase OS=Mumia flava OX=1348852 GN=tgt; PE = 3 SV=1
MSFTFTVGDRLDGRHGRTGTISTPHGEIRTPAFVPVGTKATVKAVLPETMREIGSQALLANAYHLYLQPGSDIVDEAGGLGAFMNWDGPTFTDSGGFQVLSLGAGFRKVLAMDTAGRAADDVIAEGKERLAHIDDDGVTFKSHLDGSKHRFTPETSMQIQHRLGADIIFAFDECTTLMNTRDYQERSVERTQAWAVRCVAEHRRLTEERADKPYQALFGVVQGAQFEDLRRQSARGLVELGFDGYGIGGALEKDQLGTIVSWVCDELPEDRPRHLLGIGEPDDLFAGIENGADTFDCVSPSRVARTSRVYTVDGQRNLLVAASKRRFEPIDDACDCYTCGHYTVAYLHHLFKAKEYLAATLVTIHNERFIVRLVDRIRDAVGDGSYDALKSEFLGRYYASRS

SEQ ID NO: 57826 - protein, 406 aa, unidentified
  source 1..406: note = Mumia sp.
  REGION 1..406: note = tr|A0A5C4MLJ6|A0A5C4MLJ6_9ACTN Queuine tRNA-ribosyltransferase OS=Mumia sp. 527 OX=2585212 GN=tgt; PE = 3 SV=1
MTFSFSVSARLADSVDGAQGRTGVISTPHGEISTPAFIPVGTKATVKAVLPETMADLGSQALLANAYHLYLQPGSDIVDEAGGLGAFMNWPGPTFTDSGGFQVLSLGAGFRKVLAMDTTGRKADDVIAEGKERLAHIDDEGVTFKSHLDGSKHRFTPEVSMQIQHQLGADIIFAFDECTTLMNTRDYQERSVARTQAWAVRCVAEHEKLTAERAAKPYQALFGVVQGAQYEDLRRRSARGLVDLGFDGFGIGGALEKEQLGTIVGWVSEELPEDKPRHLLGIGEPDDLFTGVENGADTFDCVSPSRVARSSRVYTHDGQRNLAVASSRRSFAPIDAECDCYTCAHYTEAYLHHLFKAKEYNAATLVTIHNERFIVRLVDRIRASIEDGTYADLKAEFLGRYYARRG

SEQ ID NO: 57827 - protein, 382 aa, unidentified
  source 1..382: note = Muribacter muris
  REGION 1..382: note = tr|A0A4Y9K6C3|A0A4Y9K6C3_9PAST Queuine tRNA-ribosyltransferase OS=Muribacter muris OX=67855; GN = tgt PE=3 SV=1
MKYELKKTSGNARRGRLTFSRPKGEFHVETPAFMPVGTYGTVKGMTPEEVQATGAQIILGNTFHLWLRPGQEVMRQHGDLHDFMQWHGPILTDSGGFQVFSLGKLRKIKEEGVHFQNPISGEKIFLSPEKSMEIQYDLGSDIVMIFDECTPYPATFDYAKQSMEMSLRWAKRSRDRFDELENPNALFGIIQGGVYEELRKISVEGLVEIGFDGYAVGGLAVGEPKEDMHRILEYVCPQIPADKPRYLMGVGKPEDLIEGVRRGIDMFDCVMPTRNARNGHLFVTNGVVKIRNAKYRNDTTPLDAECDCYTCKNYTKAYLYHLDKCNEILGARLNTIHNLRYYQRLMAEIRQAIEDDRFDDFVVEFYQRIGKDVPPLQLAQSD

SEQ ID NO: 57828 - protein, 382 aa, unidentified
  source 1..382: note = Muribacter muris
  REGION 1..382: note = tr|A0A0J5P8S7|A0A0J5P8S7_9PAST Queuine tRNA-ribosyltransferase OS=Muribacter muris OX=67855; GN = tgt PE=3 SV=1
MKYELKKTSGNARRGRLTFSRPKGEFHVETPAFMPVGTYGTVKGMTPEEVQATGAQIILGNTFHLWLRPGQEVMRQHGDLHDFMQWHGPILTDSGGFQVFSLGKLRKIKEEGVHFQNPISGEKIFLSPEKSMEIQYDLGSDIVMIFDECTPYPATFDYAKQSMEMSLRWAKRSRDRFDELENPNALFGIIQGGVYEELRKISVEGLVKIGFDGYAVGGLAVGEPKEDMHRILEYVCPQIPADKPRYLMGVGKPEDLVEGVRRGIDMFDCVMPTRNARNGHLFVTNGVVKIRNAKYRNDTTPLDAECDCYTCKNYTKAYLYHLDKCNEILGVRLNTIHNLRYYQRLMAEIRQAIEDDRFDDFVVEFYQRIGKDVPPLQLAQSD

SEQ ID NO: 57829 - protein, 376 aa, unidentified
  source 1..376: note = Muribaculaceae bacterium
  REGION 1..376: note = tr|A0A4Q0IKZ9|A0A4Q0IKZ9_9BACT Queuine tRNA-ribosyltransferase OS=Muribaculaceae bacterium Isolate-007 (NCI) OX=2489217 GN=tgt PE=3 SV=1
MEFQLQATDALSNARAGLITTDHGRIETPVFMPVGTVGSVKAVHQHELRDDVNAQIILGNTYHLYLRPGTEILRQAGGLHKFIGWERPILTDSGGFQVFSLSSNRKLKEEGAYFRSHIDGSKHLFTPENVVDIERIIGADIMMALDECPPGTAEYDYAKKSLGLTMRWLQRGWKRYKETEGLYGYRQAYFPIVQGCTYPDLRRQAAREVAELGADGNAIGGLAVGEPAEVMYDMIDIVNEILPADRPRYLMGVGTPANILEAIERGVDMMDCVMPTRNGRNGMLFTRHGVMNMRNKKWADDFSPLQEDGPSYVDRAYSKAYVRHLFASQEILGMQIASIHNLAFYLWLTREARAHILAGDFKQWKAEMLECVTRKL

SEQ ID NO: 57830 - protein, 376 aa, unidentified
  source 1..376: note = Muribaculaceae bacterium
  REGION 1..376: note = tr|A0A3N2NNS2|A0A3N2NNS2_9BACT Queuine tRNA-ribosyltransferase OS=Muribaculaceae bacterium Isolate-114 (HZI) OX=2486475 GN=tgt PE=3 SV=1
MKFKIDATTPFSSARAGEITTDHGVIPTPIFMPVGTVGSVKGVHMRELREDIDAKIILGNTYHLYLRPGLDVIRGAGGLHKFNSWNRPILTDSGGFQVFSLSSNRKLKEEGAYFRSHIDGSKHLFTPEGVVDIQRTIGSDIMMALDECPPGTSDFSYARKSLDLTHRWLKRGWQRYQETEGLYGYSQAYFPIVQGCVYPELRKESARFVSDLGADGNAIGGLAVGEPTEKMYEMIEVVNDILPSDRPRYLMGVGTPANILEAIDRGVDMMDCVMPTRNGRNGMLFTSNGIMNMRNKKWADDFSELDPDGTAWVDHEYSRAYVRHLFVSQELLAMQIASVHNLAFYLHLVKEARKHIVAGDFASWKKEMIERVTRRL

SEQ ID NO: 57831 - protein, 376 aa, unidentified
  source 1..376: note = Muribaculum intestinale
  REGION 1..376: note = tr|A0A4S1ZM06|A0A4S1ZM06_9BACT Queuine tRNA-ribosyltransferase OS=Muribaculum intestinale; OX = 1796646 GN=tgt PE=3 SV=1
MEFQLQATDALSNARAGLITTDHGRIETPVFMPVGTVGSVKAVHQHELRDDVNAQIILGNTYHLYLRPGTEILRQAGGLHKFIGWERPILTDSGGFQVFSLSSNRKLKEEGAYFRSHIDGSKHLFTPENVVDIERIIGADIMMALDECPPGTAEYDYAKKSLGLTMRWLQRGWKRYKETEGLYGYRQAYFPIVQGCTYPDLRRQAAREVAELGADGNAIGGLAVGEPAEVMYDMIDIVNEILPADRPRYLMGVGTPANILEAIERGVDMMDCVMPTRNGRNGMLFTRHGVMNMRNKKWADDFSPLQEDGPSYVDRAYSKAYVRHLFASQEILGMQIASIHNLAFYLWLTREARAHILAGDFKQWKTEMLECVTRKL

SEQ ID NO: 57832 - protein, 376 aa, unidentified; identical to SEQ ID NO: 57829
  source 1..376: note = Muribaculum intestinale
  REGION 1..376: note = tr|A0A1B1S6M0|A0A1B1S6M0_9BACT Queuine tRNA-ribosyltransferase OS=Muribaculum intestinale; OX = 1796646 GN=tgt PE=3 SV=1

SEQ ID NO: 57833 - protein, 376 aa, unidentified
  source 1..376: note = Muribaculum sp.
  REGION 1..376: note = tr|A0A4P7VD49|A0A4P7VD49_9BACT Queuine tRNA-ribosyltransferase OS=Muribaculum sp. TLL-A4; OX = 2530390 GN=tgt PE=3 SV=1
MKFELQATDKFSNARAGLITTDHGPIETPIFMPVGTVGSVKAVHQRELDEDIRAQIILGNTYHLYLRPGIDILERAGGLHRFNGWKKPILTDSGGFQVFSLSANRKLKEEGAYFRSHIDGSKHLFTPEGVVDIQRSIGADIMMALDECPSGTADYDYAKKSLGLTTRWLQRGWKRYKETEGRYGYSQAYFPIVQGCTYADLRRESAKTVADLGADGNAIGGLAVGEPAEVMYDMIEVVNEILPADKPRYLMGVGTPANILEAIERGVDMMDCVMPTRNGRNGMLFTAHGIMNMRNKKWADDFSPLQEDGPSYVDRFYTKAYVRHLFAAQEILGMQIASIHNLAFYLWLVGEARKHILAGDFKAWKDVMVERVTRRL

SEQ ID NO: 57834 - protein, 376 aa, unidentified
  source 1..376: note = Muribaculum sp.
  REGION 1..376: note = tr|A0A4V3RBN0|A0A4V3RBN0_9BACT Queuine tRNA-ribosyltransferase OS=Muribaculum sp. NM65_B17; OX = 2516961 GN=tgt PE=3 SV=1
MKFELQATDKFSNARAGLITTDHGPIETPIFMPVGTVGSVKAVHQRELDEDIKAQIILGNTYHLYLRPGIDILERAGGLHRFNGWKKPILTDSGGFQVFSLSANRKLKEEGAYFRSHIDGSKHLFTPEGVVDIQRSIGADIMMALDECPSGTADYDYAKKSLGLTTRWLQRGWKRYKETEGRYGYSQAYFPIVQGCTYADLRRESAKTVADLGADGNAIGGLAVGEPAEVMYDMIEVVNEILPADKPRYLMGVGTPANILEAIERGVDMMDCVMPTRNGRNGMLFTAHGIMNMRNKKWADDFSPLQEDGPSYVDRFYTKAYVRHLFAAQEILGMQIASIHNLAFYLWLVGEARKHILAGDFKAWKDVMVERVTRRL

SEQ ID NO: 57835 - protein, 376 aa, unidentified
  source 1..376: note = Muricauda antarctica
  REGION 1..376: note = tr|A0A1M6WH00|A0A1M6WH00_9FLAO Queuine tRNA-ribosyltransferase OS=Muricauda antarctica OX=1055723; GN = tgt PE=3 SV=1
MKFTLLQKDNKSKARAGEITTDHGTIQTPIFMPVGTVASVKGVHQRELRDDIDPDIILGNTYHLYLRPSTGILEEAGGLHKFMGWDRNILTDSGGYQVYSLSGNRKIKEEGVKFKSHIDGSNHFFTPENVMEIQRTIGADIIMAFDECTPYPCDYQYAKRSMHLTHRWLDRCISHLEKLPFKYGYSQSFFPIVQGSTYKDLRKQSAEYIASVGAEGNAIGGLSVGEPAEEMYEMAELVCDILPEDKPRYLMGVGTPINILENIALGVDMFDCVMPTRNARNGMLFTAHGTINIKNKKWENDFSPLDEMGITFVDTEYSKAYLRHLFAANEYLGKQIATIHNLGFYLWLVRTARERILAGDFQEWKTKMVQQMDKRL

SEQ ID NO: 57836 - protein, 394 aa, Muricauda lutaonensis
  REGION 1..394: note = tr|A0A0D5YVN3|A0A0D5YVN3_9FLAO Queuine tRNA-ribosyltransferase OS=Muricauda lutaonensis OX=516051; GN = tgt PE=3 SV=1
MLRYCCGQDGYICVQILRLRFTLEQTDPKSKARAGKLVTDHGTIETPIFMPVGTVASVKGVHQRELRDEVDPDIILGNTYHLYLRPGMDILEKAGGLHKFMGWDRNILTDSGGYQVYSLSANRKIKEEGVKFKSHIDGSLHFFTPENVMEIQRTIGADIIMAFDECTPYPCDYGYAKRSMQMTHRWLDRCLAHLEKLPFKYGYSQTFFPIVQGSTYKDLRIQSAEYIASVGAEGNAIGGLSVGEPAEEMYKMAEAVCDILPEDKPRYLMGVGTPINILENIALGVDMFDCVMPTRNARNGMLFTAEGTINIKNKKWEDDFSPIDEMGITFVDTEYSKAYLRHLFAANEYLGKQIATIHNLGFYRWLVKTAREHILTGDFAEWKQTMVTKMNKRL

SEQ ID NO: 57837 - protein, 376 aa, Muricauda lutimaris
  REGION 1..376: note = tr|A0A3A1N716|A0A3A1N716_9FLAO Queuine tRNA-ribosyltransferase OS=Muricauda lutimaris OX=475082; GN = tgt PE=3 SV=1
MDFTLIQKDNKTKARAGELTTDHGIIDTPIFMPVGTVASVKGVHQRELKDEINPDIILGNTYHLYLRPKTGILQEAGGLHKFMGWDRPILTDSGGYQVYSLSDNRKIKEEGVKFKSHIDGSRHLFTPENVMEIQRTIGADIIMAFDECTPYPCDYQYAKRSMHMTHRWLDRCINHLEKLPYTYDYSQSFFPIVQGSTYKDLRKQSAEYIASVEAEGNAIGGLSVGEPAEEMYEMAELVCDILPEDKPRYLMGVGTPINILENIALGVDMFDCVMPTRNARNGMLFTAHGTINIKNKKWENDFSPLDEMGITFVDTEYSKAYLRHLFAANEYLGKQIATIHNLGFYLWLVRTARERILAGDFLEWKTKMVNQMDKRL

SEQ ID NO: 57838 - protein, 376 aa, Muricauda olearia
  REGION 1..376: note = tr|A0A444VHE7|A0A444VHE7_9FLAO Queuine tRNA-ribosyltransferase OS=Muricauda olearia OX=552546; GN = tgt PE=3 SV=1
MKFTLVQKDTKSKARAGEMTTDHGTIQTPIFMPVGTVASVKGVHQRELTDEINPDIILGNTYHLYLRPGTSILQQAGGLHKFMGWERPILTDSGGYQVYSLSDNRKIKEEGVKFKSHIDGSHHVFTPENVMEIQRTIGADIIMAFDECTPYPCDYNYAKRSMHMTHRWLDRCMAHLEKLPYTYDYTQTFFPIVQGSTYKDLRKQSAEYIASVGAEGNAIGGLSVGEPAEEMYEMAELVCDILPEDKPRYLMGVGTPINILENIALGVDMFDCVMPTRNARNGMLFTAHGTINIKNKKWENDFSPIDEMGITFVDTEYSKAYLRHLFAANEYLGKQIATIHNLGFYLWLVRTARERILAGDFLEWKNQMVQQMDKRL

SEQ ID NO: 57839 - protein, 376 aa, unidentified
  source 1..376: note = Muricauda pacifica
  REGION 1..376: note = tr|A0A2T0M6Y3|A0A2T0M6Y3_9FLAO Queuine tRNA-ribosyltransferase OS=Muricauda pacifica OX=1080225; GN = tgt PE=3 SV=1
MKFDLIQKDKATKARAATLETDHGVIQTPIFMPVGTVASVKAVHQRELKEDINPDIILGNTYHLYLRPGLDVLEKAGGLHQFMGWDRNILTDSGGYQVYSLSDNRKIKEEGVTFKSHIDGSKHFFSPESAMDIQRTIGADIIMAFDECTPYPCDYDYAKKSMHMTHRWLDRCISHFNSTPPKYGYEQTLFPIVQGSTYKDLRKQSAEYIASVEAEGNAIGGLSVGEPAEEMYEMSEIVCDILPEDKPRYLMGVGTPINILENIALGVDMFDCVMPTRNARNGMLFTAHGTINIKNKKWEADFSPIDEMGITFVDTEYSKSYLRHLFAANEFLGKQIATIHNLGFYLWLVRTARERILAGDFLEWKIKMVQQMDKRL

SEQ ID NO: 57840 - protein, 376 aa, Muricauda ruestringensis
  REGION 1..376: note = tr|G2PMW9|G2PMW9_MURRD Queuine tRNA-ribosyltransferase OS=Muricauda ruestringensis (strain DSM 13258 / CIP 107369 / LMG 19739 / B1) OX=886377; GN = tgt PE=3 SV=1
MDFTLVQKDSKSKARAGELTTDNGNIQTPIFMPVGTVASVKGVHQRELKDEINPDIILGNTYHLFLRPGTGILEEAGGLHKFMGWDRPILTDSGGYQVYSLSDNRKIKEEGVKFKSHIDGSRHFFTPENVMEIQRTIGADIIMAFDECTPYPCDYQYAKRSMHMTHRWLDRCINHLEKLPFKYGYSQSFFPIVQGSTYKDLRKQSVEYIASVEAEGNAIGGLSVGEPAEEMYEMAELVCDILPEDKPRYLMGVGTPINILENIALGVDMFDCVMPTRNARNGMLFTAHGTINIKNKKWENDFSPIDEMGITFVDTEYSKAYLRHLFAANEYLGKQIATIHNLGFYLWLVRTARERILAGDFLEWKTKMVNQMDKRL

SEQ ID NO: 57841 - protein, 376 aa, Muricauda sp.
  REGION 1..376: note = tr|A0A2N0GIX9|A0A2N0GIX9_9FLAO Queuine tRNA-ribosyltransferase OS=Muricauda sp. ES.050 OX=1798204; GN = tgt PE=3 SV=1
MDFTLLQKDSKTKARAGELITDHGNIQTPIFMPVGTVATVKGVHQRELKDEINPDIILGNTYHLYLRPKTGILEEAGGLHNFMGWDRPILTDSGGYQVYSLSDNRKIKEEGVKFKSHIDGSRHLFTPENVMEIQRTIGADIIMAFDECTPYPCDYQYAKRSMHMTHRWLDRCIDHLEKLPFKYGYSQSFFPIVQGSTYKDLRKQSAEYIASMEAEGNAIGGLSVGEPAEEMYEMAELVCDILPEDKPRYLMGVGTPINILENIALGVDMFDCVMPTRNARNGMLFTAHGTINIKNKKWENDFSPIDEMGITYVDTEYSKAYLRHLFAANEYLGKQIATIHNLGFYLWLVRTARERILAGDFLEWKTKMVDQMDKRL

SEQ ID NO: 57842 - protein, 376 aa, Muricauda sp.
  REGION 1..376: note = tr|A0A3R7W284|A0A3R7W284_9FLAO Queuine tRNA-ribosyltransferase OS=Muricauda sp. TMED12 OX=1986608; GN = tgt PE=3 SV=1
MDFTLIQKDSKTKARAGKLITDHGTIDTPIFMPVGTVASVKGVHQRELKDEINPDIILGNTYHLYLRPKTGILQEAGGLHKFMGWDRPILTDSGGYQVYSLSDNRKIKEEGVKFKSHIDGSRHLFTPENVMEIQRTIGADIIMAFDECTPYPCDYQYAKRSMHMTHRWLDRCINHLEKLPYTYDYSQSFFPIVQGSTYKDLRKQSAEYIASVEAEGNAIGGLSVGEPAEEMYEMAELVCDILPEDKPRYLMGVGTPINILENIALGVDMFDCVMPTRNARNGMLFTAHGTINIKNKKWENDFSPLDEMGITFVDTEYSKAYLRHLFAANEYLGKQIATIHNLGFYLWLVRTARERILAGDFLEWKTKMVNQMDKRL

SEQ ID NO: 57843 - protein, 376 aa, unidentified
  source 1..376: note = Muricauda taeanensis
  REGION 1..376: note = tr|A0A3A1NVH5|A0A3A1NVH5_9FLAO Queuine tRNA-ribosyltransferase OS=Muricauda taeanensis OX=1005926; GN = tgt PE=3 SV=1
MKFTLLQKDNKSKARAGEITTDHGTIQTPIFMPVGTVASVKGVHQRELRDDIDPDIILGNTYHLYLRPGTGILEEAGGLHKFMGWDRNILTDSGGYQVYSLSGNRKIKEEGVKFKSHIDGSNHFFTPENVMEIQRTIGADIIMAFDECTPYPCDYQYAKRSMHLTHRWLDRCISHLEKLPFKYGYSQSFFPIVQGSTYKDLRKQSAEYIASVGAEGNAIGGLSVGEPAEEMYEMAELVCDILPEDKPRYLMGVGTPINILENIALGVDMFDCVMPTRNARNGMLFTAHGTINIKNKKWENDFSPLDEMGITFVDTEYSKAYLRHLFAANEYLGKQIATIHNLGFYLWLVRTARERILAGDFQEWKTKMVQQMDKRL

SEQ ID NO: 57844 - protein, 376 aa, unidentified
  source 1..376: note = Muricauda zhangzhouensis
  REGION 1..376: note = tr|A0A1H2Z761|A0A1H2Z761_9FLAO Queuine tRNA-ribosyltransferase OS=Muricauda zhangzhouensis; OX = 1073328 GN=tgt PE=3 SV=1
MDFTLVQKDKQSKARAGIMTTDHGEIQTPIFMPVGTVASVKGVHQRELKDEINPDIILGNTYHLYLRPSTGILEEAGGLHKFMGWDRNILTDSGGYQVYSLSDNRKIKEEGVKFKSHIDGSHHVFTPENVMEIQRTIGADIIMAFDECTPYPCDYQYAKRSMHLTHRWLDRCINHLETLPFKYGYSQSFFPIVQGSTYKDLRKQSAEYIASVGAEGNAIGGLSVGEPAEEMYEMTEIVCDILPEDKPRYLMGVGTPINILENIALGIDMFDCVMPTRNARNGMLFTAHGTINIKNKKWENDFSPIDEMGITFVDTEYSKAYLRHLFAANEYLGKQIATIHNLGFYLWLTRTARERILAGDFYEWKNKMVQQMDKRL

SEQ ID NO: 57845 - protein, 378 aa, unidentified
  source 1..378: note = Muricomes intestini
  REGION 1..378: note = tr|A0A4R3KHV7|A0A4R3KHV7_9FIRM Queuine tRNA-ribosyltransferase OS=Muricomes intestini OX=1796634; GN = tgt PE=3 SV=1
MYELLKRDGLAKRGRLHTVHGIIETPVFMNVGTAAAIKGAVSADDLKTIKTQVELSNTYHLHVRPGDKVVKKLGGLHRFMSWDKPILTDSGGFQVFSLADLRKIKEEGVHFHSHIDGRKIFMGPEESMQIQSNLASTIAMAFDECPSSVADREYMTNSVARTTRWLKRCKAEMARLNALPDTINKEQMLFAINQGGIYEDIRVEHAKQIAEFDMEGYAVGGLAVGESHEEMYNILDVVVPYLPAEKPVYLMGVGTPANILEGVERGVDFFDCVYPSRNGRHGHVYTNRGKLNLFNARYELDDRPIEEGCKCPACQSYSRAYIRHLLKAKEMLGMRLCVLHNLYFYNTMMEEIRNAIDAGEFKGYKKRKLDGMAGTEGP

SEQ ID NO: 57846 - protein, 376 aa, Muriicola sp.
  REGION 1..376: note = tr|A0A411ED79|A0A411ED79_9FLAO Queuine tRNA-ribosyltransferase OS=Muriicola sp. MMS17-SY002; OX = 2507538 GN=tgt PE=3 SV=1
MQFKLQHTDPGSKARAAEMITDHGSIKTPIFMPVGTVASVKGVHQRELREEIDPDIILGNTYHLYLRPKPEILQQAGGLHAFMGWDRNILTDSGGYQVYSLSGNRKIREEGVKFKSHIDGSTHMFTPERVMEIQRIIGADIIMAFDECTPYPCDYKYAERSMHMTHRWLERCITHLEKTPLLYDYSQTFFPIVQGSTYKDLRKQSAEYIAGVGAEGNAIGGLSVGEPAEEMYGMTEVVCDILPEDKPRYLMGVGTPINLLENIALGIDMFDCVMPTRNGRNGMLFTAEGTINIKNKKWENDFSAIDEHGPTFVDKEYSKAYLRHLFVANEYLGKQIATIHNLGFYLWLVREARNHILAGDFTPWKAKMVKQMDKRL

SEQ ID NO: 57847 - protein, 376 aa, unidentified
  source 1..376: note = Mycoavidus cysteinexigens
  REGION 1..376: note = tr|A0A2Z6EXK7|A0A2Z6EXK7_9BURK Queuine tRNA-ribosyltransferase OS=Mycoavidus cysteinexigens; OX = 1553431 GN=tgt PE=3 SV=1
MLTFDLLNVDGQARRGRLKLNHGVIETPVFMPVGTYGAVKAMAPVELAQIEAQIILGNTFHLWLRPGLDAIAAHGGLHRFIGWQKPILTDSGGFQVFSLGALRKITEEGVAFASPLNGDRLFLSPEVSMQIQHQLNSDIVMQFDECTPYTTAGIPTTLSQAADSMHLSLRWARRSINEFNQLSNPNALFGIVQGGMHESLRDESLAGLMELDFAGYAIGGLSVGEPKEDMMRILNHVAPRLPADKPHYLMGVGTPEDLVAGVAAGIDMFDCVMPTRNARNGWLFTRFGDLKIKNAVHRKDPRPLDETCPCYTCSHFSRAYLHHLHRIGEILGARLNTLHNLYYYLELMREMRSAISARRFGTFVQKFKAERARGVG

SEQ ID NO: 57848 - protein, 399 aa, unidentified
  source 1..399: note = Mycobacteriaceae bacterium
  REGION 1..399: note = tr|A0A1A0N0A8|A0A1A0N0A8_9MYCO Queuine tRNA-ribosyltransferase (Fragment) OS=Mycobacteriaceae bacterium 1482268.1 OX=1834080 GN=A5662_22600 PE=3 SV=1
MSEPSFTIEAELPGRLGRAGVIRTPHGDIHTPAFIAVGTQATVKAVLPETMKEHGAQAILANAYHLYLQPGADIIEEAGGLGAFMNWPGPTFTDSGGFQVLSLGAGFRKVLAMDADRVQADDVIAEGKERLARVDDDGVTFTSHLNGSTHRFTPEVSIGIQHQIGADIIFAFDELTTLVNTRGYQEESVQRTHRWAVRCLAEHRRLAAAHPDRHPQALFGVVQGAQYEDLRRQATRGLVSIVDDDGRGFDGYGIGGALEKQNLATIIGWVSSELPADKPRHLLGISEPDDLFDAIAAGADTFDCVSPSRVARNAAVYSAAGRFNITGARYRRDFSPIDADCDCYTCGHYTRAYLHHLFKAKEMLAATLCTIHNERFIIRLVDQIRMAIRAGEFDELRAE

SEQ ID NO: 57849 - protein, 410 aa, unidentified
  source 1..410: note = Mycobacterium aquaticum
  REGION 1..410: note = tr|A0A1X0AXJ4|A0A1X0AXJ4_9MYCO Queuine tRNA-ribosyltransferase OS=Mycobacterium aquaticum; OX = 1927124 GN=tgt PE=3 SV=1
MGEPYFTVEAELPGRLGRVGVIHTPHGDIRTPAFIAVGTAATVKSVLPETMKQLGAQAILANAYHLYLQPGPEIVAEAGGLGAFMNWPGPTFTDSGGFQVMSLGVGFKKVLAMDTSRLQTDDIIAKGKERLAVVDEDGVTFRSHLDGSKHRFTPEVSIGIQHQLGADIIFAFDELTTLVNTRGYQERSVQRTHEWAVRCLAEHQRLQSSTPERPRQALFGVVQGAQYEDLRRQAASGLAGIRTADGHGFDGYGIGGALEKQNLATIVGWVSSELPADKPRHLLGISEPDDLFDAVAAGADTFDCVSPSRVARNAAVYSATGRFNITGARYKRDFTPIDAECDCYTCANYSRAYIRHLFKAKEMLSATLCTIHNERFVIRLVDQIRAAIVAGEFDELRAHVLGRYYGAPVR

SEQ ID NO: 57850 - protein, 420 aa, Mycobacterium chubuense
  REGION 1..420: note = tr|I4BQP6|I4BQP6_MYCCN Queuine tRNA-ribosyltransferase OS=Mycobacterium chubuense (strain NBB4) OX=710421 GN=tgt PE=3 SV=1
MAAPSTPRPRDSSEPFFTVESHLPGRLGRSGVIHTPHGDIHTPAFIAVGTQATVKAVLPEMIEQLGAQAVLANAYHLYLQPGPDVVEEAGGLGTFMNWPGPTFTDSGGFQVMSLGVGFKKVLAMDTERVQADDIMASGKERLAHVDDDGVTFRSHLNGSTHRFTPEVSIGIQHQLGADIIFAFDELTTLVNTRGYQERSVRRTHDWAVRCLAEHRRLSALRPDKPPQALFGVVQGAQYEDLRRQAARGLTEIVDPDGRGFDGYGIGGALEKQNLATIVGWVGEELPDDKPRHLLGISEPDDLFAAVEAGADTFDCVSPSRVARNGAVYSVTGRFNITGARYRRDFTPIDAECDCYTCANYTRAYLHHLFKAKEMLASTLCTIHNERFVIRLVDDIRAAIPAGRFDELREHVLGRYYARAI

SEQ ID NO: 57851 - protein, 411 aa, unidentified
  source 1..411: note = Mycobacterium dioxanotrophicus
  REGION 1..411: note = tr|A0A1Y0BXQ0|A0A1Y0BXQ0_9MYCO Queuine tRNA-ribosyltransferase OS=Mycobacterium dioxanotrophicus; OX = 482462 GN=tgt PE=3 SV=1
MGEPYFTVEAELPGRLGRVGVIHTPHGDIRTPAFIAVGTAATVKSVLPETMKQLGAQAILANAYHLYLQPGPEIVAEAGGLGAFMNWAGPTFTDSGGFQVMSLGVGFKKVLAMDTSRLQTDDIIAKGKERLAVVDEDGVTFRSHLDGSKHRFTPEVSIGIQHQLGADIIFAFDELTTLVNTRGYQERSVQRTHEWAVRCLAEHQRLQSSTPERPRQALFGVVQGAQYEDLRRQAASGLAGIRTADGHSFDGYGIGGALEKQNLATIVGWVSSELPADKPRHLLGISEPDDLFDAVAAGADTFDCVSPSRVARNAAVYSATGRFNITGARYKRDFTPIDAECDCYTCANYSRAYIRHLFKAKEMLSATLCTIHNERFVIRLVDQIRAAIVAGEFDELRAHVLGRYYGTAVRK

SEQ ID NO: 57852 - protein, 415 aa, Mycobacterium goodii
  REGION 1..415: note = tr|A0A2M9FD73|A0A2M9FD73_MYCGD Queuine tRNA-ribosyltransferase OS=Mycobacterium goodii OX=134601; GN = tgt PE=3 SV=1
MDQPYFTVTAELDDGRLGRVGTIHTPHGDINTPAFIPVGTAATVKSVLPETMEQLGAQAVLANAYHLYLQPGPDIVAEAGGLGAFMNWRGPTFTDSGGFQVLSLGVGFKKVLAMDTNRVQADDIIAEGKERLAHVDDDGVTFRSHLNGSLHRFTPEVSIGIQYQLGADIIFAFDELTTLVNTRAYQERSVQRTHEWAVRCLAEHHRLQEQSPERPRQALFGVVQGAQYEDLRRQAARGLAGIGEHEGPAAGLSFDGFGIGGALEKQNLATIVGWVSSELPRDKPRHMLGISEPDDLFAAVAAGADTFDCVSPSRVARNAAIYTATGRYNITGARYKRDFTPLDPECDCYTCANYSRAYIRHLFKAKEMLSATLCTIHNERFVIRLVDRIRAAMLAGEFDELRAEVLGRYYGTAVR

SEQ ID NO: 57853 - protein, 417 aa, Mycobacterium goodii
  REGION 1..417: note = tr|A0A0K0X1E4|A0A0K0X1E4_MYCGD Queuine tRNA-ribosyltransferase OS=Mycobacterium goodii OX=134601; GN = tgt PE=3 SV=1
MEQPYFTVTAELDGRLGRVGTIHTPHGDIHTPAFIPVGTAATVKSVLPETMEQLGAQAILANAYHLYLQPGPDIVAEAGGLGAFMNWPGPTFTDSGGFQVLSLGVGFKKVLAMDTNRVQADDIIAEGKERLAHVDDDGVTFRSHLNGSLHRFTPEVSIGIQYQLGADIIFAFDELTTLVNTRAYQERSVQRTHEWAVRCLAEHHRLQEQSPERPRQALFGVVQGAQYEDLRRRAARGLATIGEREGPAEGLSFDGFGIGGALEKQNLATIVGWVSGELPRDKPRHMLGISEPDDLFAAVAAGADTFDCVSPSRVARNAAIYTSTGRYNITGARYKRDFTPLDPECDCYTCANYSRAYIRHLFKAKEMLSATLCTIHNERFVIRLVDRIRAAMLAGEFDELRAEVLGRYYGSRVPEAP

SEQ ID NO: 57854 - protein, 401 aa, unidentified
  source 1..401: note = Mycobacterium grossiae
  REGION 1..401: note = tr|A0A1E8PY36|A0A1E8PY36_9MYCO Queuine tRNA-ribosyltransferase OS=Mycobacterium grossiae; OX = 1552759 GN=tgt PE=3 SV=1
MSAQLPDRAGRVGVIHTPHGDVHTPAFVAVGTQATVKAVLPEAMQAAGAQAVLANAYHLYLQPGPDVVDEAGGLGAFMNWPGPTYTDSGGFQVMSLGVGFKKVLAMDTERVRADDVIAEGKERLAHVDDDGVTFRSHLDGSTHRFTPEVSIGIQHQLGADVIFAFDELTTLVNTRAYQETSVQRTHEWAVRCLAEHRRQTRARAHRPYQALFGVVQGAQYEDLRRRAARGLTEIRDADGNGFDGYGIGGALEKQNLATIVGWVTDELPEDKPRHLLGISEPDDLFAAVAAGADTFDCVSPSRVARNAAVYSADGRYNITGARYKRDWAPLDPECDCYTCAHYTRAYVHHLFKAKEMLASTLCTIHNERFVIHLVDRIREAITAGSFDDLRDEVLGRYYARH

SEQ ID NO: 57855 - protein, 403 aa, unidentified
  source 1..403: note = Mycobacterium lehmannii
  REGION 1..403: note = tr|A0A101AAL4|A0A101AAL4_9MYCO Queuine tRNA-ribosyltransferase OS=Mycobacterium lehmannii; OX = 2048550 GN=tgt PE=3 SV=1
MPGRAGRTGVIRTPHGEIRTPAFIPVGTQATVKAVLPETMKELGAQALLANAYHLYLQPGPDIIDEAGGLSAFMNWPGPTFTDSGGFQVLSLGAGFRKVLAMDAERIQADDIIAEGKERLANVDDDGVTFRSHLDGSSHRFTPEVSIRIQHQLGADIIFAFDELTTLVNTRGYQERSVQRTHDWAVRCLAEHRRQHEARPDKPEQALFGVVQGAQYEDLRRRAARGLVTIGAHAGPAEGLEFDGYGIGGALEKQNLATIVGWVVDELPADKPRHLLGISEPDDLFDAIAAGADTFDCVSPSRVARNAAVYSTTGRFNITNARFRRDFTPIDADCDCYTCAHYTKAYIHHLFKAKEILSATLCTIHNERFVVRLVDRIRAAIETGDFDELRADVLGRYYATRTP

SEQ ID NO: 57856 - protein, 408 aa, Mycobacterium sp.
  REGION 1..408: note = tr|A0A1H4DU97|A0A1H4DU97_9MYCO Queuine tRNA-ribosyltransferase OS=Mycobacterium sp. 283mftsu; OX = 1761810 GN=tgt PE=3 SV=1
MSQQFFEVTAQLPDRRGRAGVIHTPHGDIQTPAFIAVGTAATVKGVLPETMKSLGVQALLSNAYHLYLQPGPDVVDEAGGLGAFMNWPGPTFTDSGGFQVMSLGVGFKKVLAMDTARLQADDIIAEGKERLAHVDEDGVTFRSHLNGDKHRFTPEVSIGIQHQLGADIIFAFDELTTLVNTRAYQERSVERTHRWAVRCLAEHRRLTIERAGKPAQALFGVVQGAQYEDLRRQATKGLVGIVDEDGHGFDGYGIGGALEKQNLATIVGWVTDELPDDKPRHLLGISEPDDLFAAIEAGADTFDCVSPSRVARNAAMYSATGRFNVTNARFKRDFNPIDAECDCYTCANYTRAYMHHLFKAKEILASTLGTIHNERFIIRLVDQIRAAIIAGEFDELRDHVLGRYYGSR

SEQ ID NO: 57857 - protein, 416 aa, Mycobacterium sp.
  REGION 1..416: note = tr|A0A1A3T906|A0A1A3T906_9MYCO Queuine tRNA-ribosyltransferase OS=Mycobacterium sp. 1274761.0; OX = 1834077 GN=tgt PE=3 SV=1
MAEPSFSIEAELPGRLGRAGVIRTPHGDIHTPAFIAVGTQATVKAVLPEAMKELGAQAILANAYHLYLQPGADIIEEAGGLGAFMNWPGPTFTDSGGFQVLSLGAGFRKVLAMDAERVQADDVIAEGKQRLARVDDDGVTFTSHLNGSTHRFTPEVSIGIQHRIGADIIFAFDELTTLVNTRGYQEESVQRTHRWAVRCLAEHRRLAAAHPDRHPQALFGVVQGAQYEDLRRQAARGLVSIVDEDGRGFDGYGIGGALEKQNLATIIGWVSNELPADKPRHLLGISEPDDLFDAVAAGADTFDCVSPSRVARNAAVYSTAGRFNITGARYRRDFTPIDAECDCYTCAHYTRAYLHHLFKAKEILASTLATIHNERFIIRLVDQIRMAIRTGEFDELRAEVLGRYYAQTDKRAGKFE

SEQ ID NO: 57858 - protein, 411 aa, unidentified
  source 1..411: note = [Mycobacterium] stephanolepidis
  REGION 1..411: note = tr|A0A1Z4ERL3|A0A1Z4ERL3_9MYCO Queuine tRNA-ribosyltransferase OS=[Mycobacterium] stephanolepidis; OX = 1520670 GN=tgt PE=3 SV=1
MTDQYFSIDATLPGTAGRAGVIHTPHGDIHTPAFIAVGTKATVKAVLPETMAALGAQAVLANAYHLYLQPGPDIVDEAGGLGAFMNWPGPTFTDSGGFQVLSLGSGARKVMAMDVNRARSDDVMGSLGGGKKKDKLAHVDDDGVTFTSYLDGSTHRFTPEVSMQIQHQLGADIIFAFDELTTLINTREYQEDSVQRTHEWAQRCLDEHEKLTRERADKPYQALFGVVQGAQYEDLRRRAARGLESLVSEEGRGFDGYGIGGALEKQNLGTIVGWVTSELPEHKPRHLLGISEPDDLFAAVAAGADTFDCVSPSRVARNAAVYTRDGRVNITGSKYRRDFTPIDAECDCYTCTHYTRAYMHHLFKAKEILASTLATIHNERFTIGLVDRIRAGIMDGHFEELREETLGRYYR

SEQ ID NO: 57859 - protein, 416 aa, unidentified
  source 1..416: note = Mycobacterium syngnathidarum
  REGION 1..416: note = tr|A0A1S1JXG0|A0A1S1JXG0_9MYCO Queuine tRNA-ribosyltransferase OS=Mycobacterium syngnathidarum; OX = 1908205 GN=tgt PE=3 SV=1
MDQPYFTVEAELPGRLGRVGTIHTPHGDIHTPAFIAVGTAATVKSVLPEAMKQLGAQAILANAYHLYLQPGPDIVAEAGGLGAFMNWPGPTFTDSGGFQVMSLGVGFKKVLAMDTDRLQTDDIIAKGKERLAVVDDDGVTFRSHLDGSKHRFTPEVSIGIQNQLGADIIFAFDELTTLVNTRGYQESSVQRTHEWAVRCLAEHHRLQGLSPERPRQALFGVVQGAQYEDLRRQAARGLATIGQETGVAEGLGFDGYGIGGALEKQNLATIVGWVSSELPADKPRHLLGISEPDDLFDAVAAGADTFDCVSPSRVARNAAVYSATGRFNITGAKYKRDFTPIDAECDCYTCANYSRAYIRHLFKAKEMLSATLCTIHNERFVIRLVDQIRASIVAGEFDELRADVLGRYYGVAQERR

SEQ ID NO: 57860 - protein, 406 aa, unidentified
  source 1..406: note = Mycobacteroides abscessus
  REGION 1..406: note = tr|A0A1N2FTP1|A0A1N2FTP1_9MYCO Queuine tRNA-ribosyltransferase OS=Mycobacteroides abscessus subsp. abscessus OX=1185650 GN=tgt PE=3 SV=1
MTDPYFSIDATLSGTAGRAGVIHTPHGDIQTPAFIAVGTKATVKAVLPETMAALGAQAVLANAYHLYLQPGPDIVDEAGGLGAFMNWPGPTFTDSGGFQVLSLGSGVRKVMAMDVNRARADDVTVAGKDKLAHVDDDGVTFTSHLDGSAHRFTPEVSMQIQHQLGADIMFAFDELTTLINTREYQEDSVQRTHEWAQRCLDEHEKLTRERADKPYQALFGVVQGAQYEDLRRQAARGLESLAGPSGRGFDGYGIGGALEKQNLGTIVGWVTSELPEHKPRHLLGISEPDDLFAAVAAGADTFDCVSPSRVARNAAVYTRDGRVNITGARYRRDFTPIDAECDCYTCAHYTRAYMHHLFKAKEILASTLATIHNERFTIGLVDRIRASIVEGCFQELREDTLGRYYR

SEQ ID NO: 57861 - protein, 406 aa, unidentified
  source 1..406: note = Mycobacteroides abscessus
  REGION 1..406: note = tr|A0A1T6PXT5|A0A1T6PXT5_9MYCO Queuine tRNA-ribosyltransferase OS=Mycobacteroides abscessus subsp. massiliense OX=1962118 GN=tgt PE=3 SV=1
MTDPYFSIDATLPGTAGRAGVIHTPHGDIQTPAFIAVGTKATVKAVLPETMAALGAQAVLANAYHLYLQPGPDIVDEAGGLGAFMNWPGPTFTDSGGFQVLSLGSGVRKVMAMDVNRARADDVTVAGKDKLAHVDDDGVTFTSHLDGSAHRFTPEVSMQIQHQLGADIMFAFDELTTLINTREYQEDSVQRTHEWAQRCLDEHEKLTRERADKPYQALFGVVQGAQYEDLRRQAARGLESLAGPSGRGFDGYGIGGALEKQNLGTIVGWVTSELPEHKPRHLLGISEPDDLFAAVAAGADTFDCVSPSRVARNAAVYTRDGRVNITGARYRRDFTPIDAECDCYTCAHYTRAYMHHLFKAKEILASTLATIHNERFTIGLVDRIRASIVDGCFQELREDTLGRYYR

SEQ ID NO: 57862 - protein, 410 aa, unidentified
  source 1..410: note = Mycobacteroides chelonae
  REGION 1..410: note = tr|A0A3S4UKQ5|A0A3S4UKQ5_MYCCH Queuine tRNA-ribosyltransferase OS=Mycobacteroides chelonae; OX = 1774 GN=tgt PE=3 SV=1
MPAPYFSVTAELPGRLGRTGVIRTPHGEIRTPAFIPVGTQATVKAVLPETMKELGAQAILANAYHLYLQPGPDIVDEAGGLGAFMNWPGPTFTDSGGFQVLSLGAGFRKVLAMDANRVQADDVIAEGKERLAAVDDDGVTFRSHLDGSTHRFTPEVSIGIQHKLGADIIFAFDELTTLVNTRGYQERSVQRTHEWAVRCLAEHRRLTAARPDKPKQALFGVVQGAQYEDLRRQATRGLLTIVDENGEGFDGYGIGGALEKQNLATIVGWVCEELPRDKPRHLLGISEPDDLFAAVAAGADTFDCVSPSRVARNAAVYTTYGRVNITNSRFRRDFTPIDENCDCYTCTHYTRAYLHHLFKAKEILSKTLATIHNERFIVRLVDRIRDAIEAGDFDELRDDVLGRYYSARGQ

SEQ ID NO: 57863 - protein, 406 aa, unidentified
  source 1..406: note = Mycobacteroides chelonae
  REGION 1..406: note = tr|A0A1S1LL75|A0A1S1LL75_MYCCH Queuine tRNA-ribosyltransferase OS=Mycobacteroides chelonae; OX = 1774 GN=tgt PE=3 SV=1
MTDQYFSIDATLPGTAGRAGVIHTPHGDIQTPAFIAVGTKATVKAVLPETMAALGAQAVLANAYHLYLQPGPDIVDEAGGLGAFMNWPGPTFTDSGGFQVLSLGSGARKVMAMEVDRARADNHVVAGKDKLAHVDDEGVTFTSHLDGSTHRFTPEVSMQIQHQLGADIMFAFDELTTLINTREYQENSVQRTHEWAQRCLDEHEKLTRERADKPYQALFGVVQGAQYEDLRRQAARGLESLVSEEGRGFDGYGIGGALEKQNLGTIVGWVTSELPEHKPRHLLGISEPDDLFAAVAAGADTFDCVSPSRVARNAAVYTRDGRVNITGSKYRRDFTPIDAECDCYTCAHYTRAYMHHLFKAKEILASTLATIHNERFTIGLVDRIRASIVDGRFEELREETLGRYYR

SEQ ID NO: 57864 - protein, 406 aa, unidentified
  source 1..406: note = Mycobacteroides franklinii
  REGION 1..406: note = tr|A0A4R5PEQ6|A0A4R5PEQ6_9MYCO Queuine tRNA-ribosyltransferase OS=Mycobacteroides franklinii; OX = 948102 GN=tgt PE=3 SV=1
MTDQYFSIDATLPGTAGRAGVIHTPHGDIQTPAFIAVGTKATVKAVLPETMAALGAQAVLANAYHLYLQPGPDIVDEAGGLGAFMNWPGPTFTDSGGFQVLSLGSGARKVMAMDVDRARADDHVIAGKDKLAHVDDDGVTFTSHLDGSTHRFTPEVSMQIQHQLGADIMFAFDELTTLINTREYQEDSVQRTHEWAQRCLDEHEKLTRERADKPYQALFGVVQGAQYEDLRRQAARGLESLVSSGDRGFDGYGIGGALEKQNLGTIVGWVTSELPEHKPRHLLGISEPDDLFAAVAAGADTFDCVSPSRVARNAAVYTRDGRVNITGAKYRRDFTPIDAECDCYTCAHYTRAYLHHLFKAKEILASTLATIHNERFTIGLVDRIRASIVDGRFDELRDDTLGRYYG

SEQ ID NO: 57865 - protein, 406 aa, unidentified
  source 1..406: note = Mycobacteroides franklinii
  REGION 1..406: note = tr|A0A1S1L2B1|A0A1S1L2B1_9MYCO Queuine tRNA-ribosyltransferase OS=Mycobacteroides franklinii; OX = 948102 GN=tgt PE=3 SV=1
MTDQYFSIDATLPGTAGRAGVIHTPHGDIQTPAFIAVGTKATVKAVLPETMAALGAQAVLANAYHLYLQPGPDIVDEAGGLGAFMNWPGPTFTDSGGFQVLSLGSGARKVMAMEVDRARADDHVIAGKDKLAHVDDDGVTFTSHLDGSTHRFTPEVSMQIQHQLGADIMFAFDELTTLINTREYQEDSVQRTHEWAQRCLDEHEKLTRERADKPYQALFGVVQGAQYEDLRRQAARGLESLVSSGDRGFDGYGIGGALEKQNLGTIVGWVTSELPEHKPRHLLGISEPDDLFAAVAAGADTFDCVSPSRVARNAAVYTRDGRVNITGAKYRRDFTPIDAECDCYTCAHYTRAYLHHLFKAKEILASTLATIHNERFTIGLVDRIRASMVDGRFDELRDDTLGRYYG

SEQ ID NO: 57866 - protein, 406 aa, unidentified
  source 1..406: note = Mycobacteroides immunogenum
  REGION 1..406: note = tr|A0A179V743|A0A179V743_9MYCO Queuine tRNA-ribosyltransferase OS=Mycobacteroides immunogenum; OX = 83262 GN=tgt PE=3 SV=1
MTDQYFSIDATLPGTAGRAGVIHTPHGDIQTPAFIAVGTKATVKAVLPETMSALGAQAVLANAYHLYLQPGPDIVDEAGGLGAFMNWPGPTFTDSGGFQVLSLGSGARKVMAMEVDRARADNHVVAGKDKLAHVDDEGVTFTSHLDGSTHRFTPEVSMRIQHQLGADIMFAFDELTTLINTREYQEDSVQRTHEWAQRCLDEHEKLTRERADKPYQALFGVVQGAQYEDLRRQAARGLESLASAQGRGFDGYGIGGALEKQNLGTIVGWVTSELPEHKPRHLLGISEPDDLFAAVAAGADTFDCVSPSRVARNAAVYTRDGRVNITGAKYRRDFTPIDAECDCYTCAHYTRAYLHHLFKAKEILASTLATIHNERFTIGLVDRIRASIVDGCFDELREDTLGRYYS

SEQ ID NO: 57867 - protein, 406 aa, unidentified
  source 1..406: note = Mycobacteroides immunogenum
  REGION 1..406: note = tr|A0A0N0KNA7|A0A0N0KNA7_9MYCO Queuine tRNA-ribosyltransferase OS=Mycobacteroides immunogenum; OX = 83262 GN=tgt PE=3 SV=1
MTDQYFSIDATLPGTAGRAGVIHTPHGDIQTPAFIAVGTKATVKAVLPETMAALGAQAVLANAYHLYLQPGPDIVDEAGGLGAFMNWPGPTFTDSGGFQVLSLGSGARKVMAMDVNRARADDVTVAGKDKLAHVDDEGVTFTSHLDGSTHRFTPEVSMRIQHQLGADIMFAFDELTTLINTREYQEDSVQRTHEWAQRCLDEHEKLTRERADKPYQALFGVVQGAQYEDLRRQAARGLESLASAQGRGFDGYGIGGALEKQNLGTIVGWVTSELPEHKPRHLLGISEPDDLFAAVAAGADTFDCVSPSRVARNAAVYTRDGRVNITGARYRRDFTPIDAECDCYTCAHYTRAYLHHLFKAKEILASTLATVHNERFTIGLVDRIRASIVDGCFDELREDTLGRYYR

SEQ ID NO: 57868 - protein, 411 aa, unidentified
  source 1..411: note = Mycobacteroides salmoniphilum
  REGION 1..411: note = tr|A0A4R8SQM0|A0A4R8SQM0_9MYCO Queuine tRNA-ribosyltransferase OS=Mycobacteroides salmoniphilum; OX = 404941 GN=tgt PE=3 SV=1
MTDQYFSIDATLPGTAGRAGVIHTPHGDLQTPAFIAVGTKATVKAVLPETMAALGAQAVLANAYHLYLQPGPDIVDEAGGLGAFMNWPGPTFTDSGGFQVLSLGSGARKVMAMDVDRARSDDVLGALGTGAKKDKLAHVDDDGVTFTSHLDGSTHRFTPEVSMRIQHQLGADIIFAFDELTTLINTREYQEDSVQRTHEWAQRCLDEHEKLTRERADKPYQALFGVVQGAQYEDLRRQAARGLESLATEEGRGFDGYGIGGALEKQNLGTIVGWVTSELPEHKPRHLLGISEPDDLFAAVAAGADTFDCVSPSRVARNAAVYTRDGRVNITGARYRRDFTPIDAECDCYTCTHYTRAYMHHLFKAKEMLACTLATIHNERFTIGLVDRIRASIVDGHFDELREETLGRYYS

SEQ ID NO: 57869 - protein, 411 aa, unidentified
  source 1..411: note = Mycobacteroides salmoniphilum
  REGION 1..411: note = tr|A0A4R8SLE1|A0A4R8SLE1_9MYCO Queuine tRNA-ribosyltransferase OS=Mycobacteroides salmoniphilum; OX = 404941 GN=tgt PE=3 SV=1
MTDQYFSVDATLPGTAGRAGVIHTPHGDIQTPAFIAVGTKATVKAVLPETMAALGAQAVLANAYHLYLQPGPDIVDEAGGLGAFMNWPGPTFTDSGGFQVLSLGSGARKVMAMDVDRARSDDVLGALGTGAKKDKLAHVDDDGVTFTSHLDGSAHRFTPEVSMRIQHQLGADIIFAFDELTTLINTREYQEDSVQRTHEWAQRCLDEHEKLTRERADKPYQALFGVVQGAQYEDLRRQAARGLESLATEEGRGFDGYGIGGALEKQNLGTIVGWVTSELPEHKPRHLLGISEPDDLFAAVAAGADTFDCVSPSRVARNAAVYTRDGRVNITGARYRRDFTPIDAECDCYTCTHYTRAYMHHLFKAKEMLACTLATIHNERFTIGLVDRIRASIVDGHFDELREETLGRYYS

SEQ ID NO: 57870 - protein, 406 aa, unidentified
  source 1..406: note = Mycobacteroides saopaulense
  REGION 1..406: note = tr|A0A1S4VBX2|A0A1S4VBX2_9MYCO Queuine tRNA-ribosyltransferase OS=Mycobacteroides saopaulense; OX = 1578165 GN=tgt PE=3 SV=1
MTDPYFSIDATLPGTAGRAGVIHTPHGDIQTPAFIAVGTKATVKAVLPETMAALGAQAVLANAYHLYLQPGPDIVDEAGGLGAFMNWPGPTFTDSGGFQVLSLGSGARKVMAMEVDRARADNHVVAGKDKLAHVDDEGVTFTSHLDGSTHRFTPEVSMRIQHQLGADIMFAFDELTTLINTREYQEDSVQRTHEWAQRCLDEHEKLTRERADKPYQALFGVVQGAQYEDLRRQAARGLETLASEEGRGFDGYGIGGALEKQNLGTIVGWVTSELPEHKPRHLLGISEPDDLFAAVAAGADTFDCVSPSRVARNAAVYTRDGRVNITGARYRRDFTPIDAECDCYTCTHYTRAYMHHLFKAKEILASTLATIHNERFTIGLVDRIRASIVDGRFEELREDTLGRYYR

SEQ ID NO: 57871 - protein, 406 aa, unidentified
  source 1..406: note = Mycobacteroides sp.
  REGION 1..406: note = tr|A0A0R3HGV8|A0A0R3HGV8_9MYCO Queuine tRNA-ribosyltransferase OS=Mycobacteroides sp. H054; OX = 1720567 GN=tgt PE=3 SV=1
MTDQYFSIDATLPGTAGRAGVIHTPHGDIQTPAFIAVGTKATVKAVLPETMAALGAQAVLANAYHLYLQPGPDIVDEAGGLGAFMNWPGPTFTDSGGFQVLSLGSGARKVMAMEVDRARADNHVVAGKDKLAHVDDEGVTFTSHLDGSTHRFTPEVSMRIQHQLGADIMFAFDELTTLINTREYQENSVQRTHEWAQRCLDEHEKLTRERADKPYQALFGVVQGAQYEDLRRQAARGLESLVSEEGRGFDGYGIGGALEKQNLGTIVGWVTSELPEHKPRHLLGISEPDDLFAAVAAGADTFDCVSPSRVARNAAVYTRDGRVNITGSKYRRDFTPIDAECDCYTCAHYTRAYMHHLFKAKEILASTLATIHNERFTIGLVDRIRASIVDGRFEELREETLGRYYR

SEQ ID NO: 57872 - protein, 406 aa, unidentified; identical to SEQ ID NO: 57871
  source 1..406: note = Mycobacteroides sp.
  REGION 1..406: note = tr|A0A0R3FR95|A0A0R3FR95_9MYCO Queuine tRNA-ribosyltransferase OS=Mycobacteroides sp. H002; OX = 1720566 GN=tgt PE=3 SV=1

SEQ ID NO: 57873 - protein, 407 aa, unidentified
  source 1..407: note = Mycolicibacterium agri
  REGION 1..407: note = tr|A0A2A7N602|A0A2A7N602_MYCAG Queuine tRNA-ribosyltransferase OS=Mycolicibacterium agri OX=36811; GN = tgt PE=3 SV=1
MVEPSFSIEAQLPGRAGRAGVIRTPHGDIHTPAFIAVGTQATVKAVLPETMKELGAQAILANAYHLYLQPGPEVIAEAGGLGAFMNWPGPTFTDSGGFQVLSLGAGFRKVLAMDTERVQADDVIAKGKERLARVDDDGVTFTSHLDGSTHRFTPEVSIQIQHQIGADIIFAFDELTTLVNTRGYQEDSVQRTHRWAERCLAEHRRLAAQHPDRPPQALFGVVQGAQYEDLRREAARGLTAIVDDEGRGFDGYGIGGAIEKQNLAAIVGWVSDELPDDKPRHMLGISEPDDLFDAVAAGADTFDCVSPSRVARNAAVYSTKGRYNITNARYRLDFTPIDDECDCYTCGHYTRAYIGHLFKAKEILAATLCTIHNERFVIRLVDQIREAIKNDEFDELRAHVLGRYYGT

SEQ ID NO: 57874 - protein, 410 aa, unidentified
  source 1..410: note = Mycolicibacterium aichiense
  REGION 1..410: note = tr|A0A378RDV2|A0A378RDV2_9MYCO Queuine tRNA-ribosyltransferase OS=Mycolicibacterium aichiense; OX = 1799 GN=tgt PE=3 SV=1
MPFFTVDAELPGRRGRSGVIHTPHGDIHTPAFVAVGTKATVKAVLPETMRELGAQAVLANAYHLYLQPGPDIVDEAGGLGAFMNWPGPTFTDSGGFQVLSLGAGFRKVLSMDANRVQADDVIAEGKQRLAHVDDDGVTFISHLDGSTHRFTPEVSMQIQHKIGADIIFAFDELTTLVNTRGYQEESVARTQAWAVRCIAEHRRLTAERPERPAQALFGVVQGAQYEDLRRQASRDLAGIVDSEGRGFDGYGIGGALEKQNLATIVGWCVDELPDDKPRHLLGISEPDDLFAAIAAGADTFDCVSPSRVARNAAVYSPTGRFNITGARYRRDFTPIDADCDCYTCANYTRAYLHHLFKAKEILSATLCTIHNERFIIRLVDQIRAAIVAGEFDELREDALGNYYGHSTRAQ

SEQ ID NO: 57875 - protein, 410 aa, unidentified
  source 1..410: note = Mycolicibacterium aromaticivorans
  REGION 1..410: note = tr|A0A064CL98|A0A064CL98_9MYCO Queuine tRNA-ribosyltransferase OS=Mycolicibacterium aromaticivorans JS19b1 = JCM 16368 OX=1440774 GN=tgt PE=3; SV = 1
MPFFTVDAELPGRRGRSGVIHTPHGDIQTPAFVAVGTKATVKAVLPETMRELGAQAVLANAYHLYLQPGPDIVDEAGGLGAFMNWPGPTFTDSGGFQVLSLGAGFRKVLSMDANRVQADDVIAEGKQRLAHVDDDGVTFISHLDGSTHRFTPEVSMQIQHKIGADIIFAFDELTTLVNTRGYQEESVARTQAWAVRCIAEHRRLTADRPERPAQALFGVVQGAQYEDLRRQASRDLAGIVDSEGRGFDGYGIGGALEKQNLATIVGWCVDELPDDKPRHLLGISEPDDLFAAIAAGADTFDCVSPSRVARNAAIYSPTGRFNITGARYRRDFTPIDGDCDCYTCANYTRAYLHHLFKAKEILSATLCTIHNERFIIRLVDQIRAAIVAGEFDELREDVLGSYYGHSTRAQ

SEQ ID NO: 57876 - protein, 414 aa, unidentified
  source 1..414: note = Mycolicibacterium aurum
  REGION 1..414: note = tr|A0A448J103|A0A448J103_MYCAU Queuine tRNA-ribosyltransferase OS=Mycolicibacterium aurum OX=1791; GN = tgt PE=3 SV=1
MSRPFCADPLFSVNAELPGRLGRTGTIRTPHGDIQTPAFVAVGTAATVKAVLPETMKEVGAQAILANAYHLYLQPGPDIVDEAGGLGAFMNWPGPTYTDSGGFQVMSLGVGFKKVLAMDTERVQTDDIIAEGKERLAHVDDDGVTFRSHLDGSTHRFTPEVSIGIQHQLGADIIFAFDELTTLVNTRGYQESSVQRTHDWAVRCLAEHRRLSIERAGKPPQALFGVVQGAQYEDLRRQAARGLAEIRDEDGNGFAGYGIGGALEKQNLATIVGWVSSELPDDKPRHLLGISEPDDLFAAVASGADTFDCVSPSRVARNAAVYSVHGRYNITGSRYRRDFTPIDAECDCYTCAHYTRAYLHHLFKAKEILASTLCTIHNERFVIRLVDDIRAAIPAGRFDELREHVLGRYYAKSS

SEQ ID NO: 57877 - protein, 401 aa, unidentified
  source 1..401: note = Mycolicibacterium austroafricanum
  REGION 1..401: note = tr|A0A2S8LNA4|A0A2S8LNA4_MYCAO Queuine tRNA-ribosyltransferase OS=Mycolicibacterium austroafricanum OX=39687 GN=tgt PE=3 SV=1
MDVELPGRLGRTGTIRTPHGDIQTPAFIAVGTQATVKAVLPETMKEIGAQAVLANAYHLYLQPGADVVDEAGGLGAFMNWPGPTFTDSGGFQVMSLGVGFKKVLAMDTSRVQADDIIAEGKSRLAHVDDDGVTFRSHLNGSSHRFTPEVSIGIQHQLGADIIFAFDELTTLVNTRGYQERSVQRTHEWAVRCLAEHRRLSRVRSHTPPQALFGVVQGAQYEDLRRQAARGLTQIVDEEGRGFDGYGIGGALEKQNLATIVGWVSSELPDDKPRHLLGISEPDDLFAAIEAGADTFDCVSPSRVARNAAVYSADGRFNITGSRYRRDFTPIDAECDCYTCTHYTRAYLHHLFKAKEMLSATLCTIHNERFVIRLVDDIRVAIREGRFDELREHVLGRYYAKA

SEQ ID NO: 57878 - protein, 412 aa, unidentified
  source 1..412: note = Mycolicibacterium bacteremicum
  REGION 1..412: note = tr|A0A1W9YR57|A0A1W9YR57_9MYCO Queuine tRNA-ribosyltransferase OS=Mycolicibacterium bacteremicum; OX = 564198 GN=tgt PE=3 SV=1
MSEQFFDVQAELPGRPGRVGTIHTPHGDIQTPAFIAVGTQATVKAVLPETMKEIGAQAVLANAYHLYLQPGPDVVDEAGGLGAFMNWPGPTFTDSGGFQVLSLGVGFKKVLSMDATRVQADDIIAEGKERLAHVDDDGVTFRSHLDGSTHRFTPEVSIGIQHQLGADIIFAFDELTTLVNTRSYQEQSVQRTHEWAVRCLAEHRRLTEVRHDKPYQALFGVVQGAQYEDLRRQATRGLVDIRDADGRGFDGYGIGGALEKQNLATIVEWVTSELPADKPRHLLGISEPDDLFAAVAAGADTFDCVSPSRVARNAAVYSVNGRYNITGARYKRDFTPIDAECDCYTCAHYTRAYIHHLFKAKEMLASTLCTIHNERFTIALVDRIRASILAGEFDELREHVLGRYYGGDLRSS

SEQ ID NO: 57879 - protein, 423 aa, unidentified
  source 1..423: note = Mycolicibacterium boenickei
  REGION 1..423: note = tr|A0A2A7P577|A0A2A7P577_9MYCO Queuine tRNA-ribosyltransferase OS=Mycolicibacterium boenickei; OX = 146017 GN=tgt PE=3 SV=1
MDQPYFTVEAELPGRFGRVGTIHTPHGDIQTPAFIAVGTAATVKSVLPETMKQLGAQAILANAYHLYLQPGPDIVAEAGGLGAFMNWPGPTFTDSGGFQVMSLGVGFKKVLAMDTERLQKDDIIAKGKERLAVVDDDGVTFRSHLDGSKHRFTPEVSIGIQNQLGADIIFAFDELTTLVNTRGYQESSVQRTHEWAVRCLAEHHRLQGLSPERPRQALFGVVQGAQYEDLRRQAARGLAEIGQEAGPAEGLSFDGYGIGGALEKQNLATIVGWVSSELPADKPRHLLGISEPDDLFDAVAAGADTFDCVSPSRVARNAAVYSATGRFNITGAKYKRDFTPIDSECDCYTCANYSRAYIRHLFKAKEMLSATLCTIHNERFVIRLVDQIRASIVAGEFDELRAHVLGRYYGVPADERLREERKA

SEQ ID NO: 57880 - protein, 410 aa, unidentified
  source 1..410: note = Mycolicibacterium brisbanense
  REGION 1..410: note = tr|A0A100W369|A0A100W369_9MYCO Queuine tRNA-ribosyltransferase OS=Mycolicibacterium brisbanense; OX = 146020 GN=tgt PE=3 SV=1
MGEPYFTVEAELPGRLGRVGVIHTPHGDIHTPAFIAVGTAATVKSVLPETMKQLGAQAILANAYHLYLQPGPEIVAEAGGLGAFMNWPGPTFTDSGGFQVMSLGVGFKKVLAMDTSRLQTDDIIAKGKERLAVVDEDGVTFRSHLDGSKHRFTPEVSIGIQHQLGADIIFAFDELTTLVNTRGYQESSVQRTHEWAVRCLAEHHRLQDSAPQRPRQALFGVVQGAQYEDLRRQAAHGLTTIRTADGHGFDGYGIGGALEKQNLATIVGWVSSELPADKPRHLLGISEPDDLFDAVAAGADTFDCVSPSRVARNAAVYSATGRFNITGARYKRDFTPIDAECDCYTCANYSRAYIRHLFKAKEMLSATLCTIHNERFVIRLVDQIRAAIVAGEFDELRAHVLGRYYGAPVR

SEQ ID NO: 57881 - protein, 402 aa, unidentified
  source 1..402: note = Mycolicibacterium brumae
  REGION 1..402: note = tr|A0A2G5PDF9|A0A2G5PDF9_9MYCO Queuine tRNA-ribosyltransferase OS=Mycolicibacterium brumae; OX = 85968 GN=tgt PE=3 SV=1
MADGAGRTGTIHTPHGDIDTPAFVPVGTKATVKAVLPETMADLGAQAVLANAYHLYLQPGPDIVDEAGGLGAFMNWPGPTFTDSGGFQVLSLGSGFRKVLAMDTERHRADDIVAPGKDRLARVDDDGVTFTSHLDGSTHRFTPEVSMGIQHRLGADIIFAFDELTTLVNTREYQQRSVQRTHEWAIRCLVEHRRLTAAAPDRPAQALFGVVQGAQYEDLRRAATRGLVGIGNEAGPAQGCEFDGYGIGGALEKQNLATIIGWVVDELPEDKPRHLLGISEPDDLFAAVAAGADTFDCVSPSRVARNAAIYSADGRYNITGARYRRDFTPLDPECDCHTCAHYTRAYIHHLFKAKEILSATLCTIHNERFIVRLVDRIRTSIGAGDFAELREETLGRYYSKSS

SEQ ID NO: 57882 - protein, 412 aa, unidentified
  source 1..412: note = Mycolicibacterium canariasense
  REGION 1..412: note = tr|A0A100WKF5|A0A100WKF5_9MYCO Queuine tRNA-ribosyltransferase OS=Mycolicibacterium canariasense; OX = 228230 GN=tgt PE=3 SV=1
MSEQYFEVRAQLPGRKGRAGVIHTPHGDIQTPAFIAVGTQATVKAVLPETMKEIGAQAVLANAYHLYLQPGPDIVDEAGGLGAFMNWPGPTFTDSGGFQVLSLGVGFKKVLAMDATRLQNDDIIAEGKERLAHVDEDGVTFRSHIDGSSHRFTPEVSIGIQHQLGADIIFAFDELTTLVNTRGYQEQSVRRTHDWAVRCLAEHRKLTVARPDKPPQALFGVVQGAQYEDLRRQATRGLVSILDEDGRGFDGYGIGGALEKQNLATIVGWVTSELPDDKPRHLLGISEPDDLFAAVAAGADTFDCVSPSRVARNAAVYSARGRYNITGARYRRDFTPIDAECDCYTCAHYTRAYIHHLFKAKEMLAATLCTIHNERFTIRLVDQIRAAILAGEFDELREHVLGRYYGTDQRSS

SEQ ID NO: 57883 - protein, 415 aa, unidentified
  source 1..415: note = Mycolicibacterium celeriflavum
  REGION 1..415: note = tr|A0A1X0C0B9|A0A1X0C0B9_9MYCO Queuine tRNA-ribosyltransferase OS=Mycolicibacterium celeriflavum; OX = 1249101 GN=tgt PE=3 SV=1
MAVPNSSAPRESSAPSFSVVTELPGRFGRTGVIRTPHGEIHTPAFIPVGTQATVKAVLPEMMKELGAQAILANGYHLYLQPGADIVDEAGGLGAFMNWPGPTFTDSGGFQVLSLGAGFRKVLAMDTERVQADDIIAEGKERLAAVDDDGVTFRSHLDGSTHRFTPEVSIGIQHRLGADIIFAFDELTTLVNTRGYQERSVQRTHDWAVRCLAEHRRLQASRPDKPKQALFGVVQGAQYEDLRRQAARGLVSLGFDGYGIGGALEKQNLATIVGWVCEELPVDKPRHLLGISEPDDLFDAVAAGADTFDCVSPSRVARNAALYSTSGRFNITNARFRRDFTPVDAECDCYTCAHYTRAYLHHLFKAKEILSATLCTIHNQRFVVRLVDRMRAAIDAGEFDELRADVLGRYYATRTR

SEQ ID NO: 57884 - protein, 406 aa, unidentified
  source 1..406: note = Mycolicibacterium chitae
  REGION 1..406: note = tr|A0A3S4R911|A0A3S4R911_MYCCI Queuine tRNA-ribosyltransferase OS=Mycolicibacterium chitae; OX = 1792 GN=tgt PE=3 SV=1
MGELFEVRETLPDGRGRAGVIRTPHGDVETPAFIAVGTKATVKAVLPETMKSLGAQAVLANAYHLYLQPGPDVVDEAGGLGKFMNWSGPTFTDSGGFQVLSLGAGFRKVLSMDANRVQADDVIAEGKERLARVDDDGVTFTSHLDGSRHRFTPEVSMGIQHQLGADIIFAFDELTTLVNTRGYQEQSVRRTHAWAQRCVDEHRRLTRERADKPYQALFGVVQGAQYEDLRRKAARGLVEIRDADGRGFDGYGIGGALEKQNLATIVGWVTDELPDDKPRHLLGISEPDDLFAAVAAGADTFDCVSPSRVARNAAIYAATGRYNITGACYKRDFTPLDPECDCYTCAHYTRAYIHHLFKAKEMLASTLCTIHNERFIIRLVDDIRAAIGDGRFEDLREHVLGRYYRS

SEQ ID NO: 57885 - protein, 423 aa, unidentified
  source 1..423: note = Mycolicibacterium chlorophenolicum
  REGION 1..423: note = tr|A0A0J6VKF6|A0A0J6VKF6_9MYCO Queuine tRNA-ribosyltransferase OS=Mycolicibacterium chlorophenolicum OX=37916 GN=tgt PE=3 SV=1
MAAPDISDPFFRVEAELPGSLGRAGVINTPHGDIATPAFIAVGTQATVKAVLPDSMKQLGAQAILANAYHLYLQPGPDIVEEAGGLGAFMNWPGPTFTDSGGFQVMSLGVGFKKVLAMDTARVQADDVIADGKERLAHVDDDGVTFRSHLNGSTHRFTPEVSIGIQHQLGADIIFAFDELTTLVNTRGYQERSVQRTHEWAVRCLAEHRRLAALRPDRPAQALFGVVQGAQYEDLRRQAARGLTEIVDAHGNGFDGYGIGGALEKQNLATIVGWVSSELPADKPRHLLGISEPDDLFAAVAAGADTFDCVSPSRVARNAAVYTHTGRFNITGSRYRRDFTPIDPECDCYTCAHYTRAYLHHLFKAKEILASTLATIHNERFVVRLVDDIRAAILAGRFDDLRDHVLGRYYGVSEATSAPSSAQ

SEQ ID NO: 57886 - protein, 419 aa, unidentified
  source 1..419: note = Mycolicibacterium chubuense
  REGION 1..419: note = tr|A0A0J6VW13|A0A0J6VW13_MYCCU Queuine tRNA-ribosyltransferase OS=Mycolicibacterium chubuense; OX = 1800 GN=tgt PE=3 SV=1
MAAPDISDPFFRVEAELPGSLGRAGVIHTPHGDIATPAFIAVGTQATVKAVLPDSMKQLGAQAILANAYHLYLQPGPDIVEEAGGLGAFMNWPGPTFTDSGGFQVMSLGVGFKKVLAMDTARVQADDVIADGKERLAHVDDDGVTFRSHLNGSTHRFTPEVSIGIQHQLGADIIFAFDELTTLVNTRGYQERSVQRTHEWAVRCLAEHRRLTAMRPDKPTQALFGVVQGAQYEDLRRQAARGLTEIVDAHGNGFDGYGIGGALEKQNLATIVGWVSSELPADKPRHLLGISEPDDLFAAVAAGADTFDCVSPSRVARNAAVYTHTGRFNITGSRYRRDFTPIDPECDCYTCAHYTRAYLHHLFKAKEILASTLATIHNERFVVRLVDDIRAAILAGRFDDLRDHVLGRYYGASEVTSAQ

SEQ ID NO: 57887 - protein, 414 aa, unidentified
  source 1..414: note = Mycolicibacterium conceptionense
  REGION 1..414: note = tr|A0A0J8U5M5|A0A0J8U5M5_9MYCO Queuine tRNA-ribosyltransferase OS=Mycolicibacterium conceptionense OX=451644 GN=tgt PE=3 SV=1
MDQPYFTVEAELPGRLGRVGTIHTPHGDIHTPAFIAVGTAATVKSVLPETMKQLGAQAILANAYHLYLQPGPDIVAEAGGLGAFMNWPGPTFTDSGGFQVMSLGVGFKKVLAMDTERLQTDDIIAKGKERLAVVDDDGVTFRSHLDGSKHRFTPEVSIGIQNQLGADIIFAFDELTTLVNTRGYQESSVQRTHEWAVRCLAEHHRLQALSPERPRQALFGVVQGAQYEDLRRQAARGLATIGQEAGAAAGLSFDGYGIGGALEKQNLATIVGWVSSELPADKPRHLLGISEPDDLFDAVAAGADTFDCVSPSRVARNAAVYSATGRFNITGARYKRDFTPIDAECDCYTCANYSRAYIRHLFKAKEMLSATLCTIHNERFVIRLVDQIRASIVAGEFDELKAHVLGRYYGVPIS

SEQ ID NO: 57888 - protein, 404 aa, unidentified
  source 1..404: note = Mycolicibacterium confluentis
  REGION 1..404: note = tr|A0A1X1S917|A0A1X1S917_9MYCO Queuine tRNA-ribosyltransferase OS=Mycolicibacterium confluentis; OX = 28047 GN=tgt PE=3 SV=1
MGDFFEVRDTLPGGRGRTGVIHTPHGDVHTPAFIAVGTKATVKAVLPETMKSLGAQAVLANAYHLYLQPGADIVDEAGGLGAFMNWSGPTFTDSGGFQVLSLGAGFRKVLAMDANRVQADDIIAAGKERLARVDDDGVTFTSHLDGSTHRFTPEVSMGIQHQLGADIIFAFDELTTLVNTRSYQEQSVRRTHDWAVRCVAEHRRLTEVRAHKPYQALFGVVQGAQYEDLRRAATRGLVDIGGFDGFGIGGALEKQNLATIVGWVTDELPEDKPRHLLGISEPDDLFAAVAAGADTFDCVSPSRVARNAAIYSRTGRYNITGARYKRDFTPLDPECDCYTCGNYTRAYLHHLFKAKEMLASTLATIHNERFIVRLVDQIRESISAGSFDELRAEVLGRYYAGARI

SEQ ID NO: 57889 - protein, 416 aa, unidentified
  source 1..416: note = Mycolicibacterium cosmeticum
  REGION 1..416: note = tr|W9AYT7|W9AYT7_9MYCO Queuine tRNA-ribosyltransferase OS=Mycolicibacterium cosmeticum; OX = 258533 GN=tgt PE=3 SV=1
MSEQYFEVRAQLPGRKGRAGVIHTPHGDIQTPAFIAVGTQATVKAVLPETMKEIGAQAVLANAYHLYLQPGPDVVDEAGGLGAFMNWPGPTFTDSGGFQVLSLGVGFKKVLAMDATRLQNDDIIAEGKERLAHVDEDGVTFRSHIDGSSHRFTPEVSIGIQHQLGADIIFAFDELTTLVNTRGYQEQSVRRTHDWAVRCLIEHHKLTAARPDKPRQALFGVVQGAQYEDLRRQATRGLVGIGEGPGPAEGLSFDGYGIGGALEKQNLATIVGWVTSELPDDKPRHLLGISEPDDLFAAVAAGADTFDCVSPSRVARNAAVYSARGRYNITGARYRRDFTPIDAECDCYTCAHYTRAYIHHLFKAKEMLAATLCTIHNERFTIRLVDQIRAAIVAGEFDELREHVLGRYYGTDQRSS

SEQ ID NO: 57890 - protein, 405 aa, unidentified
  source 1..405: note = Mycolicibacterium diernhoferi
  REGION 1..405: note = tr|A0A1Q4HBN6|A0A1Q4HBN6_9MYCO Queuine tRNA-ribosyltransferase OS=Mycolicibacterium diernhoferi; OX = 1801 GN=tgt PE=3 SV=1
MSEQFFEVRAELPGRSGRVGTIHTPHGDIQTPAFIAVGTAATVKSVLPETMKDLGAQAVLSNAYHLYLQPGPDVVDEAGGLGAFMNWPGPTFTDSGGFQVMSLGVGFKKVLAMDASRVQADDVIAEGKERLAHVDEDGVTFRSHRDGSKHRFTPEVSIGIQHQLGADIIFAFDELTTLVNTRSYQEESVRRTHDWAVRCVAEHRRLTEVRHDKPYQALFGVVQGAQYEDLRRKAARGLADLGFDGFGIGGALEKQNLATIVGWVTDELPDDKPRHLLGISEPDDLFAAVAAGADTFDCVSPSRVARNAAVYSARGRFNITGSQYKRDFTPIDAECDCYTCAHYTRAYIHHLFKAKEMLSSTLCTIHNERFIIRLVDRIRESIIAGEFDELREDVLGRYYGSSGAS

SEQ ID NO: 57891 - protein, 400 aa, unidentified
  source 1..400: note = Mycolicibacterium doricum
  REGION 1..400: note = tr|A0A1X1T2V7|A0A1X1T2V7_9MYCO Queuine tRNA-ribosyltransferase OS=Mycolicibacterium doricum; OX = 126673 GN=tgt PE=3 SV=1
MHQQFFTVEARLAGQRGRVGVIHTPHGDIRTPAFIAVGTQATVKAVLPETMKLLGAQAILANAYHLYLQPGPDIVDAAGGLGAFMNWPGPTFTDSGGFQVMSLGVGFKKVLAMDTTRVQTDDIIAEGKERLAHVDDDGVTFRSHLDGSRHRFTPEVSIGIQHQLGADIIFAFDELTTLVNTRGYQERSVQRTHEWAVRCLAEHRRLRAKRSHKPSQALFGVVQGAQYEDLRRHAARGLAGLGFDGFGIGGALEKQNLATIVGWVTDELPEDKPRHLLGISEPDDLFAAVAAGADTFDCVSPSRVARNAAVYSATGRYNITGSRYRRDFSPIDGECDCYTCAHYTRAYIHHLFKAKEILASTLCTIHNERFVVRLVESIRAAILAGEFDELREHVVGRYYG

SEQ ID NO: 57892 - protein, 398 aa, unidentified
  source 1..398: note = Mycolicibacterium duvalii
  REGION 1..398: note = tr|A0A2A7NHM8|A0A2A7NHM8_9MYCO Queuine tRNA-ribosyltransferase OS=Mycolicibacterium duvalii; OX = 39688 GN=tgt PE=3 SV=1
MEAELPGRHGRTGIIHTPHGDIHTPAFIAVGTQATVKAVLPETMKQLGAQAVLANAYHLYLQPGPDIVDEAGGLGAFMNWPGPTFTDSGGFQVMSLGVGFKKVLAMDAERVQADDIIAEGKQRLAHVDDDGVTFRSHLNGSTHRFTPEVSIGIQHRLGADIIFAFDELTTLVNTRAYQEQSVERTHRWAVRCVAEHRRLRELRPDRPPQALFGVVQGAQYEDLRRNAARGLAELDFDGFGIGGALEKQNLATIVGWVIDELPVDKPRHLLGISEPDDLFAAIEAGADTFDCVSPSRVARNAAVYSADGRFNITGSRYRRDFTPIDADCDCYTCAHYTRAYLHHLFKAKEILSATLCTIHNERFVIRLVDRIRAAIPDGRFDDLREHVLGRYYATPRAQ

SEQ ID NO: 57893 - protein, 419 aa, unidentified
  source 1..419: note = Mycolicibacterium elephantis
  REGION 1..419: note = tr|A0A439DYR6|A0A439DYR6_9MYCO Queuine tRNA-ribosyltransferase OS=Mycolicibacterium elephantis DSM 44368 OX=1335622 GN=tgt PE=3 SV=1
MTAPNTACPNDSSARFFTVDAELPGRFGRAGTIRTPHGDIHTPAFIPVGTQATVKAVLPEAMKELGAQAILANAYHLYLQPGPDIVAEAGGLGAFMNWPGPTFTDSGGFQVLSLGAGFRKVLAMDTERVQADDIIAEGKERLAAVDDDGVTFRSHLDGSTHRFTPELSIGIQHRLGADIIFAFDELTTLVNTRGYQEQSVRRTHAWAVRCLAEHRRLTAADRHRPPQALFGVVQGAQYEDLRRQAARGLTTIVDDDGVGFDGYGIGGALEKQNLATIVGWVSSELPPDKPRHMLGISEPDDLFATVAAGADTFDCVSPSRVARNAAVYSATGRFNVTNSRYRRDFGPIDAECDCYTCAHYTRAYLHHLFKAKELLSATLCTIHNERFIVRLVDQIRAAIRAGEFDELRAHVLGRYYAQA

SEQ ID NO: 57894 - protein, 419 aa, unidentified
  source 1..419: note = Mycolicibacterium elephantis
  REGION 1..419: note = tr|A0A0M2ZLA6|A0A0M2ZLA6_9MYCO Queuine tRNA-ribosyltransferase OS=Mycolicibacterium elephantis; OX = 81858 GN=tgt PE=3 SV=1
MTAPNTACPNDSSARFFTVEAELPGRFGRAGTIRTPHGDIHTPAFIPVGTQATVKAVLPEAMKELGAQAILANAYHLYLQPGPDIVAEAGGLGAFMNWPGPTFTDSGGFQVLSLGAGFRKVLAMDTERVQADDIIAEGKERLAAVDDDGVTFRSHLDGSTHRFTPEVSIGIQHRLGADIIFAFDELTTLVNTRGYQEESVRRTHSWAVRCLAEHRRLTAADRHQPPQALFGVVQGAQYEDLRRQAARGLTTIVDDDGVGFDGYGIGGALEKQNLATIVGWVSSELPPDKPRHMLGISEPDDLFAAVAAGADTFDCVSPSRVARNAAVYSATGRFNVTNSRYRRDFGPIDAECDCYTCAHYTRAYLHHLFKAKELLSATLCTIHNERFIVRLVDQIRAAIRAGEFDELRAHVLGRYYAQA

SEQ ID NO: 57895 - protein, 414 aa, unidentified
  source 1..414: note = Mycolicibacterium fallax
  REGION 1..414: note = tr|A0A1X1RJ36|A0A1X1RJ36_MYCFA Queuine tRNA-ribosyltransferase OS=Mycolicibacterium fallax; OX = 1793 GN=tgt PE=3 SV=1
MAAVGDYFTVGDRLEGRDGRTGVIHTPRGDIATPAFIPVGTKATVKAVLPETMKSLGAQAVLANAYHLYLQPGPDIVDEAGGLGRFMNWPGPTFTDSGGFQVLSLGSGFRKVLAMDTTRHRADDIVAPGKDRLARVDDDGVTFTSHLDGSTHRFTPEVSMGIQHRLGADIIFAFDELTTLVNTRAYQEDSVRRTHDWAIRCLAEHHRLAAAAPDRPAQALFAVVQGAQYEDLRRAATRGLVGMGEQDGPAHGLSFDGYGIGGALEKQNLATIIGWVIDELPEDKPRHLLGISEPDDLFAAIEAGADTFDCVSPSRVARNAAIYSGTGRYNITGARYRRDFGPLDPDCDCYTCANYTRAYIHHLFKAKEILSATLCTIHNERFIIALVDRIRAAIADGSFDELRAEVLGRYYGTG

SEQ ID NO: 57896 - protein, 425 aa, unidentified
  source 1..425: note = Mycolicibacterium flavescens
  REGION 1..425: note = tr|A0A448HL87|A0A448HL87_MYCFV Queuine tRNA-ribosyltransferase OS=Mycolicibacterium flavescens; OX = 1776 GN=tgt PE=3 SV=1
MAVPKSPAPKESSAPFFSVTAQLPGRAGRTGVIRTPHGEIRTPAFIPVGTQATVKAVLPETMKELGAQALLANAYHLYLQPGPDIVDEAGGLSAFMNWPGPTFTDSGGFQVLSLGAGFRKVLAMDAERVQADDIIAEGKERLANVDDDGVTFRSHLDGSTHRFTPEVSIRIQHQLGADIIFAFDELTTLVNTRGYQERSVQRTHDWAVRCLTEHRRQHEARPDKPGQALFGVVQGAQYEDLRRQATRGLVTIGAQAGPAEGLEFDGYGIGGALEKQNLATIVGWVVDELPADKPRHLLGISEPDDLFDAIAAGADTFDCVSPSRVARNAAVYSTTGRFNITNARFRRDFTPIDADCDCYTCAHYTKAYIHHLFKAKEILSATLCTIHNERFVVRLVDRIRAAIETGDFDELRADVLGRYYATRTR

SEQ ID NO: 57897 - protein, 404 aa, unidentified
  source 1..404: note = Mycolicibacterium flavescens
  REGION 1..404: note = tr|A0A1E3R9A5|A0A1E3R9A5_MYCFV Queuine tRNA-ribosyltransferase OS=Mycolicibacterium flavescens; OX = 1776 GN=tgt PE=3 SV=1
MAEPFFSVAAELPGRPGRTGVIRTPHGQIRTPAFIPVGTQATVKAVLPETVAALGAQALLANAYHLYLQPGPDIVEDAGGLGAFMNWPGPTFTDSGGFQVLSLGAGFRKVLAMDTERIQADDIIAEGKERLADVDDDGVTFRSHLDGTTHRFTPEVSIGIQNKLGADIIFAFDELTTLVNTRGYQERSVQRTHEWALRCLAEHQRLQAQRTDRPRQALFGVVQGAQYEDLRRQAARGLAALDFDGFGVGGALEKQNLATIVGWVTSELPADKPRHLLGISEPDDLFAAVAAGADTFDCVSPSRVARNAAVYSATGRFNITNSRFRRDFTPIDDECDCYTCGHYTRAYLHHLFKAKEMLSATLCTIHNERFVVRLVDRIRDAIEAGEFDELRDHTLGRYYSTSAQ

SEQ ID NO: 57898 - protein, 414 aa, unidentified
  source 1..414: note = Mycolicibacterium fortuitum
  REGION 1..414: note = tr|A0A100WSK9|A0A100WSK9_MYCFO Queuine tRNA-ribosyltransferase OS=Mycolicibacterium fortuitum subsp. acetamidolyticum OX=144550 GN=tgt PE=3 SV=1
MDQPYFTVEAELPGRFGRVGTIHTPHGDIHTPAFIAVGTAATVKSVLPETMKQIGAQAILANAYHLYLQPGPDIVAEAGGLGAFMNWPGPTFTDSGGFQVMSLGVGFKKVLAMDTERLQTDDIIAKGKERLAVVDDDGVTFRSHLDGSKHRFTPEVSIGIQNKLGADIIFAFDELTTLVNTRGYQESSVQRTHEWAVRCLAEHHRLQALSPERPRQALFGVVQGAQYEDLRRQAARGLASIGQEAGPAEGLSFDGYGIGGALEKQNLATIVGWCSSELPADKPRHLLGISEPDDLFDAVAAGADTFDCVSPSRVARNAAVYSATGRFNITGARYKRDFTPIDAECDCYTCANYSRAYIRHLFKAKEMLSATLCTIHNERFVIRLVDQIRASIVAGEFDELKAHVLGRYYGVPIS

SEQ ID NO: 57899 - protein, 414 aa, unidentified; identical to SEQ ID NO: 57898
  source 1..414: note = Mycolicibacterium fortuitum
  REGION 1..414: note = tr|K0VMY4|K0VMY4_MYCFO Queuine tRNA-ribosyltransferase OS=Mycolicibacterium fortuitum subsp. fortuitum DSM 46621 = ATCC 6841 OX=1214102 GN=tgt; PE = 3 SV=1

SEQ ID NO: 57900 - protein, 409 aa, unidentified
  source 1..409: note = Mycolicibacterium gilvum
  REGION 1..409: note = tr|A0A378SW38|A0A378SW38_9MYCO Queuine tRNA-ribosyltransferase OS=Mycolicibacterium gilvum; OX = 1804 GN=tgt PE=3 SV=1
MTAELPGRLGRTGVIRTPHGDIQTPAFIAVGTQATVKAVLPETMKQVGAQAVLANAYHLYLQPGPDIVDEAGGLGAFMNWPGPTFTDSGGFQVMSLGVGFKKVLAMDTERVRADDIIAEGKERLAHVDDDGVTFRSHLDGSSHRFTPEVSIGIQHQLGADIIFAFDELTTLVNTREYQERSVQRTHEWAVRCLAEHHRLSEVRSHTPPQALFGVVQGAQYEDLRRQAARGLAEIGRDKGPAEGLSFDGYGIGGALEKQNLATIVGWVSSELPDDKPRHLLGISEPDDLFAAVAAGADTFDCVSPSRVARNAAVYSADGRYNITGARYRRDFTPIDAECDCYTCAHYTRAYLHHLFKAKELLAATLCTIHNERFIIRLVDDIRAAIPAGRFDELREHVLGRYYATRPSAQ

SEQ ID NO: 57901 - protein, 402 aa, unidentified
  source 1..402: note = Mycolicibacterium gilvum
  REGION 1..402: note = tr|E6TKM2|E6TKM2_MYCSR Queuine tRNA-ribosyltransferase OS=Mycolicibacterium gilvum (strain DSM 45189 / LMG 24558 / Spyr1) OX=278137 GN=tgt; PE = 3 SV=1
MTAELPGRLGRTGVIRTPHGEIRTPAFIAVGTQATVKAVLPETMKQVGAQAVLANAYHLYLQPGPDIVDEAGGLGAFMNWPGPTFTDSGGFQVMSLGVGFKKVLAMDTERVRADDIIAEGKERLAHVDDDGVTFRSHLDGSSHRFTPEVSIGIQHQLGADIIFAFDELTTLVNTREYQESSVQRTHEWAVRCLVEHRRLSDVRSHTPQQALFGVVQGAQYEDLRRQAARGLTGIVDEHGRGFDGYGIGGALEKQNLATIVGWVSSELPDDKPRHLLGISEPDDLFAAVEAGADTFDCVSPSRVARNAAVYSADGRYNITGARYRRDFTPIDAECDCYTCANYTRAYLHHLFKAKELLAATLCTIHNERFIIRLVDDIRASIPAGRFDELREHVLGRYYAAKS

SEQ ID NO: 57902 - protein, 407 aa, unidentified
  source 1..407: note = Mycolicibacterium hassiacum
  REGION 1..407: note = tr|K5B9N2|K5B9N2_MYCHD Queuine tRNA-ribosyltransferase OS=Mycolicibacterium hassiacum (strain DSM 44199 / CIP 105218 / JCM 12690 / 3849); OX = 1122247 GN=tgt PE=3 SV=1
MQDSSRPAFFTVDTELPGRLGRTGVIRTPHGDIHTPAFVPVGTQATVKAVLPETMKELGAQAILANAYHLYLQPGPDIVAEAGGLGAFMNWPGPTFTDSGGFQVLSLGAGFRKVLAMDANRVQADDVIAKGKERLAHVDDDGVTFRSHLNGSIHRFTPEVSIGIQHKLGADIIFAFDELTTLVNTRGYQERSVRRTHEWAVRCMAEHRRLSEAHPDKPPQALFGVVQGAQYEDLRRAAARGLTEIGFDGYGIGGALEKQNLAAIVEWVCSELPPDKPRHMLGISEPDDLFAAIAAGADTFDCVSPSRVARNAALYSPTGRFNITNARFRRDFTPIDDECDCYTCAHYTRAYLHHLFKAKELLANTLATIHNERFIIRLVDRIRAAIKAGEFDDLREEVLGRYYGSRR

SEQ ID NO: 57903 - protein, 411 aa, unidentified
  source 1..411: note = Mycolicibacterium hodleri
  REGION 1..411: note = tr|A0A544VYA6|A0A544VYA6_9MYCO Queuine tRNA-ribosyltransferase OS=Mycolicibacterium hodleri; OX = 49897 GN=tgt PE=3 SV=1
MSTPPYFEVKAQLPGRSGRVGVIHTPHGDVHTPAFVAVGTAATVKAVLPESMKDVGAQAVLSNAYHLYLQPGPDVVDEAGGLGAFMNWPGPTFTDSGGFQVLSLGVGFKKVLSMDTGRVQADDVIAEGKERLAHVDDDGVTFRSHKDGSIHRFTPEVSIGIQHQLGADIIFAFDELTTLMNTRGYQETSVQRTHDWAVRCLAEHRRLGIARAHKPAQALFGVVQGAQYEDLRRQAAKGLTEIRDEDGRGFDGYGIGGALEKQNLATIVGWVTDELPDDKPRHLLGISEPDDLFAAVAAGADTFDCVSPSRVARNAAVYSATGRYNITGARYKRDFTPIDAECDCYTCANYTRAYIHHLFKAKEMLSSTLCTIHNERFVIRMVDQIRAAITAGEFDELREHVLGRYYSARAQ

SEQ ID NO: 57904 - protein, 408 aa, unidentified
  source 1..408: note = Mycolicibacterium hodleri
  REGION 1..408: note = tr|A0A502DVB0|A0A502DVB0_9MYCO Queuine tRNA-ribosyltransferase OS=Mycolicibacterium hodleri; OX = 49897 GN=tgt PE=3 SV=1
MSTPSFFEVEAHLPGRAGRAGVIHTPHGDIRTPAFIAVGTAATVKAVLPESMKDVGAQAVLANAYHLYLQPGPDVVDEAGGLGAFMNWPGPTFTDSGGFQVLSLGVGFKKVLSMDAGRVQADDVIAEGKQRLAHVDDDGVTFRSHTDGSTHRFTPEVSIGIQHQLGADIIFAFDELTTLMNTRGYQESSVRRTHDWAVRCLAEHRRLGVERSDKPAQALFGVVQGAQYEDLRRQASSGLTKIVDADGRGFDGYGIGGALEKQNLATIVGWCTEELPDDKPRHLLGISEPDDLFAAVEAGADTFDCVSPSRVARNAAVYSANGRYNITGARYKRDFTPIDAECDCYTCANYTRAYIHHLFKAKEMLSSTLCTIHNERFVIRLVDQIRSAIVADDFDELREHVLGRYYSS

SEQ ID NO: 57905 - protein, 427 aa, unidentified
  source 1..427: note = Mycolicibacterium holsaticum
  REGION 1..427: note = tr|A0A1E3S2P8|A0A1E3S2P8_9MYCO Queuine tRNA-ribosyltransferase OS=Mycolicibacterium holsaticum; OX = 152142 GN=tgt PE=3 SV=1
MTAPNTARPSDSPARFFTVEAELPGRLGRAGTIRTPHGDIHTPAFIPVGTQATVKAVLPETMKELGAQAILANAYHLYLQPGPDIVAAAGGLGAFMNWPGPTFTDSGGFQVLSLGAGFRKVLAMDTERVQADDIIAEGKERLAAVDDDGVTFRSHLDGSTHRFTPEVSIGIQHRLGADIIFAFDELTTLVNTRGYQEQSVQRTHAWAVRCLAEHRRLAAADPDQPRQALFGVVQGAQYEDLRRQAARGLTTIVDDEGAGFDGYGIGGALEKQNLATIVGWVSSELPDDKPRHMLGISEPDDLFAAVAAGADTFDCVSPSRVARNAAVYSVTGRFNITNSRYRRDFTPIDAECDCYTCAHYTRAYLHHLFKAKEILSATLCTIHNERFTVRLVDQIRAAIRAGEFDELRAHTLGRFYAERDHRAGKCE

SEQ ID NO: 57906 - protein, 411 aa, unidentified
  source 1..411: note = Mycolicibacterium insubricum
  REGION 1..411: note = tr|A0A1X0DAW9|A0A1X0DAW9_9MYCO Queuine tRNA-ribosyltransferase OS=Mycolicibacterium insubricum; OX = 444597 GN=tgt PE=3 SV=1
MGENFTVGDRLPGRRGRTGTLRTPHGEIATPAFVPVGTKATVKAMLPETVKSLGAQAVLANAYHLYLQPGADIVDEAGGLGRFMNWPGPTFTDSGGFQVLSLGSGFRKVLAMDTERVRADDVIAKGKDRLARVDDDGVTFTSHLDGSTHRFTPEVSMGIQHQLGADIIFAFDELTTLINTRKYQEDSVARTHAWAIRCLVEHHRLRSAAPQRPAQALFGVIQGAQYEDLRRAATRGLVDIGEQPGPAEGLSFDGYGIGGALEKQNLGTIVGWVVDELPEDKPRHLLGISEPDDLFAAIEAGADTFDCVSPSRVARNAAIYSHAGRYNVTGARYKRDFTPLDPECDCYTCANYTRAYIHHLFKAKEILSATLCTIHNERFTISLVDRIRASITDGTFDELRAEVLGRYYRDR

SEQ ID NO: 57907 - protein, 409 aa, unidentified
  source 1..409: note = Mycolicibacterium iranicum
  REGION 1..409: note = tr|A0A1X1WFW6|A0A1X1WFW6_9MYCO Queuine tRNA-ribosyltransferase OS=Mycolicibacterium iranicum; OX = 912594 GN=tgt PE=3 SV=1
MTGPFFTVDAYLPGRLGRTGTIRTPHGDIQTPAFIAVGTQATVKAVLPETMKQVGAQAVLANAYHLYLQPGPDIVDEAGGLGAFMNWPGPTFTDSGGFQVMSLGVGFKKVLAMDTERVQADDIIAEGKERLAHVDDDGVTFRSHLDGSTHRFTPEVSIGIQHQLGADIIFAFDELTTLVNTRAYQKSSVQRTHEWAVRCLAEHRRLSEVRSHKPPQALFGVVQGAQYEDLRRQATRGLLGIVDEDGRGFDGYGIGGALEKQNLATIVSWVTSELPADKPRHLLGISEPDDLFAAVEAGADTFDCVSPSRVARNAAVYSVHGRYNITGSRYRRDFTPIDAECDCYTCANYTRAYLHHLFKAKELLAATLCTIHNERFVIRLLDDIRAAIPAGRFDELREHVLGRYYAAKT

SEQ ID NO: 57908 - protein, 409 aa, unidentified
  source 1..409: note = Mycolicibacterium iranicum
  REGION 1..409: note = tr|A0A178LXK9|A0A178LXK9_9MYCO Queuine tRNA-ribosyltransferase OS=Mycolicibacterium iranicum; OX = 912594 GN=tgt PE=3 SV=1
MTGPFFSVDADLPGRLGRTGTIRTPHGDIQTPAFIAVGTQATVKAVLPETMKQVGAQAVLANAYHLYLQPGPDIVDEAGGLGAFMNWPGPTFTDSGGFQVMSLGVGFKKVLAMDTDRVQADDIIAEGKERLAHVDDDGVTFRSHLDGSTHRFTPEVSIGIQHQLGADIIFAFDELTTLVNTRAYQESSVQRTHEWAVRCLVEHRRLSKVRSHKPPQALFGVVQGAQYEDLRRQATRGLTEIVDEDGRGFDGYGIGGALEKQNLATIVGWVTSELPADKPRHLLGISEPDDLFAAVEAGADTFDCVSPSRVARNAAVYSVYGRYNITGSRYRRDFAPIDAECDCYTCANYTRAYLHHLFKAKELLAATLCTIHNERFVIRLLDDIRAAIPAGRFDELREHVLGRYYASKV

SEQ ID NO: 57909 - protein, 405 aa, unidentified
  source 1..405: note = Mycolicibacterium litorale
  REGION 1..405: note = tr|A0A4R8J132|A0A4R8J132_9MYCO Queuine tRNA-ribosyltransferase OS=Mycolicibacterium litorale; OX = 758802 GN=tgt PE=3 SV=1
MLNTRVGQQFFTVEARLPGQRGRVGVIHTPHGDIHTPAFIAVGTQATVKAVLPETMKELGAQAVLANAYHLYLQPGPDIVDAAGGLGAFMNWPGPTFTDSGGFQVMSLGVGFKKVLAMDANRVQTDDVIAKGKERLAHVDEDGVTFRSHLDGTTHRFTPEASIGIQHQLGADIIFAFDELTTLVNTRGYQEQSVQRTHEWAVRCLAEHRRLREERSHKPPQALFGVVQGAQYEDLRRRGARGLAELGFDGFGIGGALEKQNLATIVGWVTDELPEDKPRHLLGISEPDDLFAAVAAGADTFDCVSPSRVARNAAVYSATGRYNITGARYRRDFTPIDAECDCYTCAHYTRAYIRHLFKAKEMLASTLCTIHNERFVIRLVDQIRAAITAGEFDELRDHVLGRYYG

SEQ ID NO: 57910 - protein, 415 aa, unidentified
  source 1..415: note = Mycolicibacterium litorale
  REGION 1..415: note = tr|A0A1U9PNA0|A0A1U9PNA0_9MYCO Queuine tRNA-ribosyltransferase OS=Mycolicibacterium litorale; OX = 758802 GN=tgt PE=3 SV=1
MRPFFTVDAQLPGRRGRTGVIHTPHGDIATPAFVAVGTKASVKAVLPETMAQLGAQAVLANAYHLYLQPGPDIVDEAGGLGAFMNWPGPTFTDSGGFQVLSLGAGFRKVLSMDANRVQTDEVIAEGKQRLAHVDDDGVTFISHLDGSTHRFTPEVSMQIQHKIGADIIFAFDELTTLVNTRGYQEESVARTHAWAVRCLTEHRRLTAERPQRPAQALFGVVQGAQYEDLRRQAARELAGIVDADGRGFDGYGIGGALEKQNLATIVGWCIDELPDDKPRHLLGISEPDDLFAAIAAGADTFDCVSPSRVARNAAVYSPTGRFNITGARYRRDFTPIDADCDCYTCGHYTRAYLHHLFKAKEILSATLCTIHNERFVIRLVDQIRAAIVAGEFDELRDHMLGNYYRQSPGHSTRAQ

SEQ ID NO: 57911 - protein, 408 aa, unidentified
  source 1..408: note = Mycolicibacterium llatzerense
  REGION 1..408: note = tr|A0A0D1J1P4|A0A0D1J1P4_9MYCO Queuine tRNA-ribosyltransferase OS=Mycolicibacterium llatzerense; OX = 280871 GN=tgt PE=3 SV=1
MNQQFFEVTAQLPGRRGRAGVIHTPHGDIQTPAFIAVGTAATVKGVLPETMKELGAQALLANAYHLYLQPGPDVVDEAGGLGAFMNWPGPTFTDSGGFQVMSLGVGFKKVLAMDTARLQADDIIAEGKERLAHVDEDGVTFRSHLNGDKHRFTPEVSIGIQHQLGADIIFAFDELTTLVNTRAYQERSVERTHRWAVRCLAEHRRLSIERAGKPAQALFGVVQGAQYEDLRRQATKGLVGIVDEDGHGFDGYGIGGALEKQNLATIVGWVTDELPDDKPRHLLGISEPDDLFAAIEAGADTFDCVSPSRVARNAAMYSATGRFNVTNARFKRDFNPIDAECDCYTCANYTRAYLHHLFKAKEILASTLGTIHNERFIIRLIDQIRAAIGAGEFDELRDHVLGRYYGTK

SEQ ID NO: 57912 - protein, 410 aa, unidentified
  source 1..410: note = Mycolicibacterium mageritense
  REGION 1..410: note = tr|A0A5C7YPG6|A0A5C7YPG6_9MYCO Queuine tRNA-ribosyltransferase OS=Mycolicibacterium mageritense; OX = 53462 GN=tgt PE=3 SV=1
MDQPYFTVEAELAGRLGRVGTIHTPHGDIQTPAFIAVGTQATVKSVLPETMKQLGAQAILANAYHLYLQPGPDIVAEAGGLGAFMNWPGPTFTDSGGFQVMSLGVGFKKVLAMDTERLQTDDIIAKGKERLAVVDDDGVTFRSHLDGSKHRFTPEISIGIQHQLGADIIFAFDELTTLVNTRGYQESSVQRTHEWAVRCLIEHHRLQDSTPERPRQALFGVVQGAQYEDLRRQAARGLTEIRTADGHGFDGYGIGGALEKQNLATIVGWVSSELPADKPRHLLGISEPDDLFDAVAAGADTFDCVSPSRVARNAAVYSSTGRFNITGARYKRDFTPIDAECDCYTCANYSRAYIRHLFKAKEMLSATLCTIHNERFVIRLVDQIRAAIVAGEFDELRAHVLGRYYGTPVS

SEQ ID NO: 57913 - protein, 410 aa, unidentified; identical to SEQ ID NO: 57912
  source 1..410: note = Mycolicibacterium mageritense
  REGION 1..410: note = tr|X5L9H0|X5L9H0_9MYCO Queuine tRNA-ribosyltransferase OS=Mycolicibacterium mageritense DSM 44476 = CIP 104973 OX=1209984 GN=tgt PE=3 SV=1

SEQ ID NO: 57914 - protein, 410 aa, unidentified
  source 1..410: note = Mycolicibacterium monacense
  REGION 1..410: note = tr|A0A1X0GV50|A0A1X0GV50_9MYCO Queuine tRNA-ribosyltransferase OS=Mycolicibacterium monacense DSM 44395 OX=1226751 GN=tgt PE=3 SV=1
MDQQFFTVEAELPGRRGRAGVIRTPHGEIRTPAFIAVGTQATVKAVLPETMRELGAQAVLANAYHLYLQPGPDVVAAAGGLGAFMNWPGPTFTDSGGFQVLSLGAGFRKVLAMDANRVQADDVIAKGKERLAVVDDDGVTFRSHLNGTTHRFTPEVSIGIQHQLGADIIFAFDELTTLVNTRGYQEDSVRRTHRWAERCLAEHRKLSLENHEKPPQALFGVVQGAQYEDLRRQAARELTEILDEDGRGFDGYGIGGALEKQNLATIVGWVTSELPDDKPRHLLGISELDDLFAAVEAGADTFDCVSPSRVARNAAVYSATGRYNITGSRYRRDFTPIDAECDCYTCAHYTRGYIHHLFKAKEMLASTLCTIHNERFVVRLVDQIRASIVAGNFDELREHVLGRYYAARGQ

SEQ ID NO: 57915 - protein, 405 aa, unidentified
  source 1..405: note = Mycolicibacterium moriokaense
  REGION 1..405: note = tr|A0A370CXP7|A0A370CXP7_9MYCO Queuine tRNA-ribosyltransferase OS=Mycolicibacterium moriokaense; OX = 39691 GN=tgt PE=3 SV=1
MEAELPGRLGRAGVIRTPHGDIRTPAFVAVGTQATVKAVVPEVMKELGAQAILANAYHLYLQPGPDIIEQAGGLGTFMNWPGPTFTDSGGFQVLSLGAGFRKVLAMDTERVQADDIIAEGKQRLARVDEDGVTFTSHLNGSSHRFTPEVSIGIQHQIGADIIFAFDELTTLVNTRGYQEESVARTHRWAARCLAEHRRLTAARPDRDPQALFGVVQGAQYEDLRRQAARGLVSIVDDGGRGFDGYGIGGALEKQNLATIVGWVSSELPADKPRHMLGISEPDDLFAAVAAGADTFDCVSPSRVARNAAVYCATGRYNITGARYRRDFTPIDAECDCYTCANYTRAYLHHLFKAKEILAATLCTIHNERFVIRLVDQIRAAIKAGEFDELRAHVLGRYYAQTDKRA

SEQ ID NO: 57916 - protein, 418 aa, unidentified
  source 1..418: note = Mycolicibacterium moriokaense
  REGION 1..418: note = tr|A0A1X0H2I5|A0A1X0H2I5_9MYCO Queuine tRNA-ribosyltransferase OS=Mycolicibacterium moriokaense; OX = 39691 GN=tgt PE=3 SV=1
MAAPNSSAPKDSSAPFFSIDAELPDRPGRAGVIRTARGDIHTPAFIPVGTQATVKAVLPEIMKSLGAQAILANAYHLYLQPGPDIVDEAGGLGAFMNWPGPTFTDSGGFQVLSLGAGFRKVLAMDTKRVQADDIIAEGKERLANVDDDGVTFRSHLDGSTHRFTPESSIRIQHQLGADIIFAFDELTTLVNTRGYQEQSVQRTHDWAVRCVIEHRRLTAAAPDRPKQALFGVVQGAQYEDLRRAAARGLTKIVGEDGVGFDGYGIGGALEKQNLATIVGWVTSELPEDKPRHLLGISEPDDLFDAIAAGADTFDCVSPSRVARNAAVYSATGRFNITNARYRRDFTPIDADCDCYTCENYTRAYLHHLFKAKEILSATLCTIHNERFVIRMVDKIRAAIRTGEFDELRAEVLGRYYST

SEQ ID NO: 57917 - protein, 407 aa, unidentified
  source 1..407: note = Mycolicibacterium mucogenicum
  REGION 1..407: note = tr|A0A1A0MH75|A0A1A0MH75_9MYCO Queuine tRNA-ribosyltransferase OS=Mycolicibacterium mucogenicum; OX = 56689 GN=tgt PE=3 SV=1
MSQQFFEVTAQLPDRRGRAGVIHTPHGDIQTPAFIAVGTAATVKGVLPETMKELGAQALLANAYHLYLQPGPDVVDEAGGLGAFMNWPGPTFTDSGGFQVMSLGVGFKKVLAMDTARLQADDIIAEGKERLAHVDEDGVTFRSHLNGDKHRFTPEVSIGIQHQLGADIIFAFDELTTLVNTRAYQERSVERTHRWAVRCLAEHRRLSIERAGKPAQALFGVVQGAQYEDLRRQATKGLVGIVDDDGHGFDGYGIGGALEKQNLATIVGWVTDELPDDKPRHLLGISEPDDLFAAIEAGADTFDCVSPSRVARNAAMYSATGRFNVTNARFKRDFNPIDAECDCYTCANYTRAYLHHLFKAKEILASTLGTIHNERFIIRLVDQIRAAITAGEFDELRDHVLGRYYRS

SEQ ID NO: 57918 - protein, 407 aa, unidentified
  source 1..407: note = Mycolicibacterium mucogenicum
  REGION 1..407: note = tr|A0A4R5WJS4|A0A4R5WJS4_9MYCO Queuine tRNA-ribosyltransferase OS=Mycolicibacterium mucogenicum; OX = 56689 GN=tgt PE=3 SV=1
MSQQFFEVTAQLPDRRGRAGVIHTPHGDIQTPAFIAVGTAATVKGVLPETMKELGAQALLANAYHLYLQPGPDVVDEAGGLGAFMNWPGPTFTDSGGFQVMSLGVGFKKVLAMDTARLQADDIIAEGKERLAHVDEDGVTFRSHLNGDKHRFTPEVSIGIQHQLGADIIFAFDELTTLVNTRAYQERSVERTHRWAVRCLAEHRRLSIERAGKPAQALFGVVQGAQYEDLRRQATKGLVGIVDDDGHGFDGYGIGGALEKQNLATIVGWVTDELPDDKPRHLLGISEPDDLFAAIEAGADTFDCVSPSRVARNAAMYSATGRFNVTNARFKRDFNPIDAECDCYTCANYTRAYLHHLFKAKEILASTLGTIHNERFIIRLVDQIRAAITAGEFDELRNHVLGRYYRS

SEQ ID NO: 57919 - protein, 409 aa, unidentified
  source 1..409: note = Mycolicibacterium neoaurum
  REGION 1..409: note = tr|A0A024QLV6|A0A024QLV6_MYCNE Queuine tRNA-ribosyltransferase OS=Mycolicibacterium neoaurum; OX = 1795 GN=tgt PE=3 SV=1
MFFEVQAELPGRPGRVGTIHTPHGDIQTPAFIAVGTQATVKAVLPETMKEIGAQAVLANAYHLYLQPGPDVVDEAGGLGAFMNWPGPTFTDSGGFQVLSLGVGFKKVLSMDATRVQADDIIAEGKERLAHVDEDGVTFRSHLDGSTHRFTPEVSIGIQHQLGADIIFAFDELTTLVNTRSYQEQSVRRTHRWAERCLAEHHRLTEVRHDKPYQALFGVVQGAQYEDLRRQATRDLVRIGEGTGPAEGLSFDGYGIGGALEKQNLATIVEWVTSELPADKPRHLLGISEPDDLFAAVAAGADTFDCVSPSRVARNAAVYSVHGRYNITGARYKRDFTPIDAECDCYTCAHYTRAYIHHLFKAKEMLASTLCTIHNERFTIRLVDQIRAAILAGEFDELRAEVLGRYYGSK

SEQ ID NO: 57920 - protein, 405 aa, unidentified
  source 1..405: note = Mycolicibacterium neoaurum
  REGION 1..405: note = tr|V5XIR4|V5XIR4_MYCNE Queuine tRNA-ribosyltransferase OS=Mycolicibacterium neoaurum VKM Ac-1815D OX=700508 GN=tgt PE=3 SV=1
MQAELPGRPGRVGTIHTPHGDIQTPAFIAVGTQATVKAVLPETMKEIGAQAVLANAYHLYLQPGPDVVDEAGGLGAFMNWPGPTFTDSGGFQVLSLGVGFKKVLSMDATRVQADDIIAEGKERLAHVDDDGVTFRSHLDGSTHRFTPEVSIGIQHQLGADIIFAFDELTTLVNTRSYQEQSVRRTHRWAERCLAEHHRLTEVRHDKPYQALFGVVQGAQYEDLRRQATRDLVRIGEGAGPAEGLSFDGYGIGGALEKQNLATIVEWVTSELPADKPRHLLGISEPDDLFAAVAAGADTFDCVSPSRVARNAAVYSVHGRYNITGARYKRDFTPIDAECDCYTCAHYTRAYIHHLFKAKEMLASTLCTIHNERFTIRLVDRIRAAILAGEFDELRAEVLGRYYGSR

SEQ ID NO: 57921 - protein, 414 aa, unidentified
  source 1..414: note = Mycolicibacterium neworleansense
  REGION 1..414: note = tr|A0A0H5RUP6|A0A0H5RUP6_9MYCO Queuine tRNA-ribosyltransferase OS=Mycolicibacterium neworleansense OX=146018 GN=tgt PE=3 SV=1
MDQPYFTVEAELPGRLGRVGTIHTPHGDIHTPAFIAVGTAATVKSVLPETMKELGAQAVLANAYHLYLQPGPDIVAEAGGLGAFMNWPGPTFTDSGGFQVMSLGVGFKKVLAMDTERLQTDDIIAKGKERLAVVDDDGVTFRSHLDGSKHRFTPEVSIGIQNKLGADIIFAFDELTTLVNTRAYQESSVQRTHEWALRCLAEHHRLQALSPERPRQALFGVVQGAQYEDLRRQAARGLATIGQEAGPAEGLSFDGYGIGGALEKQNLATIVGWVSSELPADKPRHLLGISEPDDLFDAVAAGADTFDCVSPSRVARNAAVYSATGRFNITGARYKRDFTPIDAECDCYTCANYSRAYIRHLFKAKEMLSATLCTIHNERFVIRLVDQIRASIVAGEFDELRAHVLGRYYGVPIS

SEQ ID NO: 57922 - protein, 423 aa, unidentified
  source 1..423: note = Mycolicibacterium novocastrense
  REGION 1..423: note = tr|A0A100ZC19|A0A100ZC19_9MYCO Queuine tRNA-ribosyltransferase OS=Mycolicibacterium novocastrense; OX = 59813 GN=tgt PE=3 SV=1
MPKSSAPKESSAPFFSVTAELRGRAGRTGVIRTPHGEIRTPAFIPVGTQATVKAVLPETMKELGAQALLANAYHLYLQPGPDIVDEAGGLSVFMNWPGPTFTDSGGFQVLSLGAGFRKVLAMDAERVQADDIIAEGKERLANVDDDGVTFRSHLDGSTHRFTPEVSIGIQHQLGADIIFAFDELTTLVNTRGYQERSVQRTHEWAVRCLVEHRRQQAARPDKPEQALFGVVQGAQYEDLRRQAARGLVTIGAQAGPAEGLEFDGYGIGGALEKQNLATIVGWVVDELPVDKPRHLLGISEPDDLFDAIAAGADTFDCVSPSRVARNAAVYSTTGRFNITNARFRRDFTPIDAECDCYTCAHYTRAYIHHLFKAKEILSATLCTIHNERFVVRLVDRIRAAIETGEFDELRADVLGRYYATRTP

SEQ ID NO: 57923 - protein, 407 aa, unidentified
  source 1..407: note = Mycolicibacterium novocastrense
  REGION 1..407: note = tr|A0A100X2H8|A0A100X2H8_9MYCO Queuine tRNA-ribosyltransferase OS=Mycolicibacterium novocastrense; OX = 59813 GN=tgt PE=3 SV=1
MTAELPGRAGRTGVIRTPHGQIRTPAFIPVGTQATVKAVLPETMKQLGAQALLANAYHLYLQPGPDIVDEAGGLSAFMNWPGPTFTDSGGFQVLSLGAGFRKVLAMDAERIQADDIIAEGKERLANVDDDGVTFRSHLDGSTHRFTPEVSIGIQHQLGADIIFAFDELTTLVNTRGYQERSVQRTHDWAVRCLVEHRRLRAERPDKLEQALFGIVQGAQYEDLRRQAARGLVTIGAQAGPAEGLEFDGYGIGGALEKQNLATIVGWVVDELPVDKPRHLLGISEPDDLFDAIAAGADTFDCVSPSRVARNAAVYSTTGRFNITNARFRRDFAPIDAECDCYTCAHYTRAYIHHLFKAKEILSATLCTIHNERFVVRLVDRIRAAIETGEFDELRADVLGRYYATRTP

SEQ ID NO: 57924 - protein, 417 aa, unidentified
  source 1..417: note = Mycolicibacterium obuense
  REGION 1..417: note = tr|A0A4R5X2L9|A0A4R5X2L9_9MYCO Queuine tRNA-ribosyltransferase OS=Mycolicibacterium obuense; OX = 1807 GN=tgt PE=3 SV=1
MPPPDTRDPFFCVDAELPGRRGRAGVIHTPHGEIRTPAFIAVGTQATVKAVLPETMKDLGAQAILANAYHLYLQPGADIVDEAGGLGAFMNWPGPTFTDSGGFQVMSLGVGFKKVLAMDTTRVQTDDIIAEGKQRLAHVDDDGVTFRSHLNGSMHRFTPEVSIGIQHQLGADIIFAFDELTTLVNTRGYQEQSVERTHRWAQRCLVEHRRLTEVRAHKPRQALFGVVQGAQYEDLRRQAARGLTEIVDDDGAGFDGYGIGGALEKQNLATIVGWVTSELPDDKPRHLLGISEPDDLFAAVEAGADTFDCVSPSRVARNAAIYSADGRYNITGSRYRRDFTPLDAECDCYTCAHYTRAYLRHLFKAKEILASTLATIHNERFVVRLVDDMRAAILAGRFDELREHVLGRYYGRAHNRA

SEQ ID NO: 57925 - protein, 417 aa, unidentified
  source 1..417: note = Mycolicibacterium obuense
  REGION 1..417: note = tr|A0A0M2K4F5|A0A0M2K4F5_9MYCO Queuine tRNA-ribosyltransferase OS=Mycolicibacterium obuense; OX = 1807 GN=tgt PE=3 SV=1
MPPPDTRDPFFCVDAELPGRRGRAGVIHTPHGEIRTPAFIAVGTQATVKAVLPETMKGLGAQAILANAYHLYLQPGADIVDEAGGLGAFMNWPGPTFTDSGGFQVMSLGVGFKKVLAMDTTRVQTDDIIAEGKQRLAHVDDDGVTFRSHLNGSMHRFTPEVSIGIQHQLGADIIFAFDELTTLVNTRGYQEQSVERTHRWAQRCLVEHRRLTEVRAHKPRQALFGVVQGAQYEDLRRQAARGLTEIVDDDGAGFDGYGIGGALEKQNLATIVGWVTSELPDDKPRHLLGISEPDDLFAAVEAGADTFDCVSPSRVARNAAIYSADGRYNITGSRYRRDFTPLDAECDCYTCAHYTRAYLRHLFKAKEILASTLATIHNERFVVRLVDDMRAAILAGRFDELREHVLGRYYGRAHNRA

SEQ ID NO: 57926 - protein, 409 aa, unidentified
  source 1..409: note = Mycolicibacterium parafortuitum
  REGION 1..409: note = tr|A0A375YCE5|A0A375YCE5_MYCPF Queuine tRNA-ribosyltransferase OS=Mycolicibacterium parafortuitum; OX = 39692 GN=tgt PE=3 SV=1
MPVPFFTVNSQLPGQLGRTGTIRTPHGDIQTPAFIAVGTQATVKAVLPETMKEIGAQAVLANAYHLYLQPGPDIVDAAGGLGAFMNWDGPTFTDSGGFQVMSLGVGFKKVLAMDTKRVQADDIIAEGKQRLAHVDDDGVTFRSHLDGSTHRFTPEVSIGIQHQLGADIIFAFDELTTLVNTRAYQEQSVQRTHEWAVRCLAEHRRLSVERSHKPPQALFGVVQGAQYEDLRRKAARGLTEIVDADGRGFDGYGIGGALEKQNLSTIVGWVSSELPEDKPRHLLGISEPDDLFAAVAAGADTFDCVSPSRVARNAAVYSRDGRFNITGARYRRDFTPIDADCDCYTCANYTRAYLHHLFKAKEILSKTLCTIHNERFIIRLVDQIRESIPAGRFDELREDVLGRYYATKV

SEQ ID NO: 57927 - protein, 414 aa, unidentified
  source 1..414: note = Mycolicibacterium peregrinum
  REGION 1..414: note = tr|A0A1X2B868|A0A1X2B868_MYCPR Queuine tRNA-ribosyltransferase OS=Mycolicibacterium peregrinum; OX = 43304 GN=tgt PE=3 SV=1
MDQPYFTVKAELPGRLGRVGTIHTPHGDIQTPAFIAVGTAATVKSVLPETMKQLGAQAILANAYHLYLQPGPDVVAEAGGLGAFMNWPGPTFTDSGGFQVMSLGVGFKKVLAMDTERLQADDIIAKGKERLAHVDDDGVTFRSHLDGSKHRFTPEISIGIQNKLGADIIFAFDELTTLVNTRAYQESSVQRTHEWAVRCLAEHHRLQALSPERPRQALFGVVQGAQYEDLRRQAASGLASIGQEAGPAEGLSFDGYGIGGALEKQNLATIVGWVSSELPADKPRHLLGISEPDDLFDAVAAGADTFDCVSPSRVARNAAVYSATGRFNITGARYKRDFTPIDAECDCYTCANYSRAYIRHLFKAKEMLSATLCTIHNERFVIRLVDQIRASILAGEFDELRSHVLGRYYGVPVN

SEQ ID NO: 57928 - protein, 414 aa, unidentified
  source 1..414: note = Mycolicibacterium peregrinum
  REGION 1..414: note = tr|A0A1A0VRK3|A0A1A0VRK3_MYCPR Queuine tRNA-ribosyltransferase OS=Mycolicibacterium peregrinum; OX = 43304 GN=tgt PE=3 SV=1
MDQPYFTVEAELPGRLGRVGTIHTPHGDIQTPAFIAVGTAATVKSVLPETMKQLGAQAILANAYHLYLQPGPDVVAEAGGLGAFMNWPGPTFTDSGGFQVMSLGVGFKKVLAMDTERLQADDIIAKGKERLAHVDDDGVTFRSHLDGSKHRFTPEISIGIQNKLGADIIFAFDELTTLVNTRAYQESSVQRTHEWAVRCLAEHHRLQALSPERPRQALFGVVQGAQYEDLRRQAASGLASIGQEAGPAEGLSFDGYGIGGALEKQNLATIVGWVSSELPADKPRHLLGISEPDDLFDAVAAGADTFDCVSPSRVARNAAVYSATGRFNITGARYKRDFTPIDAECDCYTCANYSRAYIRHLFKAKEMLSATLCTIHNERFVIRLVDQIRASILAGEFDELRSHVLGRYYGVPVN

SEQ ID NO: 57929 - protein, 411 aa, unidentified
  source 1..411: note = Mycolicibacterium phlei
  REGION 1..411: note = tr|A0A3S4R727|A0A3S4R727_MYCPH Queuine tRNA-ribosyltransferase OS=Mycolicibacterium phlei OX=1771; GN = tgt PE=3 SV=1
MTDPYFSIDATLPGTAGRAGVIHTPHGDIQTPAFIAVGTKATVKAVLPETMAALGAQAVLANAYHLYLQPGPDIVDEAGGLGAFMNWPGPTFTDSGGFQVLSLGSGARKVMAMDLDRARSDDVMGSLGGGKKKDKLAHVDDDGVTFTSHLDGSTHRFTPEVSMQIQHQLGADIIFAFDELTTLINTREYQEDSVQRTHEWAQRCLDEHEKLTRERADKPYQALFGVVQGAQYEDLRRQAARGLESLASAQGRGFDGYGIGGALEKQNLGTIVGWVTSELPEHKPRHLLGISEPDDLFAAVAAGADTFDCVSPSRVARNAAVYTRDGRVNITGSKYRRDFTPIDAECDCYTCTHYTRAYMHHLFKAKEILASTLATIHNERFTIGLVDRIRASIVDGRFEELREETLGRYYR

SEQ ID NO: 57930 - protein, 410 aa, unidentified; identical to SEQ ID NO: 57862
  source 1..410: note = Mycolicibacterium phlei
  REGION 1..410: note = tr|A0A139VFN2|A0A139VFN2_MYCPH Queuine tRNA-ribosyltransferase OS=Mycolicibacterium phlei DSM 43239 = CCUG 21000 OX=1226750 GN=tgt PE=3 SV=1

SEQ ID NO: 57931 - protein, 423 aa, unidentified
  source 1..423: note = Mycolicibacterium porcinum
  REGION 1..423: note = tr|A0A1Q8XZ27|A0A1Q8XZ27_9MYCO Queuine tRNA-ribosyltransferase OS=Mycolicibacterium porcinum; OX = 39693 GN=tgt PE=3 SV=1
MDQPYFTVEAELPGRLGRVGTIHTPHGDIQTPAFIAVGTAATVKSVLPETMKQIGAQAILANAYHLYLQPGPDIVAEAGGLGTFMNWPGPTFTDSGGFQVMSLGVGFKKVLAMDTERLQKDDIIAKGKERLAVVDDDGVTFRSHLDGSKHRFTPEVSIGIQNKLGADIIFAFDELTTLVNTRAYQESSVQRTHDWAVRCLAEHHRLQALSPERPRQALFGVVQGAQYEDLRRQAARGLAAIGQESGPAEGLSFDGYGIGGALEKQNLATIVGWVSSELPADKPRHLLGISEPDDLFDAVAAGADTFDCVSPSRVARNAAVYSATGRFNITGAKYKRDFTPIDAECDCYTCANYSRAYIRHLFKAKEMLSATLCTIHNERFVIRLVDQIRASIVAGEFDELRAHVLGRYYGVPADERLREERKA

SEQ ID NO: 57932 - protein, 414 aa, unidentified
  source 1..414: note = Mycolicibacterium porcinum
  REGION 1..414: note = tr|A0A393Y933|A0A393Y933_9MYCO Queuine tRNA-ribosyltransferase OS=Mycolicibacterium porcinum; OX = 39693 GN=tgt PE=3 SV=1
MDQPYFTVEAELPGRFGRVGTIHTPHGDIHTPAFIAVGTAATVKSVLPETMKQLGAQAILANAYHLYLQPGPDIVAEAGGLGAFMNWPGPTFTDSGGFQVMSLGVGFKKVLAMDTERLQKDDIIAKGKERLAVVDDDGVTFRSHLDGSKHRFTPEVSIGIQNQLGADIIFAFDELTTLVNTRGYQESSVQRTHEWAVRCLAEHHRLQGLSPERPRQALFGVVQGAQYEDLRRQAARGLATIGQEAGPAEGLSFDGYGIGGALEKQNLATIVGWVSSELPADKPRHLLGISEPDDLFDAVAAGADTFDCVSPSRVARNAAVYSATGRFNITGAKYKRDFTPIDAECDCYTCANYSRAYIRHLFKAKEMLSATLCTIHNERFVIRLVDQIRASIVAGEFDELRAHVLGRYYGVPIS

SEQ ID NO: 57933 - protein, 417 aa, unidentified
  source 1..417: note = Mycolicibacterium rhodesiae
  REGION 1..417: note = tr|G8RPR1|G8RPR1_MYCRN Queuine tRNA-ribosyltransferase OS=Mycolicibacterium rhodesiae (strain NBB3) OX=710685 GN=tgt PE=3 SV=1
MVAPNSPAPSDSSAPFFSIDAELSGRRGRAGVIRTPHGDIHTPAFIPVGTQATVKAVLPETMRSLNAQAVLANAYHLYLQPGPDIVAEAGGLGAFMNWPGPTFTDSGGFQVLSLGAGFRKVLAMDTERVQADDIIAEGKERLANVDDDGVTFRSHLDGSTHRFTPEVSIGIQHQLGADIIFAFDELTTLVNTRGYQERSVQRTHEWAIRCVVEHRKLTNANPDKPPQALFGVVQGAQYEDLRRQATRGLTSIVGEDGIGFDGYGIGGALEKQNLATIVGWVTSELPDDKPRHLLGISEPDDLFDAVAAGADTFDCVSPSRVARNAAVYSTTGRFNITNARYRRDFTPIDADCDCYTCAHYTRAYLHHLFKAKEILSATLCTIHNERFVVRMVDQIRAAIRAGEFDELRADVLGRYYS

SEQ ID NO: 57934 - protein, 410 aa, unidentified
  source 1..410: note = Mycolicibacterium rhodesiae
  REGION 1..410: note = tr|A0A1X0IRC1|A0A1X0IRC1_MYCRH Queuine tRNA-ribosyltransferase OS=Mycolicibacterium rhodesiae; OX = 36814 GN=tgt PE=3 SV=1
MPFFTVDAELPGRRGRSGVIHTPHGDIHTPAFIAVGTKATVKAVLPETMRELGAQAVLANAYHLYLQPGPDIVDEAGGLGAFMNWPGPTFTDSGGFQVLSLGAGFRKVLSMDANRVQADDVIAEGKQRLAHVDDDGVTFISHLDGSTHRFTPEVSMQIQHKIGADIIFAFDELTTLVNTRGYQEESVARTQAWAVRCIAEHRRLTAERPERPAQALFGVVQGAQYEDLRRQASRDLAGIVDSEGRGFDGYGIGGALEKQNLATIVGWCVDELPDDKPRHLLGISEPDDLFAAIAAGADTFDCVSPSRVARNAAVYSPTGRFNITGARYRRDFTPIDADCDCYTCANYTRAYLHHLFKAKEILSATLCTIHNERFIVRLVDQIRAAIVAGEFDELREDALGNYYGHSTRAQ

SEQ ID NO: 57935 - protein, 409 aa, unidentified
  source 1..409: note = Mycolicibacterium rutilum
  REGION 1..409: note = tr|A0A1H6JAV7|A0A1H6JAV7_9MYCO Queuine tRNA-ribosyltransferase OS=Mycolicibacterium rutilum; OX = 370526 GN=tgt PE=3 SV=1
MADPFFSVAAELPGRLGRTGVIRTPHGEIRTPAFIPVGTQATVKAVLPETMKELGAQALLANAYHLYLQPGPDIVEEAGGLGAFMNWPGPTFTDSGGFQVLSLGAGFRKVLAMDTERVQADDIIAEGKERLASVDDDGVTFRSHLDGSTHRFTPEVSIGIQNKLGADIIFAFDELTTLVNTRGYQERSVQRTHEWAVRCLAEHHRLQAERTDRPKQALFGVVQGAQYEDLRRQATRGLVSIEHDGAGFDGYGIGGALEKQNLATIVGWVCEELPADKPRHLLGISEPDDLFAAVAAGADTFDCVSPSRVARNAAVYSATGRFNITNSRFRRDFTPIDDGCDCYTCAHYTRAYLHHLFKTKEILSATLCTIHNERFVVRLVDRIRAAIEAGEFDELRDDVLGRYYSTSAQ

SEQ ID NO: 57936 - protein, 414 aa, unidentified; identical to SEQ ID NO: 57887
  source 1..414: note = Mycolicibacterium senegalense
  REGION 1..414: note = tr|A0A378WA54|A0A378WA54_9MYCO Queuine tRNA-ribosyltransferase OS=Mycolicibacterium senegalense; OX = 1796 GN=tgt PE=3 SV=1

SEQ ID NO: 57937 - protein, 422 aa, unidentified
  source 1..422: note = Mycolicibacterium setense
  REGION 1..422: note = tr|A0A0B2YAK6|A0A0B2YAK6_9MYCO Queuine tRNA-ribosyltransferase OS=Mycolicibacterium setense; OX = 431269 GN=tgt PE=3 SV=1
MDQPYFTVEAELPGRLGRVGTIHTPHGDIQTPAFIAVGTAATVKSVLPETMKQIGAQAILANAYHLYLQPGPDIVAEAGGLGAFMNWPGPTFTDSGGFQVMSLGVGFKKVLAMDTERLQTDDIIAKGKERLAVVDDDGVTFRSHLDGSTHRFTPEVSIGIQNQLGADIIFAFDELTTLVNTRAYQESSVRRTHEWAVRCLAEHHRLQGLSPERPRQALFGVVQGAQYEDLRRQAASGLARIGEEAGPAEGLSFDGYGIGGALEKQNLATIVGWVSSELPADKPRHLLGISEPDDLFAAVAAGADTFDCVSPSRVARNAAVYSATGRFNITGARYKRDFTPIDAECDCYTCANYSRAYIRHLFKAKEMLSATLCTIHNERFVIRLVDQIRASIVAGEFDELRAHVLGRYYGVPDERVREEPQV

SEQ ID NO: 57938 - protein, 414 aa, unidentified
  source 1..414: note = Mycolicibacterium smegmatis
  REGION 1..414: note = tr|A0R5U3|A0R5U3_MYCS2 Queuine tRNA-ribosyltransferase OS=Mycolicibacterium smegmatis (strain ATCC 700084 / mc(2)155) OX=246196 GN=tgt PE=3 SV=1
MDQPYFTVTAELEGRLGRVGTIHTPHGDIHTPAFIPVGTAATVKSVLPETMKQLGAQAILANAYHLYLQPGPDIVAEAGGLGAFMNWPGPTFTDSGGFQVLSLGVGFKKVLAMDTNRVQADDIIAEGKERLAHVDDDGVTFRSHLNGSLHRFTPEVSIGIQYQLGADIIFAFDELTTLVNTRAYQERSVQRTHEWAERCLAEHHRLQNQAPERPRQALFGVVQGAQYEDLRRKAARGLATIGEQAGPAEGLAFDGYGIGGALEKQNLATIVGWVSSELPKDKPRHMLGISEPDDLFAAVAAGADTFDCVSPSRVARNAAIYTSTGRYNITGARYKRDFTPLDPECDCYTCANYSRAYIRHLFKAKEMLSATLCTIHNERFVVRLVDRIRAAMLAGEFDALRDEVLGRYYGTSVR

SEQ ID NO: 57939 - protein, 414 aa, unidentified; identical to SEQ ID NO: 57938
  source 1..414: note = Mycolicibacterium smegmatis
  REGION 1..414: note = tr|A0A0D6J1E6|A0A0D6J1E6_MYCSM Queuine tRNA-ribosyltransferase OS=Mycolicibacterium smegmatis; OX = 1772 GN=tgt PE=3 SV=1

SEQ ID NO: 57940 - protein, 408 aa, unidentified
  source 1..408: note = Mycolicibacterium sp.
  REGION 1..408: note = tr|A0A391PGW2|A0A391PGW2_9MYCO Queuine tRNA-ribosyltransferase OS=Mycolicibacterium sp. NCC-Tsukiji OX=2185272 GN=tgt PE=3 SV=1
MSQQFFEVTAQLPDRRGRAGVIHTPHGDIQTPAFIAVGTAATVKGVLPETMKSLGAQALLSNAYHLYLQPGPDVVDEAGGLGAFMNWPGPTFTDSGGFQVMSLGVGFKKVLAMDTARLQADDIIAEGKERLAHVDEDGVTFRSHLNGDKHRFTPEVSIVIQHQLGADIIFAFDELTTLVNTRAYQERSVERTHRWAVRCLAEHRRLSIERAGKPAQALFGVVQGAQYEDLRRQATKGLVGIVDDDGHGFDGYGIGGALEKQNLATIVGWVTDELPDDKPRHLLGISEPDDLFAAIEAGADTFDCVSPSRVARNAAMYSATGRFNVTNARFKRDFNPIDAECDCYTCANYTRAYMHHLFKAKEILASTLGTIHNERFIIRLVDQIRAAIGAGEFDELRDHVLGRYYGSR

SEQ ID NO: 57941 - protein, 410 aa, unidentified
  source 1..410: note = Mycolicibacterium sp.
  REGION 1..410: note = tr|A0A5A7YMG6|A0A5A7YMG6_9MYCO Queuine tRNA-ribosyltransferase OS=Mycolicibacterium sp. P1-5; OX = 2024617 GN=tgt PE=3 SV=1
MPFFTVDAELPGRRGRTGVIHTPHGDIHTPAFIAVGTKASVKAVLPETMRELGAQAVLANAYHLYLQPGPDIVDEAGGLGAFMNWPGPTFTDSGGFQVLSLGAGFRKVLSMDANRVQADDVIAEGKQRLAHVDDDGVTFISHLDGSTHRFTPEVSMQIQHKIGADIIFAFDELTTLVNTRGYQEDSVARTQAWAVRCLTEHRRLTAAHPERPAQALFGVVQGAQYEDLRRQASRDLAGIVDSEGRGFDGYGIGGALEKQNLATIVGWCVDELPDDKPRHLLGISEPDDLFAAIAAGADTFDCVSPSRVARNAAVYSPTGRFNITGARYRRDFTPIDADCDCYTCANYTRAYLHHLFKAKEILSATLCTIHNERFIIRLVDQIRAAIGAGEFDDLREHVLGGYYGHSTRAQ

SEQ ID NO: 57942 - protein, 410 aa, unidentified
  source 1..410: note = Mycolicibacterium sphagni
  REGION 1..410: note = tr|A0A255DD36|A0A255DD36_9MYCO Queuine tRNA-ribosyltransferase OS=Mycolicibacterium sphagni; OX = 1786 GN=tgt PE=3 SV=1
MPFFTVDAELPGRRGRTGVIRTPHGDIHTPAFVAVGTKASVKAVLPETMRELGAQAVLANAYHLYLQPGPDIVDEAGGLGVFMNWPGPTFTDSGGFQVLSLGAGFRKVLSMDANRVQADDVIAEGKQRLAHVDDDGVTFISHLDGSTHRFTPEVSMQIQHKIGADIIFAFDELTTLVNTRGYQEESVARTQAWAVRCLTEHRRLTAERPERPAQALFGVVQGAQYEDLRRQASRDLAGIVDAEGRGFDGYGIGGALEKQNLATIVGWCTDELPDDKPRHLLGISEPDDLFAAVAAGADTFDCVSPSRVARNAAVYSPAGRFNITGARYRRDFTPIDADCDCYTCGHYTRAYLHHLFKAKEILSATLCTIHNERFVIRLVDQIRAAIVAGEFDELREHVLGNYYGSSTRAQ

SEQ ID NO: 57943 - protein, 428 aa, unidentified
  source 1..428: note = Mycolicibacterium thermoresistibile
  REGION 1..428: note = tr|A0A100XAS0|A0A100XAS0_MYCTH Queuine tRNA-ribosyltransferase OS=Mycolicibacterium thermoresistibile OX=1797 GN=tgt PE=3 SV=1
MNTGVTSDSSGPFFSVGTELPGRLGRTGVIRTPHGEIHTPAFIPVGTQATVKAVLPETMKELGAQAVLANAYHLYLQPGPDIVAEAGGLGAFMNWPGPTFTDSGGFQVLSLGAGFRKVLAMDANRVQADDVIAEGKERLAHVDDDGVTFRSHLDGSTHRFTPEKSIGIQRRLGADIIFAFDELTTLVNTRGYQERSVRRTHEWAVRCLVEHHRLRAAHPELPRQALFGVVQGAQYEDLRRQAARGLTEIGAGPGPAEGLGFDGYGIGGALEKQNLATIVGWVSSELPPDKPRHLLGISEPDDLFAAVAAGADTFDCVSPSRVARNAAVYSSTGRFNVTNARFRRDFNPIDDGCDCYTCAHYTRAYLHHLFKARELLSATLATIHNQRFIIRLVDRIRESIVAGEFDELREHTLGRYYGGRRRYGTMAT

SEQ ID NO: 57944 - protein, 424 aa, unidentified
  source 1..424: note = Mycolicibacterium thermoresistibile
  REGION 1..424: note = tr|G7CFL6|G7CFL6_MYCT3 Queuine tRNA-ribosyltransferase OS=Mycolicibacterium thermoresistibile (strain ATCC 19527 / DSM 44167 / CIP 105390 / JCM 6362 / NCTC 10409 / 3 16) OX=1078020 GN=tgt; PE = 3 SV=1
MTSDSSGPFFSVGTELPGRLGRTGVIRTPHGEIHTPAFIPVGTQATVKAVLPETMKELGAQAVLANAYHLYLQPGPDIVAEAGGLGAFMNWPGPTFTDSGGFQVLSLGAGFRKVLAMDANRVQADDVIAEGKERLAHVDDDGVTFRSHLDGSTHRFTPEKSIGIQRRLGADIIFAFDELTTLVNTRGYQERSVRRTHEWAVRCLVEHHRLRAAHPELPRQALFGVVQGAQYEDLRRQAARGLTEIGAGPGPAEGLGFDGYGIGGALEKQNLATIVGWVSSELPPDKPRHLLGISEPDDLFAAVAAGADTFDCVSPSRVARNAAVYSSTGRFNVTNARFRRDFNPIDDGCDCYTCAHYTRAYLHHLFKARELLSATLATIHNQRFIIRLVDRIRESIVAGEFDELREHTLGRYYGGRRRYGTMAT

SEQ ID NO: 57945 - protein, 387 aa, unidentified
  source 1..387: note = Mycolicibacterium tokaiense
  REGION 1..387: note = tr|A0A378TFD5|A0A378TFD5_9MYCO Queuine tRNA-ribosyltransferase OS=Mycolicibacterium tokaiense; OX = 39695 GN=tgt PE=3 SV=1
MIRTPHGDIETPAFVAVGTKATVKAVLPETMKSLGAQAVLANAYHLYLQPGPAIVDEAGGLGAFMNWGGPTFTDSGGFQVLSLGSGFRKVLAMDTTRVQADDVIAAGKDRLARVDDDGVTFTSHLDGSTHRFTPEVSMQIQHQLGADIIFAFDELTTLVNTRAYQESSVQRTHEWAIRCLAEHRRLENERDDKPSQALFGVVQGAQYEDLRRQATRGLVGLRDAEGRGFDGYGIGGALEKQNLATIVGWVTDELPEDKPRHLLGISEPDDLFAAVEAGADTFDCVSPSRVARNAAIYSATGRYNITGARYKRDFTPLDPECDCYTCAHYTRAYVHHLFKAKEMLASMLSTIHNERFIIRLVDQIRAAITDGTFDDLREHVLGRYYRS

SEQ ID NO: 57946 - protein, 418 aa, unidentified
  source 1..418: note = Mycolicibacterium tusciae
  REGION 1..418: note = tr|A0A1X0JP10|A0A1X0JP10_9MYCO Queuine tRNA-ribosyltransferase OS=Mycolicibacterium tusciae; OX = 75922 GN=tgt PE=3 SV=1
MTAPNTPRPRDSSVPFFSVDAELPGRAGRAGVIRTPHGDIHTPAFIPVGTQATVKAVLPETMRSLGAQAILANAYHLYLQPGSDIVAEAGGLGEFMNWPGPTFTDSGGFQVLSLGAGFRKVLAMDTERVQADDIIAEGKERLANVDDDGVTFRSHLDGSTHRFTPEVSIQIQHQLGADIIFAFDELTTLVNTRGYQERSVQRTHEWAIRCVVEHRRRSAANPDKPPQALFGVVQGAQYEDLRRQATRGLTQIVGDDGIGFDGYGIGGALEKQNLATIVGWVTSELPDDKPRHLLGISEPDDLFDAVAAGADTFDCVSPSRVARNAAVYSSGGRFNVTNARYRRDFTPIDAECDCYTCANYTRAYLHHLFKAKEILSATLCTIHNERFVVRMVDQIRAAIRTGEFDELRADVLGRYYSS

SEQ ID NO: 57947 - protein, 401 aa, unidentified
  source 1..401: note = Mycolicibacterium vaccae
  REGION 1..401: note = tr|K0V328|K0V328_MYCVA Queuine tRNA-ribosyltransferase OS=Mycolicibacterium vaccae ATCC 25954 OX=1194972 GN=tgt PE=3 SV=1
MTADLPGGPGRAGVIRTPHGDIQTPAFIAVGTQATVKAVLPETMKQLGAQAVLANAYHLYLQPGPDVVDEAGGLGAFMNWPGPTFTDSGGFQVMSLGVGFKKVLAMDTARVQADDVIAEGKERLAHVDDDGVTFRSHLNGSIHRFTPEVSIGIQHQLGADIIFAFDELTTLVNTRDYQERSVQRTHEWAVRCLAEHRRLSAVRAHKPPQALFGVVQGAQYEDLRRQAARGLTQIVDEDGRGFDGYGIGGALEKQNLATIVGWVSSELPDDKPRHLLGISEPDDLFAAVEAGADTFDCVSPSRVARNAAVYSADGRFNITGARYRRDFTPIDPECDCYTCAHYTRAYLHHLFKAKEMLSATLCTIHNERFIVRLVDQIRASIPEGRFGDLREHVLGRYYANA

SEQ ID NO: 57948 - protein, 401 aa, unidentified
  source 1..401: note = Mycolicibacterium vanbaalenii
  REGION 1..401: note = tr|A1TGP5|A1TGP5_MYCVP Queuine tRNA-ribosyltransferase OS=Mycolicibacterium vanbaalenii (strain DSM 7251 / JCM 13017 / NRRL B-24157 / PYR-1); OX = 350058 GN=tgt PE=3 SV =1
MDVELPGRLGRTGTIRTPHGDIQTPAFIAVGTQATVKAVLPETMKEIGAQAVLANAYHLYLQPGADVVDEAGGLGAFMNWPGPTFTDSGGFQVMSLGVGFKKVLAMDTSRVQADDIIAEGKSRLAHVDDDGVTFRSHLNGSSHRFTPEVSIGIQHQLGADIIFAFDELTTLVNTRGYQERSVQRTHDWAVRCLAEHRRLSRVRSHTPPQALFGVVQGAQYEDLRRQAARGLTQIVDEEGRGFDGYGIGGALEKQNLATIVGWVSSELPDDKPRHLLGISEPDDLFAAIEAGADTFDCVSPSRVARNAAVYSADGRFNITGSRYRRDFTPIDAECDCYTCTHYTRAYLHHLFKAKEMLSATLCTIHNERFVIRLVDDIRVAIREGRFDELREHVLGRYYAKA

SEQ ID NO: 57949 - protein, 423 aa, unidentified
  source 1..423: note = Mycolicibacterium vulneris
  REGION 1..423: note = tr|A0A1B9D4V0|A0A1B9D4V0_9MYCO Queuine tRNA-ribosyltransferase OS=Mycolicibacterium vulneris; OX = 547163 GN=tgt PE=3 SV=1
MDQPYFTVEAELPGRFGRVGTIHTPHGDIQTPAFIAVGTAATVKSVLPETMKQLGAQAILANAYHLYLQPGPDIVAEAGGLGAFMNWPGPTFTDSGGFQVMSLGVGFKKVLAMDTERLQKDDIIAKGKERLAVVDDDGVTFRSHLDGSKHRFTPEVSIGIQNQLGADIIFAFDELTTLVNTRGYQESSVQRTHEWAVRCLAEHHRLQGLSPERPRQALFGVVQGAQYEDLRRQAARGLATIGQEDGPAEGLSFDGYGIGGALEKQNLATIVGWVSSELPADKPRHLLGISEPDDLFDAVAAGADTFDCVSPSRVARNAAVYSATGRFNITGAKYKRDFTPIDAECDCYTCANYSRAYIRHLFKAKEMLSATLCTIHNERFVIRLVDQIRASIVAGEFDELRAHVLGRYYGVPADERLREERKA

SEQ ID NO: 57950 - protein, 410 aa, unidentified
  source 1..410: note = Mycolicibacterium wolinskyi
  REGION 1..410: note = tr|A0A1X2FH31|A0A1X2FH31_9MYCO Queuine tRNA-ribosyltransferase OS=Mycolicibacterium wolinskyi; OX = 59750 GN=tgt PE=3 SV=1
MDQPYFTVEAELAGRLGRVGTIHTPHGDIHTPAFIAVGTQATVKSVLPETMKQIGAQAILANAYHLYLQPGPDIVAEAGGLGAFMNWPGPTYTDSGGFQVLSLGVGFKKVLAMDTQRVQADDIIADGKERLAVVDDDGVTFRSHLNGSTHRFTPEVSIGIQHQLGADIIFAFDELTTLVNTRGYQERSVQRTHEWAVRCLAEHQRLQESTPERPRQALFGVVQGAQYEDLRRQAAHGLTTIVGPNGEGFDGYGIGGALEKQNLATIVGWVSSELPADKPRHLLGISEPDDLFDAVAAGADTFDCVSPSRVARNAAVYSATGRFNITGARYKRDFTPIDAECDCYTCANYSRAYIRHLFKAKEMLSATLCTIHNERFVIRLVDQIRAAIVADEFDELRAHVLGRYYGTPVR

SEQ ID NO: 57951 - protein, 410 aa, unidentified
  source 1..410: note = Mycolicibacterium wolinskyi
  REGION 1..410: note = tr|A0A132PJT5|A0A132PJT5_9MYCO Queuine tRNA-ribosyltransferase OS=Mycolicibacterium wolinskyi; OX = 59750 GN=tgt PE=3 SV=1
MDQPYFTVEAELAGRLGRVGTIHTPHGDIHTPAFIAVGTQATVKSVLPETMKQIGAQAILANAYHLYLQPGPDIVAEAGGLGAFMNWPGPTYTDSGGFQVLSLGVGFKKVLAMDTQRVQADDIIADGKERLAVVDDDGVTFRSHLNGSTHRFTPEVSIGIQHQLGADIIFAFDELTTLVNTRGYQERSVQRTHEWAVRCLAEHQRLQESTPERPRQALFGVVQGAQYEDLRRQAAHGLTTIVGPNGEGFDGYGIGGALEKQNLATIVGWVSSELPADKPRHLLGISEPDDLFDAVAAGADTFDCVSPSRVARNAAVYSATGRFNITGARYKRDFTPIDAECDCYTCANYSRAYIRHLFKAKEMLSATLCTIHNERFVIRLVDQIRAAIVAGEFDELRAHVLGRYYGTPVR

SEQ ID NO: 57952 - protein, 380 aa, Mycoplana dimorpha
  REGION 1..380: note = tr|A0A2T5B7T2|A0A2T5B7T2_MYCDI Queuine tRNA-ribosyltransferase OS=Mycoplana dimorpha OX=28320; GN = tgt PE=3 SV=1
MTERFEFKLLATDGKARRGEVTMPRGTIRTPAFMPVGTVGTVKAMYLGQVRELGADIILGNTYHLMLRPGAERVARLGGLHEFIRWPYPILTDSGGFQVMSLEGLRKLDEQGVTFKSHVDGSLHHMSPERSIEIQGLLDSDIQMQLDECVRLPAEPKEIERAMEMSYRWAERCKVAFGDQPGKAMFGIVQGGDIPELRVRSAQALAGLDLKGYAIGGLAVGEPQGVMLDMIDTTCPHLPTEKPRYLMGVGTPDDILKSVAHGIDMFDCVMPTRSGRHGLAFTRHGRINIRNARHAEDTRPLDEQSACPASRDYSRAYLHHLVRANESLGGMLLTWNNLAYYQELMAGIRAAIEQGRYADFMAETQEAWARGEAEAKRAAA

SEQ ID NO: 57953 - protein, 373 aa, Mycoplasma sp.
  REGION 1..373: note = tr|R7NF22|R7NF22_9MOLU Queuine tRNA-ribosyltransferase OS=Mycoplasma sp. CAG:776; OX = 1262906 GN=tgt PE=3 SV=1
MKFTYKLEKKEKNTNARLGSFIYNGIQYETPMFMPVGTQATVKTLAPEELKEVRAGIILANTYHLWLRPGEDVIDHAGGLHKFMNWDQPILTDSGGFQVFSLAKPKDITEEGVHFKNQLNGDSLFLTPEKSIAIQNKLDSDIAMSFDECIGYPATYEYCKESTERTVRWAKRGKEVHNNPNQMLFGIVQGGNYEDLRKYCALELAKMDFDGYSVGGTSVGEDKTTMYQMVEYATRYMPEDKIRYLMGVGDPIDLIENTIRGIDIFDCVSPTRLARHGHALTKYGKINLKNAKYKEDFTPVSEVCDCYACKHYTKAYIRHLIQSNETFGARLLSIHNIRFLTHLMEEIREAIKKDSLLELKEQFIKDYYGEQDE

SEQ ID NO: 57954 - protein, 370 aa, Mycoplasma sp.
  REGION 1..370: note = tr|R5YPV2|R5YPV2_9MOLU Queuine tRNA-ribosyltransferase OS=Mycoplasma sp. CAG:611; OX = 1262905 GN=tgt PE=3 SV=1
MSKMEFNLLHKNNNARYGIIKSKYGEFETPMFMPVGTRATVKTLSPEELYDCNTGIVLANTYHLWLKPGEDIVNKAGGLHKFMNYNRPMLTDSGGFQVFSLAKPKDIKEEGVTFKSHIDGSKLFLTPEKSIEIQNKLGADIIMSFDECPYYPCTYDYMKQSVERTIRWAKRGKEKHSNPDQMLFGIVQGGEFKDLRKYSAEKTVEMDFDGYSIGGTSVGEDKKTMYEMIDNCINYLPENKLRYLMGVGEPIDILEGVTRGVDLFDCVLPTRIARHANAFTRTGKINLKNAKYKEDFTPIEISCDCYACKNYTKAYIRHLITVDETFGQRLLSIHNIRFLTKMMEEIRLAIKDDRFLEYKSEFLEKYNAKK

SEQ ID NO: 57955 - protein, 376 aa, unidentified
  source 1..376: note = Myroides guanonis
  REGION 1..376: note = tr|A0A1I3QSM7|A0A1I3QSM7_9FLAO Queuine tRNA-ribosyltransferase OS=Myroides guanonis OX=1150112; GN = tgt PE=3 SV=1
MKFDLLHTDPLSRARAGKITTDHGVIETPIFMPVGTVGTVKGLHQRELRDEVNPDVILGNTYHLYLRPKTPILEKAGGLHKFINWDRNILTDSGGFQVYSLSANRKIKEEGVKFKSHIDGSYHFFSPESVMEIQRTIGADIIMAFDECTPYPCDYRYAKRSMHMTHRWLDRCINHLEKVPFKYDYEQTFFPIVQGSTYKDLRAQSAEYIANAGAAGNAIGGLSVGEPAEEMYEMTEVVTNILPVDKPRYLMGVGTPINILENIALGIDMFDCVMPTRNARNGMLFTSEGIINIKNKKWEDDLSPIDAMGHTWVDLEYSKAYLRHLFAANESLGKQIASIHNLGFYMWLVREARVQILAGTFYDWKNKMVKKLGERL

SEQ ID NO: 57956 - protein, 376 aa, unidentified
  source 1..376: note = Myroides indicus
  REGION 1..376: note = tr|A0A4R7F1Z9|A0A4R7F1Z9_9FLAO Queuine tRNA-ribosyltransferase OS=Myroides indicus OX=1323422; GN = tgt PE=3 SV=1
MEFELLHTDVNSRARAGKITTDHGVIETPIFMPVGTVATVKGVHQRELQQEINPDIILGNTYHLYLRPKTEILKQAGGLHKFMNWDRNILTDSGGFQVYSLSANRKIKEEGVKFKSHIDGSYHFFSPENVMEIQRTIGADIIMAFDECTPYPCDYKYARRSMHMTHRWLDRCVEHLKKTPELYGYSQTLFPIVQGSTYKDLRKQSAEYIAGVGAEGNAIGGLSVGEPAEEMYAMTEVVTDILPVDKPRYLMGVGTPINILENIALGIDMFDCVMPTRNARNGMLFTANGIINIKNKKWVADFSPIDEMGHTWVDTEYSKAYLRHLFAANESLGKQIASIHNLGFYMWLVREARQQILSGTFYDWKAKMVKQLGERL

SEQ ID NO: 57957 - protein, 376 aa, Myroides marinus
  REGION 1..376: note = tr|A0A163X9F3|A0A163X9F3_9FLAO Queuine tRNA-ribosyltransferase OS=Myroides marinus OX=703342; GN = tgt PE=3 SV=1
MKFELLHTDAGSRARAGKITLDHGVIETPIFMPVGTVASVKGVHQRELADEINPDIILGNTYHLYLRPKMEILKQAGGLHKFMNWDRNILTDSGGFQVYSLSSNRKIKEEGVKFKSHIDGSYHFFSPESVMEIQRTIGADIIMAFDECTPYPCDYRYAKRSMHRTHRWLDRCVEHLTKVPEMYGYSQTLFPIVQGSTFKDLRQQSAEYIANIGADGNAIGGLSVGEPAEEMYAMTELVTDILPKDKPRYLMGVGTPINILENIALGVDMFDCVMPTRNARNGMLFTANGSINMKNKKWENDFSPIDENAYTWVDTAYSKAYLRHLFAANESLGKQIATIHNLGFYLWLVREARRQILAGTFTEWKNKMVKQMDNRL

SEQ ID NO: 57958 - protein, 376 aa, Myroides odoratimimus
  REGION 1..376: note = tr|A0A0E1Z6W3|A0A0E1Z6W3_9FLAO Queuine tRNA-ribosyltransferase OS=Myroides odoratimimus CCUG 10230 OX=883150 GN=tgt PE=3 SV=1
MKFDLLHTDVNSRARAGKITLDHGVIETPIFMPVGTVASVKGVHQRELSEEINPDIILGNTYHLYLRPKMEILKQAGGLHKFMNWDRNILTDSGGFQVYSLSSNRKIKEEGVKFKSHIDGSYHFFSPESVMEIQRTIGADIIMAFDECTPYPCDYRYAKRSMHRTHRWLDRCVDHLTKVPEMYGYSQTLFPIVQGSTFKDLREQSAEYIANIGADGNAIGGLSVGEPAEEMYAMTELVTNILPKDKPRYLMGVGTPINILENIALGVDMFDCVMPTRNARNGMLFTAHGSMNMKNKKWEDDFSPIDENGYTWVDTAYSKAYLRHLFAANESLGKQIATIHNLGFYLWLVREARRQILAGTFTEWKNKMVKQMDNRL

SEQ ID NO: 57959 - protein, 376 aa, Myroides odoratimimus
  REGION 1..376: note = tr|A0A0U3GQ83|A0A0U3GQ83_9FLAO Queuine tRNA-ribosyltransferase OS=Myroides odoratimimus OX=76832; GN = tgt PE=3 SV=1
MKFDLLHTDVNSRARAGKITLDHGVIETPIFMPVGTVASVKGVHQRELSEEINPDIILGNTYHLYLRPKMEILKQAGGLHKFMNWDRNILTDSGGFQVYSLSSNRKIKEEGVKFKSHIDGSYHFFSPESVMEIQRTIGADIIMAFDECTPYPCDYRYAKRSMHRTHRWLDRCVDHLTKVPEMYGYSQTLFPIVQGSTFKDLREQSAEYIANIGADGNAIGGLSVGEPAEEMYAMTELVTNILPQDKPRYLMGVGTPINILENIALGVDMFDCVMPTRNARNGMLFTAHGSMNMKNKKWEDDFSPIDENGYTWVDTAYSKAYLRHLFAANESLGKQIATIHNLGFYLWLVREARRQILAGTFTEWKNKMVKQMDNRL

SEQ ID NO: 57960 - protein, 376 aa, Myroides odoratus
  REGION 1..376: note = tr|A0A378U4A8|A0A378U4A8_MYROD Queuine tRNA-ribosyltransferase OS=Myroides odoratus OX=256 GN=tgt; PE = 3 SV=1
MKFELLHTDVQSRARAGKITTDHGVIETPIFMPVGTVATVKGVHQRELKEEINPDIILGNTYHLYLRPKVEILKQAGGLHKFMNWDRNILTDSGGFQVYSLSANRKIKEEGVKFKSHIDGSYHFFSPENVMEVQRAIGADIIMAFDECTPYPCDYRYAKRSMHMTHRWLDRCVTHFNKTPELYGYSQALFPIVQGSTYKDLRQQSAEYIANVGAEGNAIGGLSVGEPAEEMYAMTDVVTSILPEDKPRYLMGVGTPINILENIALGIDMFDCVMPTRNARNGMLFTSEGIINIKNKKWEDDFSPIDAMGHTWVDTEYSKAYLRHLFAANESLGKQIASIHNLGFYMWLVREAREQILAGTFAAWKNKMVKQLGERL

SEQ ID NO: 57961 - protein, 376 aa, Myroides odoratus
  REGION 1..376: note = tr|H1ZA59|H1ZA59_MYROD Queuine tRNA-ribosyltransferase OS=Myroides odoratus DSM 2801; OX = 929704 GN=tgt PE=3 SV=1
MKFELLHTDVQSRARAGKITTDHGVIETPIFMPVGTVATVKGVHQRELKEEINPDIILGNTYHLYLRPKVEILKQAGGLHKFMNWDRNILTDSGGFQVYSLSANRKIKEEGVKFKSHIDGSYHFFSPENVMEVQRAIGADIIMAFDECTPYPCDYRYAKRSMHMTHRWLDRCVTHFNKTPELYGYSQALFPIVQGSTYKDLRQQSAEYIANVGAEGNAIGGLSVGEPAEEMYAMTDVVTSILPEDKPRYLMGVGTPINILENIALGIDMFDCVMPTRNARNGMLFTAEGIINIKNKKWEDDFSPIDAMGHTWVDTEYSKAYLRHLFAANESLGKQIASIHNLGFYMWLVREARQQILAGTFATWKNKMVKQLGERL

SEQ ID NO: 57962 - protein, 376 aa, Myroides phaeus
  REGION 1..376: note = tr|A0A1G8DRJ4|A0A1G8DRJ4_9FLAO Queuine tRNA-ribosyltransferase OS=Myroides phaeus OX=702745; GN = tgt PE=3 SV=1
MKFDLLHTDANSRARAGKVTLDHGVIETPIFMPVGTVASVKGVHQRELKEEVNPDIILGNTYHLYLRPKMEILKQAGGLHKFMNWDRNILTDSGGFQVYSLSGNRKIKEEGVKFKSHIDGSYHFFSPESVMEVQRTIGADIIMAFDECTPYPCDYRYAKRSMHRTHRWLDRCVDHLAKVPEMYGYSQTLFPIVQGSTFKDLRQQSAEYIANVGAAGNAIGGLSVGEPAEEMYAMTELVTDILPKEKPRYLMGVGTPINILENIALGVDMFDCVMPTRNARNGMLFTVNGTINMKNKKWENDFSPIDENGYTWVDTEYSKAYLRHLFAANESLGKQIATIHNLGFYMWLVREARRQILAGTFTEWKNKMVKQLGQRL

SEQ ID NO: 57963 - protein, 376 aa, Myroides profundi
  REGION 1..376: note = tr|A0A0B5S3I9|A0A0B5S3I9_9FLAO Queuine tRNA-ribosyltransferase OS=Myroides profundi OX=480520; GN = tgt PE=3 SV=1
MKFDLLHTDVNSRARAGKITLDHGVIETPIFMPVGTVASVKGVHQRELSEEINPDIILGNTYHLYLRPKMEILKQAGGLHKFMNWDRNILTDSGGFQVYSLSSNRKIKEEGVKFKSHIDGSYHFFSPESVMEIQRTIGADIIMAFDECTPYPCDYRYAKRSMHRTHRWLDRCVDHLAKVPEMYGYSQTLFPIVQGSTFKDLREQSAEYIANIGAEGNAIGGLSVGEPAEEMYAMTELVTNILPQDKPRYLMGVGTPINILENIALGVDMFDCVMPTRNARNGMLFTAHGSMNMKNKKWEDDFSPIDENGYTWVDTAYSKAYLRHLFAANESLGKQIATIHNLGFYLWLVREARRQILAGTFTEWKNKMVKQMDNRL

SEQ ID NO: 57964 - protein, 383 aa, unidentified
  source 1..383: note = Myxococcaceae bacterium
  REGION 1..383: note = tr|A0A521U186|A0A521U186_9DELT Queuine tRNA-ribosyltransferase OS=Myxococcaceae bacterium; OX = 2484252 GN=tgt PE=3 SV=1
MSFRFSVSAVDPGSRARRGAILTPHGRAETPAFMTVGTRATVTGLTPADLREVGAQVVLGNTYHLMLRPGVELFRRVGGIHRFMGWDGPMLTDSGGYQIFSLPGDRTINERGARFRSYIDQRVHVLSPERSIEVQTAIGADIMMVLDVCVDARSDEATTRAAMERTHRWALRSLAARTDSPQALFAIMQGGVFPELRKASAGFLTDHPFDGFAIGGLAVGDTRSQREDITHLAAELLPPDRPRYLMGVGTPPDLLHAMLGGVDMFDCILPTNLGWQATAFTSTGRVKLTRGAHCHDDNPLDVTCSCATCATFSRSYLHHLFKCDEPLGARLVSMHNLHHYQALMAEARAAITAGTFAAYAREKLEAIDRHEHSGRRMGASDLP

SEQ ID NO: 57965 - protein, 374 aa, unidentified
  source 1..374: note = Myxococcaceae bacterium
  REGION 1..374: note = tr|A0A3N5HIK6|A0A3N5HIK6_9DELT Queuine tRNA-ribosyltransferase OS=Myxococcaceae bacterium; OX = 2484252 GN=tgt PE=3 SV=1
MSVRFERLHVDAGTRARRGRLHTPHGTVETPVFMPVGTQATVKAVGQDDLRTLGAEILLGNTYHLMLRPGEELVGALGGLHRFMAWDRALLTDSGGFQVYSLAQNRKITEEGASFQSHLDGSRWMLTPERSIQIQEVLGADVIMAFDECAPSRSERRYMEESLARTTRWLHRCAAAWTRGRSALFGIVQGGLDLELRRRHVEEVCAVELPGYALGGYSVGERPEEMHASVADVAVLLPADRPRYLMGVGTPVDLVTAMAAGVDMFDCVLPTRCARNGLLFTHLGRLNLRNATHARDERAPDPECGCYTCRTHSRAYLRHLFAADELLALRLATLHNLHHYLELMRGARAAIEEDRYAAFAEDVRRRESGRAPSG

SEQ ID NO: 57966 - protein, 378 aa, unidentified
  source 1..378: note = Myxococcales bacterium
  REGION 1..378: note = tr|A0A0S8EWJ4|A0A0S8EWJ4_9DELT Queuine tRNA-ribosyltransferase OS=Myxococcales bacterium SG8_38_1; OX = 1703408 GN=tgt PE=3 SV=1
MSLPTTGFSFRVDAIDGAARCGELQTPRAVVETPAFMPVGTQATVKALTPEEVASTGARIILANTYHLWLRPGAESIAAHGGVVGFMKWPHALLTDSGGYQVFSLAKQRTIDEDGITFRSHLDGTLHRLTPEEAMRVQALLGSDVAMVLDECPPGNAPRDVIERAISRTTAWAKRCLQTEPAEGQARFGIVQGGTELDLRLEHLQTIAALDFDGVALGGFSVGEPPAQMYELLAEIGPAMPVDRPRYLMGVGTPSDLLRALSSGIDLFDCVLPTRNARNGQALTWGGRVNLRQARHRDDESPLDARCDCSVCATYSRAYLRHLIKADEMLGPRLLSLHNLHFYGALMRKAREMIRLGRLQTWVDATLAQMHEQDEVGD

SEQ ID NO: 57967 - protein, 281 aa, unidentified
  source 1..281: note = Myxococcales bacterium
  REGION 1..281: note = tr|A0A3C1L0P6|A0A3C1L0P6_9DELT Queuine tRNA-ribosyltransferase (Fragment) OS=Myxococcales bacterium OX=2026763 GN=tgt PE=3 SV=1
MAYRFTLEHVCAQSGARAGRVETTHGVIETPIFMPVATQAALKGGVQFRDVKSAGAQVVLANTYHLMLRPGSERIRDAGGLHEFMRWKGPILTDSGGFQVFSLSGMRKISDEGVVFQSHIDGSRFHLNAEEAVRLQENFGSDIAMAFDECPPAKADVNAIRTAMNRTTAWLDRAIAARRRSDEVALYGIVQGGVNKQLRREHVEAICSRDACEGFAIGGLSVGESVEELHDICGFTAELMPEDKARYLMGVGTPRDLLVCIGHGVDQFDCGMPSRNGRHGK

SEQ ID NO: 57968 - protein, 359 aa, Myxococcus fulvus
  REGION 1..359: note = tr|F8CRZ2|F8CRZ2_MYXFH Queuine tRNA-ribosyltransferase OS=Myxococcus fulvus (strain ATCC BAA-855 / HW-1) OX=483219 GN=LILAB_30945 PE=3 SV=1
MFMPVATHAGFRHLAMEEVKETGASILLANTYHLMLRPGAEVFKRFGGIHPFMQWDGGVLTDSGGFQIFSLPEDRLITEKGAHFRSFYDNSRQLLSPESSIAMQQAINSEIMMVLDVCIDSRTDEAGTREAMERTHRWAVRSLEAKAARDTGQAMFGIVQGGVFPHLRDESAAFLTKLPFDGFAIGGLAVGETKVERESMTLRTTASLPQDKPRYLMGVGTPTDLVEAVLRGVDMFDCIIPTKMAQQGYAYTFSGLVRVSRSVFRLSDEPLDAACDCYVCKRYTRGYLQHLMRGKHHLGSRFLSVHNVRHYQKLMGRIRDGILNGTYAQVYRELKAAIATPKDLKDEANAREVTLKEVG

SEQ ID NO: 57969 - protein, 405 aa, Myxococcus fulvus
  REGION 1..405: note = tr|A0A511T592|A0A511T592_MYXFU Queuine tRNA-ribosyltransferase OS=Myxococcus fulvus OX=33; GN = tgt_2 PE=3 SV=1
MGEQHEQDAGTPREATREKGDTRVAPGMVKFELLHEDASGTKARRGRLNTPHGPIETPIFMPVGTVGSVKGVGPDDLLTMDAQIILGNTYHLMLRPGEQLVGEMGGLHQFVSWNRPMLTDSGGFQVFSLSEKRKITEEGAAFQSHLDGARHFLTPERSIDIQETLGADVIMAFDECPPSTAERSYLEKSLARTTRWLHRCEKAWSRGRSSLFGIVQGGLHEDLRKRHAEEVCAVDLPGYALGGYSVGEAPEAMHAGVAYSAPLLPRDKPRYLMGVGTPVDLVTCVEHGVDMFDCVLPTRCARNGLLFTSEGKLTIRNAAFAKDPRPVDPECSCYTCRNFSRAYLRHLFAAGEILAMRLNTLHNLHYFLGLMAQVRRAIAEDRYAAFARDFRERARAQEAERTRGR

SEQ ID NO: 57970 - protein, 402 aa, unidentified
  source 1..402: note = Myxococcus hansupus
  REGION 1..402: note = tr|A0A0H4WUL8|A0A0H4WUL8_9DELT Queuine tRNA-ribosyltransferase OS=Myxococcus hansupus OX=1297742; GN = tgt PE=3 SV=1
MNAMGEQQDAKQSGEKGDTRVAPGMVRFELLHEDASGTKARRGRLHTPHGPVETPIFMPVGTVGSVKGVGPDDLLTLDAQIILGNTYHLMLRPGEKLVGEMGGLHRFVSWDRPMLTDSGGFQVFSLSGKRKITEEGATFQSHLDGARHFLTPERSIDIQETLGADVIMAFDECPPSTEDRPYLEASLARTTRWLHRCVKAWSRQRSSLFGIVQGGLHEDLRKRHAEEVCAVDLPGYALGGYSVGEAPEAMHDGVAYSAPLLPRDKPRYLMGVGTPVDLVTCVEHGVDMFDCVLPTRCARNGLLFTSEGKVVIRNAAYARDPRPVDPACSCYTCRNFSRAYLRHLFAAQELLAMRLNTIHNLHYFLGLMAEVRRAVAEDRFAAFARDFRARAKAQEAERTRGR

SEQ ID NO: 57971 - protein, 389 aa, unidentified
  source 1..389: note = Myxococcus hansupus
  REGION 1..389: note = tr|A0A0H4WPG0|A0A0H4WPG0_9DELT Queuine tRNA-ribosyltransferase OS=Myxococcus hansupus OX=1297742; GN = tgt PE=3 SV=1
MAVRFELLTTDPTGARAGILHTRRGSFKTPMFMPVATHAGFRHLAMEEVKEAGASILLANTYHLMLRPGAEVFKRFGGIHPFMQWDGGVLTDSGGFQIFSLPEDRLITEKGAHFRSFYDNSRQLLSPESSIAMQQAINSEIMMVLDVCIDSRTDEAGTREAMERTHRWAVRSLEAKAAHDTGQAMFGIVQGGVFPNLRDESAAFLTKLPFDGFAIGGLAVGETKVERESMTLRSAALLPQDKPRYLMGVGTPTDLVEAVLRGVDMFDCIIPTKMAQQGYAYTFSGLVRISRSVFRLSDEPLDAECDCYVCKRYTRGYLQHLMRGKHHLGSRFLSVHNVRHYQKLMGRIREGILGGTYAQVYRELKAAIATPKDLKDEAAAREVTLKEVG

SEQ ID NO: 57972 - protein, 389 aa, unidentified
  source 1..389: note = Myxococcus macrosporus
  REGION 1..389: note = tr|A0A250JZC8|A0A250JZC8_9DELT Queuine tRNA-ribosyltransferase OS=Myxococcus macrosporus DSM 14697 OX=1189310 GN=tgt PE=3 SV=1
MAVRFELLTTDPTGARAGILHTRRGSFKTPMFMPVATHAGFRHLAMEEVKETGASILLANTYHLMLRPGAEVFKRFGGIHPFMQWDGGVLTDSGGFQIFSLPEDRLITEKGAHFRSFYDNSRQLLSPESSIAMQQAINSEIMMVLDVCIDSRTDEAGTREAMERTHRWAVRSLEAKAARDTGQAMFGIVQGGVFPNLRDESAAFLTKLPFDGFAIGGLAVGETKVERESMTLRTTASLPQDKPRYLMGVGTPTDLVEAVLRGVDMFDCIIPTKMAQQGYAYTFSGLVRVSRSVFRLSDEPLDAACDCYVCKRYTRGYLQHLMRGKHHLGSRFLSVHNVRHYQKLMGRIRDGILTGTYAQVYRELKAAIATPKDLKDEANAREVTLKEVG

SEQ ID NO: 57973 - protein, 399 aa, unidentified
  source 1..399: note = Myxococcus macrosporus
  REGION 1..399: note = tr|A0A250JZQ4|A0A250JZQ4_9DELT Queuine tRNA-ribosyltransferase OS=Myxococcus macrosporus DSM 14697 OX=1189310 GN=tgt PE=3 SV=1
MGEQQEVKQQGGKGDTRVEPGMVRFELLHEDASGTKARRGRLHTPHGPVETPIFMPVGTVGSVKGVGPDDLLTLDAQIILGNTYHLMLRPGEALVGELGGLHRFVSWNRPMLTDSGGFQVFSLSGKRKITEEGAAFQSHLDGARHFLTPERSIDIQETLGADVIMAFDECPPSTEDRAYLEASLARTTRWLHRCVKAWSRERSSLFGIVQGGLHEDLRKRHAEEVCAVDLPGYALGGYSVGEAPEAMHDGVAYSAPLLPRDKPRYLMGVGTPVDLVTCVEHGVDMFDCVLPTRCARNGLLFTSEGKVVIRNAAYARDPRPVDPACACYTCRNFSRAYLRHLFAAQELLAMRLNTIHNLHYFLGLMAEVRRAVAEDRFAAFARDFRARARAQEAERTRGR

SEQ ID NO: 57974 - protein, 402 aa, Myxococcus sp.
  REGION 1..402: note = tr|A0A540X1A7|A0A540X1A7_9DELT Queuine tRNA-ribosyltransferase OS=Myxococcus sp. AM401 OX=2590453; GN = tgt PE=3 SV=1
MSEQDAGVRETAREKGDTRVAPGLVRFDLLHEDASGTKARRGRLNTPHGPIETPIFMPVGTVGSVKGVGPDDLLALDAQIILGNTYHLMLRPGEALMREMGGLHQFVSWNRPMLTDSGGFQVFSLSEKRKITEEGAAFQSHLDGARHFLTPERSIEIQETLGADVIMAFDECPPSTEDRPYLENSLARTTRWLHRCVKAWNREGRSSLFGIVQGGLHEDLRKRHAEEVCAVDLPGYALGGYSVGEAPEAMHAGVAYAAPLLPRDKPRYLMGVGTPVDLVTCVEHGVDMFDCVLPTRCARNGLLFTSEGKLTIRNAAFARDPRPVDPACSCYTCRNFSRAYLRHLFAAGEILAMRLNTLHNLHYFLGLMADVRKAIAEDRYAAFAREFRERARAQEAERTRGR

SEQ ID NO: 57975 - protein, 389 aa, Myxococcus sp.
  REGION 1..389: note = tr|A0A540X017|A0A540X017_9DELT Queuine tRNA-ribosyltransferase OS=Myxococcus sp. AM401 OX=2590453; GN = tgt PE=3 SV=1
MAVRFELLTTDPTGARAGVLHTRRGSFSTPMFMPVATHAAFRHLGMEEVKETGASILLANTYHLMLRPGAEVFQRFGGIHSFMQWDGGVLTDSGGFQIFSLPEDRLITEKGAHFRSFYDNSRQLLSPESSIAMQQSINSEIMMVLDVCIDSRTDEAGTREAMERTHRWAVRSLAAKAKVDTGQAMFGIVQGGVFPNLRDESAEFLTKLPFDGFAIGGLAVGETKAERESMTLRTTASLPADKPRYLMGVGTPTDLIEAVLRGVDMFDCIIPTKMAQQGYAYTFQGLVRITRNVFRLADEPLDAECDCYVCKRYTRGYLHHLMRGKHHLGSRFLSVHNVRHYQKLMARIRAGILSGTYEQVARELKVAIATPKDLKEVASANEVTLKEVG

SEQ ID NO: 57976 - protein, 401 aa, Myxococcus stipitatus
  REGION 1..401: note = tr|L7UF15|L7UF15_MYXSD Queuine tRNA-ribosyltransferase OS=Myxococcus stipitatus (strain DSM 14675 / JCM 12634 / Mx s8) OX=1278073 GN=tgt PE=3 SV=1
MGEQDAGTSKPSREKGDTRVAPGLVRFELLHEDASGTKARRGRLHTPHGPVETPIFMPVGTVGSVKGVGPDDLVNLDAQIILGNTYHLMLRPGEALVGEMGGLHQFVSWNRPMLTDSGGFQVFSLSEKRKITEEGAAFQSHLDGARHFLTPERSIEIQETLGADVIMAFDECPPSMSERSYLEKSLDRTTRWLHRCVKAWGRERSSLFGIVQGGLHEDLRKRHAEEVCAVDLPGYALGGYSVGEVPEAMHAGVAYSAPLLPRDKPRYLMGVGTPVDLVTCVEHGVDMFDCVLPTRCARNGLLFTSEGKLTIRNAAFAKDPRPVDPACSCYTCRNFSRAYLRHLFAAGEILAMRLNTLHNLHYFLGLMADVRRAIAEDRFAAFAREFRERARAQEAERTRGR

SEQ ID NO: 57977 - protein, 389 aa, Myxococcus stipitatus
  REGION 1..389: note = tr|L7UFH4|L7UFH4_MYXSD Queuine tRNA-ribosyltransferase OS=Myxococcus stipitatus (strain DSM 14675 / JCM 12634 / Mx s8) OX=1278073 GN=tgt PE=3 SV=1
MAVRFELLTTDPTGARAGILHTRRGSFRTPMFMPVATHAAFRHLAMEEVKETGASILLANTYHLMLRPGAEVFKRFGGIHPFMQWDGGVLTDSGGFQIFSLPEDRLITEKGAHFRSFYDNSRQLLSPESSIAMQQAINSEIMMVLDVCIDSRTDEAGTREAMDRTHRWAVRSLAAKNKVDSGQALFGIVQGGVFPHLRDESAAFLTKLPFDGFAIGGLAVGETKVEREEMTLRTTASLPVDKPRYLMGVGTPTDLIEAVLRGVDMFDCIIPTKMAQQGYAYTFQGLVRITRSVFRLADEPLDAECDCYVCKRYTRGYLQHLMRGKHHLGSRFLSVHNVRHYQKLMGRIREGILSGTYDQVSRELKAAVATPKDLKEEASARDLTLKEVG

SEQ ID NO: 57978 - protein, 399 aa, Myxococcus virescens
  REGION 1..399: note = tr|A0A511HDB7|A0A511HDB7_9DELT Queuine tRNA-ribosyltransferase OS=Myxococcus virescens OX=83456; GN = tgt PE=3 SV=1
MGEQQEAKQSGGKGDTRVEPGMVRFELLHEDASGTKARRGRLHTPHGPVETPIFMPVGTVGSVKGVGPDDLLTLDAQIILGNTYHLMLRPGEALVGEMGGLHRFVSWNRPMLTDSGGFQVFSLSEKRKITEEGAAFQSHLDGARHFLTPERSIDIQETLGADVIMAFDECPPSTENRAYLEASLARTTRWLHRCVKAWSRERSSLFGIVQGGLHEDLRKRHAEEVCAVDLPGYALGGYSVGEAPEAMHDGVAYSAPLLPRDKPRYLMGVGTPVDLVTCVEHGVDMFDCVLPTRCARNGLLFTSEGKVVIRNAAYARDNRPVDPACSCYTCRNFSRAYLRHLFAAQELLAMRLNTIHNLHYFLGLMAEVRRAVAEDRFATFAREFRARAKAQEAERTRGR

SEQ ID NO: 57979 - protein, 404 aa, Myxococcus virescens
  REGION 1..404: note = tr|A0A511HDN7|A0A511HDN7_9DELT Queuine tRNA-ribosyltransferase OS=Myxococcus virescens OX=83456; GN = tgt PE=3 SV=1
MDAVPAGHDGYKGRPMAVRFELLTTDPTGARAGILHTRRGSFKTPMFMPVATHAGFRHLAMEEVKEAGASILLANTYHLMLRPGAEVFKRFGGIHPFMQWDGGVLTDSGGFQIFSLPEDRLITEKGAHFRSFYDNSRQLLSPESSIAMQQAINSEIMMVLDVCIDSRTDEAGTREAMERTHRWAVRSLEAKAARDTGQAMFGIVQGGVFPHLRDESADFLTKLPFDGFAIGGLAVGETKVERESMTLRATASLPADKPRYLMGVGTPTDLVEAVLRGVDMFDCIIPTKMAQQGYAYTFSGLVRISRSVFRLSDEPLDAECDCYVCKRYTRGYLQHLMRGKHHLGSRFLSVHNVRHYQKLMGRIREGILGGTYAQVYRELKAAIATPKDLKDEANAREVTLKEVG

SEQ ID NO: 57980 - protein, 389 aa, Myxococcus xanthus
  REGION 1..389: note = tr|A0A4Y6D615|A0A4Y6D615_MYXXA Queuine tRNA-ribosyltransferase OS=Myxococcus xanthus OX=34 GN=tgt; PE = 3 SV=1
MAVRFELLTTDPTGARAGILHTRRGSFKTPMFMPVATHAGFRHLAMEEVKEAGASILLANTYHLMLRPGAEVFKRFGGIHPFMQWDGGVLTDSGGFQIFSLPEDRLITEKGAHFRSFYDNSRQLLSPESSIAMQQAINSEIMMVLDVCIDSRTDEAGTREAMERTHRWAVRSLEAKAARDTGQAMFGIVQGGVFPNLRDESAAFLTKLPFDGFAIGGLAVGETKVERESMTLRATASLPADKPRYLMGVGTPTDLVEAVLRGVDMFDCIIPTKMAQQGYAYTFSGLIRISRSVFRLSDEPLDAECDCFVCKRYTRGYLQHLMRGKHHLGSRFLSVHNVRHYQKLMGRIREGILSGTYAQVYRELKAAIATPKDLKDEANAREVTLKEVG

SEQ ID NO: 57981 - protein, 389 aa, Myxococcus xanthus
  REGION 1..389: note = tr|Q1D3M0|Q1D3M0_MYXXD Queuine tRNA-ribosyltransferase OS=Myxococcus xanthus (strain DK 1622) OX=246197 GN=tgt PE=3 SV=1
MAVRFELLTTDPTGARAGILHTRRGSFKTPMFMPVATHAGFRHLAMEEVKEAGASILLANTYHLMLRPGAEVFKRFGGIHPFMQWDGGVLTDSGGFQIFSLPEDRLITEKGAHFRSFYDNSRQLLSPESSIAMQQAINSEIMMVLDVCIDSRTDEAGTREAMERTHRWAVRSLEAKAARDTGQAMFGIVQGGVFPHLRDESAAFLTKLPFDGFAIGGLAVGETKVERESMTLRATASLPADKPRYLMGVGTPTDLVEAVLRGVDMFDCIIPTKMAQQGYAYTFSGLIRISRSVFRLSDEPLDAECDCYVCKRYTRGYLQHLMRGKHHLGSRFLSVHNVRHYQKLMGRIREGILSGTYAQVYRELKAAIATPKDLKDEANAREVTLKEVG

SEQ ID NO: 57982 - protein, 424 aa, Nakamurella multipartita
  REGION 1..424: note = tr|C8X7A7|C8X7A7_NAKMY Queuine tRNA-ribosyltransferase OS=Nakamurella multipartita (strain ATCC 700099 / DSM 44233 / CIP 104796 / JCM 9543 / NBRC 105858 / Y-104) OX= 479431 GN=tgt PE=3 SV=1
MHNGSGFGFVVGSRLPDRQGRTGVITTPHGTIRTPAFVAVGTKATVKSLLPESVAQLGAQAVLANAYHLYLQPGPDIVEAAGGLGAFMHWPGPTFTDSGGFQVMSLGVGFKKVLAMNTAGLQSDDVIAPGKNRLATVDEDGVTFKSHLDGSLHRFSPEISMGIQHQLGADIIFAFDECTTLMNTRGYQERSVVRTHEWAARCVAEHRRLTDERVGRPYQALFGVVQGAQYEDLRRQATRDLLTLGFDGFGIGGALEKENLGTIVRWVCEELPEHLPRHLLGISEPDDMFTAIENGTDTFDCVSPSRVARNGSLYTERGRINITNARFKRDFGPLDEDCDCHTCAHYTRAYVHHLFRAKEMLSATLATIHNERFVVRLVDRIRDSIDDGSFDEFRAHFLGRYYAARGGAPAPVLLPGPVNGGENP

SEQ ID NO: 57983 - protein, 408 aa, unidentified
  source 1..408: note = Nakamurella panacisegetis
  REGION 1..408: note = tr|A0A1H0MLU3|A0A1H0MLU3_9ACTN Queuine tRNA-ribosyltransferase OS=Nakamurella panacisegetis; OX = 1090615 GN=tgt PE=3 SV=1
MTTSTSTSFTVTSRLPDAQGRTGTLSTPHGDIRTPAFIAVGTKATVKAVLPESMSDLGAQAVLANAYHLYLQPGADIVEAGGGLGRFMNWSGPTFTDSGGFQVLSLGAGFKKVLAMDTRGLGTDDVIAAGKTRLATVDDDGVTFKSHLDGSKHRFTPEISMQIQHRLGADIIFAFDECTTLMNTREYQESSVRRTQEWAVRCVDEHRRLTAERAGMPYQALFGVIQGAQYEDLRRRAVRDLLPLGFDGFGIGGALEKENLGTIVRWCCEEMPETMPRHLLGISEPDDIFTAIENGTDTFDCVSPSRVARNGAIYSPDGRYNLVAARFRRDFTPLAQDCDCYTCANYTRAYLHHLFKGNEMVSCTLATIHNERFIVKLVDDIRRSIDAGSFAEFKSEFLGRYYDGTRRP

SEQ ID NO: 57984 - protein, 409 aa, unidentified
  source 1..409: note = Nakamurella silvestris
  REGION 1..409: note = tr|A0A399USM8|A0A399USM8_9ACTN Queuine tRNA-ribosyltransferase OS=Nakamurella silvestris; OX = 1645681 GN=tgt PE=3 SV=1
MTDIQAPDQTTGFTVGTRLENGLGRTGTIHTPHGEIQTPAFIAVGTKATVKAVLPETVAELGAQAVLANAYHLFLQPGSDIVDEAGGLGAFMNWPGPTFTDSGGFQVLSLGAGFKKVLAMNSSTVRADDVIAEGKTRLAHVDEDGVTFKSHLDGSRHRFTPEVSMQIQHQLGADIIFAFDECTTLMNTREYQERSVERTQRWAVRCVDEHTRLTAERTHRPYQMLFGVVQGAQYEDLRRQAARDLAALGFDGFGIGGALEKDVLGTIVRWVNEELPEDKPRHLLGIGEPDDIFTAVENGVDTFDCVSPSRVARNGAIYSENGRFNVASATNRRDFGPLTQDCACYTCTHYSKAYLHHLLKAKEMLASTLATIHNEHFIVNLVDRVRASIVDGTFAEFREDFLGRYYPHR

SEQ ID NO: 57985 - protein, 403 aa, Nakamurella sp.
  REGION 1..403: note = tr|A0A3G8ZL95|A0A3G8ZL95_9ACTN Queuine tRNA-ribosyltransferase OS=Nakamurella sp. s14-144; OX = 1902245 GN=tgt PE=3 SV=1
MSDAESNFQLTTELGHSELGRSGVISTPHGTIATPAFIAVGTKATVKAVLPESMVGLGAQAVLANAYHLYLQPGSDLIDEAGGLGKFMNWTGPTFTDSGGFQVLSLGAGFKKVLAMDAGNVRADDVIAEGKTRLAHVDDDGVTFKSHLDGSLHRFTPEVSMQIQHQLGADIIFAFDELTTLMNTREYQEMSLERTRLWALRCIAEHRTLTESRAEKPYQSLFGVIQGAQYEDLRRKAARDLGQMGFDGFGIGGALEKENLGTIVRWVNEELPVDKPRHLLGISEPDDIFVAVQNGIDTFDCVSPSRVARNGAIYTPVGRVNVTNSRFRRDFGPLSQDCGCYTCSHYSRAYLHHLFKAKEMISCTLATIHNEAFIVKLVDDIRVSINDGTFFDFKEQFLGSYYS

SEQ ID NO: 57986 - protein, 409 aa, Nakamurella sp.
  REGION 1..409: note = tr|A0A4U6Q991|A0A4U6Q991_9ACTN Queuine tRNA-ribosyltransferase OS=Nakamurella sp. N5BH11; OX = 2576308 GN=tgt PE=3 SV=1
MAEPADFGFTVDHRLPGRLGRTGTITTPHGEIRTPAFIAVGTKATVKAVLPESMAALGAQAVLANAYHLYLQPGSDLIDEAGGLGAFMNWPGPTFTDSGGFQVMSLGVGFKKVLAMDVSGLQSDSVIAAGKTRLAAVDDDGVTFKSHLDGSRHRFTPEVSMGIQHQLGADVMFAFDELTTLMNTREYQELSVRRTHEWAIRCLAEHRRLTAQRVGKPYQALFAVVQGAQYEDLRRQATADLAALRVDGQAFDGYGIGGAIEKQILGDIVGWVCEELPEDKPRHLLGISEPDDFFNAIANGADTFDCVSPSRVARNGRIFADRGYYNVNNARFRRDLTPLDEGCDCYVCAHYTRAYLHHLFKAKEMLSATLATIHNERWVVRLVDRIRASIADGTFDEFRDEMLGRFYRS

SEQ ID NO: 57987 - protein, 419 aa, Nannocystis exedens
  REGION 1..419: note = tr|A0A1I1T118|A0A1I1T118_9DELT Queuine tRNA-ribosyltransferase OS=Nannocystis exedens OX=54; GN = tgt PE=3 SV=1
MTTRADPRLDLSCETSGLQPRPPGTFEVLAQAPGSPARAGRLWTAHGPIDTPCFMPVGTYGAVKGLDADDLREVGAQIILGNSYHLGHRPGAARVAALGGLHRMMAWDRPILTDSGGFQVFSLRGLQKIDDAGVSYQTHFDGSRHRMTPESVLATQAALGSDICMILDHCPPADAEPALIRAAVDRSTRWAEEAARRRGEILQPGQLCFGIVQGGTNVALRREHLKALADLPFEGLALGGLSVGEPIPEMHATMAAIGPEMPQDRPRYVMGIGTPHDLLAAVSSGIDMFDCVMPTRHARNGQLFTFSGRLNIRQARFRDDDAPIDPACRCRCCARYSRAYLRHLHEQNEPLYGRLATIHNLYFYQQWVGALRRALRSGRFEALRGEFSSIISTVYAEGAGAEGDVDAAAAAAVAAPEPA

SEQ ID NO: 57988 - protein, 381 aa, Nannocystis exedens
  REGION 1..381: note = tr|A0A1I2GWY8|A0A1I2GWY8_9DELT Queuine tRNA-ribosyltransferase OS=Nannocystis exedens OX=54; GN = tgt PE=3 SV=1
MRFPFHVSALDPGSRARRGALDTPHGRIETPVFMAVGTRASVTGLTPAELHEVGAEVVLGNTYHLMLRPGPDLFRRVGGIHRFMGWNGPMLTDSGGYQIFSLSADRVISERGARFRSYTNQQFHMLSPEASIAMQEAIGADIMMVLDVCVDARSDEATTRAAMQRTHRWALRSLAARTGTPQALFAIMQGGIFPGLRRESAAFLTDHPFDGFAIGGLAVGDTRAEREDITHMAADLLPADRPRYLMGVGTPPDLLHAILAGVDMFDCILPTSLAWQGTAFTSTGRVKLMRASTRDDDRPLDAACACSTCKLYTRAYLHHLFRCGEPLGPRLVSLHNLHHYHALMAEARAAIAAGRFATYARDKLEAIDRYEHSDRRIGATA

SEQ ID NO: 57989 - protein, 370 aa, Natranaerobius thermophilus
  REGION 1..370: note = sp|B2A5K8|TGT_NATTJ Queuine tRNA-ribosyltransferase; OS = Natranaerobius thermophilus (strain ATCC BAA-1301 / DSM 18059 / JW/NM-WN-LF) OX=457570 GN=tgt PE=3 SV=1
MAISYQLEQTSSESRARLGKLKTPRGEIQTPVFMPVGTQATVKTMTPEELKNLDAEIILGNTYHLHLRPGNDIVREADGLHKFMNWDRPILTDSGGFQVFSLGKLRQISEQGVEFRSHIDGSKLFMTPEKSIEIQEDLGSDIMMVFDECPPYPAEYDYVKESMDRTIRWSKRCLQHQKHPEKQALFGIVQGGMYPELRKESALKTTELDFPGYAVGGLSVGEPKEMMLEVLNTTIPYLPEEKPRYLMGVGTPDYIIEAVRMGIDMFDCVYPTRVARNGTAMTRFGNLTVRNAVFQRDFQPIEEDCDCYVCQNYSRAYLRHLIKANEILGFRLLTWHNLFFLIKLIKELRQAIADDNFLAWRDSFYKNYQN

SEQ ID NO: 57990 - protein, 371 aa, Natranaerobius trueperi
  REGION 1..371: note = tr|A0A226BWV7|A0A226BWV7_9FIRM Queuine tRNA-ribosyltransferase OS=Natranaerobius trueperi; OX = 759412 GN=tgt PE=3 SV=1
MAVSYIVNQKSSECDARVGTLKTPHGEVETPVFMPVGTQATVKTMTPDELKELESEIILSNTYHLYLRPGSKLIKEAGGLHKFMNWDRPILTDSGGFQVFSLGNRRNITEQGVEFRSHIDGSKMFLSPEKAVEIQEDLGSDIMMVFDECPPYPADEIYVKKSLDRTLRWAKRCKDSQNHADKQALFGIVQGGMYPKLRKESALRTVELDFPGYAVGGLSVGEPKELMLEVLENTTPFLPEEKPRYLMGVGTADYLVEGVYRGIDMFDCVFPTRVARNGTAMTWTGKMTVRNASYKKDFSPIDKSCECYTCKNYSRAYIRHLVKTNEILGFRLITWHNLYFLVQLMKEIRQAIKNDNFKDWRESFYKSYQHN

SEQ ID NO: 57991 - protein, 376 aa, Natranaerovirga hydrolytica
  REGION 1..376: note = tr|A0A4R1MYV9|A0A4R1MYV9_9FIRM Queuine tRNA-ribosyltransferase OS=Natranaerovirga hydrolytica; OX = 680378 GN=tgt PE=3 SV=1
MYKLLNIDGKAKRGEFHTTHGVIQTPVFMNVGTAAAIKGAVSTKDLEDVKCQVELSNTYHLHLRPGDEVIKKLGGLHQFMVWDKPILTDSGGFQVFSLTSLRKIKEEGVYFSSHIDGKKIFMGPEESMQIQSNLGSTIAMAFDECPPYPATREYMKSSVDRTTRWLERCKVELNRLNKLEDTINPNQLLFGINQGGTYEDMRIEHAKVISELDLPGYAIGGLAVGESHSEMYRILEAVVPHLPQEKPTYLMGVGTPENILEAVDRGVDFFDCVYPTRNGRHGHVYINQGKLNLFNAKFQLDDRPIEEGCQCPACQSYSRAYIRHLLKAKEMLGMRLCVLHNLYFYNTMMEEIREAIANNRYQEYKQAKIDGFNVKV

SEQ ID NO: 57992 - protein, 376 aa, Natranaerovirga pectinivora
  REGION 1..376: note = tr|A0A4R3MQH5|A0A4R3MQH5_9FIRM Queuine tRNA-ribosyltransferase OS=Natranaerovirga pectinivora; OX = 682400 GN=tgt PE=3 SV=1
MYKLHNIDGKAKRGELHTVHGVIQTPVFMNVGTAAAIKGAVSTEDLKQVKCQVELSNTYHLHVRPGDGVIRKLGGLHKFMVWDKPILTDSGGFQVFSLTSLRKIKEEGVYFSSHIDGKKIFMGPEESMQIQSNLASTIAMAFDECPPYPATREYMKDSVDRTTRWLVRCKDELNRLNGLDDTINKNQLLFGINQGGTYEDMRIEHAKVISELDLPGYAIGGLAVGESHHEMYRILEAVVPHLPQNKPTYLMGVGTPQNILEAVERGVDFFDCVYPTRNGRHGHVYTNHGKMNMLNAKFELDDRPIEEGCGCPACTTYSRAYIRHLLKAKEMLGMRLCVLHNLYFYNSMMEEIREAIENNRYSDYKAEKLERYNNGN

SEQ ID NO: 57993 - protein, 381 aa, Natribacillus halophilus
  REGION 1..381: note = tr|A0A1G8NXZ4|A0A1G8NXZ4_9BACI Queuine tRNA-ribosyltransferase OS=Natribacillus halophilus; OX = 549003 GN=tgt PE=3 SV=1
MTAAISYEHIKTCRQSGARLGRIHTPHGVIDTPIFMPVGTLATVKMMSPEELKEMGAQIILSNTYHLWLRPGEDLVAEAGGLHTFMNWDRPVLTDSGGFQVFSLSDLRDIDEEGVRFRNHISGERLFLTPEKATRIQQSLGADMIMAFDECPPYPASYDYLRDSVARTSRWAERCLEAQAGNDDRQALFGIVQGGEYEDLRRRSAEDLVSLDFPGYAIGGLSVGEPKAVMNDVLEQTVQHLPTDKPRYLMGVGSADALIDGAIRGVDMFDCVLPTRIGRNGTCMTSEGRKVIRNAAFTRDFRPIDEACDCYTCRNYTRAYIRHLIKSKESFGFRLTSYHNLYFLIELMGKIRLAIKEDRLLDFRASFFEQYGFNRPDAKNF

SEQ ID NO: 57994 - protein, 372 aa, Natronincola ferrireducens
  REGION 1..372: note = tr|A0A1G9CXW1|A0A1G9CXW1_9CLOT Queuine tRNA-ribosyltransferase OS=Natronincola ferrireducens; OX = 393762 GN=tgt PE=3 SV=1
MALTYELIKECKQSGARLGKIHTARGVIETPIFMPVGTQATVKTMTPEELKDIKSQIILSNTYHLYLRPGHELVKKAGGLHRFMNWDKPILTDSGGFQVFSLGDLRKISEEGVEFRSHLDGSKHFISPEKAVEIQNALGSDIMMVFDECAPYPADREYVKNSLERTTRWAKRCKDAHKNIENQSLFGIIQGGMYGDLRKQSAEELLELDFPGYAVGGLSVGEPKPLMYEVLEYTTPFMPKNKPRYLMGVGSPDCLIEGVIRGIDMFDCVLPTRIARNGTAMTSHGKVVIKNAKHTEDFTGLDPECDCYTCKNYSKAYLRHLFKANEVLGLRLMSHHNLYFLLKLMEEIRQAIKEDRLLDYRKNFFVKYGYDV

SEQ ID NO: 57995 - protein, 372 aa, Natronincola peptidivorans
  REGION 1..372: note = tr|A0A1H9YYI4|A0A1H9YYI4_9CLOT Queuine tRNA-ribosyltransferase OS=Natronincola peptidivorans; OX = 426128 GN=tgt PE=3 SV=1
MALTYELIKECKQSGARLGKIHTKRGVIETPIFMPVGTQATVKTMTPEELIEIESQIILSNTYHLYLRPGHHLIDRAGGLHKFMNWNKPILTDSGGFQVFSLGDLRKISEEGVEFRSHLDGSKHFISPEKAIEIQTSLGSDIMMVFDECAPYPADETYVKNSLERTTRWAIRCKEAHKNFENQSLFGIIQGGMYPNLRKQSAEALIELDFPGYAVGGLSVGEPKPLMYEVLEHTTPLMPKNKPRYLMGVGSPDCLLEGVIRGIDMFDCVLPTRIARNGTAMTSQGKVVIKNAKHTEDFQGLDPECSCNTCKNYSKAYLRHLFKSNEVLGLRLLSYHNLYFLLQLMKNIREAIHEDRLLDYRDNFFEKYGYNA

SEQ ID NO: 57996 - protein, 376 aa, Natronoflexus pectinivorans
  REGION 1..376: note = tr|A0A4R2GH09|A0A4R2GH09_9BACT Queuine tRNA-ribosyltransferase OS=Natronoflexus pectinivorans; OX = 682526 GN=tgt PE=3 SV=1
MDFVLHKKDAFSKARAGEISTDHGKIETPVFMPVGTVGSVKGIHVRDLEQEVRARIILGNTYHLYLRPGIDVLRKAGGLHKFNSWDKPILTDSGGFQVFSLSHRRKLKEEGAEFQSHIDGSKHVFTPENVVDIQRVIGADIIMAFDECPPGDSDFNYAKKSMELTHRWLLRGIERFDSTEPLYDYGQTFFPIVQGAGFPDLRRQSAEFIANQNREGNAIGGLAVGEPEEVMYKMIQVVNEILPEDKPRYLMGVGTPANILEAISLGVDMFDCVMPTRNGRNGMLFTSKGIINIRNEKWKYDFSPIDPDGNSAFDLIYSKAYLRHLFIAGEMLGPQIASIHNLSFYMWLVDEARRQINQGTFFDWKEQMVKQLKVRL

SEQ ID NO: 57997 - protein, 369 aa, unidentified
  source 1..369: note = Natronospirillum operossus
  REGION 1..369: note = tr|A0A4Z0W1T6|A0A4Z0W1T6_9BACT Queuine tRNA-ribosyltransferase OS=Natronospirillum operossus; OX = 2562806 GN=tgt PE=3 SV=1
MDFTLHREEGSARRGTLTFPRGKVETPCFMPVGTYGTVKGMLPRDIEAIGAQIILGNTFHLMLRPGTEVIRAHGDLHDFNGWSGPILTDSGGFQVFSLGAMRKITEQGVTFQSPVDGSPVELNPEIAMQVQRDLGSDIVMIFDECTPYPATREEARSSMELSLRWAERSKQAHGDSPSALFGIVQGGMYADLRRASLAGLEQIGFDGYAIGGLSVGEPKAEMMQVLEDTTPHMPRARPRYLMGVGTPEDLVEGVLRGVDMFDCVMPTRNARNGHLFTTEGVVKIRNAAHRHDTRPPDPDCDCYTCQNFSRAYLHHLDRCREILGSQLNTIHNLRYYQRLMAGLRQAIESGRLSDFVADFYARRGRKGAA

SEQ ID NO: 57998 - protein, 404 aa, unidentified
  source 1..404: note = Naumannella halotolerans
  REGION 1..404: note = tr|A0A4R7J8Q2|A0A4R7J8Q2_9ACTN Queuine tRNA-ribosyltransferase OS=Naumannella halotolerans; OX = 993414 GN=tgt PE=3 SV=1
MSFGFEVGSRLDGQLGRTGVITTPHGQIETPAFIAVGTKATVKAVLPESMAELGAQAVLANAYHLYLQPGSDIVESAGGLGRFMNWPGPTFTDSGGFQVMSLGVGFKKVLAMDAKGVTGDDVIAAGKERMAHVDDDGVTFKSHLDGTMHRFTPEVSMKVQHQIGADIIFAFDELTTLMNTRGYQEQSLARTQAWAQRCLAEHSRLLAAHPDRPQQALFGVVQGAQYEDLRRKACRDLAATEIDGRHFEGYGIGGALEKENLGTIVGWCAEELPENRPRHLLGISEPDDFFAAIAAGADTFDCVSPSRVARNAALYSRDGRFNVNTAANRRNFGPVDEDCDCYTCAHYTRAYLHHLFKAKEMVVNTLATIHNERFIVRLVDDIRDSIRTGDFEAFREEFLGRYYG

SEQ ID NO: 57999 - protein, 378 aa, Nautilia profundicola
  REGION 1..378: note = sp|B9L8E1|TGT_NAUPA Queuine tRNA-ribosyltransferase; OS = Nautilia profundicola (strain ATCC BAA-1463 / DSM 18972 / AmH) OX=598659 GN=tgt PE=3 SV=1
MEFRIDSIDGNARACTIKTEHSEIKTPIFMPVGTAAAVKSLDAIDMMEILDAPIILGNTYHLYLRPGDEIISKLGGLHGFSGYKRSFLTDSGGFQAFSLGDNVKFTDEGIWFKSHIDGSKHFFSPEKVIDIEYNLNSDIMMVLDDLIALPNTKERIKKSIERTTEWAYRSLVHHVNRGKKNNLFAIIQGGTDFEFRRISAESLVSLEYKGYTFDGFAIGGLSVGEENQLMYDTIEATTPYMPKDKPRYLMGVGTPEDIIEAVERGVDMFDCVMPTRNARNGYLFTTFGTLRIKNAKYKLDESPIDPKCNCYTCRNFSRAYLNHLFKAKELTYFRLASIHNLHYYLNFVKEIREAILEGRFKEYKKEFYSLRAMNSLEI

SEQ ID NO: 58000 - protein, 378 aa, Nautilia sp.
  REGION 1..378: note = tr|A0A3T0L0U7|A0A3T0L0U7_9PROT Queuine tRNA-ribosyltransferase OS=Nautilia sp. PV-1 OX=2579250; GN = tgt PE=3 SV=1
MEFKIDKTDGNARACTIKTAHSEIKTPIFMPVGTAAAVKSLDAVDMTEILDAPIILGNTYHLYLRPGDETVAKLGGLHGFSGYKRSFLTDSGGFQAFSLGDNVKFTDEGIWFKSHIDGSRHFFSPEKVIDIEYNLGSDIMMVLDDLIALPNTKERIKKSIERTTQWAYRSLVHHVKKGKKNNLFAIIQGGTDFEFRRISAESLVSLEYEGHTFDGFAIGGLSVGEENQLMYDTIEATTPYMPQDKPRYLMGVGTPEDIIEAVERGVDMFDCVMPTRNARNGYLFTTFGTLRIKNAKYKLDDSPIDPKCNCYTCRNFSRAYLNHLFKAKELTYFRLASIHNLHYYLNLVREIREAILEGRFKEYKKEFYSLRAINSFEI

SEQ ID NO: 58001 - protein, 379 aa, unidentified; identical to SEQ ID NO: 52205
  source 1..379: note = Negativibacillus sp.
  REGION 1..379: note = tr|A0A3A8XP04|A0A3A8XP04_9FIRM Queuine tRNA-ribosyltransferase OS=Negativibacillus sp. 1xD8-3; OX = 2320085 GN=tgt PE=3 SV=1

SEQ ID NO: 58002 - protein, 370 aa, Negativicoccus succinicivorans
  REGION 1..370: note = tr|W1U0H3|W1U0H3_9FIRM Queuine tRNA-ribosyltransferase OS=Negativicoccus succinicivorans DORA_17_25 OX=1403945 GN=tgt PE=3 SV=1
MAVITYELVHEDAQTGARAGRIHTPHGSFDTPMFMPVGTQATVKTLSPEEVADTGAGIILSNTYHLFLRPGTELIKEAGGLHQFMKWPRAMLTDSGGFQVFSLGAMRKIKEEGVYFRSHIDGSKQFLSPEVATHAQMDLGADIAMAFDECIPYPADYEYAKQSTERTTRWAKRCLEVHEHPAQGMFGIIQGGMYRDLRAQSAREITALPFDGFAIGGLSVGEPHDLMYEMLDYTTHLMPRDKARYLMGVGTPDCLVEGVARGVDMFDCVYPTRVARNGMAMLKTGRLNIKNKQFERDFSPLDEECDCYACRHYTRAYIRHLYKAEEIFAFRLLSVHNIHFLQRFMRGLREAILEDRFGDFQRDFWAQWQR

SEQ ID NO: 58003 - protein, 371 aa, Neisseria animalis
  REGION 1..371: note = tr|A0A3N3EEW7|A0A3N3EEW7_NEIAN Queuine tRNA-ribosyltransferase OS=Neisseria animalis OX=492; GN = tgt PE=3 SV=1
MLKFTLHKTDGHARRGTLELNHGTIETPVFMPVGTYGSVKAMTPDNLHDIKAQIILGNTYHLWLRPGLEVIEQFGGLHGFIGWNKPILTDSGGFQVFSLSDMRKLTEEGCTFKSPINGDKLFLSPEISMKIQTVLNSDIVMQLDECTPGEAGREQARLSLQMSLRWAERSKKAFEDLKNPNALFGIVQGAMYEDLREESLKGLEQFDFPGLAIGGLSVGEPKPEMYRMIRAVGPMLPAHKPHYLMGVGTPEDLVYGVAHGIDMFDCVMPTRNARNGWLFTRFGDIKIKNAKHKHDTRPLDESCTCYACRNFSRAYLHHLHRAGEILGAQLNTIHNLHFYQVIMAEMREAIEQGKFADWQAQFHENRARGTD

SEQ ID NO: 58004 - protein, 370 aa, Neisseria animaloris
  REGION 1..370: note = tr|A0A3S4YB59|A0A3S4YB59_9NEIS Queuine tRNA-ribosyltransferase OS=Neisseria animaloris OX=326522; GN = tgt PE=3 SV=1
MLKFTLHKKDGYARRGTLELNHGKIETPVFMPVGTYGSVKAMTPQNLHDIKAQIILGNTYHLWLRPGLEVIEQFGGLHHFIGWDKPILTDSGGFQVFSLSDMRKLTEEGCTFKSPINGDKLFLSPEISMKIQTVLNSDIVMQLDECTPGEASHPQAQKSLQMSLRWAERSKKAFEDLNNPNALFGIVQGAMYEDLREESLKGLEQFDFPGLAIGGLSVGEPKPEMYRMLRTVGPILPEHKPHYLMGVGTPEDLVYGVAHGVDMFDCVMPTRNARNGWLFTRFGDLKIKNAKHKLDTRPIDETCTCYACRNFSRSYLHHLHRAGEILGAQLNTIHNLHYYQTLMAEMREAIEQGKFADWQARFHENRARGV

SEQ ID NO: 58005 - protein, 370 aa, unidentified
  source 1..370: note = Neisseria arctica
  REGION 1..370: note = tr|A0A0J1C599|A0A0J1C599_9NEIS Queuine tRNA-ribosyltransferase OS=Neisseria arctica OX=1470200; GN = tgt PE=3 SV=1
MLKFTLHKTDGYARRGTLELNHGKIETPVFMPVGTYGSVKAMTPQHLHDIKAQIILGNTYHLWLRPGLEVIEQFGGLHDFIGWNKPILTDSGGFQVFSLSDMRKLTEEGCTFKSPINGDKLFLSPEISMKIQTVLNSDIVMQLDECTPGEASHSQAQKSLQMSLRWAERSKKAFEDLNNPNALFGIVQGAMYEDLREESLRGLEEFDFPGLAIGGLSVGEPKPEMYRMLRAVGPILPAHKPHYLMGVGTPEDLVYGVAHGVDMFDCVMPTRNARNGWLFTRFGDLKIKNAKHKHDPRPIDESCTCYACQNFSRAYLHHLHRAGEILGAQLNTIHNLHYYQVLMTEMREAIEQGKFAEFQAQFHKNRARGS

SEQ ID NO: 58006 - protein, 380 aa, Neisseria bacilliformis
  REGION 1..380: note = tr|F2BB88|F2BB88_9NEIS Queuine tRNA-ribosyltransferase OS=Neisseria bacilliformis ATCC BAA-1200 OX=888742 GN=tgt PE=3 SV=1
MFSRAHTMLRFTLRATDGHARRGTLELNHGIIETPVFMPVGTYGSVKAMSPANLADIKAQIILGNTYHLWLRPGLEVIEQFGGLHRFIGWDKPILTDSGGFQVFSLADMRKLTEEGCTFKSPINGDKLFLSPEISMKIQTVLNSDIAMQLDECTPGEATREQAKASLQMSLRWAERSKKAFEDLRNPNALFGIVQGAMYEDLREQSLRGLEQFDFPGLAIGGLSVGEPKPEMYRMLRAVGPMLPAHKPHYLMGVGTPEDLVYGVAHGVDMFDCVMPTRNARNGWLFTRLGDVKIKNAKHKHDTAPLDETCTCYTCQNFSRAYLHHLHRAGEILGAQLNTIHNLHFYQTIMAEMREAIEQGRFADWRARFHELRGSQPEAE

SEQ ID NO: 58007 - protein, 370 aa, Neisseria canis
  REGION 1..370: note = tr|A0A448DAP4|A0A448DAP4_9NEIS Queuine tRNA-ribosyltransferase OS=Neisseria canis OX=493 GN=tgt; PE = 3 SV=1
MLKFTLHKTDGHARRGTLELNHGTIETPVFMPVGTYGSVKAMTPQNLHDIKAQIILGNTYHLWLRPGLEVIEEFGDLHQFIGWNKPILTDSGGFQVFSLSDMRKLTEEGCTFKSPINGDKLFLSPEISMKIQTVLNSDIAMQLDECTPGEASHEQARKSLQMSLRWAERSKKAFEDLRNPNALFGIVQGAMYEDLREESLKGLEAFDFPGLAIGGLSVGEPKPEMYRMLRAIGPILPAHKPHYLMGVGTPEDLVYGVAHGVDMFDCVMPTRNARNGWLFTRFGDLKIKNAVHKHDTRPIDESCSCYACQNFSRAYLHHLHKAGEILGAQLNTIHNLHFYQVIMAEMREAIEQGKFADWQAQFHENRARGV

SEQ ID NO: 58008 - protein, 371 aa, Neisseria cinerea
  REGION 1..371: note = tr|A0A2X4BLD1|A0A2X4BLD1_NEICI Queuine tRNA-ribosyltransferase OS=Neisseria cinerea OX=483 GN=tgt; PE = 3 SV=1
MLKFTLHKKDGHARRGTLELNHGKIETPVFMPVGTYGSVKAMNPQNLHDIKARIILGNTYHLWLRPGLEVIEQFGGLHEFIGWDKPILTDSGGFQVFSLSDMRKLTEEGCTFQSPINGDKLFLSPEVSMKIQTVLNSDIVMQLDECTPGEATHSQAQKSLQMSLRWAERSKKAFEGLKNPNALFGIVQGAMYEDLREESLKGLEELDFPGLAIGGLSVGEPKPEMYRMLRAVGPILPEHKPHYLMGVGTPEDLVYGVAHGVDMFDCVMPTRNARNGWLFTRFGDLKIKNAKHKLDKRPIDESCTCYACQNFSRSYLHHLHRVGEILGAQLNTIHNLHFYQVIMAEMREAIEQGKFADWQAQFHENRARGVD

SEQ ID NO: 58009 - protein, 371 aa, Neisseria cinerea
  REGION 1..371: note = tr|D0W1L5|D0W1L5_NEICI Queuine tRNA-ribosyltransferase OS=Neisseria cinerea ATCC 14685; OX = 546262 GN=tgt PE=3 SV=1
MLKFTLHKKDGHARRGTLELNHGKIETPVFMPVGTYGSVKAMNPQNLHDIKAQIILGNTYHLWLRPGLEVIEQFGGLHEFIGWDKPILTDSGGFQVFSLSDMRKLTEEGCTFQSPINGDKLFLSPEVSMKIQTVLNSDIVMQLDECTPGEATHSQAQKSLQMSLRWAERSKKAFEDLKNPNALFGIVQGAMYEDLREESLKGLEELDFPGLAIGGLSVGEPKPEMYRMLRAVGPILPEHKPHYLMGVGTPEDLVYGVAHGVDMFDCVMPTRNARNGWLFTRFGDLKIKNAKHKLDKRPIDESCTCYACQNFSRSYLHHLHRVGEILGAQLNTIHNLHFYQVIMAEMREAIEQGKFTDWQAQFHENRARGVD

SEQ ID NO: 58010 - protein, 371 aa, Neisseria dentiae
  REGION 1..371: note = tr|A0A1X3D573|A0A1X3D573_9NEIS Queuine tRNA-ribosyltransferase OS=Neisseria dentiae OX=194197; GN = tgt PE=3 SV=1
MLKFTLHTTDGHARRGTLELNHGTIETPVFMPVGTYGSVKAMTPQNLHDINAQIILGNTYHLWLRPGLEVIEQFGGLHQFIGWDKPILTDSGGFQVFSLSDMRKLTEEGCTFKSPINGDKLFLSPEISMKIQTVLNSDIVMQLDECTPGEASHEQAKKSLQMSLRWAERSKKAFEDLNNPNALFGIVQGAMYEDLREESLRGLEQFDFPGLAIGGLSVGEPKPEMYRMLRAVGPMLPAHKPHYLMGVGTPEDLVYGVAHGVDMFDCVMPTRNARNGWLFTRFGDIKIKNAKHKHDTRPLDETCTCYACKNFSRAYLYHLHKAGEILGAQLNTIHNLHFYQVIMAEMREAIEQGRFADWQAQFHENRARGTD

SEQ ID NO: 58011 - protein, 371 aa, unidentified
  source 1..371: note = Neisseria dumasiana
  REGION 1..371: note = tr|A0A1X3DK98|A0A1X3DK98_9NEIS Queuine tRNA-ribosyltransferase OS=Neisseria dumasiana OX=1931275; GN = tgt PE=3 SV=1
MLKFTLHKTDGHARRGTLELNHGTIETPVFMPVGTYGSVKAMTPANLHDIKAQIILGNTYHLWLRPGLEVIEQFGGLHQFIGWNKPILTDSGGFQVFSLSDMRQLTEEGCTFKSPINGDKLFLSPEISMKIQTVLNSDIAMQLDECTPGEATHEQARQSLQMSLRWAERSKKAFEDLNNPNALFGIVQGAMYEDLREESLKGLEEFDFPGLAIGGLSVGEPKPEMYRMLRAVGPMLPARKPHYLMGVGTPEDLVYGVAHGVDMFDCVMPTRNARNGWLFTRFGDIKIKNAKHKHDTRPLDESCTCYACQNFSRAYLYHLHKAGEILGAQLNTIHNLHFYQVIMAEMREAIEQGKFAEWQAQFHENRARGTD

SEQ ID NO: 58012 - protein, 371 aa, Neisseria elongata
  REGION 1..371: note = tr|A0A0B5CPA5|A0A0B5CPA5_NEIEG Queuine tRNA-ribosyltransferase OS=Neisseria elongata subsp. glycolytica ATCC 29315 OX=546263 GN=tgt PE=3 SV=1
MLKFTLHKKDGHARRGTLELNHGSIETPVFMPVGTYGSVKAMTPQNLHDIKAQIILGNTYHLWLRPGLEVIEQFGGLHDFIGWNKPILTDSGGFQVFSLSDMRKLTEEGCTFKSPINGDKLFLSPEISMKIQTVLNSDIAMQLDECTPGEATHEQAKKSLQMSLRWAERSKKAFEDLNNPNALFGIIQGAMYEDLREESLRGLEDIGFKGIAIGGLSVGEPKPEMYRMLRALAPMLPEHKPHYLMGVGTPEDLVYGVAHGVDMFDCVMPTRNARNGWLFTRFGDLKIRNAKHRHDKRPLDESCTCYACQNFSRSYLHHLDKVGEILGAQLFTIHNLHFYQVIMAEMREAIEQGKFTDWQARFHENRARGTD

SEQ ID NO: 58013 - protein, 181 aa, Neisseria elongata
  REGION 1..181: note = tr|D4DUG3|D4DUG3_NEIEG tRNA-guanine transglycosylase; OS = Neisseria elongata subsp. glycolytica ATCC 29315; OX = 546263 GN=NEIELOOT_02723 PE=4 SV=1
MYEDLREESLRGLEDIGFKGIAIGGLSVGEPKPEMYRMLRALAPMLPEHKPHYLMGVGTPEDLVYGVAHGVDMFDCVMPTRNARNGWLFTRFGDLKIRNAKHRHDKRPLDESCTCYACQNFSRSYLHHLDKVGEILGAQLFTIHNLHFYQVIMAEMREAIEQGKFTDWQARFHENRARGTD

SEQ ID NO: 58014 - protein, 371 aa, Neisseria flavescens
  REGION 1..371: note = tr|A0A154UAB1|A0A154UAB1_NEIFL Queuine tRNA-ribosyltransferase OS=Neisseria flavescens OX=484; GN = tgt PE=3 SV=1
MLKFTLHKKDGHARRGTLELNHGKIETPVFMPVGTYGSVKAMNPQNLHDIKAQIILGNTYHLWLRPGLEVIEQFGGLHEFIGWDKPILTDSGGFQVFSLSDMRKLTEEGCTFQSPINGDKLFLSPEVSMKIQTVLNSDIVMQLDECTPGEATHSQAQKSLQMSLRWAERSKKAFEDLKNPNALFGIVQGAMYEDLREESLKGLEELDFPGLAIGGLSVGEPKPEMYRMLRAVGPILPEHKPHYLMGVGTPEDLVYGVAHGVDMFDCVMPTRNARNGWLFTRFGDLKIKNAKHKLDKRPIDESCTCYACQNFSRSYLHHLHRVGEILGAQLNTIHNLHFYQVIMAEMREAIEQGKFADWQAQFNENRARGVD

SEQ ID NO: 58015 - protein, 371 aa, Neisseria flavescens
  REGION 1..371: note = tr|C5TIW2|C5TIW2_NEIFL Queuine tRNA-ribosyltransferase OS=Neisseria flavescens SK114; OX = 596320 GN=tgt PE=3 SV=1
MLKFTLHKKDGHARRGTLELNHGKIETPVFMPVGTYGSVKAMNPQNLHDIKAQIILGNTYHLWLRPGLEVIEQFGGLHEFIGWNKPILTDSGGFQVFSLSDMRKLTEEGCTFQSPINGDKLFLSPEVSMKIQTVLNSDIVMQLDECTPGEATHSQAQKSLQMSLRWAERSKKAFEDLKNPNALFGIVQGAMYEDLREESLKGLEELDFPGLAIGGLSVGEPKPEMYRMLRAVGPILPEHKPHYLMGVGTPEDLVYGVAHGVDMFDCVMPTRNARNGWLFTRFGDLKIKNAKHKLDKRPIDESCTCYACQNFSRSYLHHLHRVGEILGAQLNTIHNLHFYQVIMAEMREAIEQGKFTDWQAQFHENRARGVD

SEQ ID NO: 58016 - protein, 371 aa, Neisseria gonorrhoeae
  REGION 1..371: note = sp|Q5F9U5|TGT_NEIG1 Queuine tRNA-ribosyltransferase; OS = Neisseria gonorrhoeae (strain ATCC 700825 / FA 1090); OX = 242231 GN=tgt PE=3 SV=1
MLKFTLHKKDGLARRGTLELNHGKIETPVFMPVGTYGSVKAMNPQNLHDIKAQIILGNTYHLWLRPGLEVVEQFGGLHGFIGWDKPILTDSGGFQVFSLSDMRKLTEEGCTFKSPINGDKLFLSPEISMKIQTVLNSDIAMQLDECTPGETTREQARKSLQMSLRWAERSKKAFEDLKNPNALFGIVQGAMYEDLREESLRGLEEFDFPGLAVGGLSVGEPKPEMYRMLHAVGPMLPERKPHYLMGVGTPEDLVYGVAHGIDMFDCVMPTRNARNGWLFTRFGDLKIKNAKHKPDKRPIDESCTCYACQNFSRAYLHHLHRAGEILGAQLNTIHNLHFYQVIMAEMRDAVEQGKFADWQAQFHENRARGVD

SEQ ID NO: 58017 - protein, 371 aa, Neisseria gonorrhoeae
  REGION 1..371: note = sp|B4RJY2|TGT_NEIG2 Queuine tRNA-ribosyltransferase; OS = Neisseria gonorrhoeae (strain NCCP11945) OX=521006; GN = tgt PE=3 SV=1
MLKFTLHKKDGLARRGTLELNHGKIETPVFMPVGTYGSVKAMNPQNLHDIKAQIILGNTYHLWLRPGLEVVEQFGGLHGFIGWDKPILTDSGGFQVFSLSDMRKLTEEGCTFKSPINGDKLFLSPEISMKIQTVLNSDIAMQLDECTPGETTREQARKSLQMSLRWAERSKKAFEDLKNPNALFGIVQGAMYEDLREESLRGLEEFDFPGLAVGGLSVGEPKPEMYRMLHAVGPILPEHKPHYLMGVGTPEDLVYGVAHGIDMFDCVMPTRNARNGWLFTRFGDLKIKNAKHKLDKRPIDESCTCYACQNFSRAYLHHLHRAGEILGAQLNTIHNLHFYQVIMAEMREAVEQGKFADWQAQFHENRARGVD

SEQ ID NO: 58018 - protein, 371 aa, Neisseria iguanae
  REGION 1..371: note = tr|A0A2P7TYQ9|A0A2P7TYQ9_9NEIS Queuine tRNA-ribosyltransferase OS=Neisseria iguanae OX=90242; GN = tgt PE=3 SV=1
MLKFTLHKKDGLARRGTLELNHGKIETPVFMPVGTYGSVKAMTPQNLHDINARIILGNTYHLWLRPGLEVIEQFGGLHRFIGWDKPILTDSGGFQVFSLSEMRKLTEEGCTFKSPINGDKLFLSPEISMKIQTVLNSDIVMQLDECTPGEATHEQARKSLQMSLRWAERSKKAFEDLNNPNALFGIVQGAMYEDLREESLRGLEQFDFPGLAIGGLSVGEPKPEMYRMLRTVGPVLPEQKPHYLMGVGTPEDLVYGVAHGVDMFDCVMPTRNARNGWLFTRFGDLKIKNAKHRLDNRPLDESCTCYACQNFSRSYLHHLHKVGEILGAQLNTIHNLHFYQAIMAEMREAIDQGKFNDWQAQFHENRAHGMS

SEQ ID NO: 58019 - protein, 371 aa, Neisseria lactamica
  REGION 1..371: note = tr|E4ZEE2|E4ZEE2_NEIL0 Queuine tRNA-ribosyltransferase OS=Neisseria lactamica (strain 020-06) OX=489653 GN=tgt PE=3 SV=1
MLKFTLHKKDGHARRGTLELNHGKIETPVFMPVGTYGSVKAVNPQNLHDIKAQIILGNTYHLWLRPGLEVIGQFGGLHGFIGWDKPILTDSGGFQVFSLSDMRKLTEEGCTFKSPINGDKLFLSPEISMKIQTVLNSDIAMQLDECTPGEATREQARKSLQMSLRWAERSKKAFEDLKNPNALFGIVQGAMYEDLREESLRGLEQFDFPGLAVGGLSVGEPKPEMYRMLRAVGPMLPEHKPHYLMGVGTPEDLVYGVAHGIDMFDCVMPTRNARNGWLFTRFGDLKIKNAKHKSDKRPIDESCTCYACRNFSRAYLHHLHRTGEILGAQLNTIHNLHFYQVIMAEMREAVEQGKFADWQAQFHENRARGTD

SEQ ID NO: 58020 - protein, 371 aa, Neisseria lactamica
  REGION 1..371: note = tr|D0W7W9|D0W7W9_NEILA Queuine tRNA-ribosyltransferase OS=Neisseria lactamica ATCC 23970; OX = 546265 GN=tgt PE=3 SV=1
MLKFTLHKKDGHARCGTLELNHGKIETPVFMPVGTYGSVKAMNPQNLHDIKAQIILGNTYHLWLRPGLEVIGQFGGLHGFIGWDKPILTDSGGFQVFSLSDMRKLTEEGCTFKSPINGDKLFLSPEISMKIQTVLNSDIAMQLDECTPGEATREQARKSLQMSLRWAERSKKTFEDLKNPNALFGIVQGAMYEDLREESLRGLEQFDFPGIAVGGLSVGEPKPEMYRMLRAVGPMLPAHKPHYLMGVGTPEDLVYGVAHGIDMFDCVMPTRNARNGWLFTRFGDLKIKNAKHKSDKRPIDESCTCYACRNFSRAYLHHLHRAGEILGAQLNTIHNLHFYQVIMAEMREAVEQGKFADWQAQFHENRARGTD

SEQ ID NO: 58021 - protein, 371 aa, Neisseria macacae
  REGION 1..371: note = tr|F9EY42|F9EY42_9NEIS Queuine tRNA-ribosyltransferase OS=Neisseria macacae ATCC 33926; OX = 997348 GN=tgt PE=3 SV=1
MLKFTLHKKDGHARRGTLELNHGKIETPVFMPVGTYGSVKAMNPQNLHDIKAQIILGNTYHLWLRPGLEVIEQFGGLHEFIGWNKPILTDSGGFQVFSLSDMRKLTEEGCTFQSPINGDRLFLSPEISMKIQTVLNSDIVMQLDECTPGEATHEQAQKSLQMSLRWAERSKKAFEDLKNPNALFGIVQGAMYEDLREESLHGLEQFDFPGLAIGGLSVGEPKPEMYRMLRAVGPMLPEHKPHYLMGVGTPEDLVYGVAHGVDMFDCVMPTRNARNGWLFTRFGDLKIKNAKHKLDKRPIDESCTCYACQNFSRAYLHHLHRAGEILGAQLNTIHNLHFYQVIMAEMREAIEQGKFADWQAQFHENRARGID

SEQ ID NO: 58022 - protein, 371 aa, Neisseria meningitidis
  REGION 1..371: note = sp|Q9K096|TGT_NEIMB Queuine tRNA-ribosyltransferase; OS = Neisseria meningitidis serogroup B (strain MC58); OX = 122586 GN=tgt PE=3 SV=1
MLKFTLHKKDGLARRGTLELNHGKIETPVFMPVGTYGSVKAMNPQNLHDIKAQIILGNTYHLWLRPGLEVIGQFGGLHGFIGWDKPILTDSGGFQVFSLSDMRKLTEEGCTFKSPINGDKLFLSPEISMKIQTVLNSDIAMQLDECTPGEATREQARKSLQMSLRWAERSKKAFEDLKNPNALFGIVQGAMYEDLREESLRGLEQFDFPGLAVGGLSVGEPKPEMYRMLRAVGPILPEHKPHYLMGVGTPEDLVYGVAHGIDMFDCVMPTRNARNGWLFTRFGDLKIKNAKHKLDKRPIDESCTCYACQNFSRAYLHHLHRTGEILGAQLNTIHNLHFYQVIMAEMREAVEQGKFADWQARFHENRARGTD

SEQ ID NO: 58023 - protein, 371 aa, Neisseria meningitidis
  REGION 1..371: note = sp|A9M374|TGT_NEIM0 Queuine tRNA-ribosyltransferase; OS = Neisseria meningitidis serogroup C (strain 053442); OX = 374833 GN=tgt PE=3 SV=1
MLKFTLHKKDGYARRGTLELNHGKIETPVFMPVGTYGSVKAMNPQNLHDIKAQIILGNTYHLWLRPGLEVIGQFGGLHGFIGWDKPILTDSGGFQVFSLSDMRKLTEEGCTFKSPINGDKLFLSPEISMKIQTVLNSDIAMQLDECTPGEATREQARKSLQMSLRWAERSKKAFEDLKNPNALFGIVQGAMYEDLREESLRGLEQFDFPGLAVGGLSVGEPKPEMYRMLRAVGPILPEHKPHYLMGVGTPEDLVYGVAHGIDMFDCVMPTRNARNGWLFTRFGDLKIKNAKHKLDKRPIDESCTCYACQNFSRAYLHHLHRAGEILGAQLNTIHNLHFYQVIMAEMRDAIEQGKFADWQAQFHENRARGTD

SEQ ID NO: 58024 - protein, 371 aa, Neisseria mucosa
  REGION 1..371: note = tr|A0A2R4ASZ1|A0A2R4ASZ1_NEIMU Queuine tRNA-ribosyltransferase OS=Neisseria mucosa OX=488 GN=tgt; PE = 3 SV=1
MLKFTLHKKDGHARRGTLELNHGKIETPVFMPVGTYGSVKAMNPQNLHDIKAQIILGNTYHLWLRPGLEVIEQFGGLHDFIGWNKPILTDSGGFQVFSLSDMRKLTEEGCTFQSPINGDRLFLSPEISMKIQTVLNSDIVMQLDECTPGEATHEQAQKSLQMSLRWAERSKKAFEDLKNPNALFGIVQGAMYEDLREESLRGLEQFDFPGLAIGGLSVGEPKPEMYRMLRTVGPMLPEHKPHYLMGVGTPEDLVYGVAHGVDMFDCVMPTRNARNGWLFTRFGDLKIKNAKHKLDKRPIDESCTCYACQNFSRAYLHHLHRAGEILGAQLNTIHNLHFYQVIMAEMREAIEQEKFADWQAQFHENRARGVD

SEQ ID NO: 58025 - protein, 371 aa, Neisseria mucosa
  REGION 1..371: note = tr|D2ZZK4|D2ZZK4_NEIMU Queuine tRNA-ribosyltransferase OS=Neisseria mucosa ATCC 25996; OX = 546266 GN=tgt PE=3 SV=1
MLKFTLHKKDGHARRGTLELNHGKIETPVFMPVGTYGSVKAMNPQNLHDIKAQIILGNTYHLWLRPGLEVIEQFGGLHEFIGWNKPILTDSGGFQVFSLSDMRKLTEEGCTFQSPINGDRLFLSPEISMKIQTVLNSDIVMQLDECTPGEATHEQAQKSLQMSLRWAERSKKAFEDLKNPNALFGIVQGAMYEDLREESLRGLEQFDFPGLAIGGLSVGEPKPEMYRMLRAVGPMLPEHKPHYLMGVGTPEDLVYGVAHGVDMFDCVMPTRNARNGWLFTRFGDLKIKNAKHKLDKRPIDESCTCYSCQNFSRAYLHHLHRAGEILGAQLNTIHNLHFYQVIMAEMREAIEQGKFADWQAQFHENRARGVD

SEQ ID NO: 58026 - protein, 371 aa, Neisseria perflava
  REGION 1..371: note = tr|A0A2I1QZ89|A0A2I1QZ89_NEIPE Queuine tRNA-ribosyltransferase OS=Neisseria perflava OX=33053; GN = tgt PE=3 SV=1
MLKFTLHKKDGHARRGTLELNHGKIETPVFMPVGTYGSVKAMNPQNLHDIKAQIILGNTYHLWLRPGLEVIEQFGGLHGFIGWDKPILTDSGGFQVFSLSDMRKLTEEGCTFQSPINGDKLFLSPEVSMKIQTVLNSDIVMQLDECTPGEATHSQAQKSLQMSLRWAERSKKAFEDLKNPNALFGIVQGAMYEDLREESLKGLEELDFPGLAIGGLSVGEPKPEMYRMLRAVGPILPEHKPHYLMGVGTPEDLVYGVAHGVDMFDCVMPTRNARNGWLFTRFGDLKIKNAKHKFDKRPIDESCTCYACQNFSRSYLHHLHRVGEILGAQLNTIHNLHFYQVIMAEMREAIEQGKFADWQAQFHENRARGVD

SEQ ID NO: 58027 - protein, 371 aa, Neisseria polysaccharea
  REGION 1..371: note = tr|E2PGJ4|E2PGJ4_NEIPO Queuine tRNA-ribosyltransferase OS=Neisseria polysaccharea ATCC 43768 OX=546267 GN=tgt PE=3 SV=1
MLKFTLHKKDGLARRGTLELNHGKIETPVFMPVGTYGSVKAMNPQNLHDIKAQIILGNTYHLWLRPGLEVIGQFGGLHGFIGWDKPILTDSGGFQVFSLSDMRKLTEEGCTFKSPINGDKLFLSPEISMKIQTVLNSDIAMQLDECTPGEATREQAKKSLQMSLRWAERSKKAFEDLKNPNALFGIVQGAMYEDLREESLRGLEEFDFPGLAVGGLSVGEPKPEMYRMLRAVGPILPEHKPHYLMGVGTPEDLVYGVAHGVDMFDCVMPTRNARNGWLFTRFGDLKIKNAKHKLDKRPIDESCTCYACQNFSRSYLHHLHRVGEILGAQLNTIHNLHFYQVIMAEMREAIEQGKFTDWQAQFHENRARGVD

SEQ ID NO: 58028 - protein, 400 aa, Neisseria shayeganii
  REGION 1..400: note = tr|G4CGX3|G4CGX3_9NEIS Queuine tRNA-ribosyltransferase OS=Neisseria shayeganii 871; OX = 1032488 GN=tgt PE=3 SV=1
MCPAAGYLKTRCGKIRYNPPPCFRKEPPAMLQFTLHKKDGHARRGTLTLNHGSIETPVFMPVGTYGSVKAMTPQNLHDIQAQIILGNTYHLWLRPGLDVIEQFGGLHQFIGWNKPILTDSGGFQVFSLSDMRQLTEEGCTFKSPINGDKLFLSPEISMKIQTVLNSDIAMQLDECTPGEATHEQARQSLQMSLRWAERSKKAFEDLNNPNALFGIVQGAMYEDLREESLRGLEELDFPGLAIGGLSVGEPKPEMYRMLRAVGPILPEHKPHYLMGVGTPEDLVYGVAHGIDMFDCVMPTRNARNGWLFTRFGDIKIKNAKHKHDTRPLDESCSCYTCRNFSRAYLYHLHKAGEILGAQLNTIHNLHFYQVIMEEMREAIEQGTFADWQAQFHENRARGSD

SEQ ID NO: 58029 - protein, 371 aa, Neisseria sicca
  REGION 1..371: note = tr|C6M4L5|C6M4L5_NEISI Queuine tRNA-ribosyltransferase OS=Neisseria sicca ATCC 29256; OX = 547045 GN=tgt PE=3 SV=1
MLKFTLHKKDGHARRGTLELNHGKIETPVFMPVGTYGSVKAMNPQNLHDIKAQIILGNTYHLWLRPGLEVIEQFGGLHDFIGWDKPILTDSGGFQVFSLSDMRKLTEEGCTFQSPINGDRLFLSPEISMKIQTVLNSDIVMQLDECTPGEATHEQAQKSLQMSLRWAERSKKAFEDLKNPNALFGIVQGAMYEDLREESLRGLEQFDFPGLAIGGLSVGEPKPEMYRMLRAVGPMLPEHKPHYLMGVGTPEDLVYGVAHGVDMFDCVMPTRNARNGWLFTRFGDLKIKNAKHKLDKRPIDESCTCYACQNFSRAYLHHLHRVGEILGAQLNTIHNLHFYQVIMAEMREAIEQGKFADWQVQFHENRARGVD

SEQ ID NO: 58030 - protein, 371 aa, Neisseria sicca
  REGION 1..371: note = tr|I2NME3|I2NME3_NEISI Queuine tRNA-ribosyltransferase OS=Neisseria sicca VK64 OX=1095748; GN = tgt PE=3 SV=1
MLKFTLHKKDGHARRGTLELNHGKIETPVFMPVGTYGSVKAMNPQNLHDIKAQIILGNTYHLWLRPGLEVIEQFGGLHDFIGWNKPILTDSGGFQVFSLSDMRKLTEEGCTFQSPINGDRLFLSPEISMKIQTVLNSDIVMQLDECTPGEATHEQAQKSLQMSLRWAERSKKAFEDLKNPNALFGIVQGAMYEDLREESLRGLEQFDFPGLAIGGLSVGEPKPEMYRMLRTVGPMLPEHKPHYLMGVGTPEDLVYGVAHGVDMFDCVMPTRNARNGWLFTRFGDLKIKNAKHKLDKRPIDESCTCYACQNFSRAYLHHLHRVGEILGAQLNTIHNLHFYQVIMAEMREAIEQGKFADWQAQFHENRARGVD

SEQ ID NO: 58031 - protein, 371 aa, Neisseria sp.
  REGION 1..371: note = tr|A0A1F1HZG2|A0A1F1HZG2_9NEIS Queuine tRNA-ribosyltransferase OS=Neisseria sp. HMSC073G10; OX = 1739369 GN=tgt PE=3 SV=1
MLKFTLHKKDGHARRGTLELNHGKIETPVFMPVGTYGSVKAMNPQNLHDIKAQIILGNTYHLWLRPGLEVIEQFGGLHEFIGWDKPILTDSGGFQVFSLSDMRKLTEEGCTFQSPINGDKLFLSPEVSMKIQTVLNSDIVMQLDECTPGEATHSQAQKSLQMSLRWAERSKKAFEDLKNPNALFGIVQGAMYEDLREESLKGLEELDFPGLAIGGLSVGEPKPEMYRMLRAVGPILPEHKPHYLMGVGTPEDLVYGVAHGVDMFDCVMPTRNARNGWLFTRFGDLKIKNAKHKLDKRPIDESCTCYACQNFSRSYLHHLHRVGEILGAQLNTIHNLHFYQVIMAEMREAIEQGKFADWQAQFHENRARGVD

SEQ ID NO: 58032 - protein, 371 aa, Neisseria sp.
  REGION 1..371: note = tr|A0A1E8SYD4|A0A1E8SYD4_9NEIS Queuine tRNA-ribosyltransferase OS=Neisseria sp. HMSC072F04; OX = 1739348 GN=tgt PE=3 SV=1
MLKFTLHKKDGYARRGTLELNHGKIETPVFMPVGTYGSVKAMNPQNLHDIKAQIILGNTYHLWLRPGLEVIEQFGGLHEFIGWDKPILTDSGGFQVFSLSDMRKLTEEGCTFQSPINGDRLFLSPEISMKIQTVLNSDIVMQLDECTPGEATHEQAQKSLQMSLRWAERSKKAFEDLKNPNALFGIVQGAMYEDLRAESLRGLEQFDFPGLAIGGLSVGEPKPEMYRMLRAVGPMLPEHKPHYLMGVGTPEDLVYGVAHGVDMFDCVMPTRNARNGWLFTRFGDLKIKNAKHKLDKRPIDESCTCYACQNFSRAYLHHLHRTGEILGAQLNTIHNLHFYQVIMAEMREAIEQGKFADWQAQFHENRARGVD

SEQ ID NO: 58033 - protein, 371 aa, Neisseria subflava
  REGION 1..371: note = tr|A0A4D7WZI8|A0A4D7WZI8_NEISU Queuine tRNA-ribosyltransferase OS=Neisseria subflava OX=28449; GN = tgt PE=3 SV=1
MLKFTLHKKDGHARRGTLELNHGKIETPVFMPVGTYGSVKAMNPQNLHDIKAQIILGNTYHLWLRPGLEVIEQFGGLHEFIGWDKPILTDSGGFQVFSLSDMRKLTEEGCTFQSPINGDKLFLSPEVSMKIQTVLNSDIVMQLDECTPGEATHSQAQKSLQMSLRWAERSKKAFEDLKNPNALFGIVQGAMYEDLREESLKGLEELDFPGLAIGGLSVGEPKPEMYRMLRAVGPILPEHKPHYLMGVGTPEDLVYGVAHGVDMFDCVMPTRNARNGWLFTRFGDLKIKNTKHKLDKRPIDESCTCYACQNFSRSYLHHLHRVGEILGAQLNTIHNLHFYQVIMAEMREAIEQGKFTDWQAQFHENRARGVD

SEQ ID NO: 58034 - protein, 371 aa, Neisseria subflava; identical to SEQ ID NO: 58031
  REGION 1..371: note = tr|D3A3I3|D3A3I3_NEISU Queuine tRNA-ribosyltransferase OS=Neisseria subflava NJ9703; OX = 546268 GN=tgt PE=3 SV=1

SEQ ID NO: 58035 - protein, 404 aa, Neisseria wadsworthii
  REGION 1..404: note = tr|G4CQG1|G4CQG1_9NEIS Queuine tRNA-ribosyltransferase OS=Neisseria wadsworthii 9715; OX = 1030841 GN=tgt PE=3 SV=1
MIIFAFLARCLRAFRQAFQVFGYNLRQINYMTINMLKFTLHKTDGHARRGTLELNHGTIETPVFMPVGTYGSVKAMTPQNLHDIRAQIILGNTYHLWLRPGLEVIEQFSGLHQFIGWNKPILTDSGGFQVFSLSDMRKLTEEGCTFKSPINGDKLFLSPEISMKIQTVLNSDIVMQLDECTPGEATHEQARKSLQMSLRWAERSKKAFEDLRNPNALFGIVQGAMYEDLREESLKGLEAFDFPGLAIGGLSVGEPKPEMYRMLRAVGPILPAHKPHYLMGVGTPEDLVCGVAHGVDMFDCVMPTRNARNGWLFTRFGDLKIKNAVHKHDTRPIDESCSCYACQNFSRAYLHHLHKTGEILGAQLNTIHNLHFYQVIMAEMREAIEQGKFADWQAQFHENRARGV

SEQ ID NO: 58036 - protein, 372 aa, Neisseria weaveri
  REGION 1..372: note = tr|A0A448VJ48|A0A448VJ48_9NEIS Queuine tRNA-ribosyltransferase OS=Neisseria weaveri OX=28091; GN = tgt PE=3 SV=1
MLKFTLHKKDGLARRGTLELNHGKIETPVFMPVGTYGSVKAMTPQNLHDIKAQIILGNTYHLWLRPGLEVIEQFGGLHQFIGWDKPILTDSGGFQVFSLSDMRKLTEEGCTFKSPLNGDKLFLSPEISMKIQTVLNSDIVMQLDECTPGEASHDQARKSLQMSLRWAERSKKAFEDLKNPNALFGIVQGAMYEDLREESLKGLEQFDFPGLAIGGLSVGEPKPEMYRMLRAVGPMLPEHKPHYLMGVGTPEDLVYGVAHGMDMFDCVMPTRNARNGWLFTRFGDLKIKNAKHKLDTRPVDESCTCYACQNFSRAYLQHLHRTGEILGAQLNTIHNLHFYQAIMAEMREAIEQGTFSDWQAKFHENRSRGVDA

SEQ ID NO: 58037 - protein, 372 aa, unidentified
  source 1..372: note = Neisseria zalophi
  REGION 1..372: note = tr|A0A5J6PXU7|A0A5J6PXU7_9NEIS tRNA guanosine(34) transglycosylase Tgt OS=Neisseria zalophi OX=640030; GN = D0T92_04935 PE=4 SV=1
MLKFTLHKTDGHARRGTLELNHGTIETPVFMPVGTYGSVKAMTPQNLHDIQAQIILGNTYHLWLRPGLEVIEQFGGLHDFIGWNKPILTDSGGFQVFSLAEMRKLTEEGCTFRSPINGDKLFLSPEISMKIQTVLNSDIAMQLDECTPGEADHKQAQKSLQMSLRWADRSKKAFEDLKNPNALFGIVQGAMFEDLREESLKGLEEFDFPGLAIGGLSVGEPKPEMYRMMRAVGPMLPAHKPHYLMGVGTPEDLVYGVAHGIDMFDCVMPTRNARNGWLFTRFGDIKIKNAKHKLDNRPLDESCTCYTCQNFSRAYLHHLHKAGEILGAQLNTIHNLHFYQTIMAEMREAIEQGRFSDWQAEFHENRARKADA

SEQ ID NO: 58038 - protein, 371 aa, Neisseria zoodegmatis
  REGION 1..371: note = tr|A0A378WH79|A0A378WH79_9NEIS Queuine tRNA-ribosyltransferase OS=Neisseria zoodegmatis OX=326523; GN = tgt PE=3 SV=1
MLKFTLHKTDGHARRGTLELNHGTIETPVFMPVGTYGSVKAMTPANLHDIKAQIILGNTYHLWLRPGLEVIEQFGGLHQFIGWNKPILTDSGGFQVFSLSDMRQLTEEGCTFKSPINGDKLFLSPEISMKIQTVLNSDIAMQLDECTPGEATHEQARKSLQMSLRWAERSKKAFEDLNNPNALFGIVQGAMYEDLREESLKGLEEFDFPGLAIGGLSVGEPKPEMYRMLRAVGPMLPAHKPHYLMGVGTPEDLVYGVAHGVDMFDCVMPTRNARNGWLFTRFGDIKIKNAKHKHDTRPLDESCTCYACQNFSRAYLYHLHKAGEILGAQLNTIHNLHFYQVIMAEMREAIEQGKFAEWQAQFHENRARGTD

SEQ ID NO: 58039 - protein, 371 aa, Neisseria zoodegmatis
  REGION 1..371: note = tr|A0A1X3CUH9|A0A1X3CUH9_9NEIS Queuine tRNA-ribosyltransferase OS=Neisseria zoodegmatis OX=326523; GN = tgt PE=3 SV=1
MLKFTLHKTDGHARRGTLELNHGTIETPVFMPVGTYGSVKAMTPANLHDIKAQIILGNTYHLWLRPGLEVIEQFGGLHQFIGWSKPILTDSGGFQVFSLSDMRKLTEEGCTFKSPINGDKLFLSPEISMKIQTVLNSDIAMQLDECTPGEATHEQARQSLQMSLRWAERSKKAFEDLKNPNALFGIVQGAMYEDLREESLKGLEAFDFPGLAIGGLSVGEPKPEMYRMLRAVGPMLPAHKPHYLMGVGTPEDLVYGVAHGVDMFDCVMPTRNARNGWLFTRFGDIKIKNAKHKHDTRPLDESCTCYACQNFSRAYLYHLHKAGEILGAQLNTIHNLHFYQVIMAEMREAIEQGKFAEWQAQFHENRARGTD

SEQ ID NO: 58040 - protein, 372 aa, unidentified
  source 1..372: note = Neisseriaceae bacterium
  REGION 1..372: note = tr|A0A2I7N8G6|A0A2I7N8G6_9NEIS Queuine tRNA-ribosyltransferase OS=Neisseriaceae bacterium DSM 100970 OX=2052837 GN=tgt PE=3 SV=1
MLKFELLKKDGNARRGRVHLNHGVVETPIFMPVGTYGAVKALAPTDLEASEAQIILGNTFHLWLRPGLDIISKFNGLHKFNGWDKPILTDSGGFQVFSLGKLRKIKEEGVYFQSPVDGSKLFLSPEKSMEIQTVLNSDIVMIFDECTPYPADYKTARESMELSLRWAQRSRDAFNEYNNPNALFGIVQGGMYMDLRKQSLDGLMQIGFDGIAIGGLSVGEPKEEMERMLSELVDILPEDKPHYLMGVGTPEDLVYGVKNGIDMFDCVMPTRNARNGWLFTRFGDVKIKNAKYKDDTAPLDETCSCYTCKNFSRAYLHHLFKIGEILGSRLNTIHNIHYYLQLMAEIRQAIDEGKFSQFEQRFYAERSQLASN

SEQ ID NO: 58041 - protein, 375 aa, unidentified
  source 1..375: note = Neisseriaceae bacterium
  REGION 1..375: note = tr|A0A431HSL7|A0A431HSL7_9NEIS Queuine tRNA-ribosyltransferase OS=Neisseriaceae bacterium; OX = 2014784 GN=tgt PE=3 SV=1
MLKFEILEQDGYARLGKMTLNHGVVETPIFMPVGTYGAVKAMSPQELDESEAQIILGNTFHLWLRPGNDIISKFGGLHKFNGWSKPILTDSGGFQVFSLGKLRKIKEEGVYFQNPIDGSKLFLSPEKSMEIQTVLNSDIVMIFDECTPYPADYNTAKQSMELSLRWAERSRQAFDEYKNPNALFGIVQGGMYADLRQHSLNELMKIGFDGIAIGGLSVGEPKEEMERMLDEMKDMLPKEKPHYLMGVGTPEDLIYGVSKGIDMFDCVMPTRNARNGWLFTRFGDVKIKNAKYKDDTKPLDSSCDCYTCKNFSRAYLHHLFKIGEILGARLHTIHNIHYYLALMKEVRQAIKDKRFNDFVAEFHENRQKLKQGIVE

SEQ ID NO: 58042 - protein, 374 aa, unidentified
  source 1..374: note = Neisseriales bacterium
  REGION 1..374: note = tr|A0A5C8B9D8|A0A5C8B9D8_9NEIS Queuine tRNA-ribosyltransferase OS=Neisseriales bacterium; OX = 2053582 GN=tgt PE=3 SV=1
MLKFELLKKDGNARRGRVHLNHGVVETPIFMPVGTYGAVKALAPTDLEASEAQIILGNTFHLWLRPGLDIISKFNGLHKFNGWDKPILTDSGGFQVFSLGKLRKIKEEGVYFQSPVDGSKLFLSPEKSMEIQTVLNSDIVMIFDECTPYPADYKTARESMELSLRWAQRSRDAFNEYNNPNALFGIVQGGMYIDLRKQSLDGLMQIGFDGIAIGGLSVGEPKEEMERMLSELVDILPEDKPHYLMGVGTPEDLVYGVKHGIDMFDCVMPTRNARNGWLFTRFGDVKIKNAKYKDDTAPLDETCSCYTCKNFSRAYLHHLFKIGEILGSRLNTIHNIHYYLQLMAEIRQAIDEGKFSQFEERFHSERSQVGNISV

SEQ ID NO: 58043 - protein, 373 aa, unidentified
  source 1..373: note = Neisseriales bacterium
  REGION 1..373: note = tr|A0A5C8BBV0|A0A5C8BBV0_9NEIS Queuine tRNA-ribosyltransferase OS=Neisseriales bacterium; OX = 2053582 GN=tgt PE=3 SV=1
MLKFELLKKDGHARLGRVHLNHGVVETPIFMPVGTYGAVKAMSPFELEQSNAQIILGNTFHLWLRPGLDVIGKFGGLHKFNGWNKPILTDSGGFQVFSLGKLRKIKEEGVHFQNPIDGSKLFLSPEKSMEIQTVLNSDIAMIFDECTPYPADYATARESMELSLRWAERSRKAFDEYKNPNALFGIIQGGMFNDLRQKSLTELMNIGFDGMAIGGLSVGEPKEEMERMLDEMKDMLPEHKPHYLMGVGTPEDLVYGVSKGIDMFDCVMPTRNARNGWLFTRFGDVKIKNAQYKDDTRPLDESCSCYTCQNFSRAYLHHLFKIGEILGARLNTIHNIHYYLTLMSEIREAISQGQFSSFTEQFLANRQILKKQK

SEQ ID NO: 58044 - protein, 386 aa, Neoasaia chiangmaiensis
  REGION 1..386: note = tr|A0A1U9KSL9|A0A1U9KSL9_9PROT Queuine tRNA-ribosyltransferase OS=Neoasaia chiangmaiensis; OX = 320497 GN=tgt PE=3 SV=1
MSPMRWMTEATCGNARAGHLHTAHGIVPTPTFMPVGTAGTVKAMTMDAVRSTGAGIVLGNTYHLMLRPGAERVRKMGGLHRMMDWSGPILTDSGGFQVMSLGALRKLDQDGVTFNSHIDGSKHRLTPEISTDIQHALDATITMCFDECPALPATPERIEQSMQLSMRWAARSREAFVPRLGYGQFGIVQGGTERELRERSVRALTDIGFEGYAIGGLAVGEGQELMFSTLDYTTPLLPGTHARYLMGVGTPDDLLGAVERGVDMFDCVMPTRAGRTARAYTERGTLNMRNARHAEDNRPISPHCDCLACTRHSRAYLHHLFRNNEILGPMLLTWHNLAYYQRLMRTIRAAIVASNLPAVAAGLRADWAAGDWTENEMPQPAIPPVP

SEQ ID NO: 58045 - protein, 366 aa, Neochlamydia sp.
  REGION 1..366: note = tr|A0A0C1KAT8|A0A0C1KAT8_9BACT Queuine tRNA-ribosyltransferase OS=Neochlamydia sp. EPS4; OX = 1478175 GN=tgt PE=3 SV=1
MKFTICKADACSRARVGIIETAHGAIETPVFMPVGTRAAVKTLTNQHLLDMKAQIILGNTYHLMLRPGVEILAKAGGLHAFMNWQSPLLTDSGGFQVFSLSALNKVTDKGVHFQSHIDGSRHFLGPDESMFIQKTIGSDIVMAFDECTPYPCEKKVVEKSLERTHRWAERCRNYDLQPHQNLFGIVQGGVHADLRQQSAQFLANLDFQGYAIGGLSVGEPASVMYEVLDHTVPFMPVEKPRYLMGVGTPRNLVESVMRGVDMFDCVMPTRNARNGTAFTWAGKVQIKAARYAEDFSPLDPSTPSYTSQFSKAYLRHLLNVDEMTGLTLVTLQNLAFYLDFMQKLREAIKNDTLADFYQKVCALYPH

SEQ ID NO: 58046 - protein, 366 aa, Neochlamydia sp.
  REGION 1..366: note = tr|A0A3Q9XV44|A0A3Q9XV44_9BACT Queuine tRNA-ribosyltransferase OS=Neochlamydia sp. S13 OX=1353976; GN = tgt PE=3 SV=1
MKFTICKADACSRARVGIIETAHGAIETPVFMPVGTRAAVKTLTNQHLLDMKAQIILGNTYHLMLRPGVEILGKAGGLHAFMNWQSPLLTDSGGFQVFSLSALNKVTDKGVHFQSHIDGSRHFLGPDESMFIQKTIGSDIVMAFDECTPYPCEKKIVEKSLERTHRWAERCRNYDLQPHQNLFGIVQGGVHADLRQQSAQFLANLDFQGYAIGGLSVGEPASVMYEVLDHTVPFMPVEKPRYLMGVGTPRNLVESVMRGVDMFDCVMPTRNARNGTAFTWAGKVQIKAARYAEDFSPLDPSTPSYTSQFSKAYLRHLLNVDEMTGLTLVTLQNLAFYLDFMQKLREAIKNDTLADFYQKVCALYPH

SEQ ID NO: 58047 - protein, 404 aa, Neokomagataea sp.
  REGION 1..404: note = tr|A0A506URM3|A0A506URM3_9PROT Queuine tRNA-ribosyltransferase OS=Neokomagataea sp. Jb2; OX = 2558904 GN=tgt PE=3 SV=1
MTQQHDGLLSQDQALPRPDLTPSDRLYWQEEGRCSQARAGWLHTRHGRVPTPTFMPVGTVGTVKGMTADAVRATGAGVVLGNTYHLMLRPGADRVQKLGGLHRMMDWPGPILTDSGGFQVMSLGPLRKMDEDGVTFRSHIDGSSHRLTPEISTDIQFKLDATISMAFDECPALPATKERLEESMERSMRWAARSREAFTPRPGYGQFGIVQGGTEQDLRARSVKALTEIGFEGYAIGGLAVGEGQELMFSTLDFTTPLLPQDKPRYLMGVGTPDDLLGSVMRGCDMFDCVMPSRAGRTARAYTDRGPLNLRNARFAEDTRPLTPHEDGPLARTSRAYLHHLFRANEMLGPMLLTWHNLAYYQRLMRRIRAAIMNGTLEALAEQLRADWAQGDWSPEEWPLPHYS

SEQ ID NO: 58048 - protein, 379 aa, Neokomagataea tanensis
  REGION 1..379: note = tr|A0A4Y6VAY8|A0A4Y6VAY8_9PROT Queuine tRNA-ribosyltransferase OS=Neokomagataea tanensis; OX = 661191 GN=tgt PE=3 SV=1
MVWKPESTCGQARAGHLHTRHGTVPTPTFMPVGTVGTVKGITTDSVRSTGAGIILGNTYHLMLRPTAERVAKLGGLHRMMDWQGPILTDSGGFQVMSLGALRKLDEDGVTFRSHIDGSAHRLTPEISTDIQHKLDATITMAFDECPALPATAESLRKSMEMSMRWAARSREAFVARPGYGQFGIVQGGTERDLREYSIKALTDIGFEGYAIGGLAVGEGQELMFSTLDFTTPMMPHDKARYLMGVGTPDDLLGAVMRGVDMFDCVMPSRAGRTARAYTERGTINLRNARFAEDTRPITPHDDSPMAGRYSRAYLHHLFRAGEMLGPMLLTWHNLAYYQRLMRQIRAAIVEGTLDELAVTLRAGWAQGDWSEDEWPMPVY

SEQ ID NO: 58049 - protein, 434 aa, unidentified
  source 1..434: note = Neomicrococcus aestuarii
  REGION 1..434: note = tr|A0A1L2ZRE0|A0A1L2ZRE0_9MICC Queuine tRNA-ribosyltransferase OS=Neomicrococcus aestuarii; OX = 556325 GN=tgt PE=3 SV=1
MNPEPETFPAPVDYPESHEKQSEFGFEIGTRLTGANGERFEGRTGVIKTPHGDIKTPAFIAVGTKASVKALTPDQVRELGAQAVLSNAYHLYLAPGADVLDEAGGLSAFMNWNGPTYTDSGGFQVMSLGSGFKKIIDMTGTGPGGDDAVAPGKERLANVDNDGVWFKSHLDGSMHRFTPEVSMQVQHQIGADIMFAFDELTTLHNSRAYQEEALERTRLWARRCVKEHFRLTDEREGKDYQALFGVIQGAQYEDLRRKASQDLGEMPFDGFGIGGALEKENLGTIVRWCAEELPENKPRHLLGISEPDDVFTAIENGADTFDCVSPTRVARNSAFYSPNGRFNLTGKRYKRDFSPLVDGCGCYTCQNFTRAYIHHLHKANELLSHTLISIHNEYFTVGLVDAAREAIENGTFFELKDRVLSAYYAGGPDPQGLE

SEQ ID NO: 58050 - protein, 376 aa, unidentified
  source 1..376: note = Neorhizobium alkalisoli
  REGION 1..376: note = tr|A0A561QUW2|A0A561QUW2_9RHIZ Queuine tRNA-ribosyltransferase OS=Neorhizobium alkalisoli; OX = 528178 GN=tgt PE=3 SV=1
MTETFQFNLKATDGGARLGEITMPRGTIRTPAFMPVGTVGTVKAMYLDQVRDTGADIILGNTYHLMLRPGAERVARLGGLHDLIRWKHPILTDSGGFQVMSLSGLRKLDEKGVTFKSHVDGSLHHMSPERSIEIQGLLGSDIQMQLDECVALPAEPKEIERAMELSLRWAERCRVAFGEQPGKAMFGIVQGGDQPALRIRSAEGLKQLDLKGYAVGGLAVGEPQDVMLSMLETTLPVLPTEKPRYLMGVGTPDDMLKSVARGIDMFDCVMPTRSGRHGLAFTRRGKVNIRNARHAEDKRPLDEESNCPAARDYSRAYLHHLMRADEALGGMLLSWNNLNYYQDLMKGIRQAIAEGRFADFYAETQEAWAKGDIDPI

SEQ ID NO: 58051 - protein, 376 aa, unidentified
  source 1..376: note = Neorhizobium galegae
  REGION 1..376: note = tr|A0A0T7HLT0|A0A0T7HLT0_RHIGA Queuine tRNA-ribosyltransferase OS=Neorhizobium galegae bv. orientalis OX=323655 GN=tgt PE=3 SV=1
MTETFQFNLKATDGGARLGEITMPRGTIRTPAFMPVGTVGTVKAMYLDQVRDTGADIILGNTYHLMLRPGAERVARLGGLHELIRWKHPILTDSGGFQVMSLSGLRKLDEKGVTFKSHVDGSLHHMSPERSIEIQGLLGSDIQMQLDECVALPAEPKEIERAMELSLRWAERCRVAFGEQPGKAMFGIVQGGDQPELRIRSAEGLKQLDLKGYAVGGLAVGEPQDVMLKMLETTLPVLPFEKPRYLMGVGTPDDMLKSVARGIDMFDCVMPTRSGRHGLAFTRRGKVNIRNARHAEDMRPLDEESNCPAARDYSRAYLHHLVRADEALGGMLLSWNNLNYYQDLMKGIRQAIAEGRFADFYAETQEMWAKGDIDPV

SEQ ID NO: 58052 - protein, 376 aa, unidentified
  source 1..376: note = Neorhizobium galegae
  REGION 1..376: note = tr|A0A0T7FPI9|A0A0T7FPI9_RHIGA Queuine tRNA-ribosyltransferase OS=Neorhizobium galegae bv. officinalis OX=323656 GN=tgt PE=3 SV=1
MTETFQFNLKATDGGARLGEITMPRGTIRTPAFMPVGTVGTVKAMYLDQVRDTGADIILGNTYHLMLRPGAERVARLGGLHELIRWKHPILTDSGGFQVMSLSGLRKLDEKGVTFKSHVDGSLHHMSPERSIEIQGLLGSDIQMQLDECVALPAEPKEIERAMELSLRWAERCRVAFGDQPGKAMFGIVQGGDQPELRIRSAEGLKQLDLKGYAVGGLAVGEPQDVMLKMLETTLPVLPFEKPRYLMGVGTPDDMLKSVARGIDMFDCVMPTRSGRHGLAFTRRGKVNIRNARHAEDMRPLDEESSCPAARDYSRAYLHHLVRADEALGGMLLSWNNLNYYQDLMKGIRQAIAEGRFADFYAETQEMWARGDIDPV

SEQ ID NO: 58053 - protein, 377 aa, unidentified
  source 1..377: note = Neorhizobium sp.
  REGION 1..377: note = tr|A0A386E0X1|A0A386E0X1_9RHIZ Queuine tRNA-ribosyltransferase OS=Neorhizobium sp. NCHU2750; OX = 1825976 GN=tgt PE=3 SV=1
MTTENFQFTLKKTDGGARLGEVSMPRGTIRTPAFMPVGTVGTVKAMYLDQVRDTGADIILGNTYHLMLRPGAERVARLGGLHELIRWKHPILTDSGGFQVMSLSGLRKLDEKGVTFKSHVDGSLHHMSPERSIEIQGLLGSDIQMQLDECVALPAEPKEIERAMELSLRWAERCRVAFGDQPGKAMFGIVQGGDQPALRIRSAEGLKQLDLKGYAVGGLAVGEPQDVMLSMLETTLPVLPTEKPRYLMGVGTPDDILKSVARGIDMFDCVMPTRSGRHGLAFTRRGKVNIRNARHAEDMRPLDEESDCPAARDYSRAYLHHLCRSDEALGGMLLSWNNLHYYQDLMKGIRKSIEEGRFADFYAETQEAWARGDIDKL

SEQ ID NO: 58054 - protein, 376 aa, unidentified
  source 1..376: note = Neorhizobium sp.
  REGION 1..376: note = tr|A0A4R3X8M3|A0A4R3X8M3_9RHIZ Queuine tRNA-ribosyltransferase OS=Neorhizobium sp. S3-V5DH; OX = 2485166 GN=tgt PE=3 SV=1
MTETFQFNLKATDGGARLGEITNPRGAIRTPAFMPVGTVGTVKAMYLDQVRDTGADIILGNTYHLMLRPGAERVARLGGLHNLIRWSHPILTDSGGFQVMSLSGLRKLDEKGVTFKSHVDGSLHHMSPERSIEIQGLLGSDIQMQLDECVALPAEPKEIERAMELSLRWAERCRVAFGDQPGKAMFGIVQGGDQPDLRIRSAEGLKQLDLKGYAVGGLAVGEPQDVMLKMLETTLPVLPAEKPRYLMGVGTPDDILKSVARGIDMFDCVMPTRSGRHGLAFTRRGKVNIRNARHAEDLRPLDEESDCPAARDYSRAYLHHLVRSDEALGGMLLSWNNLHYYQDLMKGIRQSIAEGRFGDFYAETQETWAKGDIDPV

SEQ ID NO: 58055 - protein, 402 aa, Neorickettsia helminthoeca
  REGION 1..402: note = tr|X5HKZ7|X5HKZ7_9RICK Queuine tRNA-ribosyltransferase OS=Neorickettsia helminthoeca str. Oregon OX=1286528 GN=tgt PE=3 SV=1
MTDSETFPRFEYIQNGAGPSRIGTITTKHGVVHTPAFIFCATRGTIKGLGTHQVKEAGSQIILSNTYHLMLKPGGEYIENAGGIQRFTGWDGPMLTDSGGFQAFSLNSKDTAKVDELKRKYSCKQNKSGIIEISEEGIECKSYYDGTRFFLSPEKSIDVQIKLGADLIVVLDECTKFSKDKTYNTKALRRNERWADRSLAYAKMHKKRWQGLYGIIHGGTFNDLRRESAAFNNSREFFGHAIGGSLGRDKKEMMDVVEMSMEDLSKERPVHLLGIGGISDIFMGVARGIDTFDCVHPTRIARHGGALVKHSSSLEYINREYINLGNSVFKRCDLPIEESCDCKICKTYSRGYLNYLLSVKENIVFSLITYHNVYFMNVLMEKIRYTLKNNLDLKQLQKHYCG

SEQ ID NO: 58056 - protein, 408 aa, Neorickettsia risticii
  REGION 1..408: note = tr|C6V3P7|C6V3P7_NEORI Queuine tRNA-ribosyltransferase OS=Neorickettsia risticii (strain Illinois) OX=434131 GN=tgt PE=3 SV=1
MSTQDKMHESEVFPRFNYLKNGKNRSRTGRIITKHGVIHTPAFIFCATRAAIKGLEIHQVKEAGSQVILSNTYHLMLKPGGEHIEKAGGIQKFIGWNGPMLTDSGGFQAFSLNTKDETNVQELKRKYSRTFNSSGIVAISEEGITCKSYYDGAKFFLSPEKSMDVQIKLGADLIVVLDECTKFSLDREYNKEALERNERWADRSLLYAEKNRKAWQGVYGIIHGGTFEDLRKESVEFNNSREFFGNAIGGSLGRTKEEMKEVVEMSITNLNRERPVHLLGVGGLSDIFMGVSMGVDTFDCVHPTRIARHGGALIKYSSYPGNNSREYINLRNNIFKSSDSPIDESCDCKICETYSCGYLNYLLSVKENIAFNMITYHNIYFINKLMERIRHTIEEESDLEELKKLYCG

SEQ ID NO: 58057 - protein, 402 aa, Neorickettsia sennetsu
  REGION 1..402: note = tr|Q2GF37|Q2GF37_NEOSM Queuine tRNA-ribosyltransferase OS=Neorickettsia sennetsu (strain ATCC VR-367 / Miyayama) OX=222891 GN=tgt PE=3 SV=1
MHESEVFPRFNYLENGKTRSRRGKITTKHGVIHTPAFIFCATRAAIKGLEIHQVKEAGSQVILSNTYHLMLKPGGEHIEKAGGIQKFMGWNGPMLTDSGGFQAFSLNTKDETNIQELKRKYSKAFNSSGILAISEEGITCKSYYDGAKFFLSPEKSMDVQIKLGADLIVVLDECTKFSLDREYNKEALERNKRWADRSLTYAEKNRKAWQGVYGIIHGGTFEDLRKESVEFNNSRELFGNAIGGSLGRTKEEMKEVVEMSVTNLNRERPIHLLGIGGISDIFTGVSMGVDTFDCVHPTRIARHGGALIKYSSHPENNGREYINLRNNIFKNSDSSIDESCDCKICETYSCGYLNYLLSVKENIAFNMITYHNIYFMNKLMERIRHTIEKDLDLEELKKLYCG

SEQ ID NO: 58058 - protein, 397 aa, Neorickettsia sp.
  REGION 1..397: note = tr|A0A151A0W6|A0A151A0W6_9RICK Queuine tRNA-ribosyltransferase OS=Neorickettsia sp. 179522; OX = 1714371 GN=tgt PE=3 SV=1
MFPRFNYLEYGKKRSRTGRIITKHGVIHTPAFIFCATRAAIKGLEIHQVKEAGSQIILSNTYHLMLKPGGEHIEKAGGIQKFTGWNGPMLTDSGGFQAFSLNTKDKTNVQELKRKYSRTSNSSGIIAISEEGITCKSYYDGTKFFLSPEKSMDVQIKLGADLIVVLDECTKFSLEKEYNKEALKRNERWADRSLSYAEKNRKAWQGVYGIIHGGTFEDLRKESVEFNNSRELFGNAIGGSLGRTKEEMKEVVEMSITNLNRERPVHLLGVGGISDIFMGVDMGVDTFDCVHPTRIARHGGALIKYSSYPENNGKEYINLRNSIFKNSDLPIDGSCDCKICKTYSRGYLNYLLSAKENIAFNIITYHNIYFMNELMEKIRHTIEKNLDLEELKKLYCG

SEQ ID NO: 58059 - protein, 337 aa, unidentified
  source 1..337: note = Neosynechococcus sphagnicola
  REGION 1..337: note = tr|A0A098TLB3|A0A098TLB3_9CYAN Queuine tRNA-ribosyltransferase OS=Neosynechococcus sphagnicola sy1 OX=1497020 GN=tgt PE=3 SV=1
MPVGTLATVKAVTPAQLKATAAQMVLANTYHLHLQPGEELIAKAGGLHRFMAWEGPMLTDSGGFQVFSLSSLRQIAESGVTFRSPRDGRMIELTPERSIQIQNTLGADVIMAFDECPPYPAPREAVAAATARTYRWLERCITTHARPAEQALFGIVQGGVHLDLRQEAAQRLAALDLPGYAIGGVSVGEPSELIAQIVQATAPLLPARKPRYLMGIGTYREMAQAIAAGIDLFDCVIPTRLARHGSVLVQGERWNIKNAQFREDFAPLDATCSCYTCQTFSRAYLGHLWRTKELLVFTLLSIHNLTELIRFTQEIRQAIFKGTFATEFAHWLLPAQG

SEQ ID NO: 58060 - protein, 379 aa, Neptuniibacter sp.
  REGION 1..379: note = tr|A0A136HA50|A0A136HA50_9GAMM Queuine tRNA-ribosyltransferase OS=Neptuniibacter sp. Phe_28; OX = 1795871 GN=tgt PE=3 SV=1
MTRQCFMQFEKIAEDGKARRARLTFPRGTVETPAFMPVGTYGTVKGMTPRDIEATGAQILLGNTFHLMLRPGTEIIKQHGDLHDFMQWKGPILTDSGGFQVFSLGKMRKITEAGVTFQSPVNGSKVFMGPEESMQVQRDLGSDIVMIFDECTPYPATELEAAESMRLSMRWAKRSKDAHGDNPSALFGIVQGGMYPHLRDESMQGLEAIGFDGYAIGGLSVGEPKDEMVKVLDHLAHKMPTDKPRYLMGVGKPEDIVEAVRRGVDMFDCVMPTRNARNGFLFIDTGVVKIRNSVHKTDTSPLDSTCDCYTCKNFSRAYLHHLDKCKEILGAQLNTIHNLHYYQVLMAGLRQAIEQGKLGDFVDEFYSKRGLETPQLDSI

SEQ ID NO: 58061 - protein, 382 aa, Neptunomonas antarctica
  REGION 1..382: note = tr|A0A1N7N4M8|A0A1N7N4M8_9GAMM Queuine tRNA-ribosyltransferase OS=Neptunomonas antarctica; OX = 619304 GN=tgt PE=3 SV=1
MSRNCFMKFEKIATEGKARRGRLTFPRGVVETPAFMPVGTYGTVKGMLPRDVEAIGAHMILGNTFHLMLRPGTEIIQLHGDLHDFMQWQGPILTDSGGFQVFSLGKMRKITELGVTFQSPVNGSKVFIDPERSMQVQRELGSDVVMIFDECTPYPATELEAAESMRLSLRWAKRSKDAHGDSPSALFGIIQGGMYENLRDESLAGLTDIDFDGYAIGGLSVGEPKDEMVKVLDHLAYKMPEDKPRYLMGVGKPEDLVEGVRRGIDMFDCVMPTRNARNAHLFVSTGVVKLRNASNKTDIRPLDETCDCYTCQNFSRAYLHHLDKCKEILGSQLNTIHNLRYYQTLMAGLRGAIEQGKLSDFVAEFYSSRGMEVPSLAEQLAE

SEQ ID NO: 58062 - protein, 379 aa, unidentified
  source 1..379: note = Neptunomonas qingdaonensis
  REGION 1..379: note = tr|A0A1I2TZX0|A0A1I2TZX0_9GAMM Queuine tRNA-ribosyltransferase OS=Neptunomonas qingdaonensis; OX = 1045558 GN=tgt PE=3 SV=1
MSRNCFMKFEKIATQGKARRGRITFPRGVVETPAFMPVGTYGTVKGVLPKDIEAIGAHMILGNTFHLMLRPGTEIIQMHGDLHDFMQWQGPILTDSGGFQVFSLGKMRKITEQGVTFQSPVNGSKVFIDPERSMQVQRELGSDVVMIFDECTPYPATETEAAQSMRLSLRWAKRSKEAHGDSPSALFGIIQGGMYEHLRDESLAGLTEIDFDGYAIGGLSVGEPKDEMVKVLDHLAHQMPEDKPRYLMGVGKPEDLVEGVRRGVDMFDCVMPTRNARNAHLFVSTGVVKLRNASNKTDTRPLDETCDCYTCQNFSRAYLHHLDKCHEILGAQLNTIHNLRYYQILMAGLRAAIEQGKLDDFVTEFYSNRGMEVPPLAKN

SEQ ID NO: 58063 - protein, 373 aa, Neptunomonas sp.
  REGION 1..373: note = tr|A0A437Q6L0|A0A437Q6L0_9GAMM Queuine tRNA-ribosyltransferase OS=Neptunomonas sp. HPM-16; OX = 1815562 GN=tgt PE=3 SV=1
MKFEKLAEQGKARRGRLTFPRGEVETPAFMPVGTYGTVKGMLPKDIKETGAQIILGNTFHLMLRPGTEIVKLHGDLHDFMQWQGPILTDSGGFQVFSLGKMRKITEKGVTFQSPVNGSQVFLDPEKSMQVQRDLGSDIVMIFDECTPYPATEQEAADSMRLSLRWAERSKKAHGDSPSALFGIVQGGMYEHLRDESLEGLVDIGFDGYAIGGLSVGEPKDEMMKVLDHVAYKLPEDKPRYLMGVGKPEDLVEGVRRGVDMFDCVMPTRNARNAHLFVDTGVVKLRNASNKTDTRPVDETCDCYTCQNFSRAYLHHLDKCHEILGSQLNTIHNLHFYQKVMAGLREALDQGKLDDFVAEFYAKRGMEVPPLSNN

SEQ ID NO: 58064 - protein, 382 aa, Nereida ignava
  REGION 1..382: note = tr|A0A0U1NIX2|A0A0U1NIX2_9RHOB Queuine tRNA-ribosyltransferase OS=Nereida ignava OX=282199 GN=tgt; PE = 3 SV=1
MVKGNDMAQTFGFDLLATDGRARTGRISTPRGDIRTPAFMPVGTAATVKAMMPESVAATGADILLGNTYHLMLRPTAERIASLGGLHKFMNWDKPILTDSGGFQVMSLADLRKLTEDGVTFKSHIDGSKHMLSPERSMEIQKLLGSDIVMCFDECPALPADKARIAQSMELSMRWAKRSRDAFGDRPGYALFGIQQGGLEEDLRAQSAEALRDIGFEGYAVGGLAVGEGQEAMFGCLDFAPEQLPKDKPRYLMGVGKPDDIVGAVKRGIDMMDCVLPSRSGRTGQVFTRHGVVNIKNARHADDPRPLDEQCSCPACQKYSRAYLHHVYRSQEMISGMLLTWHNLHYFQQIMQEMRDAIAEQRFDVWEKGFHEGRAQGDIEPL

SEQ ID NO: 58065 - protein, 387 aa, Nesiotobacter exalbescens
  REGION 1..387: note = tr|A0A1U7JFH9|A0A1U7JFH9_9RHOB Queuine tRNA-ribosyltransferase OS=Nesiotobacter exalbescens; OX = 197461 GN=tgt PE=3 SV=1
MSDQAQKPFSFKLLKTDGAARRGEITTPHGVVRTPAFMPVGTQATVKAMYPQQVRDLGADVILGNTYHLMLRPTAERVAKLGGLHHFMNWPHAILTDSGGFQVMSLAQLRKMSEEGVSFRSHHDGSKHMMSPERSIEIQGLLGSDIQMQLDQCIALPAERSEIEEAMNLSLRWADRSRTQFEKMGGPGKGQALYGIVQGGDNPELRVESAQRLGEMPFEGYSVGGLAVGEPQEVMLRMLEVTTPVMPVHKPRYLMGVGTPEDILESVARGIDQFDCVMPTRAGRHGLAYTRFGKVNLKNARHAEDPRPLDEEADCPATRDYSRAYLHHLVRVNEGLAAMLLTWNNLAYYQFLMQGIRDAIEAGTFEDFRQKTKEDWARGDLAPYVWS

SEQ ID NO: 58066 - protein, 443 aa, unidentified
  source 1..443: note = Nesterenkonia aurantiaca
  REGION 1..443: note = tr|A0A4R7G448|A0A4R7G448_9MICC Queuine tRNA-ribosyltransferase OS=Nesterenkonia aurantiaca; OX = 1436010 GN=tgt PE=3 SV=1
MPNQLNTETPSAAPQEKAPQEKAPQQEAAHPQANRESFSFEVESRIEGALGRTGTIRTPHGDIKTPAFIPVATKATIKTVRPEEMLEIGAQAALANAYHLNLQPGTDVIDAAGGLGKFMNWPLPTFTDSGGFQVMSLGAGFKKVITMDSSVVPDDAAVAPKKVRLALVDDDGVTFKSHIDGSTHRFTPEISMRLQHEIGADIIFAFDELTTLFNTREYQETSLERTRLWAERCLSAHGRLTAERSHRPYQALFGVLQGAQYEDLRRKAAKDLGAMEIEGQSFDGFGIGGALDKENLGTIVGWMAEELPENKPRHLLGISEPEDFFTAIENGADTFDCVSPSRVARTGRVYHPDGRYNIPQARFKRDFSPIDAECSCYTCANYTRAYLHHLFKAKEMLYNTLCTIHNEHYTIKMVDDIRASIEQGRFYEFCDATLGRYQAGATP

SEQ ID NO: 58067 - protein, 403 aa, Nesterenkonia jeotgali
  REGION 1..403: note = tr|A0A0W8IE31|A0A0W8IE31_9MICC Queuine tRNA-ribosyltransferase OS=Nesterenkonia jeotgali; OX = 317018 GN=tgt PE=3 SV=1
MEAKIPGALGRTGTIRTPHGDIRTPAFIPVATKATIKSVRPDEILEVGAQAALANAYHLNLQPGTDVLDAAGGLGRFMNWPLPTFTDSGGFQVMSLGAGFKKVISMDASVVPNDAAVAPNKQRLALVDDDGVTFKSHIDGTTHRFTPEISMKLQHEIGADIIFAFDELTTLFNTRDYQETSLERTRLWAERCLVAHRDLTEERSHRPYQALFGVLQGAQYEDLRRKAAKDLGSMEINGQSFDGFGIGGALDKENLGVIVSWMAEELPEDKPRHLLGISEPEDFFTAIENGADTFDCVSPSRVARTGRVYHPDGRFNIPQARFKRDFSPIDDECTCYTCQNYTRAYLHHLFKAKEMLYNTLCTIHNEHYTIKMVDDIRASIEQGRFYEFRDATLGRYQAGSNVR

SEQ ID NO: 58068 - protein, 457 aa, Nesterenkonia sandarakina
  REGION 1..457: note = tr|A0A2T0YTT0|A0A2T0YTT0_9MICC Queuine tRNA-ribosyltransferase OS=Nesterenkonia sandarakina; OX = 272918 GN=tgt PE=3 SV=1
MPNQLNTETPSAARPDSTTQASTQSSASQNSVPQNPLPQEAGRHPQADRESFSFEVEARIDGALGRTGTIRTPHGDIKTPAFIPVATKATIKTVRPEEMLEVGAQAALANAYHLNLQPGTDVIDAAGGLGKFMNWPLPTFTDSGGFQVMSLGAGFKKVITMDASVVPDDTAVAPKKVRLALVDDDGVTFKSHIDGTTHRFTPEISMKLQHEIGADIIFAFDELTTLFNTRDYQETSLERTRLWAERCLSAHRGLTAERSHRPYQALFGVLQGAQYEDLRRKAAKDLGSMEIEGQSFDGFGIGGALDKENLGTIVGWMAEELPDNKPRHLLGISEPEDFFTAIENGADTFDCVSPSRVARTGRVYHPDGRFNIPQARFKRDFSPIDEECTCYTCQNYTRAYLHHLFKAKEMLYNTLCTIHNEHYTIKMVDDIRASIEQGRFYEFRDATLSRYQAGATP

SEQ ID NO: 58069 - protein, 425 aa, Nesterenkonia sp.
  REGION 1..425: note = tr|A0A3A4F968|A0A3A4F968_9MICC Queuine tRNA-ribosyltransferase OS=Nesterenkonia sp. M8 OX=2174932; GN = tgt PE=3 SV=1
MLDPQTSSTRQPLHPDHVQGGFAFEVQDRVPGELGRTGTITTPHGIIRTPAFIPVATKATVKAVRPEEMSELGTQAVLANAYHLNLQPGTDVLDAAGGLSKFMNWPGPTFTDSGGFQVMSLGVGFKKVIQMDASRVTNDEAISAEHERRAFVDDDGVTFTSHIDGSKHRFTPEISMRLQHEIGADIIFAFDELTTLFNTRDYQEESLERTRLWAERCLSAHRDLTEQRCHKPYQALFGVLQGAQYEDLRRKAAGDLGRMVVDGQEFDGFGIGGALEKENLGTIVRWVSEELPENKPRHLLGISEPEDFFTAIENGADTFDCVQPSRVARTGRVYTPDGYFNIPQAKYKKDFSPIQEGCGCYTCQHYSKAYLHHLFKAKEMLYSTLCTIHNEYFTVKLVDDIRTSITEGRFAEFRDDALDRYKGKT

SEQ ID NO: 58070 - protein, 365 aa, unidentified
  source 1..365: note = Nevskiales bacterium
  REGION 1..365: note = tr|A0A2E9ZU88|A0A2E9ZU88_9GAMM Queuine tRNA-ribosyltransferase OS=Nevskiales bacterium OX=2026766; GN = tgt PE=3 SV=1
MSFVCLQTDGGARRGRLTTQHGVIETPIFMPVGTYGTVKAMTPEELDSLGASIILGNTFHLMLRPGEQVVQALGGLHGFMHWDGPILTDSGGFQVWSLTELRKLTEQGVVFRSPVNGDRVELTPERSIQVQHALGSDIVMQFDECTAYPATEAEAAESMRLSLRWADRCRQAHADNPNLLFGIVQGGMHADLRRESLAGLETVGFDGYAIGGLSVGETREERLHVLETLSPLMPADRPRYLMGVGTPRDLIEGIDRGVDMFDCVMPTRNARNGHLFTSGGIVRIRNARHREDSAPLDANCSCYTCQHYSRAYLYHLNRCNEILGARLNTIHNLHFYLDLMRRAREAIEQGRWAGFRDGELKRWAD

SEQ ID NO: 58071 - protein, 379 aa, unidentified
  source 1..379: note = Niabella drilacis
  REGION 1..379: note = tr|A0A1G6UKX7|A0A1G6UKX7_9BACT Queuine tRNA-ribosyltransferase OS=Niabella drilacis OX=1285928; GN = tgt PE=3 SV=1
MAQLSFQLQHTDTGSAARAGLIQTDHGLIETPIFMPVGTAGSVKAVTQAQLESEVQAQIILGNTYHLYLRPGLEVLEKAGGLHRFNQWHRPILTDSGGFQVFSLAGTRKIKEEGVTFASHIDGSKHLFTPERVMDIQRVIGGDIIMAFDECPPGGSEYGYVRKSLDLTHRWLNRCWDRFTSTPDKYGYTQNLFPIVQGATFKDLRKESCDFVTQKDAPGNAIGGLSVGEPEDKMYEICDWCCQHLPVHKPRYLMGVGTPWNILECIGMGIDMFDCVMPTRNGRNAMLFTTEGVINIDNKKWEFDYSPIDEGLPNPMSNLYSKAYLRHLFKSGELLALTVASVHNLAFYLWLVQEARRQIISGNYHSWKNQMIVKLKRRL

SEQ ID NO: 58072 - protein, 379 aa, unidentified
  source 1..379: note = Niabella ginsenosidivorans
  REGION 1..379: note = tr|A0A1A9I4A1|A0A1A9I4A1_9BACT Queuine tRNA-ribosyltransferase OS=Niabella ginsenosidivorans; OX = 1176587 GN=tgt PE=3 SV=1
MAQLSFQLQHTDAQSSARAGLITTDHGQIETPVFMPVGTAGSVKAVTQAQLENDIKAQIILGNTYHLYLRPGLEVLEKAGGLHRFNQWKRPILTDSGGFQVFSLAGTRKIKEEGVTFASHIDGSKHLFTPERVMDIQRIIGGDIIMAFDECPPGGSEYGYARKSLDLTHRWLDRCWDRFNSTPDRYGYTQNLFPIVQGATFKDLRKESCDFVAAKDAAGNAIGGLSVGEPEEKMYEICDWCCAHLPAQRPRYLMGVGTPWNILECIGMGIDMFDCVMPTRNGRNAMLFTTGGVINIDNKKWEFDYSPIDEELPNSMSNLYSKAYLRHLFKSGELLALTIASVHNLAFYLWLVGEARRQIRAGSYASWKNQMIVKLKTRL

SEQ ID NO: 58073 - protein, 379 aa, Niabella soli
  REGION 1..379: note = tr|W0EZP3|W0EZP3_9BACT Queuine tRNA-ribosyltransferase OS=Niabella soli DSM 19437; OX = 929713 GN=tgt PE=3 SV=1
MAQLHFQLQHTDKDSSARAGMITTDHGTIQTPIFMPVGTAGSVKAVTQAQLENEVKAQIILGNTYHLYLRPGLEVLEKAGGLHQFNQWKHPVLTDSGGFQVFSLAGTRKIKEEGVTFASHIDGSKHLFTPERVMDIQRSIGGDIIMAFDECPPGGSEYEYARKSLDLTHRWLDRCFTQFNQTPDKYGYTQNLFPIVQGATYKDLRKESCEYVSEKNAPGNAIGGLSVGEPEDKMYEICDWCCQHLPKEKPRYLMGVGTPWNILECIGMGIDMFDCVMPTRNGRNAMLFTTEGVINIDNKKWEFDYSPIDAGLPNPMSHLYSKAYLRHLFKSGELLALTIASVHNLAFYLWLVGEARKQIIAGTYNAWKNQMIVKLKNRL

SEQ ID NO: 58074 - protein, 379 aa, Niabella sp.
  REGION 1..379: note = tr|A0A5C7WAC5|A0A5C7WAC5_9BACT Queuine tRNA-ribosyltransferase OS=Niabella sp. OX=1962976 GN=tgt; PE = 3 SV=1
MARLHFQLEHKDKGSKARAGKITTDHGTIETPIFMPVGTAGSVKAVTQQHLVDDVQAQIILGNTYHLYLRPGTDILEKAGGLHQFINWQQPILTDSGGYQVFSLAGTRKIKEDGVTFQSHIDGSKHLFSPERVMDIQRSIGGDIVMAFDECPPGGSEYGYAQKSLALTQRWLDRCVARFAETPDKYGYTQNLFPIVQGAMFKDLRKQSCEYVIEKDAPGNAIGGLSVGEPEPVMYEICDWCCEHLPTDRPRYLMGVGTPWNILECIGMGVDMFDCVMPTRNGRNAMLFTTSGIINIDNKKWEYDFSPIDEGLPCEVSNHYSKAYLRHLFKSKEILGLTIASVHNLSFYLWLVGEARKQIVSGNYHSWKEEMIAKLKTRL

SEQ ID NO: 58075 - protein, 379 aa, Niastella koreensis
  REGION 1..379: note = tr|G8TH85|G8TH85_NIAKG Queuine tRNA-ribosyltransferase OS=Niastella koreensis (strain DSM 17620 / KACC 11465 / GR20-10) OX=700598 GN=tgt PE=3 SV=1
MAALQFTLQHTDNQTKARAGHIVTDHGEIATPIFMPVGTVGSVKAVSQQQLKEEVNASIILGNTYHLYLRPGTEVLEKAGGLHRFNGWERPILTDSGGYQVFSLAGTRKITEEGVLFQSHIDGSRHLFTPESVMDIQRNIGADIIMAFDECPPYPSDYQYAEKSMHLTHRWLDRCFKRFNETPDKYGYTQNLFPIVQGSTYTDLRKASCEFIASQEATGNAIGGLSVGEPDNMLYDLCGLCCDNLPVHKPRYLMGVGTPWNILECIALGVDMFDCVMPTRNGRNAMLFTSQGVINIDNKKWETDFSPLDDGIDCVVSNYYSKAYLRHLVKSKEILGLTLASVHNLAFYLWLVRQARHHILQGDFVSWKNEMVVRLQTRL

SEQ ID NO: 58076 - protein, 379 aa, Niastella populi
  REGION 1..379: note = tr|A0A1V9GA53|A0A1V9GA53_9BACT Queuine tRNA-ribosyltransferase OS=Niastella populi OX=550983; GN = tgt PE=3 SV=1
MAALQFTLQHTDDQSKARAGHIVTDHGEIATPIFMPVGTVGSVKAVSQQQLREEVNASIILGNTYHLYLRPGTEVLQKAGGLHRFKGWDRPILTDSGGYQVFSLAGTRKITEDGVVFQSHIDGSRHLFTPESVMDIQRSIGADIIMAFDECPPYPSDYKYAEKSMHLTHRWLDRCFTRFNQTPDKYGYTQNLFPIVQGSTYTDLRKASCEYIASKDATGNAIGGLSVGEPDNMLYDLCGLCCDNLPAHKPRYLMGVGTPWNILECIALGVDMFDCVMPTRNGRNAMLFTSQGVINIDNKKWESDFTPIDNGIDAHISNHYSKAYLRHLVKSKEILGLTIASVHNLAFYLWLVRQARGHIMQGDFISWKNEMVPRLQTRL

SEQ ID NO: 58077 - protein, 379 aa, Niastella sp.
  REGION 1..379: note = tr|A0A4R2WBP3|A0A4R2WBP3_9BACT Queuine tRNA-ribosyltransferase OS=Niastella sp. CF465 OX=2135684; GN = tgt PE=3 SV=1
MAALQFTLQHTDDQSKARAGHIVTDHGEIATPIFMPVGTVGSVKAVSQQQLKEEVNAEIILGNTYHLYLRPGTEVLQKAGGLHRFKGWDRPILTDSGGYQVFSLAGTRKLTEEGALFQSHIDGSRHMFSPEAVMDIQRTIGADIIMAFDECPPYPSDYKYAEKSMHLTHRWLDRCFKRFNETPDKYGYTQNLFPIVQGSTYTDLRKASCEYIASKDATGNAIGGLSVGEPENMLYDLCGLCCDNLPAHKPRYLMGVGTPWNILECIALGVDMFDCVMPTRNGRNAMLFTSLGVINIDNKKWENDFSPIDEGIDAHISNHYNKAYLRHLIKSKEILGLTIASVHNLAFYLWLVRQAREHIIKGDFVSWKNEMVPRLQTRL

SEQ ID NO: 58078 - protein, 379 aa, Niastella sp.
  REGION 1..379: note = tr|A0A1E4E5D9|A0A1E4E5D9_9BACT Queuine tRNA-ribosyltransferase OS=Niastella sp. SCN 39-18; OX = 1660119 GN=tgt PE=3 SV=1
MASLQFKIKATDAFSKARAGTILTDHGSIETPIFMPVGTVGSVKAVTQQQLKEQVRAEIILGNTYHLYLRPGLPVLEAAGGLHRFNGWNKPILTDSGGFQVFSLAKSRKINEEGVIFRSHIDGSKHLFTPEKAIDIQRSIGADIMMAFDECPPGASAYEYAKSSMLLTHRWLDRCFNQFNNTPDKYGYTQNLFPIVQGGIHHDLRKASCEYISAKAAAGNAIGGLSVGEPIETMYEICNLCCDHLPVNKPRYLMGVGTPWNILECIGMGIDMFDCVMPTRNGRNAMLFTSRGIINIDNKKWEHDFSVLDDGIDCETSQYYSKAYVRHLFKSKEYLGLIIASIHNLAFYLWLVKQARLHIEQGDFVSWKSGMISRLQQRL

SEQ ID NO: 58079 - protein, 379 aa, unidentified
  source 1..379: note = Niastella vici
  REGION 1..379: note = tr|A0A1V9G1U5|A0A1V9G1U5_9BACT Queuine tRNA-ribosyltransferase OS=Niastella vici OX=1703345; GN = tgt PE=3 SV=1
MAALQFTLQHTDPSSKARAGHIVTDHGDILTPIFMPVGTVGSVKAVSQQQLKEEINAQIILGNTYHLYLRPGIDVLQKAGGLHQFKGWNRPILTDSGGYQVFSLAGTRKISEEGVLFQSHIDGSRHLFTPESVMDIQRAIGADIIMAFDECPPYPSDYKYAEKSMHLTHRWLDRCFTRFNETPDKYGYTQNLFPIVQGSTYTDLRKASCEYIASKDATGNAIGGLSVGEPDDMLYELCGLCCDNLPAHKPRYLMGVGTPWNILECIALGVDMFDCVMPTRNGRNAMLFTSQGVINIDNKKWESDFSPIDDGIDCHISNHYSKAYLRHLVKSKEILGLTIASVHNLAFYLWLVGEARKHIIEGDFVSWKNEMVPRLQTRL

SEQ ID NO: 58080 - protein, 379 aa, Niastella yeongjuensis
  REGION 1..379: note = tr|A0A1V9EMB7|A0A1V9EMB7_9BACT Queuine tRNA-ribosyltransferase OS=Niastella yeongjuensis; OX = 354355 GN=tgt PE=3 SV=1
MAALQFTLQHTDNQSKARAGHIVTDHGEIATPIFMPVGTVGSVKAVSQQQLKEEVNASIILGNTYHLYLRPGTRVLEKAGGLHRFNGWDRPILTDSGGYQVFSLAGTRKITEEGALFQSHIDGSKHMFSPEAVMDIQRTIGADIIMAFDECPPYPSDYKYAEKSMHLTHRWLDRCFKRFNETPDKYGYTQNLFPIVQGSTYTDLRKASCEHIASKEATGNAIGGLSVGEPDNMLYDLCGLCCDNLPVHKPRYLMGVGTPWNILECIALGVDMFDCVMPTRNGRNAMLFTSQGVINIDNKKWEHDFSPLDDGIDCLVSNYYSKAYLRHLIKAKEILGLTIASVHNLAFYLWLVRQARHHILQGDFVSWKNEMVVRLQTRL

SEQ ID NO: 58081 - protein, 383 aa, unidentified
  source 1..383: note = Nibricoccus aquaticus
  REGION 1..383: note = tr|A0A290Q5N6|A0A290Q5N6_9BACT Queuine tRNA-ribosyltransferase OS=Nibricoccus aquaticus; OX = 2576891 GN=tgt PE=3 SV=1
MPEHFQLLKTDSVTAARRGRLQTRHGVVETPIFMPVGTQGTVKAITPQHIQEIGAQIILGNTYHLNLRPTSELVKELGGLHAFMGWEGPILTDSGGFQVFSLAKLRDIREDGVAFQSHLDGAKLFLGPKEVMTIQANLGSDIAMVLDECPPWPCTRDECARAVERSFRWAKQCKEIATDNGFLAGGHHVFAIAQGSTFDDLRREAAESLASLDLPGYAVGGVSVGEPEPEMIKQVGATTPFMPADKPRYTMGLGTPPQILKMIALGVDMFDCVLPSRVARNGLVFTPDGPMNLRNEKYRTDPRPIAEGVTNYTSRFSRAYLRHLTVAGEMLSATLLTIHNLQFFIELTAQARAHIEAGDFGAWHRAWIARYEAGAAERLAGGK

SEQ ID NO: 58082 - protein, 696 aa, unidentified
  source 1..696: note = Nibricoccus aquaticus
  REGION 1..696: note = tr|A0A290Q8S2|A0A290Q8S2_9BACT Queuine tRNA-ribosyltransferase OS=Nibricoccus aquaticus; OX = 2576891 GN=tgt PE=3 SV=1
MSRLNFTLEKEASGSSARAATFRTLHGEVKTPVFMPVGTQATVKSQTVETLKATGSSVLLANTYHLLLRPGPEVFKKFGGIHNFMKWDGPVLTDSGGFQIFSLPGERVMNEDGARFKSYVDGAMFMLSPESSIGMQKTIGSDIMMVLDQCIPSTAGYAEAEVAMELTHRWALRSLKARGDSPQALFGIVQGACHHDLRKKSAAFLRELPFDGLAIGGLAVGETHAERYEFTGLVTQHLPKNLPRYLMGVGTPIDILEAVHRGVDMFDCIIPSQLAQRGVAFTSQGKIQLRRAVYKFSEAPLDAKCDCHCCKNFSRAYLHHLVKSDELLGWQLLGIHNFAFYHRLMREMRQEILHGNFLAYYERMRPELMKSDEDNPVNPPKKLRHGKPKHLGDYDIVTSEQGFSSIRQISSGEVMHSVSAPSDEAQRLYVGQSRLAERLLKSSAGGEAVSGASAGGDGAARELVIWDVGLGAASNAMAAIQCFESRYAEKGGEALRPLRIVSFECDLDPLTLAAKFPGHFPHLRHGAPHALLESGRWRHASGLLEWELLKGDFLTFIETAVEPDVIFYDPFSAKTDTGLWTAEVFARVRARCGEKRAELFTYSAATAVRVALLAAGFYVAEGVGTGPKATTTVAFARERRETDAGVWPEARLLGAEWLARWGRSTSKSPSTLTEAERVVFEKRIEGHPQFRAVRQS

SEQ ID NO: 58083 - protein, 388 aa, Nicoletella semolina
  REGION 1..388: note = tr|A0A4V2SK47|A0A4V2SK47_9PAST Queuine tRNA-ribosyltransferase OS=Nicoletella semolina OX=271160; GN = tgt PE=3 SV=1
MKYKLKKTSGNARRGRLTFSRPRGEFHVETPAFMPVGTYGTVKGMTPEEVTATGAEILLGNTFHLWLRPGQEIMKMHGDLHDFMQWHAPILTDSGGFQVFSLGKLRKIEEEGVTFQNPISGEKIFLSPEKSMEIQYDLGSDIVMIFDECTPYPATFDYAKKSMEMSLRWAKRSRDRFDELENPNALFGIIQGGVYEELRKISAEELIKIGFDGYAVGGLAVGEPKEDMHRILEYVCPQIPKDKPRYLMGVGKPEDLVEGVRRGIDMFDCVMPTRNARNGHLFVSNGIVKIRNAKYRSDTSPLDPECDCYTCKNYTKAYLYHLDKCGEILGARLNTIHNLRYYQRLMAQIREAIEQDRFDEFAQEFYAKIGKPMPPLQTDVIQQDAIES

SEQ ID NO: 58084 - protein, 377 aa, Nisaea sp.; identical to SEQ ID NO: 53258
  REGION 1..377: note = tr|A0A2D7JN02|A0A2D7JN02_9PROT Queuine tRNA-ribosyltransferase OS=Nisaea sp. OX=2024842 GN=tgt; PE = 3 SV=1

SEQ ID NO: 58085 - protein, 381 aa, Nisaea sp.
  REGION 1..381: note = tr|A0A2D7Z6I2|A0A2D7Z6I2_9PROT Queuine tRNA-ribosyltransferase OS=Nisaea sp. OX=2024842 GN=tgt; PE = 3 SV=1
MTKAFSFQLLGQDGPARRGRVSTAHGSFETPAFMPVGTAGTVKAMTMDGVAATGAEIILGNTYHLMLRPGAEIVAEMGGLQEFTRWSGPILTDSGGFQVMSLAELRKLTEEGVRFRSHVDGRHMMLTPEDSIRIQHQLGADITMVLDECTPYPATHEEAEKSMELSMRWAVRSKEAFVTRPGHGLFGIVQGSVYEDLRHRSIAALTDIGFDGYAVGGLAVGEGQAQMFSVLDFTMPAMPADRPRYLMGVGKPSDLVGAVARGVDMFDCVLPTRSGRTGQAFTRRGVVNIRNARHSRDPRPLDADCACQTCQNYSRAYLHHLFKAGEILGLMLMTAHNLRFYQDLMADLRAAIEAGRLTDQVARFHADQARGDIEPWVPGGP

SEQ ID NO: 58086 - protein, 374 aa, unidentified
  source 1..374: note = Nissabacter sp.
  REGION 1..374: note = tr|A0A4P8SHZ9|A0A4P8SHZ9_9GAMM Queuine tRNA-ribosyltransferase OS=Nissabacter sp. SGAir0207; OX = 2126321 GN=tgt PE=3 SV=1
MKYELMTKDGRARRGRLVFERGVVETPAFMPVGTYGTVKGMTPEEVKETGAQILLGNTFHLWLRPGQEIMKLHGDLHDFMQWHGPILTDSGGFQVFSLGAMRKIKEEGVHFRNPINGNPVFLSPEKSMEIQYDLGSDIVMIFDECTPYPADWDYAKRSMEMSLRWAARSRKRFDELENKNALFGIIQGSVYEDLRDVSVKGLVEIGFDGYAVGGLAVGEPKEDMHRILEHVCPQIPEDKPRYLMGVGKPEDLVEGVRRGIDMFDCVMPTRNARNGHLFVTEGVVKIRNAKYKEDTSPLDAECDCYTCRNYSRAYLHHLDRCNEILGARLNTIHNLRYYQRVMAGLRQAIEEGKLELFVADFYQRIGKPVPPLDA

SEQ ID NO: 58087 - protein, 374 aa, Nitratifractor salsuginis
  REGION 1..374: note = tr|E6WYV7|E6WYV7_NITSE Queuine tRNA-ribosyltransferase OS=Nitratifractor salsuginis (strain DSM 16511 / JCM 12458 / E9I37-1) OX=749222 GN=tgt; PE = 3 SV=1
MQFRIDAQDGAARAATIQTAHSVIQTPVFMPVGTVGAVKALDALDLQNHLSPQIILGNTYHLYLRPGDEIVKAMGGLHGFTRFPKSFLTDSGGFQAFSLSDNVKIEEDGITFRSHIDGSKHHFTPQKVLDIQYNLGSDIMMILDDLVALPATRERIRESIERTTRWAQRSIDYHRRKQMEGIGVDQNIFAIIQGGTDKEFRKISATELCALDFDGFAIGGLSVGEANREMYDTVEWTTPFMPTDKPRYLMGVGTPEDLVENVERGVDMFDCVMPTRNARNGTLFTSFGKVTIKAARYATDEEPIDPECGCIVCRTYSRAYLRHLFRAKELTYFRLATIHNLYYYLDLMRQMREAILEGKFAEFKRKFYRKRDNG

SEQ ID NO: 58088 - protein, 376 aa, Nitratireductor basaltis
  REGION 1..376: note = tr|A0A084UB32|A0A084UB32_9RHIZ Queuine tRNA-ribosyltransferase OS=Nitratireductor basaltis; OX = 472175 GN=tgt PE=3 SV=1
MSENFTFNLLARDGAARRGEITMPRGTVRTPAFMPVGTAGTVKAMYLDQVRELGSDIILGNTYHLMLRPGAERMARLGGLHEFARWPHPILTDSGGFQVMSLADLRKITEKGVTFRSHVDGQVFEMSPERSIEIQGLLDSDIQMQLDECIALPAERSEIERAMELSLRWAERCKTAFGDQPGKAMFGIVQGGDDVKLRERSAQALKALDLKGYAVGGLAVGEPQDVMFEMLEATCPQLPEEKPRYLMGVGTPDDILGAVARGIDMFDCVMPTRAGRHGLAYTRHGKINLKNARHAEDPRPLDEESNCPASRDYSRAYLHHLVRSNEALGGMLLTWNNLAYYQSLMADIRSAIEQGRFTERAAEIRAAWARGDIPPR

SEQ ID NO: 58089 - protein, 376 aa, Nitratireductor indicus
  REGION 1..376: note = tr|K2N8D7|K2N8D7_9RHIZ Queuine tRNA-ribosyltransferase OS=Nitratireductor indicus C115; OX = 1231190 GN=tgt PE=3 SV=1
MSATFTFRLLATDGQARRGEISMPRGTIRTPAFMPVGTAGTVKAMYLDQVRELGSDIILGNTYHLMLRPGAERVARLGGLHEFARWPYPILTDSGGFQVMSLADLRKITEKGVTFRSHVDGQVFEMPPERSIEIQGLLDSDIQMQLDECVALPAEEAEIERAMELSLRWAERCKTAFGDQPGKAMFGIVQGGDKAHLRERSAHALADMGLKGYAVGGLAVGEPQAVMLEMLDATCPVLPFEKPRYLMGVGTPDDILKSVARGIDMFDCVMPTRAGRHGLAYTRHGKINLKNARHAEDMRPLDEESDCPASRDYSRAYLHHLVKSGESLGGMLLTWNNLAYYQSLMQDIRNAIEAGRFGERAGEIAQGWERGDIPAL

SEQ ID NO: 58090 - protein, 376 aa, Nitratireductor pacificus
  REGION 1..376: note = tr|K2M960|K2M960_9RHIZ Queuine tRNA-ribosyltransferase OS=Nitratireductor pacificus pht-3B OX=391937 GN=tgt PE=3 SV=1
MSDQFTFRLLAQDGAARRGAISMPRGTIRTPAFMPVGTGGTVKAMYMDQVRALGSDIILGNTYHLMLRPGAERMARLGGLHQFAGWPHPILTDSGGFQVMSLAELRKITEKGVTFRSHVDGQVFEMPPERSIEIQGLLGSDIQMQLDECVALPAEEAEIERAMEMSLRWAERCKTAFGDQPGKAMFGIVQGGDRAHLRQRSAQALAAMDLKGYAVGGLAVGEPQAVMLEMLEATCPELPAEKPRYLMGVGTPDDILKSVARGIDMFDCVMPTRAGRHGLAYTRRGKINLKNARHAEDLRPLDEESDCPASRDYSRAYLHHLVKSGESLGGMLLTWNNLAYYQALMQDIRDAIEAGRFTERSAEISAAWEKGDLPPL

SEQ ID NO: 58091 - protein, 376 aa, Nitratireductor sp.
  REGION 1..376: note = tr|A0A1H4ITM3|A0A1H4ITM3_9RHIZ Queuine tRNA-ribosyltransferase OS=Nitratireductor sp. ES.061; OX = 1855335 GN=tgt PE=3 SV=1
MSDRFTFRLLATDGDARRGEISMPRGTIRTPAFMPVGTAGTVKAMYMDQVRGLGADIILGNTYHLMLRPGAERVARLGGLHEFARWPYPILTDSGGFQVMSLADLRKITEKGVTFRSHVDGQVFEMPPERSIEIQGLLGSDIQMQLDECVALPAEESEIERAMELSLRWAERCRIAFGNQPGKAMFGIVQGGDKPHLRERSARALAAMELKGYAVGGLAVGEPQAVMLDMLEATCPVLPGEKPRYLMGVGTPDDILKSVARGIDMFDCVMPTRAGRHGLAYTRRGKINLKNARHAEDMRPLDEESDCPAARDYSRAYLHHLVKAGESLAGMLLTWNNLAYYQSLMQDIRDAIEAGRFQQRSAEISAAWEKGDLPPL

SEQ ID NO: 58092 - protein, 376 aa, Nitratireductor sp.
  REGION 1..376: note = tr|A0A2P8NJP8|A0A2P8NJP8_9RHIZ Queuine tRNA-ribosyltransferase OS=Nitratireductor sp. StC3; OX = 2126741 GN=tgt PE=3 SV=1
MTQSFEFSLLATDGAARRGEISTPRGTIRTPAFMPVGTAGTVKAMYMDQVRALGADIILGNTYHLMLRPGAERVARLGGLHAFARWPHPILTDSGGFQVMSLAQLRKLSEKGVTFKSHIDGAVHEMSPERSIEIQGLLGSDIQMQLDECVALPAERDVIERSMELSLRWAERCKTAFGDQPGRAMFGIVQGGDDEALRVRSAEALTALDLKGYAVGGLAVGEPQPVMLAMLDAVCPALPHQKPRYLMGVGTPDDIVKSVQRGIDMFDCVMPTRAGRHGLAYTRHGKINLRNARHAEDPRPLDAESDCPAARDYSRAYLHHLVKAGEALGGMLLTWNNLSYYQTLMQGLRDAIEAGRLADHAAGLAEGWARGDLAPV

SEQ ID NO: 58093 - protein, 373 aa, Nitratiruptor sp.
  REGION 1..373: note = sp|A6Q3Y5|TGT_NITSB Queuine tRNA-ribosyltransferase; OS = Nitratiruptor sp. (strain SB155-2) OX=387092 GN=tgt; PE = 3 SV=1
MDFFIDATDNNARACTIKTSHSTIKTPVFMPVGTAASVKSLDTVDLRDILQTQIILANTYHLYLRPGDNVVKKLGGLHGFTGYNRSFLTDSGGFQAFSLSDISKANERGIEFQSHIDGSKHFFTPQKVLDIQYNLGSDIMMILDDLVALPATKERLALSVDRTTRWAQESIKYHKKMQAQGIGTNQNIFAIIQGGTDYEFRKKSAMELTALDFDGFAIGGLSVGEENSVMYNTVEFTTPFMPKNKPRYLMGVGTPEDLVECIDRGVDMFDCVMPTRNARNGTIFTSFGRLNIKAAKYKLDQNPIDEACSCYTCQNYTRAYLNHLYRAKELTYYRLASIHNLHYYLTLMKEAREAIEKGEYKAFKKAFYARRQS

SEQ ID NO: 58094 - protein, 373 aa, Nitratiruptor tergarcus
  REGION 1..373: note = tr|A0A1W1WUI6|A0A1W1WUI6_9PROT Queuine tRNA-ribosyltransferase OS=Nitratiruptor tergarcus DSM 16512 OX=1069081 GN=tgt PE=3 SV=1
MEFTLDATCGNARATTIKTYHSTIKTPVFMPVGTAASVKALDTRDLIDLLDTHIILANTYHLYLRPGDEIVKEFGGLHGFTKYNRSFLTDSGGFQAFSLSDISKANDEGIEFQSHIDGSRHFFTPQKVLDIQYNLGSDIMMILDDLIALPATKERLKLSVVRTTKWAKASITYHKKMQERGIGRTQNIFAIIQGGVDPAFRRQSAQELTALDFDGFAIGGLSVGEESQAMYDTVAWTTQFMPANKPRYLMGVGTPEDIVEAIDRGIDMFDCVMPTRNARNGTIFTTFGRLNIKAARFKKDHRPIDENCSCYTCQNYSRGYLNHLFRAKELTYYRLASIHNLHYYLQLTKDAREAIIQGDYATFKKDFYARRSQ

SEQ ID NO: 58095 - protein, 376 aa, Nitrincola lacisaponensis
  REGION 1..376: note = tr|A0A063Y5G1|A0A063Y5G1_9GAMM Queuine tRNA-ribosyltransferase OS=Nitrincola lacisaponensis; OX = 267850 GN=tgt PE=3 SV=1
MQFECLTTEGKARRGRLTFPRGVVETPAFMPVGTYGTVKGMLPRDVKALGAQIILGNTFHLMLRPGTEIINLHGDLHDFMQWQGPILTDSGGFQVFSLGKMRKITEEGVSFRSPVDGSKVFLSPERSMEVQRALGSDIVMIFDECTPYPATEAEAAKSMRMSLRWAERSKAAHGDSPSALFGIVQGGMYPHLRDESLAGLTAIDFDGYAIGGLSVGEPKDEMIKVLDHLAYQMPADKPRYLMGVGKPEDIVEAVRRGVDMFDCVIPTRNARNGFLFTSTGVVKIRNSVNKTDTRPLDENCDCYTCKNFSRAYLHHLDKCGEMLGAQLSTLHNLHYYQTLMAGLRNALEQGKLCAFVDDFYRVRGMETPPLTDTASD

SEQ ID NO: 58096 - protein, 379 aa, unidentified
  source 1..379: note = Nitrincola nitratireducens
  REGION 1..379: note = tr|W9V1X6|W9V1X6_9GAMM Queuine tRNA-ribosyltransferase OS=Nitrincola nitratireducens; OX = 1229521 GN=tgt PE=3 SV=1
MSRQCFMQFEQLATDGKARRARLTFPRGTVETPAFMPVGTYGTVKGMLPRDIKALGAQIILGNTFHLMLRPGTDIINLHGDLHDFMQWQGPILTDSGGFQVFSLGKMRKITEEGVSFQSPVDGSKVFLSPERSMEVQKALGSDIVMIFDECTPYPATEDEAAKSMRMSLRWARRSKDAHGDSPSALFGIVQGGMYPDLRDESMAGLAEIDFDGYAIGGLSVGEPKDEMIKVLDHLAYKMPENKPRYLMGVGKPEDIVEAVRRGVDMFDCVIPTRNARNGFLFTSTGVVKIRNAVNKTDTRPLDENCDCYTCRNFSRAYLHHLDKCGEMLGAQLNTLHNLYYYQTLMAGLRKAIEQGKLCDFVDDFYQARGLETPPLTDQ

SEQ ID NO: 58097 - protein, 376 aa, Nitrincola sp.
  REGION 1..376: note = tr|A0A5J6LJ79|A0A5J6LJ79_9GAMM tRNA guanosine(34) transglycosylase Tgt OS=Nitrincola sp. KXZD1103 OX=2614693; GN = tgt PE=4 SV=1
MQFECLTTEGKARRGRLTFPRGEVETPAFMPVGTYGTVKGMLPRDVKALGAQIVLGNTFHLMLRPGTEIINLHGDLHDFMQWQGPILTDSGGFQVFSLGKMRKITEEGVSFRSPVDGSKVFLSPEVSMQVQQALGSDIVMIFDECTPYPATETEAAESMRMSLRWAKRSKEAHGDSPSALFGIVQGGMYPHLRDESLAGLVETGFDGYAIGGLSVGEPKDEMISVLDHLAHRMPEDKPRYLMGVGKPEDIVEAVRRGVDMFDCVIPTRNARNGFLFTSNGVVKIRNSVNKTDTRPLDENCDCYTCKNFSRAYLHHLDKCGEMLGAQLSTLHNLHYYQTLMTGLRNALEQGKLSAFVDDFYRARGMETPPLIDTNTF

SEQ ID NO: 58098 - protein, 384 aa, Nitrincola sp.
  REGION 1..384: note = tr|A0A5A9WB46|A0A5A9WB46_9GAMM Queuine tRNA-ribosyltransferase OS=Nitrincola sp. MEB193; OX = 1708751 GN=tgt PE=3 SV=1
MQFECLAAEGKARRGRLTFPRGSVETPAFMPVGTYGTVKGMLPRDIKEIGAQMILGNTFHLMLRPGTEIIGLHGDLHDFMQWQGPILTDSGGFQVFSLGKMRKITEEGVSFRSPVDGSKVFLSPERSMEVQKALGSDVVMIFDECTPYPATEKEAADSMRLSLRWAERSKRAHGDNPSALFAIVQGGMYEHLRDESLKGLVEIGFDGYAIGGLSVGEPKEDMVRVLDHTAWKLPEDKPRYLMGVGKPEDIVEGVRRGVDMFDCVIPTRNARNGFLFTSTGVVKIRNSANKTDTRPLDENCDCYTCRNFSRAYLHHLDKCGEILGAQLNTLHNLHYYQTLMAGLRNALEQGKLCDFVDEFYAARGLQTPPLAPIDSITQPLENAE

SEQ ID NO: 58099 - protein, 373 aa, unidentified
  source 1..373: note = Nitrincola tibetensis
  REGION 1..373: note = tr|A0A364NR47|A0A364NR47_9GAMM Queuine tRNA-ribosyltransferase OS=Nitrincola tibetensis; OX = 2219697 GN=tgt PE=3 SV=1
MQFEQLATDGKARRARLTFPRGTVETPAFMPVGTYGTVKGMLPRDIKALGAQIILGNTFHLMLRPGTDIINLHGDLHNFMQWQGPILTDSGGFQVFSLGKMRKITEEGVSFQSPVDGSKVFLSPERSMEVQKALGSDIVMIFDECTPYPATEEEAAKSMRMSLRWARRSKDAHGDSPSALFGIVQGGMYPELRDESMAGLAEIDFDGYAIGGLSVGEPKDEMIKVLDHLAYKMPENKPRYLMGVGKPEDIVEAVRRGVDMFDCVIPTRNARNGFLFTSTGVVKIRNAVNKTDTRPLDENCDCYTCRNFSRAYLHHLDKCGEMLGAQLNTLHNLYYYQTLMAGLRKAIEQGKLCDFVDDFYRARGLETPPLADQ

SEQ ID NO: 58100 - protein, 345 aa, Nitritalea halalkaliphila
  REGION 1..345: note = tr|I5C2G6|I5C2G6_9BACT Queuine tRNA-ribosyltransferase OS=Nitritalea halalkaliphila LW7; OX = 1189621 GN=tgt PE=3 SV=1
MPVGTAGTVKAVHTRELEADIQAQIILGNTYHLYLRPGLEVLRQAGGLHRFNGWSKPILTDSGGYQVFSLAQSRKITEEGVTFKSHIDGSKHLFTPEGVMDIERTIGADIIMAFDECPPYPSTYAYAEQSMQLTHRWLKRCIERVDQTEPHYGYAQSLFPIVQGSTYKDLRAQSAEFIASCEREGNAIGGLSVGEPAEMMYEMTDHVNRILPRDKPRYLMGVGTPANILENIALGVDMFDCVMPTRNARNGMLFTTEGIINIRNEKWKSDFSPIDSGFPSYVSQFYSKAYLRHLVISKEILASQIASIHNLSFYLWLVGEARAQIQAGTFAGWKNRMVEVVSRRL

SEQ ID NO: 58101 - protein, 377 aa, Nitrobacter hamburgensis
  REGION 1..377: note = tr|Q1QMG2|Q1QMG2_NITHX Queuine tRNA-ribosyltransferase OS=Nitrobacter hamburgensis (strain DSM 10229 / NCIMB 13809 / X14) OX=323097 GN=tgt; PE = 3 SV=1
MSLANHFELLGRDGEARTGLLTTPHGAVRTPAFMPVGTQGAMKGLHWREMRDAGTDIVLGNTYHLMLRPGAERIAELGGLQKFTTWDGPMLTDSGGFQVMSLAQLRKVKEQGVTFRSHIDGTAIELTPERAVEVQRLLGSDIAMQLDECVRLPAERSDIERAVQLSLRWAERSKRAFEGAPAANMLFGIVQGGDSPELRRTSARGLTEIGFHGYAIGGLAVGEPQAVMLAMIEETIPSMPADRPRYLMGVGTPDDLLEAVARGIDMFDCVMPTRNGRHGMAFTRFGQINLRNARHANDPRPLDEESSWPASRNYSRAYLHHLVRSGETLGAMLLSGINVAYYQNLMQAMRTAITERNFQLFRERTRGDWARGDIAAR

SEQ ID NO: 58102 - protein, 65 aa, Nitrobacter sp.
  REGION 1..65: note = tr|A3WZL4|A3WZL4_9BRAD Queuine tRNA-ribosyltransferase OS=Nitrobacter sp. Nb-311A; OX = 314253 GN=NB311A_06151 PE=4 SV=1
MILSGKYADASAAIIESAQTGHVGRSLPRGAECSRAVDWISAIAGIVTSFVKMAVWTFGHGTRIV

SEQ ID NO: 58103 - protein, 377 aa, Nitrobacter sp.
  REGION 1..377: note = tr|A0A1Q3K2I8|A0A1Q3K2I8_9BRAD Queuine tRNA-ribosyltransferase OS=Nitrobacter sp. 62-13; OX = 1895797 GN=tgt PE=3 SV=1
MSLANHFKLLGRDGEARTGLLTTPHGAVRTPAFMPVGTQGAMKGLQWREVRDAGTDIVLGNTYHLMLRPGAERIDELGGLQKFTTWDGPMLTDSGGFQVMSLAQLRKVKEQGVTFRSHIDGTAIELTPERAIEVQRLLGSDIAMQLDECVRLPAERDDIERAMRLSLRWAERSKRAFEGAAEGHMLFGIVQGGDNPELRRASARELTGIGFHGYAIGGLAVGEPQTVMLAMIEETIPSMPADRPRYLMGVGTPDDLVEAVVRGIDMFDCVMPTRNGRHGMAFTRFGQINLRNARHADDPRPLDEESSWPPSRTYSRAYLHHLVRSGETLGAMLLSGINIAYYQSLMQAMRAAIAEGTFQQLRERTRADWARGDIAAR

SEQ ID NO: 58104 - protein, 377 aa, Nitrobacter vulgaris
  REGION 1..377: note = tr|A0A1V4HZC3|A0A1V4HZC3_NITVU Queuine tRNA-ribosyltransferase OS=Nitrobacter vulgaris OX=29421; GN = tgt PE=3 SV=1
MSLANHFEILGRDGSARTGLLTTAHGAVRTPAFMPVGTQGAMKGLQWQEVRDAGTDIVLGNTYHLMLRPGAERIDELGGLQKFTTWGGPMLTDSGGFQVMSLAQLRKVKEQGVTFRSHIDGTAIELTPERAVEVQRLLGSDIAMQLDECVRLPAERTDIERAMQLSLRWAERSRRAFEGAPAANMLFGIVQGGDSSDLRRTSACRLTEIGFHGYAIGGLAVGEPQAIMLAMIEETAPWLPVDRPRYLMGVGTPDDLLEAVARGIDMFDCVMPTRNGRHGMAFTRFGQINLRNARHADDPRPLDEESSWPASRNYSRAYLHHLVRSGETLGAMLLSGINIAYYQSLMQAMRTAIKGGTFQQFRELTREGWARGDIAMR

SEQ ID NO: 58105 - protein, 377 aa, Nitrobacter winogradskyi
  REGION 1..377: note = tr|A0A4Y3W9R5|A0A4Y3W9R5_NITWI Queuine tRNA-ribosyltransferase OS=Nitrobacter winogradskyi OX=913; GN = tgt PE=3 SV=1
MNPANHFEILGRDGDARSGLLTTAHGTVRTPAFMPVGTQGAMKGLQWQEVRDAGADIVLGNTYHLMLRPGAERIHELGGLQKFTSWGGPMLTDSGGFQVMSLAQLRKVKEQGVTFRSHIDGAVIELTPERAIEVQRLLGSDIAMQLDECVRLPAERGDIERAMQLSLRWAERSRRAFEGAPAADMLFGIVQGGDSPELRRTSACGLTGIGFHGYAIGGLAVGEPQATMLAMIEETVPWLPIERPRYLMGVGTPHDLLEAVARGIDMFDCVMPTRNGRHGTAFTRFGQINLRNARHADDPRPLDEESSWPAARDYSRAYLHHLVRSGETLGAMLLSGINIAYYQGLMQAMRSAIAAGAFQQFREQTREGWARGDIATR

SEQ ID NO: 58106 - protein, 377 aa, Nitrobacter winogradskyi
  REGION 1..377: note = tr|Q3SRN5|Q3SRN5_NITWN Queuine tRNA-ribosyltransferase OS=Nitrobacter winogradskyi (strain ATCC 25391 / DSM 10237 / CIP 104748 / NCIMB 11846 / Nb-255) OX=323098 GN=t gt PE=3 SV=1
MSLANHFELLGRDGDARTGLLTTAHGTVRTPAFMPVGTQGAMKGLQWQDVRDAGADIVLGNTYHLMLRPGAERIHELGGLQKFTRWGGPMLTDSGGFQVMSLAQLRKVKEQGVTFRSHIDGTAIELTPERAIEVQRLLGSDIAMQLDECVRLPAERGDIERAMQLSLRWAERSRRAFEGAPAANMLFGIVQGGDIPELRRTSACGLTGIGFHGYAIGGLAVGEPQATMLAMIEEAAPWLPMERPRYLMGVGTPHDLLEAVARGIDMFDCVMPTRNGRHGMAFTRFGQINLRNARHADDPRPLDEESSWPAARDYSRAYLHHLVRSGETLGAMLLSGINIAYYQSLMQAMRSAIAGGVFQEFRERTREGWARGDIASR

SEQ ID NO: 58107 - protein, 370 aa, Nitrococcus mobilis
  REGION 1..370: note = tr|A4BSU0|A4BSU0_9GAMM Queuine tRNA-ribosyltransferase OS=Nitrococcus mobilis Nb-231; OX = 314278 GN=tgt PE=3 SV=1
MSMRFELLGQCGRARHGRLVFERGEVYTPAFMPVGTYGTVKAMTAEELRALGVEILLANTFHLMLRPGTEIIAAHGDLHAFMHWDGPILTDSGGFQVYSLGAMRRVTEQGVHFRSPVDGASVFMGPEESMAVQRALGADIVMVFDECLAHPASESAARTSMELSLRWAARSHQAHAGNSAALFGIVQGGLYEPLRVASLNALLEIGFDGYAVGGLAVGEPTEERLRILEFLDPHLPVAHPRYLMGVGKPEDIVEAVRRGVDLFDCVIPTRNARNGYLYTHAGTLRIRNSCYAHDTRPVDEQCGCYTCRHYTRAYLRHLDRCNEILGARLNTLHNLCYYQQLMDNLRTAISEGRLESHIREFYAKREPGMT

SEQ ID NO: 58108 - protein, 156 aa, Nitrococcus mobilis
  REGION 1..156: note = tr|A4BVV4|A4BVV4_9GAMM Queuine tRNA-ribosyltransferase (Fragment) OS=Nitrococcus mobilis Nb-231 OX=314278 GN=NB231_17550 PE=4 SV=1
MTRAAFTCTARSGAARAGELTVRGRTLQTPAFLPVGTYGAVKGLHPGTIRDHGAGMILANACHLHDRPGADVVASLGGLHAFMGWDGLILTDSGGFQVFSMMDIASLDEDGVTFRSPINGRPLRLGPDEVVDVQLALDSDIAMVFDHCPALPAPRR

SEQ ID NO: 58109 - protein, 407 aa, unidentified
  source 1..407: note = Nitrolancea hollandica
  REGION 1..407: note = tr|I4EI94|I4EI94_9CHLR Queuine tRNA-ribosyltransferase OS=Nitrolancea hollandica Lb; OX = 1129897 GN=tgt PE=3 SV=1
MTNVERINSSQQHFRVITPDRETGARTGILTTRRGTVQTPAFMPVGTQASVRALSPDEVMRTGTEIILANTYHLMLRPGVDLIRAAGGLHRFMAWPGPILTDSGGFQVFSLAHRRSVSEQGVIFRSHIDGSLHELTPESAIDLQLGFDSDIIMPLDELIGFGAPEPVQQAAMERTHRWLQRAIDRFQSSVQDAGPDRPFLFGIAQGGFIPELRRESAAFIAAQPVDGWAIGGLSVGESKDVMDAMLAETISALPVEKPRYLMGVGSPEDLWRGVAAGVDMFDCVHPTRVARRGGLFTPDGRVNVTASRFRDHFGPVDETCDCVTCTTFIAAYLNHLFRARELLAYRLASIHNLRFIQREMAAIRRSIESGTFAADMAAFLGRYRPADAEAAREQRRHWAERHAPARP

SEQ ID NO: 58110 - protein, 371 aa, unidentified
  source 1..371: note = Nitrosococcus halophilus
  REGION 1..371: note = tr|D5BV95|D5BV95_NITHN Queuine tRNA-ribosyltransferase OS=Nitrosococcus halophilus (strain Nc4) OX=472759 GN=tgt PE=3 SV=1
MEFELLTRAGAARRGRLRFPRGTVETPAFMPVGTYGTVKAMTPEELRTGGAEIVLGNTFHLMLRPGTEVIAKHGGLHGFMHWEGPILTDSGGFQVWSLGAMGKITEQGVSFRSPIDGRPVFLGPEESMAVQRALGADIVMIFDDCTPYPATEEMTRQSMELSLRWAARSREAHGDSAAALFGIIQGGMYEDLRDQSLQGLLEIGFEGYAIGGLSVGEPKDAMARILTHTAPQMPADKPRYLMGVGRPEDMVEAVRQGIDMFDCVMPTRNARNGHLFVREGVIRIRNSTYRDDTRPLDEGCTCYTCRHYSRAYLHHLDKTREILGSRLNTLHNLHYYQNLMERLREAIEQNRLEAFVAEFYAARAQDPLPVP

SEQ ID NO: 58111 - protein, 371 aa, Nitrosococcus oceani
  REGION 1..371: note = tr|A0A0E2YYZ7|A0A0E2YYZ7_9GAMM Queuine tRNA-ribosyltransferase OS=Nitrosococcus oceani C-27; OX = 314279 GN=tgt PE=3 SV=1
MEFELLSCGGAARRGRLRFPRGSVETPAFMPVGTYGTVKAMTPEELRTGGAEIVLGNTFHLMLRPGTQVIAKHGGLHGFMHWDGPILTDSGGFQVWSLGAMRKITERGVNFRSPVDGRLIFLGPEESIAVQRELGADIVMVFDDCTPHPVSEEVARQSMELSLRWAARSREAHGDSPAALFGIIQGGMYEHLREESLQELLTIGFEGYAVGGLSVGEPKEDRERILTAIVSRMPADKPRYLMGVGRPEDIVEAVRRGMDMFDCVMPTRNARNGHLFVREGVIRIRNSTYRKDTRPLDESCTCYTCRHYSRAYLHHLDKSREILGARLNTIHNLHYYQALMEQLRQAIEQDGLERFSAEFYAARVQDRLSVS

SEQ ID NO: 58112 - protein, 391 aa, Nitrosococcus oceani
  REGION 1..391: note = tr|Q3J8N6|Q3J8N6_NITOC Queuine tRNA-ribosyltransferase OS=Nitrosococcus oceani (strain ATCC 19707 / BCRC 17464 / NCIMB 11848 / C-107) OX=323261; GN = tgt PE=3 SV=1
MLSSGGFSFYLHSSRVIAQKMEFELLSCGGAARRGRLRFPRGSVETPAFMPVGTYGTVKAMTPEELRTGGAEIVLGNTFHLMLRPGTQVIAKHGGLHGFMHWDGPILTDSGGFQVWSLGAMRKITERGVNFRSPVDGRLIFLGPEESIAVQRELGADIVMVFDDCTPHPVSEEVARQSMELSLRWAARSREAHGDSPAALFGIIQGGMYEHLREESLQELLTIGFEGYAVGGLSVGEPKEDRERILTAIVSRMPADKPRYLMGVGRPEDIVEAVRRGMDMFDCVMPTRNARNGHLFVREGVIRIRNSTYRKDTRPLDESCTCYTCRHYSRAYLHHLDKSREILGARLNTIHNLHYYQALMEQLRQAIEQDGLERFSAEFYAARVQDRLSVS

SEQ ID NO: 58113 - protein, 371 aa, unidentified
  source 1..371: note = Nitrosococcus wardiae
  REGION 1..371: note = tr|A0A4P7BWZ8|A0A4P7BWZ8_9GAMM Queuine tRNA-ribosyltransferase OS=Nitrosococcus wardiae; OX = 1814290 GN=tgt PE=3 SV=1
MEFELLTRAGAARRGRLRFPRGTVETPAFMPVGTYGTVKAMTPEELRTGGAEIVLGNTFHLMLRPGTEIIAKHGGLHGFMHWERPILTDSGGFQVWSLGAMGKITEQGVSFRSPIDGRPVFLGPEESIAVQRQLGADIVMIFDDCTPYPATKEVTRQSMELSLRWAARSRETHGDSPAALFGIIQGGMYEDLRDQSLQGLLEIGFEGYAIGGLSVGEPKEAMARILAHTAPQMPADKPRYLMGVGRPEDIVEAVRQGIDMFDCVMPTRNARNGHLFVRGGVIRIRNSPYRDDTRPLDEGCTCYTCRHYSRAYLHHLDKTREILGSRLNTLHNLHYYQTLMEQLRQAIEQNRLEAFVAEFYAARAQDPLPVP

SEQ ID NO: 58114 - protein, 371 aa, unidentified
  source 1..371: note = Nitrosococcus watsoni
  REGION 1..371: note = tr|D8K803|D8K803_NITWC Queuine tRNA-ribosyltransferase OS=Nitrosococcus watsoni (strain C-113) OX=105559 GN=tgt PE=3 SV=1
MEFEVLAQAGMARRGRLRFPRGSVETPAFMPVGTYGTVKAMTPEELRTGGAEIVLGNTFHLMLRPGTQVIAKHGGLHGFMHWDGPILTDSGGFQVWSLGAMRKITERGVNFRSPVDGRLIFLGPEESIAVQRELGADIVMVFDDCTPHPVSEKVARRSMELSLRWATRSRDAHGDSPAALFGIIQGGMYEHLRAESLQELLTIGFEGYAVGGLSVGEPKEDRERILTAIVPPMPTDKPRYLMGVGRPEDIVEAVRRGMDMFDCVMPTRNARNGHLFVREGVIRIRNSTYRKDTRPLDESCTCYTCRHYSRAYLHHLDKSREILGARLNTIHNLHYYQALMEQLRQAIEQDGLERFSAEFYAARVQDRLSVS

SEQ ID NO: 58115 - protein, 369 aa, unidentified
  source 1..369: note = Nitrosomonadaceae bacterium
  REGION 1..369: note = tr|A0A2E6URY7|A0A2E6URY7_9PROT Queuine tRNA-ribosyltransferase OS=Nitrosomonadaceae bacterium; OX = 2026767 GN=tgt PE=3 SV=1
MRFKVHANEGFARCGTLTSIHGKVETPAFMPVGTYGAVKAMSPRELQQINTHIVLGNTFHLWLQPGLEVIDAHGGLHKFIGWDGPILTDSGGFQVFSLGKIRKISEQGVKFQSPINGDKCFLTPEESMRIQRVLNSDIVMAFDECTPYPADEMMTKKSMELSLRWAERSRSAHDSDGGNPNALFGIVQGGMYENLRDLSLAELKDINFDGYAIGGLSVGEPKSDMRRILQHSVHQLPISKPRYLMGVGTPSDILNAVSQGVDMFDCVLPTRNARNGWLFTRNGIIKLRNSQYSRDMASPDERCGCYTCCNFTRSYLHHLQRINEILGSHLNTLHNLYYYQQLMSEIRTAIEAGQFGEYVQEFQANVASC

SEQ ID NO: 58116 - protein, 369 aa, unidentified
  source 1..369: note = Nitrosomonadaceae bacterium
  REGION 1..369: note = tr|A0A4P5UFF1|A0A4P5UFF1_9PROT Queuine tRNA-ribosyltransferase OS=Nitrosomonadaceae bacterium; OX = 2026767 GN=tgt PE=3 SV=1
MKFQLHRSEGHARRGTLTLAHGVVETPAFMPVGTYGAVKTMSPEELHAVNAHIVLGNTFHLWLRPGLEVIAAHGGLHHFMGWNGPILTDSGGFQIFSLGDLRKISEEGVKFQSPVNGDKCFLTPEESMRIQRVLNSDIVMIFDECTPYPADERVSCISMEMSLRWAERSKRAHEDDGGNPNALFGIIQGGMHEDLRERSLAGLSDISFDGYAIGGLSVGEPKEDMQRILKHIAPQLPTDKPRYLMGVGTPADIVHAVAQGVDMFDCVLPTRNARNGWLFTRNGVIKLRNSKYRLDTASPDEQCGCYTCQNFSLAYLHHLQRINEILGARLNTLHNLYYYQQLMGDIRSAIEAGRFEEFKQEFQASAASC

SEQ ID NO: 58117 - protein, 369 aa, unidentified
  source 1..369: note = Nitrosomonadales bacterium
  REGION 1..369: note = tr|A0A524MPL6|A0A524MPL6_9PROT Queuine tRNA-ribosyltransferase OS=Nitrosomonadales bacterium; OX = 2026761 GN=tgt PE=3 SV=1
MKFQVHSSDGLARRGTLTTAHGRVETPAFMPVGTYGAVKAMSPEELRETNAHIVLGNTFHLWLRPGLDVIDAHGGLHRFMGWDRPILTDSGGFQIFSLGRMRKITEEGVKFQSPVNGDAYFLTPEESMRIQRALNSDIVMIFDECTPYPADESIAKISMELSLRWAERSRRAHDNDGGNPNALFGIIQGGMYENLRDQSLAKLKDIGFDGYAIGGLSVGEPKGDMQRILKHSVQQLPVDKPRYLMGVGTPADILNAVSQGVDMFDCVLPTRNARNGWLFTRNGILKLRNNQYRTDISPPDEQCGCYTCRHFTRAYLHHLQRINEILGSRLNTLHNLHYYQQLMSEIRTAIETGRLEEYVQEFQANAASC

SEQ ID NO: 58118 - protein, 363 aa, unidentified
  source 1..363: note = Nitrosomonadales bacterium
  REGION 1..363: note = tr|A0A1E4GI46|A0A1E4GI46_9PROT Queuine tRNA-ribosyltransferase OS=Nitrosomonadales bacterium SCN 54-20 OX=1660164 GN=tgt PE=3 SV=1
MKFQLYRTDGLARRGTLSLAHGVVETPAFMPVGTYGAVKAMAPSDLQAINAHIVLGNTFHLWLRPGLEVIEAHGGLHRFMGWDGPILTDSGGFQVFSLGVLRKITEEGVKFKSPVNGDTCFLTPEESMRIQHVLNSDIVMIFDECTPYPADERAAGASMELSMRWAKRSRQAHDEGGNRNALFGIVQGGMYENLRDESLAGLLDIGFDGYAIGGLSVGEPKAEMRRILSHTAPRLPAEKPRYLMGVGTPADIVEAVAQGIDMFDCVLPTRNARNGWLYTRTGVIKLRNSQYRLDTRPADEQCTCYTCRHFSRAYLHHLQRTGEILGARLNTLHNLYYYQQLMGEIRTAIENGQFQEYARAFQA

SEQ ID NO: 58119 - protein, 364 aa, Nitrosomonas aestuarii
  REGION 1..364: note = tr|A0A1I4C4C3|A0A1I4C4C3_9PROT Queuine tRNA-ribosyltransferase OS=Nitrosomonas aestuarii OX=52441; GN = tgt PE=3 SV=1
MKFEIQNTDHAARRGTLTLAHGRVETPAFMPVGTYGAVKGMSPAMLQSVHAQIILGNTFHLWLRPGLDVIEAHGGLHGFMNWQGPILTDSGGFQVYSLGDLRKITEEGVKFSSPVNGDRCFLTPEESMRIQRILNSDIVMIFDECTPYPADEATTKSSMQLSLRWAERSRQAHGDNSNALFGIVQGGMYESVRDQSLAGLMAIGFDGYAIGGLSVGEPKAEMRRILEHTAPLLPVDKPRYLMGVGTPVDLVHAVAQGIDMFDCVLPTRNARNGWLYTRQGVLKLRNSRYRLDTTAPDAHCACYTCRNFTRAYLHHLQRINEMLGAQLNTVHNLFYYQELMTEIRSAIEQNQLSQFMQKFTREFQ

SEQ ID NO: 58120 - protein, 361 aa, Nitrosomonas communis
  REGION 1..361: note = tr|A0A0F7KCQ0|A0A0F7KCQ0_9PROT Queuine tRNA-ribosyltransferase OS=Nitrosomonas communis OX=44574; GN = tgt PE=3 SV=1
MKFELHHIDNKARRGTLTLAHGKVETPAFMPVGTYGAVKTVSPSELQEINAKIILGNTFHLWLRPGLDVIETHGGLHRFMGWNGPILTDSGGFQVFSLGKLRKINEKGVAFRSPVNGDMCFLTPEESMRIQRILNSDIVMIFDECTPYPVDIPIAKTSMELSLRWAERSKRAHDGNSNALFGIVQGGMHENLRDQSLAGLQQIGFDGYAIGGLSVGEPKADMQRILTYVAPQLPPDKPRYLMGVGTPADIVHAVAQGIDMFDCVLPTRNARNGWLYTRNGIIKLRNSRYRLDTSSPDEQCPCYTCRHFTRAYLHHLQRTNEILGARLNTLHNLYYYQQLMSDIRTAIELGQFEQYEREFQA

SEQ ID NO: 58121 - protein, 361 aa, Nitrosomonas communis
  REGION 1..361: note = tr|A0A1I4UQ24|A0A1I4UQ24_9PROT Queuine tRNA-ribosyltransferase OS=Nitrosomonas communis OX=44574; GN = tgt PE=3 SV=1
MKFKLHNVDNSARRGILTFPHGKVETPAFMPVGTYGAVKTVSPTELQEINAKIILGNTFHLWLRPGLDVIETHGGLHRFMGWNGPILTDSGGFQVFSLGKLRKINEKGVAFRSPVNGDMCFLTPEESMRIQRILNSDVVMIFDECTPYPVDIPIAKASMELSLRWAERSKRAHDGNPNALFGIVQGGMHENLRDQSLADLQKIGFDGYAIGGLSVGEPKADMQRILTHVAPQLPPDKPRYLMGVGTPADIVHAVAQGIDMFDCVLPTRNARNGWLYTRNGIIKLRNSRYRLDTSSPDEQCPCYTCRHFTRAYLHHLQRTNEILGARLNTLHNLYYYQQLMSEIRNAIELGQFEQYQREFQA

SEQ ID NO: 58122 - protein, 361 aa, unidentified
  source 1..361: note = Nitrosomonas cryotolerans
  REGION 1..361: note = tr|A0A1N6I4P6|A0A1N6I4P6_9PROT Queuine tRNA-ribosyltransferase OS=Nitrosomonas cryotolerans ATCC 49181 OX=1131553 GN=tgt PE=3 SV=1
MRFQLHCTDHAARRGTLTLAHGEVETPAFMPVGTYGAVKTMPPAALQEVHAQIVLGNTFHLWLRPGLEVIEAHGGLHDFMGWNKPILTDSGGFQVFSLGALRNITEEGVKFKSPVNGDSCFLTPEESMRIQRTLNSDIVMIFDECTPYPANEATASTSMELSLRWAERSKRAHENNPNALFGIVQGGMFENLRDQSFAALYDIGFDGYAIGGLSVGEPKADMQRILKHIAPQLPIETPRYLMGVGTPADIVNAVAQGIDMFDCVIPTRNARNGWLYTRQGVIKLRNSQYRLDTAPPDEHCHCYTCRHFSRAYLHHLQRINEILGAHLNTLHNLFYYQQLMSEIRTAIEVGQFEEYAREFQA

SEQ ID NO: 58123 - protein, 371 aa, Nitrosomonas europaea
  REGION 1..371: note = sp|Q82VF0|TGT_NITEU Queuine tRNA-ribosyltransferase; OS = Nitrosomonas europaea (strain ATCC 19718 / CIP 103999 / KCTC 2705 / NBRC 14298) OX=228410 GN=tgt PE=3 SV=1
MKFQLHCRDHEARRGTLTLAHGTVETPAFMPVGTYGAVKGLSPDELHTLGAGIILGNTFHLWLRPGLEVIGAHGGLHRLMNWDGPILTDSGGFQVFSLGALRKICEEGVRFRSPVNGDTCFLTPEESMRIQQVLNSDIVMIFDECTPYPVDMQIAESSMQLSLRWAERSKTAHAGNPNALFGIVQGGMYESLRDHSAAGLCAIGFDGYAIGGLSVGEPKADMQRILRHTAPQLPADKPRYLMGVGTPEDIVHAVAQGIDLFDCVLPTRNARNGWLYTSQGILRLRNSRYRLDTSPPDEHCDCYTCRHFTRAYLHHLQRTGEMLGARLNSLHNLHYYQRLMANIRKAIETGQFEQFARKFSGQDFMLKCASV

SEQ ID NO: 58124 - protein, 371 aa, Nitrosomonas europaea; identical to SEQ ID NO: 58123
  REGION 1..371: note = tr|A0A1I0C5R0|A0A1I0C5R0_NITER Queuine tRNA-ribosyltransferase OS=Nitrosomonas europaea OX=915; GN = tgt PE=3 SV=1

SEQ ID NO: 58125 - protein, 361 aa, Nitrosomonas eutropha
  REGION 1..361: note = sp|Q0AG55|TGT_NITEC Queuine tRNA-ribosyltransferase; OS = Nitrosomonas eutropha (strain DSM 101675 / C91); OX = 335283 GN=tgt PE=3 SV=1
MKFQLHCHDHHARRGTLTLAHGMIETPAFMPVGTYGAVKGLSPDELQTLGAEIILGNTFHLWLRPGLEVIEAHGGLHRFMHWDGPILTDSGGFQVFSLGALRKISEEGVRFRSPVNGDTCFLTPEESMRIQRVLNSDIVMIFDECTPYPVDMQIAEDSMQLSLRWAERSKAAHAGNPNALFGIVQGGMYESLRDRSIAGLYNIGFDGYAIGGLSVGEPKLEMQRILSHTAPQLPVDKPRYLMGVGTPEDIVRAVEQGIDMFDCVLPTRNARNGWLYTSQGVLKLRNSRYRLDTSPPDENCDCYTCRHFTRAYLHHLQRTGEMLGARLNSLHNLHYYQRLMSDIRKAIEAGQFEQFACRFSG

SEQ ID NO: 58126 - protein, 361 aa, Nitrosomonas eutropha; identical to SEQ ID NO: 58125
  REGION 1..361: note = tr|A0A1G4V450|A0A1G4V450_9PROT Queuine tRNA-ribosyltransferase OS=Nitrosomonas eutropha OX=916; GN = tgt PE=3 SV=1

SEQ ID NO: 58127 - protein, 361 aa, Nitrosomonas halophila
  REGION 1..361: note = tr|A0A1H3GFA7|A0A1H3GFA7_9PROT Queuine tRNA-ribosyltransferase OS=Nitrosomonas halophila OX=44576; GN = tgt PE=3 SV=1
MNFQLHCSDRQARRGTLTLAHGVVETPAFMPVGTYGAVKGLSPEDLQTLGADIILSNTFHLWLRPGLEVIEAHGGLHRFMGWDGPILTDSGGFQVFSLGALRKISEQGVHFRSPVNGDACFLTPEESMRIQRVLNSDVVMIFDECTPYPVDIQTAEQSMQLSLRWAERSRAAHAGNHNALFGIVQGGMYESLRDRSVAALCDIGFDGYAIGGLSVGEPKQDMQRILTHTAPQLPVDQPRYLMGVGTPADIVYAVSQGIDLFDCVLPTRNARNGWLYTRHGILKLRNSRYRLDTAPPDAQCACYTCRHFSRAYLHHLQRTNEMLGARLNSLHNLHYYQQLMADIRQAIETGRFEQLVQEFSV

SEQ ID NO: 58128 - protein, 364 aa, Nitrosomonas marina
  REGION 1..364: note = tr|A0A1I0DDI6|A0A1I0DDI6_9PROT Queuine tRNA-ribosyltransferase OS=Nitrosomonas marina OX=917; GN = tgt PE=3 SV=1
MNFNLKGTDQAARRGTLTLAHGQVETPAFMPVGTYGAVKGMSPEMLQNIHAQIILGNTFHLWLRPGLEVIAAHGGLHGFMHWNGPILTDSGGFQVYSLGDLRKITEQGVKFSSPVNGDRCFLTPEESMRIQRILNSDIVMIFDECTPYPADEAATKDSMELSLRWAERSRRAHEGNTNALFGIVQGGMYESLRDLSLAGLVSIGFDGYAIGGLSVGEPKADMRRILEHTAPLLPVDKPRYLMGVGTPADIVHAVAQGIDMFDCVLPTRNARNGWLYTRNGIIKLRNSRYRLDTAPPDDQCACYTCRNFTRAYLHHLQRINEMLGAHLNTVHNLFYYQHLMTEIRAAIEQKQFGELVEKFAREFQ

SEQ ID NO: 58129 - protein, 364 aa, Nitrosomonas marina
  REGION 1..364: note = tr|A0A1H8GMG4|A0A1H8GMG4_9PROT Queuine tRNA-ribosyltransferase OS=Nitrosomonas marina OX=917; GN = tgt PE=3 SV=1
MKFNLKGTDQAARRGTLTLAHGQVETPAFMPVGTYGAVKGISPEMLQNIHAQIILGNTFHLWLRPGLEVIAAHGGLHGFMHWNGPILTDSGGFQVYSLGDLRKITEQGVKFSSPVNGDRCFLTPEESMRIQRILNSDIVMIFDECTPYPADETATKDSMELSLRWAERSRRAHEGNTNALFGIVQGGMYESLRDRSLAGLVSIGFDGYAVGGLSVGEPKADMRRILEHTAPLLPADKPRYLMGVGTPADIVHAVAQGIDMFDCVLPTRNARNGWLYTRNGIIKLRNSRYRLDTAPPDDQCACYTCRNFTRAYLHHLQRINEMLGAHLNTVHNLFYYQHLMTEIRTAIEQAQFGEFVEKFAREFQ

SEQ ID NO: 58130 - protein, 362 aa, unidentified
  source 1..362: note = Nitrosomonas mobilis
  REGION 1..362: note = tr|A0A1G5SE54|A0A1G5SE54_9PROT Queuine tRNA-ribosyltransferase OS=Nitrosomonas mobilis OX=51642; GN = tgt PE=3 SV=1
MNFQLHYREQRARRGTLTLAHGKVETPAFMPVGTYGAVKGLSPAELVTLHAEIILGNTFHLWLRPGLEVIEAHGGLHGLMGWQGPILTDSGGFQVFSLGDLRKISEAGVHFRSPVNGDACFLTPELSMQIQRTLNADVVMIFDECTPYPVDLPIAETSMQLSLRWAERSKTAHAGNPNALFGIVQGGMFESLRDQSVQGLRDIDFDGYAIGGLSVGEPKEDMTRILTHTALQLPDDKPRYLMGVGTPADIVHAVAQGVDMFDCVLPTRNARNGWLYTSHGVLKLRNSQYRLDTSPPDETCGCYTCQHFTRAYLHHLQRTNEMLGARLNSLHNLHYYQHLMATIRQSIETGNFTTLSQQFLSV

SEQ ID NO: 58131 - protein, 367 aa, Nitrosomonas nitrosa
  REGION 1..367: note = tr|A0A3D0FDH6|A0A3D0FDH6_9PROT Queuine tRNA-ribosyltransferase OS=Nitrosomonas nitrosa OX=52442; GN = tgt PE=3 SV=1
MRFELHQVDGGARRATLTLAHGTVETPAFMPVGTYGAVKTLSPAELREIHADIILSNTFHLWLRPGLDVIEAHGGLHRFMGWNGPILTDSGGFQVFSLGKLRKIDEHGVVFRSPVNGDKCLLTPEESMRIQKTLGSDIVMIFDECTPYPADISIAKASMELSLRWAERSRRAHEANSNALFGIVQGGMHEHLRDQSLAGLQQIGFDGYAIGGLSVGEPKQDMQRILKHTAPQLPSDKPRYLMGVGTPQDIVFAISHGIDMFDCVMPTRNARNGMLFTSQGIINIRNEKWRDDLTPIDPELGGYVSTVYSKAYLRHLIINKEILGAQIASIHNLTFYLWLVQTARTKIIEGDFYQWKNQMIKSVKQRL

SEQ ID NO: 58132 - protein, 372 aa, Nitrosomonas nitrosa
  REGION 1..372: note = tr|A0A1I4KS27|A0A1I4KS27_9PROT Queuine tRNA-ribosyltransferase OS=Nitrosomonas nitrosa OX=52442; GN = tgt PE=3 SV=1
MRFELHQVDGDARRATLTLAHGTVETPAFMPVGTYGAVKTLSPAELREIHADIILSNTFHLWLRPGLDVIEAHGGLHRFMGWNGPILTDSGGFQVFSLGKLRKIDEHGVVFRSPVNGDKCLLTPEESMRIQKTLGSDIVMIFDECTPYPVDISIAKASMELSLRWAERSRRAHEANSNALFGIVQGGMHEYLRDQSLAGLQQIGFDGYAIGGLSVGEPKQDMQRILKHTAPQLPSDKPRYLMGVGTPQDIVFAISHGIDMFDCVLPTRNARNGWLYTRAGIIKLRNSRYRLDTAPPDEQCACYTCRHFTRAYLHHLQRTNEILGARLNSLHNLHYYQQLMTEIRAAIESRQFERYKQEFFANSHNIKPDCDY

SEQ ID NO: 58133 - protein, 361 aa, Nitrosomonas oligotropha
  REGION 1..361: note = tr|A0A5C7VVA2|A0A5C7VVA2_9PROT Queuine tRNA-ribosyltransferase OS=Nitrosomonas oligotropha; OX = 42354 GN=tgt PE=3 SV=1
MKFQLHSTDKAARRGTLTLAHGTVETPVFMPVGTYGAVKSMPPAALQATNAQIILGNTFHLWLRPGLEVIEAHGGLHDFMGWRGPILTDSGGFQVYSLGDLRKITEQGVHFKSPVNGDNCFLSPEESMRIQRTLNSDIVMIFDECTPYPADESTTQLSMELSLRWAERSKQAHHGNPNALFGIVQGGMYEQLRDQSFAGLYRIGFDGYAIGGLSVGEPKADMQRILKHTAPLLPVDQPRYLMGVGTPADIVHAVAHGIDMFDCVLPTRNARNGWLYTRHGIIKLRNSRYRLDTSPPDEHCGCYTCQHFSRAYLHHLQRINEMLGAHLNTVHNLYYYQQLMQEIRSAIENQQFEEYAQEFLA

SEQ ID NO: 58134 - protein, 361 aa, Nitrosomonas oligotropha
  REGION 1..361: note = tr|A0A2T5H9Y8|A0A2T5H9Y8_9PROT Queuine tRNA-ribosyltransferase OS=Nitrosomonas oligotropha; OX = 42354 GN=tgt PE=3 SV=1
MKFQLHSSDKAARRGTLTLAHGTVETPVFMPVGTYGAVKGMPPAALQATHAQIILGNTFHLWLRPGLEVIEAHGGLHDFMGWRGPILTDSGGFQVYSLGDLRKITEQGVHFKSPVNGDNCFLSPEESMRIQRTLNSDIVMIFDECTPYPADESTTQLSMELSLRWAERSKQAHHGNPNALFGIVQGGMHEHLRDQSFAGLYRIGFDGYAIGGLSVGEPKTDMQRILKHTAPLLPADKPRYLMGVGTPADIVHAVAHGIDMFDCVLPTRNARNGWLYTRHGIIKLRNSRYRLDTSPPDEQCGCYTCQHFSRAYLHHLQRINEMLGAHLNTLHNLYYYQQLMQEIRSAIENQQFEEYAQEFLA

SEQ ID NO: 58135 - protein, 361 aa, Nitrosomonas sp.
  REGION 1..361: note = tr|A0A2P7NUR8|A0A2P7NUR8_9PROT Queuine tRNA-ribosyltransferase OS=Nitrosomonas sp. APG5; OX = 2116706 GN=tgt PE=3 SV=1
MKFQLHSTDKAARRGTLALAHGIVETPVFMPVGTYGAVKSMSPAALQATHAQIILGNTFHLWLRPGLEVIEAHGGLHDFIGWHGPVLTDSGGFQVYSLGKLRKITEQGVHFKSPVNGDECFLSPEESMRIQRTLNSDIVMIFDECTPYPADETAARLSMELSLRWAERSKQAHNRNSNALFGIVQGGMYEHLREHSFAGLNQIGFDGYAIGGLSVGEPKADMQRILKHTTPLLPPDRPRYLMGVGTPADIVHAVAQGIDMFDCVLPTRNARNGWMYTRHGIIKLRNSRYRLDTLPPDEHCECYTCQNFSRSYLHHLQRINEMLGAHLNTVHNIYYYQQLMSEIRSAIENQQFEEYAQEFQA

SEQ ID NO: 58136 - protein, 361 aa, Nitrosomonas sp.
  REGION 1..361: note = tr|A0A1G8H082|A0A1G8H082_9PROT Queuine tRNA-ribosyltransferase OS=Nitrosomonas sp. Nm132; OX = 1881053 GN=tgt PE=3 SV=1
MKFELHHIDSGARRGTLTLTHGKVETPAFMPVGTYGAVKTVSPAELQEINAKIILGNTFHLWLRPGLDVIETHGGLHRFMGWNGPILTDSGGFQVFSLGKLRKINEQGVAFRSPVNGDKCFLTPEESMRIQRALNSDIVMIFDECTPYPVDILTAKTSMELSLRWAERSKRAHDGNPNALFGIVQGGMHENLRDLSLAGLQHIGFDGYAVGGLSVGEPKQDMQRILNHIVPQLPPDKPRYLMGVGTPADIIHAVAQGIDMFDCVLPTRNARNGWLYTRNGIIKLRNSRYRLDTSPPDDQCLCYTCRHFTRAYLHHLQRINEILGARLNTLHNLYYYQQLMTEIRTAIESGQFERYAREFQA

SEQ ID NO: 58137 - protein, 361 aa, unidentified
  source 1..361: note = Nitrosomonas stercoris
  REGION 1..361: note = tr|A0A4Y1YSE0|A0A4Y1YSE0_9PROT Queuine tRNA-ribosyltransferase OS=Nitrosomonas stercoris; OX = 1444684 GN=tgt PE=3 SV=1
MKFKLHCQDHQARRGTLTLAHGTVETPAFMPVGTYGAVKGLSPETLQSLGAEIVLGNTFHLWLRPGLAVIEAHGGLHQFMHWNGPILTDSGGFQVFSLGELRKISEEGVRFRSPINGDACFLTPEISMHIQRVLNADIVMIFDECTPYPVDIHTAETSMQLSLRWAERSKAAHADNPNALFGIVQGSMYETLRDRSVAGLCDIDFDGYAIGGLSVGEPKADMQRILSHTAPQLPTDKPRYLMGVGTPEDIVHAVAQGIDMFDCVLPTRNARNGWLYTSEGIVKLRNSRYQLDTSPPDKNCDCYTCRHFTRAYLHHLQRTGEMLGAQLNSLHNLHYYQQLMANIRQAIETSQFEEFAYQFFN

SEQ ID NO: 58138 - protein, 361 aa, Nitrosomonas ureae
  REGION 1..361: note = tr|A0A1H5VZ60|A0A1H5VZ60_9PROT Queuine tRNA-ribosyltransferase OS=Nitrosomonas ureae OX=44577; GN = tgt PE=3 SV=1
MKFQLHSTDKAARRGTLTLAHGTVETPVFMPVGTYGAVKSMSPAALRAVHAQIVLGNTFHLWLRPGLEVIEVHHGLHDFIDWHNPILTDSGGFQVYSLGKLRKITEQGVHFKSPVNGDNCFLSPEESMRIQRILNSDIVMIFDECTPYPADEATAKLSMELSLRWAERSKQAHGENPNALFGIVQGGMYEHLRTHSFAGLNQIGFDGYAIGGLSVGEPKVDMQRILKHTAPLLPTDKPRYLMGVGTPADIVHAVAQGVDMFDCVLPTRNARNGWLYTRNGIIKLRNSRYRLDTSPPDEHCGCYTCQNFSRAYLHHLQRINEMLGAHLNTVHNLFYYHNLMSEIRGAIENRRFEEYAQEFQA

SEQ ID NO: 58139 - protein, 361 aa, Nitrosomonas ureae
  REGION 1..361: note = tr|A0A0S3AJ78|A0A0S3AJ78_9PROT Queuine tRNA-ribosyltransferase OS=Nitrosomonas ureae OX=44577; GN = tgt PE=3 SV=1
MKFQLHSTDKAARRGTLTLAHGTVETPVFMPVGTYGAVKSMSPAALRAVHAQIVLGNTFHLWLRPGLEVIEVHHGLHDFIDWHNPILTDSGGFQVYSLGKLRKITEQGVHFKSPVNGDNCFLSPEESMRIQRILNSDIVMIFDECTPYPADEATAKLSMELSLRWAERSKQAHGENPNALFGIVQGGMYEHLRTHSFAGLNQIGFDGYAIGGLSVGEPKVDMQRILRHTAPLLPTDKPRYLMGVGTPADIVHAVAQGVDMFDCVLPTRNARNGWLYTRNGIIKLRNSRYRLDTLPPDEHCGCYTCLNFSRAYLHHLQRINEMLGAHLNTVHNLFYYHNLMSEIRSAIENRRFEEYAQEFQA

SEQ ID NO: 58140 - protein, 368 aa, Nitrosospira briensis
  REGION 1..368: note = tr|A0A1I5C429|A0A1I5C429_9PROT Queuine tRNA-ribosyltransferase OS=Nitrosospira briensis OX=35799; GN = tgt PE=3 SV=1
MKFKLHCSDGPARRGTLSLTHGTVETPAFMPVGTYGAVKTMSPAELREVNAHMVLGNTFHLWLRPGLEVVEAHGGLHRFMGWDAPILTDSGGFQVFSLGVMRKITEEGVRFKSPVNGDVCFLTPEESMRIQHVLDSDIVMIFDECTPYPADEPAASASMELSLRWAERSRRAHGDAGNHNALFGIVQGGMYENLRDQSLSRLLDIGFDGYAIGGLSVGEPKDDMQRILKHAAPQLPAEKPRYLMGVGTPADIVNAVSQGIDMFDCVLPTRNARNGWLYTRNGIIKLRNSQYRLDTAPPDEQCGCYTCRHFTRAYLHHLQRTSEILGARLNTLHNLHYYQQLMGEIRAAIEAGRFEEYVHAFQARAASC

SEQ ID NO: 58141 - protein, 369 aa, unidentified
  source 1..369: note = Nitrosospira lacus
  REGION 1..369: note = tr|A0A1W6SKS1|A0A1W6SKS1_9PROT Queuine tRNA-ribosyltransferase OS=Nitrosospira lacus OX=1288494; GN = tgt PE=3 SV=1
MRFQLHRSDGLARRATLTLMHGVVETPAFMPVGTYGAVKTMSPAELREVNAHIVLGNTFHLWLRPGLDVIEAHGGLHGFMGWNGPILTDSGGFQVFSLGVLNKITEQGVKFRSPVNGDTCFLTPEESMRIQRILNSDIAMIFDECTPYPADEPRAGKSMELSLRWAERSKRAHDNDGGNPNALFGIVQGGMYENLRDKSLMELRDIGFDGYAIGGLSVGEPKDDMQRILRHVAPRLPAERPRYLMGVGTPADIVNAVAQGVDMFDCVLPTRNARNGWLFTRNGIIKLRNSRYRLDTAPPDAQCGCYTCRHFTRAYLHHLQRINEILGARLNTLHNLYYYQQLMGEIRVAIEMGKFEDYAQEFQARAASC

SEQ ID NO: 58142 - protein, 367 aa, Nitrosospira multiformis
  REGION 1..367: note = sp|Q2Y6A3|TGT_NITMU Queuine tRNA-ribosyltransferase; OS = Nitrosospira multiformis (strain ATCC 25196 / NCIMB 11849 / C 71) OX=323848 GN=tgt PE=3 SV=1
MKFQLHRTDGLARRGTLSLTHGVVETPAFMPVGTYGAVKTMSPADLQVINAHIVLGNTFHLWLRPGLQVIEAHGGLHRFMGWDGPILTDSGGFQVFSLGVLRKITEQGVKFKSPVNGDTCFLTPEESMRIQYVLNSDIVMIFDECTPYPADERAVGESMELSLRWAERSRQAHDEGGNRNGLFGIVQGGMYEKLRDESLAGLLDIGFDGYAIGGLSVGEPKADMRRILRHTAPGLPAGKPRYLMGVGTPADIVDAVAQGMDMFDCVLPTRNARNGWLYTRTGVIKLRNSQYRLDTRPADEQCTCYTCRHFSRAYLHHLQRTGEILGARLNTLHNLYYYQQLMGEIRTAIENGQFQEYAQAFQAQTAS

SEQ ID NO: 58143 - protein, 367 aa, Nitrosospira multiformis
  REGION 1..367: note = tr|A0A1I7IS47|A0A1I7IS47_9PROT Queuine tRNA-ribosyltransferase OS=Nitrosospira multiformis; OX = 1231 GN=tgt PE=3 SV=1
MKFQLHRIDGLARRGTLSLTHGVVETPAFMPVGTYGAVKTMSPSDLRAINAHIVLGNTFHLWLRPGLEVIEAHGGLRRFMGWDGPILTDSGGFQVFSLGVLRKITEQGVKFKSPVNGDTCFLTPEESMRIQHVLNSDIVMIFDECTPYPADERAVGESMELSMRWAKRSRQAHDEGGNRNALFGIVQGGMYENLRDESLAGLLDIGFDGYAIGGLSVGEPKADMRRILRHTAPRLPAEKPRYLMGVGTPADIVDAVAQGIDMFDCVLPTRNARNGWLYTRAGVIKLRNSQYRLDTRPADEQCTCYTCRHFSRAYLHHLQRTGEILGARLNTLHNLYYYQQLMGEIRTAIESGQFQEYAQAFQAQTAS

SEQ ID NO: 58144 - protein, 368 aa, Nitrosospira sp.
  REGION 1..368: note = tr|A0A2T5JV96|A0A2T5JV96_9PROT Queuine tRNA-ribosyltransferase OS=Nitrosospira sp. Nsp2 OX=136548; GN = tgt PE=3 SV=1
MKFQLHCTDGVARRGTLSLTHGKVETPAFMPVGTYGAVKTMSPWELREINAHIVLGNTFHLWLRPGLEVIEAHGGLHRFMGWEGPILTDSGGFQVFSLGVLRKITEEGVKFQSPVNGDACFLTPEESMRIQRILNSDIVMIFDECTPYPADEPAAHKSMELSVRWAERSRRAHDDGQNSNALFGIVQGGMYETLRDHSLARLLDIGFDGYAIGGLSVGEPKDDMQRILRHVAPQLPAEKPRYLMGVGTPADIVNAVARGVDMFDCVLPTRNARNGWLFTRKGVIKLRNSRYRLDMAPPDEQCGCYTCRNFTLAYLHHLQRIGEILGARLNTLHNLYYYQQLMGEIRSAIENGKFEEYAQAFQANPPSC

SEQ ID NO: 58145 - protein, 368 aa, Nitrosospira sp.
  REGION 1..368: note = tr|A0A495EPC5|A0A495EPC5_9PROT Queuine tRNA-ribosyltransferase OS=Nitrosospira sp. Nsp44; OX = 1945879 GN=tgt PE=3 SV=1
MRFELHRTDGLARRGTLTLAHGTVETPAFMPVGTYGAVKTMSPAELREINAHIVLGNTFHLWLRPGLEVIEAHGGLHRFMGWERPILTDSGGFQVFSLGVLRKITEEGVKFQSPVNGDTCFLTPEESMRIQRILNSDIVMIFDECTPYPADELAASKSMELSVRWAERSRRAHDDGQNPNALFGIVQGGMYEKLRDRSLAELLGIGFDGYAIGGLSVGEPKDDMQRILKHAAPQLPSEKPRYLMGVGTPADIVNAVAQGVDMFDCVLPTRNARNGWLFTRNGVIKLRNSRYRLDMAPPDEQCGCYTCRNFTLAYLHHLQRIGEILGARLNTVHNLYYYQQLLGQIRAAIENGKFEEYAQAFQADPASC

SEQ ID NO: 58146 - protein, 368 aa, unidentified
  source 1..368: note = Nitrosovibrio sp.
  REGION 1..368: note = tr|A0A497X8M9|A0A497X8M9_9PROT Queuine tRNA-ribosyltransferase OS=Nitrosovibrio sp. Nv12; OX = 2135773 GN=tgt PE=3 SV=1
MKFQLHCTDGPARRGTLTLAHGGVETPAFMPVGTYGAVKTMSPAELQEVNAHIVLGNTFHLWLRPGLEVIEAHGGLHRFMGWDGPILTDSGGFQVFSLGVMRKIEEEGVRFKSPVNGDACFLTPEESMRIQRTLNSDIVMIFDECTPYPADEEATRESMELSVRWAERSRRAHNDMGNSNALFGIVQGGMHENLRDRSLSSLLDIGFDGYAIGGLSVGEPKADMQRILKHVAPQLPAERPRYLMGVGTPADIVNAVSQGIDMFDCVLPTRNARNGWLFTRNGIIKLRNSQYRLDTAPPDEQCGCYTCRHFTRAYLHHLQRIGEILGARLNTLHNLYYYQQLMSEIRSAIETGQFEEYAQAFQAHAASC

SEQ ID NO: 58147 - protein, 372 aa, unidentified
  source 1..372: note = Nitrosovibrio sp.
  REGION 1..372: note = tr|A0A1K1M9D4|A0A1K1M9D4_9PROT Queuine tRNA-ribosyltransferase OS=Nitrosovibrio sp. Nv17; OX = 1855339 GN=tgt PE=3 SV=1
MPAVRFQLHRVDGLARRATLTLAHGAVETPAFMPVGTYGAVKGVSPAELAQAGARIVLGNTFHLWLRPGLETIAAHGGLHGFMGWQGPLLTDSGGFQVFSLGALRRISEEGVRFRSPVNGDACMLTPEESMRIQRVLGSDVAMVFDECTPYPADERAAGASMELSLRWAERSRRAHDDDGGNPNALFGIVQGGMHETLRERSLAGLQAIGFDGYAIGGLSVGEPKHDMRRILRHIAPRLPAAQPRYLMGVGTPADIVEAVAQGVDMFDCVLPTRNARNGWLYTRDGVIRLRNSRYRHDTAPPDRRCGCYTCRHFSRAYLHHLQRIDEMLGARLNTLHNLHYYQELMEEIRDAIAAGMFEAYAREFQARAAPC

SEQ ID NO: 58148 - protein, 372 aa, unidentified
  source 1..372: note = Nitrosovibrio tenuis
  REGION 1..372: note = tr|A0A1H7G8W4|A0A1H7G8W4_9PROT Queuine tRNA-ribosyltransferase OS=Nitrosovibrio tenuis OX=1233; GN = tgt PE=3 SV=1
MEFKLHRTDGVARRGTLTLAHGTVETPAFMPVGTYGAVKTMSPADLREVDAHIVLGNTFHLWLRPGLEVIEAHGGLHRFMAWEGPILTDSGGFQVFSLGILRKISEEGVKFRSPVNGDACFLTPEESMRIQRVLNSDIAMIFDECTPYPADEPAAEKSMELSMRWAERSKRAHHDENNPNALFGIVQGGMYENLRDRSLGGLLNIGFDGYAIGGLSVGEPKDDMQRILKHVAPQLPGDKPRYLMGVGTPADIVNAVAQGVDMFDCVLPTRNARNGWLFTRHGIIKLRNSQYRLDTASPDEQCPCYTCRHFTRAYLHHLQRTGEILGARLNTLHNLYYYQQLMGEIRSAIETGRFDAYAQAYAQEFQACAASC

SEQ ID NO: 58149 - protein, 369 aa, Nitrospina gracilis
  REGION 1..369: note = tr|M1YNQ8|M1YNQ8_NITG3 Queuine tRNA-ribosyltransferase OS=Nitrospina gracilis (strain 3/211) OX=1266370 GN=tgt PE=3 SV=1
MFEFEIQKKHMHSGARLGTITTSHGRIQTPAFMPVGTQATVKALSPEDLKNCGAEIILGNTYHLYLRPGHKLIEQLGGLHRFMNWDRPILTDSGGYQVFSLNDLARVTEDGVTFRSHLDGSRHLLSPELAIEIQQSLGADIIMTFDEPTPPDADEAQTLQSLELSTRWARRCQEAHTRKGQTLFGIVQGGMFKNLRNESARQIIDLGFKGYAIGGLSVGEEKALMLELAEHTAPLLPENAPRYLMGVGTPDDLIDCVKMGIDMFDCVLPTRNARNGTIYTSEGKLNIRNARHRDSDRPLDPECTCYTCKHYSRAYLRHLYMADEIFAMRLNSLHNTAFFQKWMADIRRAIAEDRPLDWRLPESGENNGG

SEQ ID NO: 58150 - protein, 288 aa, Nitrospina sp.
  REGION 1..288: note = tr|A0A3D2UXJ5|A0A3D2UXJ5_9BACT Queuine tRNA-ribosyltransferase (Fragment) OS=Nitrospina sp.; OX = 2024844 GN=DHW17_05835 PE=3 SV=1
MISFEVIKTHSHSSARLGILTTPRGKIETPCFMPVGTQATVKALTPEDLESFGAQIILGNTYHLYLRPGHDLIRSLGGLHKFMNWPHPILTDSGGYQVFSLNELAKVTEEGVTFQSHFDGSSHFISPERSIEIQQALGADIIMAFDEPTPHTADISQTEKSLQLTTLWAQRCKQALHSDTQALFGIVQGGMYPDLRKKSAEQIMEIDFPGYAIGGLSVGEEKNLMYDITEYTAPLLPANKPRYLMGVGTPEDLLQCSSMGVDMFDCVMPTRNARNGSLFVKGGKINIR

SEQ ID NO: 58151 - protein, 366 aa, Nitrospina sp.
  REGION 1..366: note = tr|A0A523MWN7|A0A523MWN7_9BACT Queuine tRNA-ribosyltransferase OS=Nitrospina sp. OX=2024844; GN = tgt PE=3 SV=1
MFKFEVQHCHAHSSARLGSITTSHGTIDTPAFMPVGTQATVKALSPEDLVHCGAQIILGNTYHLYLRPGHEIIKKLGGLHRFMNWHRPILTDSGGFQVFSLSDLTKVTEEGVTFKSHLDGSTHLLSPEKSMEIQQALGADIIMAFDEPVAHDADHSKTARSLGLSTRWAKRCLESHATKSQALFGIVQGGMFKDLRQESAEQIVALDFPGFAIGGLSVGEEKSVMLEMAEHTTGFLPADRPRYLMGVGTPDDLLQCVKMGIDMFDCVMPSRNARNGSLFTSQGKMNIKNARYKMEDAPLDSECSCYTCKNYSRAYLRHLYTAEEILAMRLNTIHNIAFFQQWMQRIRTALAEDRPLDWEYPSQAEE

SEQ ID NO: 58152 - protein, 374 aa, unidentified
  source 1..374: note = Nitrospinae bacterium
  REGION 1..374: note = tr|A0A2H0MJK2|A0A2H0MJK2_9BACT Queuine tRNA-ribosyltransferase OS=Nitrospinae bacterium CG11_big_fil_rev_8_21_14_0_20_56_8 OX=1974049 GN=tgt PE=3; SV = 1
MFKFELIRSHSHSQARLGKIHTPHGTIDTPAFMPVGTQATVKALTPEDLLSCGVQVILGNTYHLYLRPGHEIIQNLGGLHRFMNWNGPILTDSGGFQIFSLNKLARVTEEGATFQSHLDGSSHFFTPEKAIEVQTSLGSDIIMPLDEPLAYPATWAEAEASLKLSTRWALRCREAHRSPSQALFGIVQGGMFKDLREQSAEQIVALDFPGYAIGGLSVGEDIELMREMARHTALLLPENKPRYLMGVGTPADLLAGSGMGIDMFDCVMPTRNARNGTLFTAKGKINIRNARFKTDPNPVDPNCDCYTCRNFSLAYLRHLFLADEILSMHLNTLHNIAFYQRWMKNIRDTIRADRPFDLAWTDDPAVTPGHPEFP

SEQ ID NO: 58153 - protein, 367 aa, unidentified
  source 1..367: note = Nitrospinae bacterium
  REGION 1..367: note = tr|A0A2H0CTH4|A0A2H0CTH4_9BACT Queuine tRNA-ribosyltransferase OS=Nitrospinae bacterium CG22_combo_CG10-13_8_21_14_all_47_10 OX=1974050 GN=tgt; PE = 3 SV=1
MIKFEVLKKHSHSSARLGVLTTPHGKIDTPCFMPVGTQATVKALTPDDLESFGVQIILGNTYHLYLRPGHELIRSLGGLHKFMNWPRPMLTDSGGYQVFSLNELTKVTEEGVTFQSHLDGSSHFISPERSIEIQQALGADIIMAFDEPTPYPADISSTEKSLKLTTLWARRCKESLHSDTQALFGIVQGGMYPDLRKKSAEQIIEIGFPGYAIGGLSVGEEKNLMHDTTAYTAPLLPEYKPRYLMGVGTPEDLLQCSSSGVDMFDCVMPTRNARNGSLFVKGGKINIRNAQYKSDPGPIEPDCPCYTCANFSRAYLRHLAMAGEILAMRLLTLHNSTFYQKWMASIRKAIEEDIPFNLDWSNQTEPG

SEQ ID NO: 58154 - protein, 369 aa, unidentified
  source 1..369: note = Nitrospira bacterium
  REGION 1..369: note = tr|A0A0S8CDA1|A0A0S8CDA1_9BACT Queuine tRNA-ribosyltransferase OS=Nitrospira bacterium SG8_3; OX = 1704023 GN=tgt PE=3 SV=1
MTFSFEVVHKSQERSPRLGKIHTARGSVDTPVFIPVGTQATVKSLTPEDLSHLGVQIILANTYHLYLRPGHDVISALGGLHRFMHWEGPILTDSGGYQVFSLARLREVSEQGVTFQSHLDGSRHLLTPEKAVRIQEALGADIMMCLDECTAYPATHAEARRSLTLSIDWARRCKESLRTDHASLFGIVQGGMFQDLRAEGVKALMDIGFDGYALGGLSVGEPKEAMLDMAAFTLPLLPDELPRYVMGVGAPEDLVEMVSFGADMFDCVIPTRHARNGQLFSATGTLNICNARYRADERPVDATCPCYTCTHYSRAYLRHLFMAKELLAYRLNTIHNIHYFMTLMTEMREAIREGRFALFKKNFYAQRGS

SEQ ID NO: 58155 - protein, 396 aa, unidentified
  source 1..396: note = Nitrospira bacterium
  REGION 1..396: note = tr|A0A0S8D3P0|A0A0S8D3P0_9BACT Queuine tRNA-ribosyltransferase OS=Nitrospira bacterium SG8_3; OX = 1704023 GN=tgt PE=3 SV=1
MFSFEVIAKEGDARAGRLVTPRGVIQTPSFVSVGTLATVKAVTPEDLREIGSQVVITNAFHLHLRPGEDLISRMGGLHRFMHWEGPLITDSGGFQIFSLGAGKEHGVGKIAPIFPDENDRGGHYGLGKKPLVTVDEDGVQFISYLDGSIHRFTPEGVIGIGRKLDTDIILVLDECTSPLHDFQYTRRAMERTHRWAQRALEAFQRTSEGNQALWGIVQGGAYQDLRKESATFIVDIDFDGFAIGGSLGKSKNDMHRVLDWTVPYLPEHKPRHLLGIGKVEDIFEVVRRGIDLFDCVAPTRLAHTGTFFTKESEAFQMHILNAQFKDDPRPIEEGCNCGTCRNYSRAYLRHLFLARELLGMQLAAIHNLSFMESVMREIRAAIKEGTFDALSKAWKR

SEQ ID NO: 58156 - protein, 385 aa, unidentified
  source 1..385: note = Nitrospira defluvii
  REGION 1..385: note = tr|D8PI91|D8PI91_9BACT Queuine tRNA-ribosyltransferase OS=Nitrospira defluvii OX=330214; GN = tgt PE=3 SV=1
MLTFRITHEESGGRARVGVLTTARSEIATPAFMPVGSLGNVRSVDGEELLKMGYGLILNNAYHLYLRPGHKVVEELGGVHGFTAWPGAILTDSGGFQVFSLAKFCKISDEGVMFQSHIDGSSRFISPETSIEIQEALGADIIMAFDHVVALPSSLDQVREASKRTSLWARRCVSAKRRTDQSLFGIVQGGLDAGLRVESARDLVSVGFDGYAVGGLSVGEDKADMYGMLDVTVPELPSAKPRYLMGVGMPEDLVEGVARGIDMFDCVVPSRHGRTGWLFTSFGRVVIKQARYARDEQPIDPACRCPVCTRYTRAYLHHLFGVKEMLGARLNTIHNLWFFAKLMEEIRSAVRGGTFQEFRREFHRTYVVDRPADDGRSASQNTNGS

SEQ ID NO: 58157 - protein, 381 aa, unidentified
  source 1..381: note = Nitrospira japonica
  REGION 1..381: note = tr|A0A1W1HZW4|A0A1W1HZW4_9BACT Queuine tRNA-ribosyltransferase OS=Nitrospira japonica OX=1325564; GN = tgt PE=3 SV=1
MEFTVKQTAGERHARLGVLTTAHGQIETPAFMPVGTLGPVKGIDPEELHQLGFRLFLNNAYHLYLRPGHKVISELGGLHRFAGWSGSILTDSGGFQIFSLAGLCRITDEGVTFRSHLDGSTHVITPESAIGIQEDLGADIIMAFDQCVALPADRDRVADAVRRTTLWAGRCQESRRRTDQALFGIVQGGLDPELRRKSARDIVALGFDGYAIGGLSVGETKEEMYRMLEICAPELPSVKPRYLMGVGMPENLIEGVARGVDLFDCVIPSRHGRTGWLFTESGRVSIKQARYTRDERPIDPNCACPVCRRYSRAYLHHLYNVKEMLASRLNTTHNLWYFSDFMRRLRGAIADGTFANFRDAFYRMRAEAPSEFVGTAETSGQ

SEQ ID NO: 58158 - protein, 388 aa, unidentified
  source 1..388: note = Nitrospira lenta
  REGION 1..388: note = tr|A0A330L7U5|A0A330L7U5_9BACT Queuine tRNA-ribosyltransferase OS=Nitrospira lenta OX=1436998; GN = tgt PE=3 SV=1
MMQFTIRQQDRQTKGRLGQLRTARAVIDTPAFMPVGSLGPVKGLEPEDLHDLGFRLMLNNAYHLYLRPGHKVVAELGGLHAFTGWPGAILTDSGGFQIFSLAKLCKITDEGVTFQSHIDGSTHFITPETAIEIEEALGADIIMAFDQCVALPASRAAILEGVQRTTAWAKRCQASRRRNDQALFGIVQGGLEADLRRISAQELVALDFEGYAIGGLSVGESKADMYAMLDVTAPELPEAKPRYLMGVGLPEDLIEGVARGVDLFDCVVPSRHGRTGWLFTSFGRVSIKQAQYKQDERPIDPDCGCSVCKRYSRAYLHHLFNVKEMLGARLNTIHNLWYFADLMQRVRSSIERGTFLTMREEFYRARAEAERVGGATAVAAQEPRAGLD

SEQ ID NO: 58159 - protein, 381 aa, Nitrospira moscoviensis
  REGION 1..381: note = tr|A0A0K2GHD8|A0A0K2GHD8_NITMO Queuine tRNA-ribosyltransferase OS=Nitrospira moscoviensis; OX = 42253 GN=tgt PE=3 SV=1
MQYQLRQRDRQTKARLGRLSTVRAVIETPAFMPVGSLGPVKGLEPDDLHALGFRLMLNNAYHLSLRPGHKVVAEFGGLHTFTGWPGAILTDSGGFQIFSLAKLRTVSDEGVTFQSHIDGSSHFISPETAIEIQEALGADIIMAFDECVALPADRAAVHEGVRRTTLWADRCQASRRRTDQALFGIVQGGLEPDLRVMSARQLVAMGFEGYAVGGLSVGESKTDMARMLEVTVPELPDDKPRYLMGVGLPEDLIEGVARGIDLFDCVVPSRHGRTGSLFTAAGRIVIKQAQYRRDERPIDAACACPVCKRFSRAYLHHLYNVKEMLGSRLNTMHNLWFFADLMQRVRGAIEQGTFAEFRDEFHRMRMAGEEADEHDQRAGTE

SEQ ID NO: 58160 - protein, 386 aa, Nitrospira sp.
  REGION 1..386: note = tr|A0A136JQN1|A0A136JQN1_9BACT Queuine tRNA-ribosyltransferase OS=Nitrospira sp. OLB3 OX=1617410; GN = tgt PE=3 SV=1
MLSFRVTHEESTGCARVGVLSTGRGEIPTPAFMPVGSLGNVRTVDGDELLKMGYGLILNNAYHLYLRPGHKIVQELGGVHGFTAWPGAILTDSGGFQVFSLAKFCKVTDEGVTFQSHIDGSARFISPETAIEIQEALGADIIMAFDHVVALPSSPEQVRDAAVRSSLWAKRCADAKRRTDQSLFGIVQGGLDPGLRGRSARDLVSIGFDGYAVGGLSVGEAKVDMYAMLDVTVPELPSNKPRYLMGVGMPEDLVEGVARGIDLFDCVVPSRHGRTGWLFTSFGRVVIKQARYARDEQPIDPACRCPVCMRYTRAYLHHLFDVKEMLGARLNTIHNLWFFAQLMQDIRNALRNGTFQAFRQEFHRTYVVDRPGEDARPETSGADRLF

SEQ ID NO: 58161 - protein, 392 aa, Nitrospira sp.
  REGION 1..392: note = tr|A0A357ENQ4|A0A357ENQ4_9BACT Queuine tRNA-ribosyltransferase OS=Nitrospira sp. OX=70125 GN=tgt; PE = 3 SV=1
MMQYHIHHPDPHSHGRIGELTTGHATIETPAFMPVGSLGPVKGLEPKDLQELGFGLMLNNAYHLYLRPGHKIVADMGGLHAFTGWAGAILTDSGGFQIFSLAKLCAITDDGVTFQSHIDGSTHVITPEKAIEIEEALGADIIMVLDQCVALPAGREVVQEGVRRTRLWAERCQAARRRTDQALFGIVQGGLEADVRVTSARDLVALGFEGYAIGGLSVGESKADMYKMLDVTVPELPESKPRYLMGVGLPEDLVEGVARGVDLFDCVVPSRHGRTGSLFTTSGRVVIKQAKYADDERPIDPDCGCPVCARYSRAYLHHLFMVKEMLGARLNTIHNLWYFSELMRGIRDAMREKRFPAFREAFYRHRDQSSPREDSGDGESNAHRECEHSHQT

SEQ ID NO: 58162 - protein, 383 aa, unidentified
  source 1..383: note = Nitrospiraceae bacterium
  REGION 1..383: note = tr|A0A353UDS6|A0A353UDS6_9BACT Queuine tRNA-ribosyltransferase OS=Nitrospiraceae bacterium; OX = 2026770 GN=tgt PE=3 SV=1
MKFELLSKDGNARLGIISTRRGNINTPAFMPVGTQATVKAMSPEELKEIGAEIILSNTYHLYLRPGHETIASLGGLHKFMNWDKPILTDSGGFQVFSLSALRSISEKGVHFRSHLDGSMHFIGPDEAMEIQSDLGADICMAFDECTPYPASYEYAVKSLELTTKWAKRCKEWIQDARYRIQDKKSGIVHHESCIMNQSLFGIIQGGIYKDLRKRSLEELVEIDFDGYASGGLSVGEPKEEMHEIINFIAPLMPEDKPRYLMGIGDLNDMLAAVEAGFDMFDCVMPTRNARNGTLFTSTGRISIKRTEYKADSEPLDKECGCYTCRNFSKAYLRHLFLAKEILSMRLNTIHNLYFYVDFFRKMREAINKGQFKEFKDRWKMLLR

SEQ ID NO: 58163 - protein, 371 aa, unidentified
  source 1..371: note = Nitrospiraceae bacterium
  REGION 1..371: note = tr|A0A3C0V5S6|A0A3C0V5S6_9BACT Queuine tRNA-ribosyltransferase OS=Nitrospiraceae bacterium; OX = 2026770 GN=tgt PE=3 SV=1
MKFSILNSDNKARRGVIETERGSIQTPAFMPVGTQGTVKAMSPEELKEMGAEIILSNTYHLYLRPGHEIIHRLGGLHKFINWERPILTDSGGFQVYSLSSLRKIREAGVEFRSHLDGSLHFLSPEKAMEIQAMLGSDIVMAFDECTPYPAEYEYAVKSLELTTKWARRCKEFSIQHSPVQSLFGIIQGGMYKDLRKRSLEDLMEIGFDGYAAGGLSVGEPKEEMHETIEFIGPLMPAEKPRYLMGVGDLSDVMTAVENGFDMFDCVMPTRNARNGTLFTSRGRISIKRTEFKADPAPLDPDCGCYTCRNYSRAYLRHLFLAKEILSMRLNTIHNLYFYLDFFGKMRDAINSGTFKQFKKYWEAVLQAGVIE

SEQ ID NO: 58164 - protein, 371 aa, unidentified
  source 1..371: note = Nitrospirae bacterium
  REGION 1..371: note = tr|A0A1G1HUH3|A0A1G1HUH3_9BACT Queuine tRNA-ribosyltransferase OS=Nitrospirae bacterium RIFCSPLOW2_12_42_9 OX=1801722 GN=tgt PE=3 SV=1
MKFNVLKEDSLTSARLGRLATTHGIVDTPAFMPVGTSGSVKGVTPEEVRHSGAQIILGNTFHLYLRPGSKLIASLGGLHKFTGWDGPILTDSGGYQVFSLAKLRKITGNGVIFQSPIDGSEHIFTPEMVIEIQETIGSDIIVCLDECIPFPATYEYTKESTDMTLQWAERSKKAIKRYDSGLFCVVQGGFFKDLREYCANELVNTGFDGYAIGGLSVGESKDMMYSVLDQTVPMLPADRPRYLMGVGLPENIIEGVIRGIDMFDCVVPTRHGRRGYLFTQSGHIIIKNAGYKDDESPVEDGCDCYTCSKYSRAYLRHLFMSGEILGLRLNTIHNLHYFGRLMNAIRGAIEEGRISQFRERFYSIRKEGDRC

SEQ ID NO: 58165 - protein, 380 aa, unidentified
  source 1..380: note = Nitrospirae bacterium
  REGION 1..380: note = tr|A0A3M1QG54|A0A3M1QG54_9BACT Queuine tRNA-ribosyltransferase OS=Nitrospirae bacterium; OX = 2026887 GN=tgt PE=3 SV=1
MARPPRCIDFAQLAADPAGGRRCRFRTAHGWVETPGFMPVGSDGAVRTLTPAQVAGETGPHVVLANTFHLLLAPGPELVARHGGLHRFMGWRRAILTDSGGFQVFSLPGSEISDAGIRLPDPRKGREGRSVWLDPEESIRVQGLLGADIAMCLDECPGYPAPRERVAEAVARTTAWAERCLYAHDREGQLLFGIVQGGVHPELRARSVAEITRLGFDGYAIGGVSVGEGTERIHRVVAETAPQLPEDRPRYLMGVGPPEDILAAVAAGCDLFDCVIPTRFGRAGTLLTRGGKVRIGERRHRRDLRPVDAECRCYTCRTFSRAYLHHLFAVGEPLGATLASLHNLRFYQDLMAAIREAIEQRRFAAFRDRFLARYRHRRRG

SEQ ID NO: 58166 - protein, 392 aa, unidentified
  source 1..392: note = Nitrospirales bacterium
  REGION 1..392: note = tr|A0A524IIC7|A0A524IIC7_9BACT Queuine tRNA-ribosyltransferase OS=Nitrospirales bacterium; OX = 2358460 GN=tgt PE=3 SV=1
MTFSDQQSLASSGVNRFQVHHTSASGARVGLLSTSHGHIDTPAFMPVGSQGTVKGLDPHEVRDCGFQMILANAYHLFLRPGHELIESQGGLHQFMQWPGGILTDSGGFQMVSLADLCKITEEGVRFRSHINGEWHMLSPEKSMGIQVALGSDIMMVLDHCPTFPCTKPQALEAMKRTTRWAKRCADVPKKAHQWMFGIVQGGVFPELRKEATQELVDLSMDGYALGGLSLGEEKPAMFEMIETVVGLLPADRPRYLMGVGLPEDRVEGVARGLDLFDCVIPTRHGRTGWLFTSTGRVLIKQARYKKDSNPIDADCECPVCQRFSRAYLRHLFISREMLGVRLNTVHNLWYYGQLMAELRAAVRENRFEDYRNDFYRRRELVPNEPLSQDAMN

SEQ ID NO: 58167 - protein, 420 aa, unidentified
  source 1..420: note = Nitrospirillum amazonense
  REGION 1..420: note = tr|A0A560FQC4|A0A560FQC4_9PROT Queuine tRNA-ribosyltransferase OS=Nitrospirillum amazonense; OX = 28077 GN=tgt PE=3 SV=1
MSDLPTSYPGFSFEITHKAPDSRARLGRLTTPHGTISTPNFIFCGTKASIKGVTPAQMRAEKTDIILSNTYHLMIQPGADIVAKMGGLHRFMGWDGPMLTDSGGFQIFSMGHGSVADEIKGRRTQTRDTTLLKITEKGATFRSYMNGEKLFLSPELSIDIQRKLGADLIVQFDECTPFHVDRAYTAKSMALSHRWGDRSLKEFVKGGGMSYNGLPQALYGIIQGGVYEDLRKESATYTKDRPFFGTAVGGSLGANTAQMDEVVAMTMPHTHPDRPVHLLGIGGIRDIFAGVVQGIDTFDCVSPTRIARHGWALAPKAKGERLNMRNSRFREDPLPIDPACDCYACSNFSRAYIHHLLKAGELLAMQLLSIHNVATMNRLLRDVREAIATGTLAEARRRWVYDPQEQENGEGESAAQGGAA

SEQ ID NO: 58168 - protein, 420 aa, unidentified
  source 1..420: note = Nitrospirillum amazonense
  REGION 1..420: note = tr|A0A248JLA2|A0A248JLA2_9PROT Queuine tRNA-ribosyltransferase OS=Nitrospirillum amazonense CBAmc; OX = 1441467 GN=tgt PE=3 SV=1
MSDLPTSYPGFSFEITHKAPDSRARLGRLTTPHGTISTPNFIFCGTKASIKGVTPAQMRAEKTDIILSNTYHLMIQPGADIVAKMGGLHRFMGWDGPMLTDSGGFQIFSMGHGSVADEIKGRRTQTRDTTLLKITEKGATFRSYMNGEKLFLSPELSIDIQRKLGADLIVQFDECTPFHVDRAYTAKSMALSHRWGDRSLKEFAKGGGMSYNGLPQALYGIIQGGVYEDLRKESATYTKDRPFFGTAVGGSLGANTAQMDEVVAMTMPYTHPDRPVHLLGIGGIRDIFAGVVQGIDTFDCVSPTRIARHGWALAPKAKGERLNMRNSRFREDPLPIDPACDCYACSNFSRAYIHHLLKAGELLAMQLLSIHNVATMNRLLRDVREAIATGTLAEARQRWVYDAQEQGNGEGEPAAQGGAA

SEQ ID NO: 58169 - protein, 405 aa, unidentified
  source 1..405: note = Niveispirillum cyanobacteriorum
  REGION 1..405: note = tr|A0A2K9NE40|A0A2K9NE40_9PROT Queuine tRNA-ribosyltransferase OS=Niveispirillum cyanobacteriorum; OX = 1612173 GN=tgt PE=3 SV=1
MAISYPGFSFDITHRDPAGSKARIGTLSTPHGAIQTPNFIFCGTKAAIKGLTTEQMRDEKTDIILANTYHLMIQPGADLVAKLGGLHKMMNWHGPMLTDSGGYQIFAMGHGSVADEVKGRRTTTREKTLLKITEEGATFRSYTNGEKLFLTPEKSIDIQRKLGPDFVVQLDECTPFHVDRKYTARSMKMSHRWGDRSLTAFKEFGGISANGLPQAMYGIVQGGVYPDLRKESAEIVANQDFFATAVGGCLGATREQMHDVVGMAMAHVHPTRPVHLLGIGGIVDIFEGVALGIDTFDCVSPTRIARHGWALAPGVKGERLNMRNARFKDDDTPIDAECGCYACRTASRGYIHHLLKAEEMLGMQLLTMHNVHTMNRLMRDIRAAIITGTLAEARRKWVWQAGDSE

SEQ ID NO: 58170 - protein, 405 aa, unidentified
  source 1..405: note = Niveispirillum lacus
  REGION 1..405: note = tr|A0A255Z4S8|A0A255Z4S8_9PROT Queuine tRNA-ribosyltransferase OS=Niveispirillum lacus OX=1981099; GN = tgt PE=3 SV=1
MAISYPGFSFDITHRDPAGSKARIGTLSTPHGSIQTPNFIFCGTKAAIKGLTTEQMREEKTDIILANTYHLMIQPGADLVAKLGGLHKMMNWHGPMLTDSGGYQIFAMGHGSVADEVKGRRTTTREKTLLKITEEGATFRSYTNGEKLFLTPEKSIDIQRKLGPDFVVQLDECTPFHVDRKYTARSMKMSHRWGDRSLTAFKEFGGISANGLPQAMYGIVQGGVYPDLRKESAEIVGSQDFFATAVGGCLGATREQMHEVVGMAMAHVHPTRPVHLLGIGGIVDIFEGVALGIDTFDCVSPTRIARHGWALAPGAKGERLNMRNARFKDDDTPIDPDCDCYACRTASRGYIHHLLKAEEMLGMQLLTLHNVHTMNRLMRDIRAAIITGTLAEARRKWVWQPGDSE

SEQ ID NO: 58171 - protein, 422 aa, Nocardia africana
  REGION 1..422: note = tr|A0A378WLH6|A0A378WLH6_9NOCA Queuine tRNA-ribosyltransferase OS=Nocardia africana OX=134964; GN = tgt PE=3 SV=1
MSDPAQFSFTVGTSLPGAHGGGPPVRHGRTGVISTPHGQIATPAFIPVGTKATVKAVLPEAMAEIGAQALLANAYHLYLQPGSDIVDEAGGLSRFMNWPGPTFTDSGGFQVMSLGVGFKKVLAMEAVGVQSDEVIAKGKERLAVVDDDGVTFRSHLDGSSHRFTPEVSMGIQHRLGADIMFAFDELTTLFNTRGYQEKSLRRTHEWAQRCIDEHERLTAERAHRPYQALFAVIQGAQYEDLRRKACRDLDAMRGSGGTGFDGYGIGGALEKANLGTIVGWCCDELPPEKPRHLLGISEPEDFFVAIENGADTFDCVNPSRVARNAAIYVAAGRFNINTSRFRRDFTRIDDTCDCYTCAHYTRAYIHHLFKAKEMLAATLCTIHNERFTIRLVDDIRASIEGGYYDDFKAEFLGRWQGRIRFD

SEQ ID NO: 58172 - protein, 417 aa, Nocardia alba
  REGION 1..417: note = tr|A0A4R1G3S8|A0A4R1G3S8_9NOCA Queuine tRNA-ribosyltransferase OS=Nocardia alba OX=225051 GN=tgt; PE = 3 SV=1
MADRSEFSFEVGTRLDGGRHGRTGVISTPHGEIATPAFIPVGTKASVKAVLPETMREIGAQALLANAYHLYLQPGADVVDEAGGLGKFMNWPGPTFTDSGGFQVMSLGVGFKKVLAMEAVDIRSDQVIAAGKERLATVDDDGVTFRSHLDGSKHRFTPEVSMGIQHELGADIMFAFDELTTLMNTRGYQEKSLQRTHEWAQRCIDEHERLTAVRGHRPYQALFAVIQGAQYEDLRRKACRELESIRGVGGTEFDGYGIGGALEKHNLGTTVGWCCDELPEAKPRHMLGISEPEDMFTAIENGADTFDCVNPSRVARNAAIYVDEGRFNINTARFRRDFTPIDEECDCYTCAHYTRAYLHHLFKAKEMLSATLCTIHNERFTIRLVDRIRGSIEGGYFDEFKKEFLGQWRGRIKVPGE

SEQ ID NO: 58173 - protein, 458 aa, unidentified
  source 1..458: note = Nocardia amikacinitolerans
  REGION 1..458: note = tr|A0A285LSI7|A0A285LSI7_9NOCA Queuine tRNA-ribosyltransferase OS=Nocardia amikacinitolerans; OX = 756689 GN=tgt PE=3 SV=1
MAAGEQVGGNDHGRGRQWRWSSAGWRWQRTGGAGWVGAPERMRGVSAAESFSFSVGARLDGRHGRSGVIQTPHGAVATPAFIPVGTKATVKAVLPETMSELGAQALLANAYHLYLQPGADIVDEAGGLGAFMNWPGPTFTDSGGFQVMSLGVGFKKVLAMEAVDVRSDDVIAAGKERLATVDDDGVTFRSHLDGSTHRFTPEVSMGIQHQLGADIMFAFDELTTLLNTRAYQEKSLQRTHEWAQRCIDEHERLTAARTHRPYQALFAVIQGAQYEDLRRKACRELEAIRGIGGTGFDGYGIGGALEKHNLGAIVGWCCDELPQDKPRHMLGISEPEDIFVAVENGADTFDCVNPSRVARNAAIYVAEGRFNINTSRFRRDFTPIDETCDCYTCANYTRAYIHHLFKAKEMLAATLCTIHNERFTVRLVDRIRASIDDGTFDEFKAETLGRWKGRIRTP

SEQ ID NO: 58174 - protein, 417 aa, Nocardia asteroides
  REGION 1..417: note = tr|U5EEJ5|U5EEJ5_NOCAS Queuine tRNA-ribosyltransferase OS=Nocardia asteroides NBRC 15531; OX = 1110697 GN=tgt PE=3 SV=1
MADPSEFSFTVGTRLDGGRHGRTGVIGTPHGEIATPAFIPVGTKASVKAVLPETMKELGAQALLANAYHLYLQPGADIVDEAGGLGRFMNWSGPTFTDSGGFQVMSLGVGFKKVLAMEAVDIRSDEVIAEGKERLATVDDDGVTFRSHLDGSKHRFTPEVSMGIQHQLGADIVFAFDELTTLLNTRGYQEKSLQRTQDWAQRCIDEHEKLTGERGHRPYQALFAVIQGAQYEDLRRKACRDLEAVRGAGGTEFDGYGIGGALEKHNLGTIVGWCCDELPEHKPRHMLGISEPEDMFVAIENGADTFDCVNPSRVARNAAIYVDEGRFNINTSRFRRDFTPIDENCDCYTCAHYTRAYLHHLFKAKEMLSATLCTIHNERFTVRLVDRIRASIDGGYFDDFKAEFLGNWKGRLKAPGA

SEQ ID NO: 58175 - protein, 414 aa, unidentified
  source 1..414: note = Nocardia bhagyanarayanae
  REGION 1..414: note = tr|A0A543F6A3|A0A543F6A3_9NOCA Queuine tRNA-ribosyltransferase OS=Nocardia bhagyanarayanae; OX = 1215925 GN=tgt PE=3 SV=1
MSAPESFSFTVGARLDGRHGRSGVIQTPHGAIATPAFIPVGTKATVKAVLPETMSELGAQALLANAYHLYLQPGADIVDEAGGLGAFMNWPGPTFTDSGGFQVMSLGVGFKKVLAMEAVDVRSDDVIAAGKERLATVDDDGVTFRSHLDGSKHRFTPEVSMGIQHQLGADIMFAFDELTTLLNTRAYQEKSLQRTHEWAQRCIDEHERLTAARTHRPYQALFAVIQGAQYEDLRRKACRELEAIRGAGGTGFDGYGIGGALEKHNLGAIVGWCCDELPQDKPRHMLGISEPEDIFVAVENGADTFDCVNPSRVARNAAIYVAEGRFNINTSRFRRDFTPIDETCDCYTCAHYTRAYLHHLFKAKEMLAATLCTIHNERFTVRLVDRIRASIDDGNFDEFKAETLGRWKGRIRTP

SEQ ID NO: 58176 - protein, 425 aa, Nocardia brasiliensis
  REGION 1..425: note = tr|A0A379A6A9|A0A379A6A9_9NOCA Queuine tRNA-ribosyltransferase OS=Nocardia brasiliensis OX=37326; GN = tgt PE=3 SV=1
MREISTWEDIGVSDPGNFSFTVGNRLDGRHGRSGVISTPHGEIATPAFIPVGTKATVKAVLPETMREIGAQALLANAYHLYLQPGSDIVDEAGGLSKFMNWPGPTFTDSGGFQVMSLGVGFKKVLAMEAVDVRSDDVIAKGKERLATVDDDGVTFRSHLDGSKHRFTPEVSMGIQHELGADIMFAFDELTTLLNTRGYQEKSLQRTHEWAQRCIDEHERLTAARTHRPYQALFAVIQGAQYEDLRRKACRELEAIRGSGGTGFDGYGIGGALEKHNLGTIVGWCCDELPEDKPRHMLGISEPEDIFTAVENGADTFDCVNPSRVARNAAIYVAEGRFNINTSRFRRDFTPIDETCDCYTCANYTRAYLHHLFKAKEILAATLCTIHNERYTIRLVDRIRASIEGGYFDEHKAETLGRWKGRIATP

SEQ ID NO: 58177 - protein, 414 aa, Nocardia brasiliensis
  REGION 1..414: note = tr|K0EL46|K0EL46_9NOCA Queuine tRNA-ribosyltransferase OS=Nocardia brasiliensis ATCC 700358 OX=1133849 GN=tgt PE=3 SV=1
MSDPGNFSFTVGSRLDGRHGRSGVISTPHGEIATPAFIPVGTKATVKAVLPETMREIGAQALLANAYHLYLQPGSDIVDEAGGLSKFMNWPGPTFTDSGGFQVMSLGVGFKKVLAMEAVDVRSDDVIAKGKERLATVDDDGVTFRSHLDGSKHRFTPEVSMGIQHELGADIMFAFDELTTLLNTRGYQEKSLQRTHEWAQRCIDEHERLTAARTHRPYQALFAVIQGAQYEDLRRKACRELEAIRGSGGTGFDGYGIGGALEKHNLGTIVGWCCDELPEDKPRHMLGISEPEDIFTAVENGADTFDCVNPSRVARNAAIYVAEGRFNINTARFRRDFTPIDETCDCYTCANYTRAYLHHLFKAKEILAATLCTIHNERYTIRLVDRIRASIEGGYFDEHKAETLGRWKGRIATP

SEQ ID NO: 58178 - protein, 430 aa, Nocardia cerradoensis
  REGION 1..430: note = tr|A0A231HCS9|A0A231HCS9_9NOCA Queuine tRNA-ribosyltransferase OS=Nocardia cerradoensis OX=85688; GN = tgt PE=3 SV=1
MSDPAQFSFTVGTSLPGRHGGGPPVGHGGGPPVRHGRTGVISTPHGQIATPAFIPVGTKATVKAVLPEAMAEIGAQALLANAYHLYLQPGSDIVDEAGGLGRFMNWPGPTFTDSGGFQVMSLGVGFKKVLAMEAVGVQSDEVIAKGKERLAVVDDDGVTFRSHLDGSSHRFTPEVSMGIQHRLGADIMFAFDELTTLFNTRGYQEKSLRRTHEWAQRCIDEHERLTAERAHRPYQALFAVIQGAQYEDLRRKACRDLDAMRGSGGTGFDGYGIGGALEKANLGTIVGWCCDELPPEKPRHLLGISEPEDFFVAIENGADTFDCVNPSRVARNAAIYVAAGRFNINTSRFRRDFTPIDDTCDCYTCAHYTRAYIHHLFKAKEMLAATLCTIHNERFTIRLVDDIRASIEGGYYDDFKAEFLGRWQGRIRFD

SEQ ID NO: 58179 - protein, 414 aa, Nocardia cyriacigeorgica
  REGION 1..414: note = tr|A0A4U8W3X0|A0A4U8W3X0_9NOCA Queuine tRNA-ribosyltransferase OS=Nocardia cyriacigeorgica; OX = 135487 GN=tgt PE=3 SV=1
MSDRAAFSFTVGTRLDGQYGRTGVISTPHGDIATPAFIPVGTKATVKAVLPETMREIGAQALLANAYHLYLQPGADIVDEAGGLGRFMNWPGPTFTDSGGFQVMSLGVGFKKVLAMEAVDVRSDDVIAKGKERLATVDDDGVTFRSHLDGSKHRFTPEVSMGIQHQLGADIMFAFDELTTLLNTRAYQEKSLQRTHEWAQRCIDEHERLTHARAHRPYQALFAVIQGAQYEDLRRKACRELEAIRGQDGTEFDGYGIGGALEKHNLGTIVGWCSAELPEHKPRHMLGISEPEDVFTAVANGADTFDCVNPSRVARNAAIYVDAGRFNINTSRFRRDFTPIDENCDCYTCANYTRAYLHHLFKAKEMLAATLCTIHNERFTIRLVDRIRESIDGGYFEQFQAETLGRWKGRITAP

SEQ ID NO: 58180 - protein, 414 aa, Nocardia cyriacigeorgica
  REGION 1..414: note = tr|A0A2L2JN92|A0A2L2JN92_9NOCA Queuine tRNA-ribosyltransferase OS=Nocardia cyriacigeorgica; OX = 135487 GN=tgt PE=3 SV=1
MSDRAAFSFTVGTRLDGQYGRTGVISTPHGDIATPAFIPVGTKATVKAVLPETMREIGAQALLANAYHLYLQPGADIVDEAGGLGRFMNWPGPTFTDSGGFQVMSLGVGFKKVLAMEAVDVRSDDVIAKGKERLATVDDDGVTFRSHLDGSKHRFTPEVSMGIQHQLGADIMFAFDELTTLLNTRAYQEKSLQRTHEWAQRCIDEHERLTHARAHRPYQALFAVIQGAQYEDLRRKACRELEAIRGQDGTEFDGYGIGGALEKHNLGTIVGWCSAELPEHKPRHMLGISEPEDVFTAVANGADTFDCVNPSRVARNAAIYVDAGRFNINTSRFRRDFTPIDENCDCYTCANYTRAYLHHLFKAKEMLAATLCTIHNESFTIRLVDRIRESIDGGYFEEFQAETLGRWKGRITAP

SEQ ID NO: 58181 - protein, 417 aa, unidentified
  source 1..417: note = Nocardia donostiensis
  REGION 1..417: note = tr|A0A1V2TAY7|A0A1V2TAY7_9NOCA Queuine tRNA-ribosyltransferase OS=Nocardia donostiensis; OX = 1538463 GN=tgt PE=3 SV=1
MFCVSDRGKFSFTVGARLEGRHGRTGVLRTPHGDIATPAFIPVGTKATVKAVLPEAMRDLGAQALLANAYHLYLQPGPDIVDEAGGLGTFMNWPGPTFTDSGGFQVMSLGVGFKKVLAMETVDVRSDDVIAKGKERLATVDDDGVTFRSHLNGSKHRFTPEVSMGIQHQLGADIMFAFDELTTLMNTRGYQEKSLQRTHDWAQRCIDEHERLTEERVHRPYQALFAVVQGAQYEDLRRKASRELEEIRGKAGTEFDGYGIGGALEKHNLGTIVGWCSDELPESKPRHMLGISEPEDLFAAIEAGADTFDCVNPSRVGRNAGIYVDAGRFNIDTSRFRRDFTPIDETCDCYTCANYTRAYLHHLFKAKEMLAATLCTIHNERFTIRLVDRIRESIAGGYFDEFRDDTLGRWQGRITAP

SEQ ID NO: 58182 - protein, 416 aa, Nocardia farcinica
  REGION 1..416: note = tr|A0A0H5PDL9|A0A0H5PDL9_NOCFR Queuine tRNA-ribosyltransferase OS=Nocardia farcinica OX=37329; GN = tgt PE=3 SV=1
MVAAETSSGFSFTVGTRLDGGRHGRTGVIRTPHGEIATPAFVPVGTKATVKAVLPETMRELGAQALLANAYHLYLQPGADIVDEAGGLGAFMNWPGPTFTDSGGFQVMSLGVGFKKVLAMESVGVANDDVIAAGKERLATVDDDGVTFRSHLDGSTHRFTPEVSMGIQHRLGADIMFAFDELTTLLNTRGYQEKSLQRTHEWAQRCIDEHERLTAARTHRPYQALFAVIQGAQYEDLRRKACRDLEAIRGAAGTAFDGYGIGGALEKHNLGTIVGWCSDELPEEKPRHMLGISEPEDLFVAVENGADTFDCVNPSRVARNAAIYRGDGRFNINTSRYRRDFTPIDEDCDCYTCANYTRAYLHHLFKAKEMLAATLCTIHNERFTVRLVDRIRASIDGGYFDEFKAETLGRWQGGRR

SEQ ID NO: 58183 - protein, 422 aa, Nocardia farcinica
  REGION 1..422: note = tr|A0A1C2B3V3|A0A1C2B3V3_NOCFR Queuine tRNA-ribosyltransferase OS=Nocardia farcinica OX=37329; GN = tgt PE=3 SV=1
MLHVSSTGTEVADPTYTVGTTLAGTRGRTGTITTPHGQIHTPAFIPVGTKATVKTVLPESVSALGAQAVLANAYHLYLQPGPEIIDAAGGLGAFMNWRGPTYTDSGGFQVMSLGAGFKKVISMEATGTPDDDLTANGKERLSRVDDDGVTFKSHLDGSAHRFTPEVSMQIQHQLGADIIFAFDELTTLMNTREYQVNSLERTRLWAIRCLAEHNRLSVERAHRPQQSLWGVIQGAQYEDLRRKAARDLVALSEADRAAGGKGFGGYGIGGALEKDNLGTIVGWVNDELPEDSPKHLLGISEPDDIFTAIENGVDTFDCVSPTRVARNGAIYSLDGRYNVTNAKYRSDFRTLDPEVENYTSQYSRAYLHHLFKAKEGLGPTLATLHNVSFIVTLVDRARQAIENGTYTEYRDEFLRRYYGGPR

SEQ ID NO: 58184 - protein, 417 aa, Nocardia fluminea
  REGION 1..417: note = tr|A0A2N3VA21|A0A2N3VA21_9NOCA Queuine tRNA-ribosyltransferase OS=Nocardia fluminea OX=134984; GN = tgt PE=3 SV=1
MADSSEFSFEVGTRLDGGRHGRTGVISTPHGEIATPAFIPVGTKASVKAVLPETMREIGAQALLANAYHLYLQPGADIVDEAGGLGKFMNWPGPTFTDSGGFQVMSLGVGFKKVLAMEAVDIRSDQVIAAGKERLATVDDDGVTFRSHLDGSKHRFTPEVSMGIQHELGADIMFAFDELTTLMNTRGYQEKSLQRTHEWAQRCIDEHERLTAVRGHRPYQALFAVIQGAQYEDLRRKACRELESIRGSGGTEFDGYGIGGALEKHNLGTTVGWCCDELPEAKPRHMLGISEPEDMFTAIENGADTFDCVNPSRVARNAAIYVDEGRFNINTARFRRDFTPIDENCDCYTCAHYTRAYLHHLFKAKEMLSATLCTIHNERFTIRLVDRIRASIEGGYFDEFKKEFLGRWRGRIKVPGE

SEQ ID NO: 58185 - protein, 417 aa, Nocardia ignorata
  REGION 1..417: note = tr|A0A4R6P887|A0A4R6P887_9NOCA Queuine tRNA-ribosyltransferase OS=Nocardia ignorata OX=145285; GN = tgt PE=3 SV=1
MADSSEFSFTVGTRLDGDRHGRTGVISTPHGEIATPAFIPVGTKASVKAVLPETMKELGAQALLANAYHLYLQPGSDIVDEAGGLGKFMNWDGPTFTDSGGFQVMSLGVGFKKVLAMEAVGVRSDQVIAAGKERLATVDDDGVTFRSHLDGSKHRFTPEVSMGIQHQLGADIMFAFDELTTLMNTRGYQEKSLQRTHEWAQRCIDEHERLTGARTHRPYQALFAVIQGAQYEDLRRKACRELESIRGSGGTEFDGYGIGGALEKHNLGTIVGWCCDELPEAKPRHMLGISEPEDMFVAIENGADTFDCVNPSRVARNAAIYVDEGRFNINTSRFRRDFTPIDENCDCYTCAHYTRAYLHHLFKAKEMLSATLCTIHNERFTVRLVDRIRASIEGGYFDEFKKEFLGQWQGRIKAPGQ

SEQ ID NO: 58186 - protein, 391 aa, Nocardia mexicana
  REGION 1..391: note = tr|A0A370GJH6|A0A370GJH6_9NOCA Queuine tRNA-ribosyltransferase OS=Nocardia mexicana OX=279262; GN = tgt PE=3 SV=1
MITTPHGTIATPAFIPVGTKATVKAVLPETMKELGAQALLANAYHLYLQPGSDIVDEAGGLSRFMNWPGPTFTDSGGFQVMSLGVGFKKVLAMEAVGVQNDDVIAKGKERLAVVDDDGVTFRSHLDGSKHRFTPEISMGIQHRLGADIMFAFDELTTLLNTRGYQEKSLQRTHEWAQRCIAEHERLTAERSHRPYQALFAVIQGAQYEDLRRKACSGLRAMRGSAGTGFDGYGIGGALEKQNLGTIVGWCSDELPEDKPRHLLGISEPEDLFVAVENGADTFDCVNPSRVARNAAIYVDAGRFNINTSRFRRDFTPIDETCDCYTCAHYTRAYIHHLFKAKEMLAATLCTIHNERFTVRLVDRIRAGIDGGYYDEFKAETLGRWQGRIRNP

SEQ ID NO: 58187 - protein, 417 aa, Nocardia neocaledoniensis
  REGION 1..417: note = tr|A0A317NNC2|A0A317NNC2_9NOCA Queuine tRNA-ribosyltransferase OS=Nocardia neocaledoniensis; OX = 236511 GN=tgt PE=3 SV=1
MADPSEFSFTVGTRLDGGRHGRTGVIGTPHGEIATPAFIPVGTKASVKAVLPETMKDLGAQALLANAYHLYLQPGADIVDEAGGLGRFMNWAGPTFTDSGGFQVMSLGVGFKKVLAMEAVDIRSDEVIAEGKERLATVDDDGVTFRSHLDGSKHRFTPEVSMGIQHQLGADIMFAFDELTTLLNTRGYQEKSLQRTHEWAQRCIDEHEKLTGERGHRPYQALFAVIQGAQYEDLRRKACRDLETIRGSGGTEFDGYGIGGALEKHNLGTIVGWCCDELPEHKPRHMLGISEPEDMFVAIENGADTFDCVNPSRVARNAAIYVDEGRFNINTSRFRRDFTPIDENCDCYTCAHYTRAYLHHLFKAKEMLSATLCTIHNERFTVRLVDRIRASIEGGYFDEFKSEFLGRWQGRIKAPGA

SEQ ID NO: 58188 - protein, 414 aa, Nocardia ninae
  REGION 1..414: note = tr|A0A511MC10|A0A511MC10_9NOCA Queuine tRNA-ribosyltransferase OS=Nocardia ninae NBRC 108245; OX = 1210091 GN=tgt PE=3 SV=1
MVGPGSFSFAVRKRLEARHGRSGVISTPHGDIATPAFIPVGTKATVKAVLPETMKEIGAQALLANAYHLYLQPGSDIVDEAGGLGKFMNWPGPTFTDSGGFQVMSLGVGFKKVLAMEAVDVRSDDVIAKGKERLATVDDDGVTFRSHLDGSKHRFTPEVSMGIQHQLGADIMFAFDELTTLLNTRGYQEKSLQRTHEWAQRCLDEHERLTAARTHRPYQALFGVIQGAQYEDLRRKACRGLESLRGSAGTGFDGYGIGGALEKHNLGTIVGWCSDELPEDKPRHMLGISEPEDIFTAVENGADTFDCVNPSRVARNAAIYVAEGRFNINTSRFRRDFTPIDETCDCYTCANYTRAYLHHLFKAKEILAATLCTIHNERYTIRLVDRIRESIEGGYFDEHKAETLGRWKGRVPAP

SEQ ID NO: 58189 - protein, 424 aa, Nocardia nova
  REGION 1..424: note = tr|W5T775|W5T775_9NOCA Queuine tRNA-ribosyltransferase OS=Nocardia nova SH22a OX=1415166; GN = tgt PE=3 SV=1
MIAAAWQDDGVSDPAQFAFTIGTRLPGRHGRTGVISTPHGDIATPAFVPVGTKATVKAVLPETMAEIGAQALLANAYHLYLQPGSDIVDEAGGLSRFMNWPGPTFTDSGGFQVMSLGVGFKKVLAMEAVGVRSDEVIAEGKERLAVVDDDGVTFRSHLDGSKHRFTPEVSMGIQHRLGADVMFAFDELTTLFNTRGYQEKSLRRTHEWAQRCIDEHERLTTDRSHRPYQALFAVIQGAQYEDLRRKASRDLDAMRGSGGTAFDGFGIGGALEKANLGTIVGWCCDELPEEKPRHLLGISEPEDFFVAIENGADTFDCVNPSRVARNAAIYVRAGRFNINTSRFRRDFTPIDDECDCYTCAHYTRAYIHHLFKAKEMLAATLCTIHNERFTIRLVDDIRASIDGGHYDEFKTEFLGRWQGRIRFD

SEQ ID NO: 58190 - protein, 415 aa, Nocardia nova
  REGION 1..415: note = tr|A0A2S6AWT0|A0A2S6AWT0_9NOCA Queuine tRNA-ribosyltransferase OS=Nocardia nova OX=37330 GN=tgt; PE = 3 SV=1
MSDPDQFSFTVGTSLPGRRGGRTGVIATPHGQIATPAFIPVGTKATVKAVLPEAMAEIGAQALLANAYHLYLQPGSDIVDEAGGLGRFMNWPGPTFTDSGGFQVMSLGVGFKKVLAMEAVGVRSDEVIAKGKERLAVVDDDGVTFRSHLDGSSHRFTPEVSMGIQHRLGADIMFAFDELTTLFNTRGYQEKSLRRTHEWAQRCIDEHERLTAERAHRPYQALFAVIQGAQYEDLRRKACRDLDAMRGSGGTGFDGYGIGGALEKANLGTIVGWCCDELPPEKPRHLLGISEPEDFFVAIENGADTFDCVNPSRVARNAAIYVAAGRFNINTSRFRRDFTPIDDTCDCYTCAHYTRAYIHHLFKAKEMLAATLCTIHNERFTIRLVDDIRASIEGGYYDDFKAEFLGRWQGRIRFD

SEQ ID NO: 58191 - protein, 416 aa, Nocardia otitidiscaviarum
  REGION 1..416: note = tr|A0A516NTZ5|A0A516NTZ5_9NOCA Queuine tRNA-ribosyltransferase OS=Nocardia otitidiscaviarum; OX = 1823 GN=tgt PE=3 SV=1
MSSPESFAFKVGTRLDGRHGRTGVISTPHGDIATPAFIPVGTKATVKAVLPEAMKELGSQALLANAYHLYLQPGPDIVDEAGGLSSFMNWPGPTFTDSGGFQVMSLGVGFKKVLAMEAVGVQNDDVIAKGKERLAHVDDDGVTFRSHLDGSKHRFTPEVSMGIQHQLGADIMFAFDELTTLMNTRGYQEESLERTRRWAQRCLDEHERLTAARAHRPYQALFGVIQGAQYEDLRRKACRDLEELRGAAGTGFDGYGIGGALEKHNLGTIVRWCCDELPERKPRHMLGISEPEDMFTAVENGADTFDCVNPSRVARNAAIYVDEGRFNINTSRFRRDFTPIDDTCDCYTCANYTRAYLHHLFKAKEILAATLCTIHNERFTVRLVDRIRGSIERGEFDAYKTDFLGRWKGRIKAPAN

SEQ ID NO: 58192 - protein, 416 aa, Nocardia otitidiscaviarum
  REGION 1..416: note = tr|A0A378YFG6|A0A378YFG6_9NOCA Queuine tRNA-ribosyltransferase OS=Nocardia otitidiscaviarum; OX = 1823 GN=tgt PE=3 SV=1
MSSPESFAFKVGTRLDGRHGRTGVISTPHGDIATPAFIPVGTKATVKAVLPEAMKELGSQALLANAYHLYLQPGPDIVDEAGGLSRFMNWPGPTFTDSGGFQVMSLGVGFKKVLAMEAVGVQNDDVIAKGKERLAHVDDDGVTFRSHLDGSKHRFTPEVSMGIQHQLGADIMFAFDELTTLMNTRGYQEESLERTRRWAQRCLDEHERLTAARSHRPYQALFGVIQGAQYEDLRRKACRDLEELRGAAGTGFDGYGIGGALEKHNLGTIVRWCCDELPERKPRHMLGISEPEDMFTAVENGADTFDCVNPSRVARNAAIYVDEGRFNINTSRFRRDFTPIDDTCDCYTCANYTRAYLHHLFKAKEILAATLCTIHNERFTVRLVDRIRGSIERGEFDAYKTDFLGRWKGRIKAPAN

SEQ ID NO: 58193 - protein, 418 aa, Nocardia pseudobrasiliensis
  REGION 1..418: note = tr|A0A370I535|A0A370I535_9NOCA Queuine tRNA-ribosyltransferase OS=Nocardia pseudobrasiliensis; OX = 45979 GN=tgt PE=3 SV=1
MRHYCWVPDPASFSFTVNTRLDGRHGRTGVVSTPHGEIRTPAFIPVGTKATVKAVLPEMMKELGSQALLANAYHLYLQPGPDIVDEAGGLGKFMNWPGPTFTDSGGFQVMSLGVGFKKVLAMEAVGVQSDDVIAKGKERLAVVDDDGVTFRSHLDGSKHRFTPEVSMGIQHQLGADVMFAFDELTTLLNTRGYQEKSLQRTHEWAQRCIDEHERLTAERTHRPYQALFAVIQGAQYEDLRRKACRDLDAMRGIGGTGFDGYGIGGALEKHNLGTIVGWCCDELPEDKPRHLLGISEPEDIFVAVANGADTFDCVNPSRVARNAAIYIPEGRFNINTSRFRRDFTPIDENCDCYTCAHYTRAYIHHLFKAKEMLASTLCTIHNERFTVKLVDDIRASIDDNRFDEFEAEFFGRWRGRLR

SEQ ID NO: 58194 - protein, 414 aa, Nocardia puris
  REGION 1..414: note = tr|A0A366D2I2|A0A366D2I2_9NOCA Queuine tRNA-ribosyltransferase OS=Nocardia puris OX=208602 GN=tgt; PE = 3 SV=1
MAASADFSFTVGTRLDGRHGRTGVIRTPHGEIATPAFIPVGTKATVKAVLPETMKELGAQALLANAYHLYLQPGADIVDEAGGLGAFMNWRGPTFTDSGGFQVMSLGVGFKKVLAMESVDVRSDDVIAKGKERLATVDDDGVTFRSHLDGSKHRFTPEVSMGIQHQLGADIMFAFDELTTLMNTRGYQEESLRRTHEWAQRCLDEHERLTTARAHRPYQALFAVIQGAQYEDLRRKACRELEELRGAEGTEFDGYGIGGALEKHNLGAIVGWCCDELPEAKPRHMLGISEPEDFFAAVENGADTFDCVNPSRVARNAAIYVPDGRFNINTSRFRRDFTPIDADCDCYTCAHYTRAYLHHLFKAKEMLAATLCTIHNERFTVRLVDRIRESIDGGYYDEFKAETLGRWGSRTRSS

SEQ ID NO: 58195 - protein, 419 aa, Nocardia seriolae
  REGION 1..419: note = tr|A0A1I9YZ67|A0A1I9YZ67_9NOCA Queuine tRNA-ribosyltransferase OS=Nocardia seriolae OX=37332; GN = tgt PE=3 SV=1
MEAVSAASAFSFKVGTRLEGRQGRTGVISTPHGDIATPAFIPVGTKATVKAVLPETMKEIGSQALLANAYHLYLQPGPDIVDEAGGVAAFMNWNGPTFTDSGGFQVMSLGVGFKKVLAMEAVGVQNDDVIAKGKERLAHVDDDGVTFRSHLDGSRHRFTPEVSMGIQHQLGADVMMAFDELTTLMNTRGYQEESLERTRRWAKRCLDEHERLTAARSHRPYQALFGVIQGAQYEDLRRKACRDLEELRGEAGSGFDGYGIGGALEKHNLGAIVGWCCDELPENEPRHLLGISEPEDIFTSVENGADTFDCVNPSRVARNAALYTDEGRFNINTARFKRDFTPIDETCDCYTCANYTRAYIHHLFKAKEILAATLCTIHNERFTVRLVDRVRESLDGGYFDDYQADFLGRWRGRIKAPGL

SEQ ID NO: 58196 - protein, 419 aa, Nocardia seriolae
  REGION 1..419: note = tr|A0A0B8NFT7|A0A0B8NFT7_9NOCA Queuine tRNA-ribosyltransferase OS=Nocardia seriolae OX=37332; GN = tgt PE=3 SV=1
MEAVSAASAFSFKVGTRLEGRQGRTGVISTPHGDIATPAFIPVGTKATVKAVLPETMKEIGSQALLANAYHLYLQPGPDIVDEAGGVAAFMNWNGPTFTDSGGFQVMSLGVGFKKVLAMEAVGVQNDDVIAKGKERLAHVDDDGVTFRSHLDGSRHRFTPEVSMGIQHQLGADVMMAFDELTTLMNTRGYQEESLERTRRWAKRCLDEHERLTAARSHRPYQALFGVIQGAQYEDLRRKACRDLEELRGEAGSGFDGYGIGGALEKHNLGAIVGWCCDELPENEPRHLLGISEPEDIFTAVENGADTFDCVNPSRVARNAALYTDEGRFNINTARFKRDFTPIDETCDCYTCANYTRAYIHHLFKAKEILAATLCTIHNERFTVRLVDRVRESLDGGYFDDYQADFLGRWRGRIKAPGL

SEQ ID NO: 58197 - protein, 416 aa, Nocardia sp.
  REGION 1..416: note = tr|A0A386ZKL0|A0A386ZKL0_9NOCA Queuine tRNA-ribosyltransferase OS=Nocardia sp. CFHS0054; OX = 2382165 GN=tgt PE=3 SV=1
MSSPSEFSFKVGTRLEGRHGRTGVISTPHGDIATPAFIPVGTKATVKAVLPETMKELGSQALLANAYHLYLQPGPDIVDEAGGVASFMNWHGPTFTDSGGFQVMSLGVGFKKVLAMEAVGVRSDDVIAKGKERLAHVDDDGVTFRSHLDGSKHRFTPEVSMGIQHQLGADVMMAFDELTTLMNTRGYQEESLERTRRWAQRCLDEHERLTAARSHRPYQALFGVIQGAQYEDLRRKACRDLEELRGAAGTGFDGYGIGGALEKHNLGTIVGWCCDELPESKPRHLLGISEPEDIFTAVENGADTFDCVNPSRVARNAALYTDEGRFNINTARFKRDFTPIDETCDCYTCANYTRAYIHHLFKAKEILAATLCTIHNERFTVRLVDRVRESLDGGYFDDYKTDFLGRWRGRIKAPGL

SEQ ID NO: 58198 - protein, 419 aa, Nocardia sp.
  REGION 1..419: note = tr|A0A3A4KWS3|A0A3A4KWS3_9NOCA Queuine tRNA-ribosyltransferase OS=Nocardia sp. YIM PH 21724; OX = 2340916 GN=tgt PE=3 SV=1
MEVVSDPAEFSFSVGTRLDGQYGRTGELRTPHGTIATPAFIPVGTKATVKSVLPETMREIGAQALLANAYHLYLQPGPDIVDEAGGLGRFMNWPGPTFTDSGGFQVMSLGVGFKKVIAMEAVDTPDDNAVAAGKERLAHVDDDGVTFRSHLDGSKHRFTPEVSMGIQHRLGADVMFAFDELTTLMNTRGYQERSLRRTHEWAQRCIDEHERLTVERGHRPYQALFAVIQGAQYEDLRRKACRELEDIRGRAGTGFDGYGIGGALEKHNLGTIVGWCSAELPEEKPRHLLGISEPEDLFVAVANGADTFDCVNPSRVARNAALYVDEGRFNINTARFRRDFTPIDETCDCYTCANYTRAYLHHLFKAKEMLAATLCTIHNERFTIRLVDRIRESIAGGYFEEFRREFMGRWQGRIKAPGL

SEQ ID NO: 58199 - protein, 414 aa, Nocardia tenerifensis
  REGION 1..414: note = tr|A0A318JYW2|A0A318JYW2_9NOCA Queuine tRNA-ribosyltransferase OS=Nocardia tenerifensis OX=228006; GN = tgt PE=3 SV=1
MSDSGSFSFTVGARLEGRHGRAGVINTPHGAIATPAFIPVGTKATVKAVLPETMKEIGAQALLANAYHLYLQPGSDIVDEAGGLSKFMNWPGPTFTDSGGFQVMSLGVGFKKVLAMEAVDVRSDDVIAKGKERLATVDDDGVTFRSHLDGSKHRFTPEVSMGIQHRLGADIMFAFDELTTLLNTRGYQEKSLQRTHEWAQRCLDEHERLTAARTHRPYQALFGVIQGAQYEDLRRKACRGLESLRGDQGTGFDGYGIGGALEKHNLGTIVGWCCDELPEDKPRHMLGISEPEDIFTAVENGADTFDCVNPSRVARNAAIYVAEGRFNINTSRFRRDFTPIDETCDCYTCANYTRAYLHHLFKAKEILAATLCTIHNERYTIRLVDRIRASIEGGYFDEHKAETLGRWKGRIQAP

SEQ ID NO: 58200 - protein, 425 aa, Nocardia terpenica
  REGION 1..425: note = tr|A0A291RCK5|A0A291RCK5_9NOCA Queuine tRNA-ribosyltransferase OS=Nocardia terpenica OX=455432; GN = tgt PE=3 SV=1
MGPWQYWRVPDPASFSFSVGTRLEGRHGRSGVISTPHGEIATPAFIPVGTKATVKAVLPETMAEIGAQALLANAYHLYLQPGSDIVDEAGGLSAFMNWPGPTFTDSGGFQVMSLGVGFKKVLAMESVGVQNDDVIAKGKERLAVVDDDGVTFRSHLDGSKHRFTPEVSMGIQHRLGADIMFAFDELTTLMNTRGYQEKSLQRTHEWAQRCIDEHERLTAERTHRPYQALFAVIQGAQYEDLRRKACRELESMRGRGGTEFDGYGIGGALEKHNLGTIVGWCCDELPEHKPRHLLGISEPEDFFVAIENGADTFDCVNPSRVARNAAIYVAEGRFNINTSRFRRDFTPIDETCDCYTCAHYTRAYLHHLFKAKEMLAATLCTIHNERFTIRLVDEIRASIEGGYFDEFKAETLGRWKGRIKAPGVQ

SEQ ID NO: 58201 - protein, 426 aa, Nocardia terpenica
  REGION 1..426: note = tr|A0A164HEA1|A0A164HEA1_9NOCA Queuine tRNA-ribosyltransferase OS=Nocardia terpenica OX=455432; GN = tgt PE=3 SV=1
MPGPWQYWRVPDPASFSFSVGTRLEGRHGRSGVISTPHGDIATPAFIPVGTKATVKAVLPETMAEIGAQALLANAYHLYLQPGSDIVDEAGGLSAFMNWPGPTFTDSGGFQVMSLGVGFKKVLAMETVGVQNDDVIAKGKQRLAVVDDDGVTFRSHLDGSKHRFTPEVSMGIQHRLGADIMFAFDELTTLMNTRGYQEKSLRRTHEWAQRCIDEHERLTAERTHRPYQALFAVIQGAQYEDLRRKACRELESMRGRGGTEFDGYGIGGALEKHNLGTIVGWCCDELPEHKPRHLLGISEPEDFFVAIENGADTFDCVNPSRVARNAAIYVAEGRFNINTSRFRRDFTPIDETCDCYTCAHYTRAYLHHLFKAKEMLAATLCTIHNERFTIRLVDDIRASIEGGYFDEFKAETLGRWKGRIKAPGAQ

SEQ ID NO: 58202 - protein, 414 aa, unidentified
  source 1..414: note = Nocardia vulneris
  REGION 1..414: note = tr|A0A0C1CT10|A0A0C1CT10_9NOCA Queuine tRNA-ribosyltransferase OS=Nocardia vulneris OX=1141657; GN = tgt PE=3 SV=1
MSDPGNFSFTVGNRLDGRHGRSGVISTPHGEIATPAFIPVGTKATVKAVLPETMREIGAQALLANAYHLYLQPGSDIVDEAGGLSKFMNWPGPTFTDSGGFQVMSLGVGFKKVLAMEAVDVRSDDVIAKGKERLATVDDDGVTFRSHLDGSKHRFTPEVSMGIQHELGADIMFAFDELTTLLNTRGYQEKSLQRTHEWAQRCIDEHERLTAARTHRPYQALFAVIQGAQYEDLRRKACRELEAIRGSGGTGFDGYGIGGALEKHNLGTIVGWCCDELPEDKPRHMLGISEPEDIFTAVENGADTFDCVNPSRVARNAAIYVAEGRFNINTARFRRDFTPIDETCDCYTCANYTRAYLHHLFKAKEILAATLCTIHNERYTIRLVDRIRASIEGGYFDEHKAETLGRWKGRIATP

SEQ ID NO: 58203 - protein, 390 aa, Nocardioides sp.
  REGION 1..390: note = tr|H0BTV1|H0BTV1_9BURK Queuine tRNA-ribosyltransferase OS=Nocardioides sp. SLBN-35; OX = 512030 GN=tgt PE=3 SV=1
MLQFELLTTDPTSHARRGTLTLNHGEVQTPIFMPVGTYGTVKGVMPQSLNDMGAQIILGNTFHLWMRPGLDIVQSFGGLHAFEQWNKPMLTDSGGFQVWSLGDMRKITEEGVHFASPVNGDKLFMSPEVSMQIQTVLNSDIVMQLDECTPYETKGHLTTEREARQSMEMSRRWAVRSKAEFERLDNPNALFGIVQGGMFENLRQESLEALVEMDFPGYAVGGVSVGEPKDEMLRIMAHTPHRLPAHKPRYLMGVGTPEDLVEGVAQGVDMFDCVMPTRNARNGTLFTRYGDLKIRNARHKADHQPLDTSCTCHACAGKDGVSWDAGGRGGFSRAYLHHLDRCGEMLGPMLATIHNLHYYLNLMREVREALDAGRFGEFRAQFKADRARGV

SEQ ID NO: 58204 - protein, 390 aa, Nocardioides sp.
  REGION 1..390: note = tr|A0A542RPZ4|A0A542RPZ4_9BURK Queuine tRNA-ribosyltransferase OS=Nocardioides sp. SLBN-35; OX = 512030 GN=tgt PE=3 SV=1
MLQFDILKTDPTSHARRGTLTLNHGVVQTPIFMPVGTYGTVKGVMPRSLHDMGAQIILGNTFHLWMRPGLDVMQSFGGLHGFEKWDKPILTDSGGFQVWSLGAMRKITEEGVTFASPVNGDKLFMSPEVSMQIQTILNSDIVMQLDECTPYETKGHLTTEAEARKSMEMSLRWAKRSRDEFQRLQNPNALFGIVQGGMYKNLRQESLEQLVEMDFPGYAVGGVSVGEPKDEMLDIMAHTPHRLPAHKPRYLMGVGTPEDLVEGVAQGVDMFDCVMPTRNARNGTLFTRFGDLKIRNARHKADHQPLDTTCTCYACAGSSGVSWDDGGREGFSRAYLHHLDRCGEMLGPMLTTVHNLHYYLNLMREVREALDAGTFSAFRSRFKAERARGV

SEQ ID NO: 58205 - protein, 332 aa, Nodularia sp.
  REGION 1..332: note = tr|A0A218Q524|A0A218Q524_9CYAN Queuine tRNA-ribosyltransferase OS=Nodularia sp. NIES-3585; OX = 1973477 GN=tgt PE=3 SV=1
MPVGTLANVKTVTPDQLKSTGAQMVLSNTYHLHLQPGERIVAGGGGLHKFMGWNGPMLTDSGGFQVFSLSEMRKISEDGVTFRSPHDGQIIHLTPERSIEIQNTLGADVIMAFDECPPYPASREDVEAATQRTYRWLERCMTFHQRSDQALFGIVQGGVYLDLRAQAAQALAKLDLPGYAIGGVSVGEPPELMADIVRTTAPLLPREKPRYLMGVGTYREMAIAIASGVDLFDCVIPTRWARHGTAIVQGERWNLKNAKFREDYTPLDETCPCYACQNFSRAYISHLVRSQEILGYTLLSIHNITELIRFTQKIREAILSDRFATEFAHWLN

SEQ ID NO: 58206 - protein, 332 aa, Nodularia spumigena
  REGION 1..332: note = tr|A0ZC57|A0ZC57_NODSP Queuine tRNA-ribosyltransferase OS=Nodularia spumigena CCY9414; OX = 313624 GN=tgt PE=3 SV=1
MPVGTLANVKTVTPDQLKSTGAQMVLSNTYHLHLQPGERIVAGGGGLHKFMGWDGPMLTDSGGFQVFSLSEMRKISEDGVTFRSPHDGQIIHLTPERSIEIQNTLGADVIMAFDECPPYPASREDVEAATGRTYRWLERCMTFHQRSDQALFGIVQGGVYLDLRAQAAQELAQLDLPGYAIGGVSVGEPPELMADIVRTTAPLLPREKPRYLMGVGTYREMAIAIASGVDLFDCVIPTRWARHGTAIVQGERWNLKNAKFREDYEPLDETCPCYACQNFSRAYISHLVRSQEILGYTLLSIHNITELIRFTQKIREAILSDRFATEFAHWLN

SEQ ID NO: 58207 - protein, 332 aa, Nodularia spumigena
  REGION 1..332: note = tr|A0A161XMY1|A0A161XMY1_NODSP Queuine tRNA-ribosyltransferase OS=Nodularia spumigena CENA596; OX = 1819295 GN=tgt PE=3 SV=1
MPVGTLANVKTVTPDQLKSTGAQMVLSNTYHLHLQPGERIVAGGGGLHKFMGWDGPMLTDSGGFQVFSLSEMRKISEDGVTFRSPHDGQIIHLTPERSIEIQNTLGADVIMAFDECPPYPASREDVEAATGRTYRWLERCMTFHQRSDQALFGIVQGGVYLDLRAQAAQALAKLDLPGYAIGGVSVGEPPELMADIVRTTAPLLPREKPRYLMGVGTYREMAIAIASGVDLFDCVIPTRWARHGTAIVQGERWNLKNAKFREDYTPLDETCPCYACQNFSRAYISHLVRSQEILGYTLLSIHNITELIRFTQKIREAILSDRFATEFAHWLN

SEQ ID NO: 58208 - protein, 376 aa, Nonlabens agnitus
  REGION 1..376: note = tr|A0A2S9WXQ3|A0A2S9WXQ3_9FLAO Queuine tRNA-ribosyltransferase OS=Nonlabens agnitus OX=870484; GN = tgt PE=3 SV=1
MKFDLLQTDANSQARAGVVHTDHGAIETPIFMPVGTVGTVKGVHQRELKEEVNPDIILANTYHLYLRPGTEVLEKAGGLHQFMNWDRPILTDSGGYQVYSLSANRKIKEEGVKFKSHIDGSYHTFTPERAMDIQRSIGADIIMAFDECTPYPCEFNYARRSMHMTHRWLKRCIEHFNNTPDKYGFTQTLFPIIQGSTYPELRQQSAEFVANCDMDANAIGGLSVGEPAEEMYAMTDVVTAILPKDKPRYLMGVGTPINLLENVALGIDMFDCVMPTRNGRNGMIFTANGSINIKNKKWEMDFSPLDDGAYAWVDTEYSKAYVRHLFTVNEMLGRQICTIHNLAFYLWLMREARKHILAGDFRAWKDQMVKQMDNRL

SEQ ID NO: 58209 - protein, 376 aa, unidentified
  source 1..376: note = Nonlabens arenilitoris
  REGION 1..376: note = tr|A0A2S7U8K4|A0A2S7U8K4_9FLAO Queuine tRNA-ribosyltransferase OS=Nonlabens arenilitoris; OX = 1217969 GN=tgt PE=3 SV=1
MKFDLLQTDSQSQARAGVVHTDHGAIETPIFMPVGTVGTVKGVHQRELENEVNPDIILANTYHLYLRPGIDVLEKAGGLHKFMNWDRPILTDSGGYQVYSLSANRKIKEEGVKFKSHIDGSYHFFTPERAMDIQRSIGADIIMAFDECTPYPCEYNYARRSMHMTHRWLKRCIEHFNSTPDKYGFSQTLFPIVQGSTYKDLREQSAEFIANCDMPANAIGGLSVGEPAEEMYAMTDVVTAVLPKDKPRYLMGVGTPINLLENVALGVDMFDCVMPTRNGRNGMIFTAHGTMNMKNKKWETDFSPLDPANYAWVDTAYSKAYVRHLFTVNEMLGRQICTIHNLSFYLWLMREARKHILAGDFRTWKDKMVKQMDNRL

SEQ ID NO: 58210 - protein, 376 aa, unidentified
  source 1..376: note = Nonlabens dokdonensis
  REGION 1..376: note = tr|L7W1K7|L7W1K7_NONDD Queuine tRNA-ribosyltransferase OS=Nonlabens dokdonensis (strain DSM 17205 / KCTC 12402 / DSW-6) OX=592029 GN=tgt PE=3 SV=1
MKFDLLQNDPQSQARAGVIHTDHGKIETPIFMPVGTIGTVKGVHQRELEEEVNPDIILGNTYHLYLRPGTDILEKAGGLHKFMNWDRPILTDSGGYQVYSLSSNRKIKEEGVKFKSHIDGSYHTFTPERAMDIQRSIGADIIMAFDECTPYPCDYNYARRSMHMTHRWLKRCITHFDNTPDLYGHKQTLFPIVQGSTYKDLRKQSAEAIAATDQFGNAIGGLSVGEPAEEMYAMTEVVTAVLPKEKPRYLMGVGTPINLLENVALGVDMFDCVMPTRNGRNGMIFTAHGTMNMKNLKWAEDFTPLDPANYAWVDTAYTKAYVRHLFTVNEMLGRQICTIHNLSFYLWLMREARKHILAGDFRTWKDQMVKQMDNRL

SEQ ID NO: 58211 - protein, 376 aa, unidentified
  source 1..376: note = Nonlabens dokdonensis
  REGION 1..376: note = tr|A0A1Z8AXE0|A0A1Z8AXE0_9FLAO Queuine tRNA-ribosyltransferase OS=Nonlabens dokdonensis OX=328515; GN = tgt PE=3 SV=1
MKFDLLQNDPQSQARAGVIHTDHGKIETPIFMPVGTIGTVKGVHQRELEQEVNPDIILGNTYHLYLRPGTDILEKAGGLHKFMNWDRPILTDSGGYQVYSLSSNRKIKEEGVKFKSHIDGSYHTFTPERAMDIQRSIGADIIMAFDECTPYPCDYNYARRSMHMTHRWLKRCITHFDNSPDLYGHKQTLFPIVQGSTYKDLRKQSAEAIAATDQFGNAIGGLSVGEPAEEMYAMTEVVTAVLPKEKPRYLMGVGTPINLLENVALGVDMFDCVMPTRNGRNGMIFTAHGTMNMKNLKWAEDFTPLDPANYAWVDTAYTKAYVRHLFTVNEMLGRQICTIHNLSFYLWLMREARKHILAGDFRTWKDQMVKQMDNRL

SEQ ID NO: 58212 - protein, 381 aa, unidentified
  source 1..381: note = Nonlabens marinus
  REGION 1..381: note = tr|W8VMY0|W8VMY0_9FLAO Queuine tRNA-ribosyltransferase OS=Nonlabens marinus S1-08; OX = 1454201 GN=tgt PE=3 SV=1
MSRMKMKFDLLQTDANSQARAGVVHTDHGAIETPIFMPVGTVGTVKGVHQRELKEDVNPDIILANTYHLYLRPGMEVLEKAGGLHQFMNWDRPILTDSGGYQVYSLSANRKIKEEGVKFKSHIDGSYHTFTPERAMDIQRSIGADIIMAFDECTPYPCEFNYARRSMHMTHRWLKRCIERFDNTPDKYGFTQTLFPIIQGSTYTDLRKQSAEFVANCDMDANAIGGLSVGEPAEEMYAMTEVVTAILPKDKPRYLMGVGTPINLLENVALGIDMFDCVMPTRNGRNGMIFTTHGSINIKNKKWEMDFSPLDEAGYAWVDTEYSKAYVRHLFTVNEMLGRQICTIHNLAFYLWLMREARKHILAGDFRTWKDQMVKQMDNRL

SEQ ID NO: 58213 - protein, 379 aa, unidentified
  source 1..379: note = Nonlabens sediminis
  REGION 1..379: note = tr|A0A090QQA8|A0A090QQA8_9FLAO Queuine tRNA-ribosyltransferase OS=Nonlabens sediminis OX=319236; GN = tgt PE=3 SV=1
MPRMKFDLLHNDPNSQARAGVVHTDHGAIETPIFMPVGTLATVKGLHQNELKDVVNPDIILANTYHLYLRPGTEILEKAGGVHKFMNWDRPVLTDSGGYQVYSLSANRKIKEAGVKFKSHIDGSYHFFTPESAMDIQRTIGADIIMAFDECTPYPCDYNYARRSMHMTHRWLKRCIDHFHNTPSKYGYNQTLFPIVQGSTYKDLRAQSAEFIANADQPGNAIGGLSVGEPAEEMYAMTEVVTAILPKDKPRYLMGVGTPINLLENVALGVDMFDCVMPTRNARNGMIFTVNGTMNVKNKKWADDFSPLDEHGTAWVDQYYSKAYVRHLFTVNEMLGKQICTLHNLTFYLWLMREARKHILAGDFRTWKDKMVKQMDNRL

SEQ ID NO: 58214 - protein, 378 aa, Nonlabens sp.
  REGION 1..378: note = tr|A0A1G5DZJ5|A0A1G5DZJ5_9FLAO Queuine tRNA-ribosyltransferase OS=Nonlabens sp. Hel1_33_55; OX = 1336802 GN=tgt PE=3 SV=1
MKMKFDLLQTDANSQARAGVVHTDHGAIETPIFMPVGTVGTVKGVHQRELKEEVNPDIILANTYHLYLRPGTEVLEKAGGLHQFMNWDRPILTDSGGYQVYSLSANRKIKEEGVKFKSHIDGSYHTFTPERAMDIQRSIGADIIMAFDECTPYPCEFNYARRSMHMTHRWLKRCIEHFNNTPDKYGFTQTLFPIIQGSTYPELREQSAEFVANCDMAANAIGGLSVGEPAEEMYAMTDVVTAILPKDKPRYLMGVGTPINLLENVALGIDMFDCVMPTRNGRNGMIFTANGSINIKNKKWEMDFSPLDEDNHAWVDTEYSKAYVRHLFTVNEMLGRQICTIHNLAFYLWLMREARKQILAGTFRTWKDKMVKQMDNRL

SEQ ID NO: 58215 - protein, 376 aa, Nonlabens sp.
  REGION 1..376: note = tr|A0A2K8X8X9|A0A2K8X8X9_9FLAO Queuine tRNA-ribosyltransferase OS=Nonlabens sp. MB-3u-79; OX = 2058134 GN=tgt PE=3 SV=1
MKFDLLQSDSQSQARAGVIHTDHGKIETPIFMPVGTIGTVKGVHQRELEEEVNPDIILGNTYHLYLRPGTDILEKAGGLHKFMNWDRPILTDSGGYQVYSLSSNRKIKEEGVKFKSHIDGSYHTFTPERAMDIQRSIGGDIIMAFDECTPYPCDYNYARRSMHMTHRWLKRCITHFDNSPDLYAHKQTLFPIVQGSTYVDLRQQSAEAIAATNQFGNAIGGLSVGEPAEEMYAMTEVVTAILPKEKPRYLMGVGTPINLLENVALGIDMFDCVMPTRNGRNGMIFTAHGTMNMKNKKWAEDFTPLDAADYAWVDTAYTKAYVRHLFTVNEMLGRQICTIHNLSFYLWLMREARKHIIAGDFRTWKDKMVKQLDNRL

SEQ ID NO: 58216 - protein, 376 aa, unidentified
  source 1..376: note = Nonlabens spongiae
  REGION 1..376: note = tr|A0A1W6MGE3|A0A1W6MGE3_9FLAO Queuine tRNA-ribosyltransferase OS=Nonlabens spongiae OX=331648; GN = tgt PE=3 SV=1
MKFDLLTTDSQSQARAGVVHTDHGEIETPIFMPVGTLGTIKGVHQSELKQEVNPDIILANTYHLYLRPGTEILEKAGGLHKFMNWDRPILTDSGGYQVYSLSANRKIKEEGVKFKSHIDGSYHFFTPERAMDIQRSIGADIIMAFDECTPYPCEYNYARRSMHMTHRWLKRCIEHFDNTPDKYGYKQTLLPIVQGSTYKDLRKQSAEFIANTNQHANAIGGLSVGEPAEEMYAMTEVVTEILPKDKPRYLMGVGTPINLLENVALGVDMFDCVMPTRNGRNGMIFTAHGSMNVKNKKWEADFSPLDEAGYAWVDTYYSKAYVRHLFSVNEMLGRQICTIHNLAFYLWLMREARKHIIAGDFRTWKDKMVKQMDNRL

SEQ ID NO: 58217 - protein, 376 aa, Nonlabens tegetincola
  REGION 1..376: note = tr|A0A2S7TC90|A0A2S7TC90_9FLAO Queuine tRNA-ribosyltransferase OS=Nonlabens tegetincola OX=323273; GN = tgt PE=3 SV=1
MKFDLLHNDPNSQARAGVVHTDHGAIETPIFMPVGTLATVKGLHQNELKDVVNPDIILANTYHLYLRPGTEILEKAGGVHKFMNWDRPVLTDSGGYQVYSLSANRKIKEAGVKFKSHIDGSYHFFTPESAMDIQRTIGADIIMAFDECTPYPCDYNYARRSMHMTHRWLKRCIDHFHNTPSKYGYNQTLFPIVQGSTYKDLRAQSAEFIANADQPGNAIGGLSVGEPAEEMYAMTEVVTAILPKDKPRYLMGVGTPINLLENVALGVDMFDCVMPTRNARNGMIFTVNGTMNVKNKKWADDFSPLDEHGTAWVDQYYSKAYVRHLFTVNEMLGKQICTLHNLTFYLWLMREARKHILAGDFRTWKDKMVKQMDNRL

SEQ ID NO: 58218 - protein, 376 aa, unidentified
  source 1..376: note = Nonlabens ulvanivorans
  REGION 1..376: note = tr|A0A084JZM8|A0A084JZM8_NONUL Queuine tRNA-ribosyltransferase OS=Nonlabens ulvanivorans; OX = 906888 GN=tgt PE=3 SV=1
MKFDLLQTDSQSQARAGVVHTDHGAIETPIFMPVGTVGTVKGVHQRELENDVNPDIILANTYHLYLRPGIDVLEKAGGLHKFMNWDRPILTDSGGYQVYSLSANRKIKEEGVKFKSHIDGSYHFFTPERAMDIQRSIGADIIMAFDECTPYPCEYNYARRSMHMTHRWLKRCIEHFNNTPNKYGFNQTLFPIIQGSTYKDLREQSAEFIANCDMPANAIGGLSVGEPAEEMYAMTDVVTAVLPKDKPRYLMGVGTPINLLENVALGVDMFDCVMPTRNGRNGMIFTAHGTMNMKNKKWETDFSPLDPGDYAWVDTAYSKAYVRHLFTVNEMLGRQICTIHNLSFYLWLMREARKHIIAGDFRTWKDKMVKQMDNRL

SEQ ID NO: 58219 - protein, 379 aa, unidentified
  source 1..379: note = Nonlabens ulvanivorans
  REGION 1..379: note = tr|A0A090QGN2|A0A090QGN2_NONUL Queuine tRNA-ribosyltransferase OS=Nonlabens ulvanivorans; OX = 906888 GN=tgt PE=3 SV=1
MRRMKFDLLQTDSQSQARAGVVHTDHGAIETPIFMPVGTVGTVKGVHQRELENDVNPDIILANTYHLYLRPGIDVLEKAGGLHKFMNWNRPILTDSGGYQVYSLSANRKIKEEGVKFKSHIDGSYHFFTPERAMDIQRSIGADIIMAFDECTPYPCEYNYARRSMHMTHRWLKRCIEHFNNTPSKYGFNQTLFPIIQGSTYKDLREQSAEFIANCDMPANAIGGLSVGEPAEEMYAMTDIVTAVLPKDKPRYLMGVGTPINLLENVALGVDMFDCVMPTRNGRNGMIFTAHGTMNMKNKKWETDFSPLDPGDYAWVDTAYSKAYVRHLFTVNEMLGRQICTIHNLSFYLWLMREARKHILAGDFRTWKDKMVKQMDNRL

SEQ ID NO: 58220 - protein, 376 aa, unidentified
  source 1..376: note = Nonlabens xylanidelens
  REGION 1..376: note = tr|A0A2S6IF51|A0A2S6IF51_9FLAO Queuine tRNA-ribosyltransferase OS=Nonlabens xylanidelens; OX = 191564 GN=tgt PE=3 SV=1
MKFDLLQNDPKSQARAGVIHTDHGKIETPIFMPVGTVGTVKGVHQRELEQEINPDIILGNTYHLYLRPGTDILEKAGGLHKFMNWDRPILTDSGGYQVYSLSSNRKIKEEGVKFKSHIDGSYHTFTPERAMDIQRSIGGDIIMAFDECTPYPCDYNYARRSMHMTHRWLKRCITRFDETPDLYGHKQTLFPIVQGSTYIDLRKQSAEAIAATEQFGNAIGGLSVGEPAEEMYAMTEVVTAILPKEKPRYLMGVGTPINLLENVALGVDMFDCVMPTRNGRNGMIFTAHGTMNMKNKKWEEDFSPLDPANYAWVDTAYTKAYVRHLFTVNEMLGRQICTIHNLSFYLWLMREARKHILAGDFSTWKDKMVKQLDNRL

SEQ ID NO: 58221 - protein, 381 aa, unidentified
  source 1..381: note = Nosocomiicoccus massiliensis
  REGION 1..381: note = tr|A0A2J6NH53|A0A2J6NH53_9STAP Queuine tRNA-ribosyltransferase OS=Nosocomiicoccus massiliensis; OX = 1232430 GN=tgt PE=3 SV=1
MAIRYEHVHTCKQSGARAGRLHTPHGIIETPIFMPVGTLATVKGMSPEELLEMGSQIILSNTYHLWLRPGSDLVREAGGLHNFMNWQKPILTDSGGFQVFSLSNIRTIEEEGVHFRSHLDGSKLFLTPEKAMDIQHDLGADIIMSFDECAPIPATREYVKDSLERTTRWAERGLNYHVKSGNDKKQALFGIVQGGEYSDLRKQSAREITSLDFPGYSIGGLSVGEPKPLMYEMLEETVPLLPFDKPRYLMGVGSPDALIEGVIRGIDMFDCVLPTRIARNGTTMTSQGRLVVKNQKYSRDFSPLDPNCDCYTCRNYTRAYIRHLFKANEMFGARLTTYHNLHFLLNLMSDVRQAILNDSLLDFKEYFFETYGLNKENAKNF

SEQ ID NO: 58222 - protein, 394 aa, unidentified
  source 1..394: note = Nostoc azollae
  REGION 1..394: note = tr|D7E0B5|D7E0B5_NOSA0 Queuine tRNA-ribosyltransferase OS=Nostoc azollae (strain 0708); OX = 551115 GN=tgt PE=3 SV=1
MTNFSFQLLATCSQTKARAGVFSTPHGPVETPRFMPVGTLANVKTITPAQLKDTGAQMVLSNTYHLHIQPGEAIVAAGGGLHKFMGWNGPMLTDSGGFQVFSLSEMRNITEAGVTFRSPYNGQVIELTPERSIEIQNILGADVIMAFDECPPYPATRQEVEAATDRTYRWLERCIVAHQRTDQALFPIVQGGVYLDLRACAAEALAKLDMPGYAIGGVSVGEPPELMAEIVKTTAPLLPHNKPRYLMGVGTYREMAIGIASGVDLFDCVIPTRWARHATAIVSGERWNLKNAKFREDFTPLDETCPCYACQNFSRAYISHLVRAQEILAYTLLSIHNITELVRFTQKIRESILSDRFITDFGHWLKDEEVTGDYGLGTGEDGKITSPSSPVPNK

SEQ ID NO: 58223 - protein, 385 aa, Nostoc calcicola
  REGION 1..385: note = tr|A0A1U7IVV2|A0A1U7IVV2_9NOSO Queuine tRNA-ribosyltransferase OS=Nostoc calcicola FACHB-389; OX = 1357508 GN=tgt PE=3 SV=1
MSANFSFQCLACCSQTKARAGVFFTPHGPVETPRFMPVGTLANVKTITPSQLRDTGAQMILSNTYHLHLQPGEAIVAGGGGLHKFMGWNGPMLTDSGGFQVFSLSEMRKITEEGVTFRSPHDGQIIKLTPERSIEIQNTLGADVIMAFDECPPYPATRQEVETATERTYRWLERCITAHQHSEQALFGIVQGGVYLDLRCRAAEALAKLDLPGYAIGGVSVGEPPELMAEIVKVTAPLLPPEKPRYLMGVGTYREMAIAIASGVDLFDCVIPTRWARHGTAIVQGDRWNLKNAKFREDFAPIDETCPCYTCQNFSRAYVSHLVRSQEILAYTLLSIHNITELIRFTQHIREAILSDRFTTEFGHWLEEVGSGNGEWETRGMTNDK

SEQ ID NO: 58224 - protein, 332 aa, unidentified
  source 1..332: note = Nostoc carneum
  REGION 1..332: note = tr|A0A1Z4HRC9|A0A1Z4HRC9_9NOSO Queuine tRNA-ribosyltransferase OS=Nostoc carneum NIES-2107; OX = 1973483 GN=tgt PE=3 SV=1
MPVGTLANVKTVTPAQLRDTGAQMVLSNTYHLHLQPGEAIVAGGGGLHKFMGWNGPMLTDSGGFQVFSLSEMRKITEEGVTFRSPHDGQIIKLTPERSIEIQNTLGADVIMAFDECPPYPATRQEVEAATERTYRWLERCIVAHKRSDQALFGIVQGGVYLDLRSQAAIALAKLNLPGYAIGGVSVGEPPELMAQIVQTTAPLLPPEKPRYLMGVGTYKEMAIAIASGVDLFDCVIPTRWARHGTAIVQGERWNLKNAKFREDFTPLDETCPCYACQNFSRAYISHLVRSQEILAYTLLSIHNINELIRFTQRIREAILSDRFYSEFGHWLE

SEQ ID NO: 58225 - protein, 382 aa, Nostoc commune
  REGION 1..382: note = tr|A0A2R5FI61|A0A2R5FI61_NOSCO Queuine tRNA-ribosyltransferase OS=Nostoc commune NIES-4072; OX = 2005467 GN=tgt PE=3 SV=1
MSANFSFECLACCNQTKARAGVFFTPHGVVETPRFMPVGTLANVKTITPSQLQETGAQMILSNTYHLHLQPGEAIVAGGGGLHKFMGWNGPMLTDSGGFQVFSLSEMRKITEEGVTFRSPHDGQIINLTPELSIQIQNTLGADVIMAFDECPPYPATRQEVETATERTYRWLERCITAHKRSEQALFGIVQGGVYLDLRCRAAEALAKLDLPGYAIGGVSVGEPPEMMAEIVKVTAPLLPPEKPRYLMGVGTYREMAIAIASGVDLFDCVIPTRWARHGTAIVQGGRWNLKNAKFREDFTPLDETCPCYTCQNFSRAYVSHLVRSQEILAYTLLSIHNITELIRFTQHIREAILSDRFVTEFGHWLNSSESVPNEEEITNDK

SEQ ID NO: 58226 - protein, 378 aa, unidentified
  source 1..378: note = Nostoc cycadae
  REGION 1..378: note = tr|A0A2H6LLN5|A0A2H6LLN5_9NOSO Queuine tRNA-ribosyltransferase OS=Nostoc cycadae WK-1 OX=1861711; GN = tgt PE=3 SV=1
MTKNFSFQSLARCSQTKARAGIFLTPHGVVETPKFMPVGTLANVKTVTPAQLKDTGAQMVLSNTYHLHLQPGEAIVAGGGGLHKFMGWDGPMLTDSGGFQVFSLSEMRKITEEGVTFRSPHDGQIINLTPERSIEIQNTLGADVIMAFDECPPYPATRQEVETATERTYRWLERCIAAHQRQDQALFGIVQGGVYLDLRSQAAVALAKLDLPGYAIGGVSVGEPAELMAQIVQATAPLLPPEKPRYLMGVGTYREMAIAIASGIDLFDCVIPTRWARHGTAMVQGERWNLKNAKFREDFTPLDETCPCYACQNFSRAYISHLVRSQEILAYTLLSIHNITELIRFTQKIRQAILNDSFLAEFGHWLNSPDTGELEENS

SEQ ID NO: 58227 - protein, 347 aa, unidentified
  source 1..347: note = Nostoc flagelliforme
  REGION 1..347: note = tr|A0A2K8SZT5|A0A2K8SZT5_9NOSO Queuine tRNA-ribosyltransferase OS=Nostoc flagelliforme CCNUN1; OX = 2038116 GN=tgt PE=3 SV=1
MPVGTLANVKTITPSQLRETGAQMILSNTYHLHLQPGEAIVAGGGGLHKFMGWNGPMLTDSGGFQVFSLSEMRKITEEGVTFRSPHDGRIINLTPELSIQIQNTLGADVIMAFDECPPYPATRQEVETATERTYRWLERCITAHQRSEQALFGIVQGGVYLDLRCRAAEALAKLDLPGYAIGGVSVGEPPEMMAEIVKVTAPLLPPEKPRYLMGVGTYREMALAIASGVDLFDCVIPTRWARHGTAIVQGGRWNLKNAKFREDFTPLDETCPCYTCQNFSRAYISHLVRSQEILAYTLLSIHNITELIRFTQHIREAILSDRFVTEFGHWLNSSESAPNEEEITNDK

SEQ ID NO: 58228 - protein, 348 aa, unidentified
  source 1..348: note = Nostoc linckia
  REGION 1..348: note = tr|A0A2C6UV00|A0A2C6UV00_NOSLI Queuine tRNA-ribosyltransferase OS=Nostoc linckia z16 OX=1628751; GN = tgt PE=3 SV=1
MPVGTLANVKTITPSQLRDTGAQMILSNTYHLHLQPGEAIVAGGGGLHKFMGWNGPMLTDSGGFQVFSLSEMRKITEDGVTFRSPHDGQIINLTPERSIEIQNTLGADVIMAFDECPPYPATRQEVETATDRTYRWLERCITAHQRSDQALFGIVQGGVYLDLRCRAAEALAKLDLLGYAIGGVSVGEPPELMAEIVKVTAPLLPPEKPRYLMGVGTYREMAIAIASGVDLFDCVIPTRWARHGTAIVQGERWNLKNAKFREDFAPIDETCPCYTCQNFSRAYVSHLVRSQEILAYTLLSIHNITELIRFTQKIREAILSDRFTTEFGHWLEGVEDGGMGRWGDGEMG

SEQ ID NO: 58229 - protein, 332 aa, unidentified
  source 1..332: note = Nostoc linckia
  REGION 1..332: note = tr|A0A2C6TTV1|A0A2C6TTV1_NOSLI Queuine tRNA-ribosyltransferase (Fragment) OS=Nostoc linckia z16; OX = 1628751 GN=tgt PE=3 SV=1
MKFDLLTKDPQSKARAGVVTTDHGAIETPIFMPVGTVASVKGVHQRELKEEINPDIILGNTYHLYLRPQTDILEKAGGLHKFMNWDRNILTDSGGYQVYSLSANRKIKEEGVKFKSHIDGSYHFFSPESVMEIQRTIGADIIMAFDECTPYPCDYRYAKRSMHMTHRWLDRCIAHLEKLPFKYGYEQTLFPIVQGSTYKDLREQSAEYIANAGAKGNAIGGLSVGEPAEEMYAMTEVVTAILPEDKPRYLMGVGTPINILENIALGVDMFDCVMPTRNARNGMLFTANGTINIKNKKWEADFSPVDEMGITFVDTEYTKAYLRHLFAANEYL

SEQ ID NO: 58230 - protein, 376 aa, Nostoc minutum
  REGION 1..376: note = tr|A0A367QDX2|A0A367QDX2_9NOSO Queuine tRNA-ribosyltransferase OS=Nostoc minutum NIES-26; OX = 1844469 GN=tgt PE=3 SV=1
MSAIFSFQSLACCSQTKARAGVFFTPHGPVETPRFMPVGTLANVKTVTPAQLKDTGAQMVLSNTYHLHLQPGEAIVAGGGGLHKFMGWNGPMLTDSGGFQVFSLSEMRKITEKGVTFRSPHDGQIINLTPERSIEIQNTLGADVIMAFDECPPYPATRQEVEAATNRTYRWLERCITAHQRSDQALFGIVQGGVYLDLRSQAAVALAQLDLPGYAIGGVSVGEPPELMAQIVQATAPLLPPEKPRYLMGVGTYREMAIAIASGVDLFDCVIPTRWARHGTAMVRGDRWNLKNAKFREDFAPLDDTCPCYACQNFSRAYISHLVRSQEILAYTLLSIHNITELIRFTQKIREAILSDRFFTEFGHWLEGDGGTEGQK

SEQ ID NO: 58231 - protein, 373 aa, unidentified
  source 1..373: note = Nostoc piscinale
  REGION 1..373: note = tr|A0A0M3V6U1|A0A0M3V6U1_9NOSO Queuine tRNA-ribosyltransferase OS=Nostoc piscinale CENA21; OX = 224013 GN=tgt PE=3 SV=1
MTKNFSFQSLARCSQTKARAGIFFTPHGAVETPRFMPVGTLANVKTVTPAQLKDTGAQMVLSNTYHLHLQPGEAIVAGGGGLHKFMGWDGPMLTDSGGFQVFSLSEMRKITEEGVTFRSPHDGQIINLTPERSIEIQNTLGADVIMAFDECPPYPATRQEVETATARTYRWLERCISAHQRQDQALFGIVQGGVYLDLRSQAAVELAKLDLPGYAIGGVSVGEPAELMAQIVQATAPLLPPEKPRYLMGVGTYREMAIAIASGIDLFDCVIPTRWARHGTAMVKGERWNLKNAKFREDFAPMDETCPCYACQNFSRAYISHLVRSQEILAYTLLSIHNITELIRFTQKIRQAILNDSFLEEFGHWLNSSETGE

SEQ ID NO: 58232 - protein, 379 aa, unidentified
  source 1..379: note = Nostoc punctiforme
  REGION 1..379: note = tr|B2J4T8|B2J4T8_NOSP7 Queuine tRNA-ribosyltransferase OS=Nostoc punctiforme (strain ATCC 29133 / PCC 73102) OX=63737 GN=tgt PE=3 SV=1
MSANFSFECLACCSQTKARAGVFFTPHGVVETPRFMPVGTLANVKTITPAQLRDTGAQMILSNTYHLHLQPGEAIVAGGGGLHKFMGWNGPMLTDSGGFQVFSLSEMRKITEEGVTFRSPHDGRIINLTPERSIEIQNTLGADVIMAFDECPPYPATRQEVETATERTYRWLERCITAHQRSEQALFGIVQGGVYLDLRCRAAETLAKLDLPGYAIGGVSVGEPPELMAEIVKVTAPLLPPEKPRYLMGVGTYREMAIAIASGIDLFDCVIPTRWARHGTAIVQGGRWNLKNAKFREDFTPLDETCPCYTCQNFSRAYVSHLVRSQEILAYTLLSIHNITELIRFTQKIREAILSDRFTTEFGHWLNEESGDEEWRIEE

SEQ ID NO: 58233 - protein, 382 aa, unidentified
  source 1..382: note = Nostoc punctiforme
  REGION 1..382: note = tr|A0A367R4L0|A0A367R4L0_NOSPU Queuine tRNA-ribosyltransferase OS=Nostoc punctiforme NIES-2108; OX = 1356359 GN=tgt PE=3 SV=1
MSANFSFQCLACCSQTKARAGVFFTPHGLVETPRFMPVGTLANVKTITPAQLRETGAQMILSNTYHLHLQPGEAIVAGGGGLHKFMGWNGPMLTDSGGFQVFSLSEMRKITEEGVTFRSPHDGRIINLTPERSIEIQNTLGADVIMAFDECPPYPATRQEVETATERTYRWLERCITAHQRSDQALFGIVQGGVYLDLRCHAAEALAKLDLPGYAIGGVSVGEPPELMAEIVKVTAPLLPPEKPRYLMGVGTYREMAIAIASGIDLFDCVIPTRWARHGTAIVQGGRWNLKNAKFREDFTPLDETCPCYTCQNFSRAYISHLVRSQEILAYTLLSIHNITELIRFTQKIREAILSDRFVAEFGHWLNSSESASDEGEITNDY

SEQ ID NO: 58234 - protein, 374 aa, Nostoc sp.
  REGION 1..374: note = sp|Q8YVT9|TGT_NOSS1 Queuine tRNA-ribosyltransferase; OS = Nostoc sp. (strain PCC 7120 / SAG 25.82 / UTEX 2576); OX = 103690 GN=tgt PE=3 SV=2
MSAIFSFQSLARCSQTKARSGIFLTPHGIVETPRFMPVGTLANVKTVTPAQLKETGAQMVLSNTYHLHLQPGEAIVAGGGGLHKFMGWNGPMLTDSGGFQVFSLSEMRKITEEGVTFRSPRDGQIIKLTPERSIEIQNILGADVIMAFDECPPYPANRQEVEAATERTYRWLERCITAHQRQDQALFGIVQGGVYLDLRAKAANTLTELDLPGYAIGGVSVGEPPEMMAQIVQATAPLLPAHKPRYLMGVGTYREMVIAIASGIDLFDCVIPTRWARHGTAMVKGERWNLKNAKFREDFAPIDETCPCYACQNFSRAYISHLVRSQEILAYTLLSIHNITELIRFTQKIREAILSDRFLEEFGHWLNSAETDNR

SEQ ID NO: 58235 - protein, 376 aa, Nostoc sp.
  REGION 1..376: note = tr|A0A1C0UTZ8|A0A1C0UTZ8_9NOSO Queuine tRNA-ribosyltransferase OS=Nostoc sp. MBR 210 OX=1881015; GN = tgt PE=3 SV=1
MSDNFSFQSLARCSQTKARAGIFLTPHGVVETPRFMPVGTLANVKTVTPAQLKDTGAQMVLSNTYHLHLQPGEAIVAGGGGLHKFMGWDGPMLTDSGGFQVFSLSEMRKITEEGVTFRSPHDGQIINLTPERSIEIQNTLGADVIMAFDECPPYPATRQEVETATQRTYRWLERCIVAHKRQDQALFGIVQGGVYLDLRSQAAVELAKLDLPGYAIGGVSVGEPAELMAQIVQATAPLLPPEKPRYLMGVGTYREMAIAIASGIDLFDCVIPTRWARHGTAMVQGERWNLKNAKFREDFAPLDETCPCYACQNFSRAYISHLVRSQEILAYTLLSIHNITELIRFTQKIRQAILNDSFLEEFGHWLNSPETGDDLS

SEQ ID NO: 58236 - protein, 384 aa, unidentified
  source 1..384: note = Nostocales cyanobacterium
  REGION 1..384: note = tr|A0A1Y0RWS7|A0A1Y0RWS7_9CYAN Queuine tRNA-ribosyltransferase OS=Nostocales cyanobacterium HT-58-2 OX=1940762 GN=tgt PE=3 SV=1
MTAKFSFQRLGSCSQTKARAGIFFTPHGPVETPRFMPVGTLANVKTLTPAQLQDTGAQMVLCNTYHLHLQPGEAIVAGGGGLHKFMGWNGPILTDSGGFQVFSLSEMRKISEEGVTFRSPHDGQIINLTPERSIEIQNILGADVIMAFDECPPYPASREEVEAATQRTYRWLERCIAAHQRSEQALFGIVQGGVHLDLRSHAAIALTKLDLPGYAIGGVSVGEPPELIAKIVQATAPLLPPDKPRYLMGVGTYREIAIAIASGVDLFDCVIPTRWARHGTAMVKGERWNLKNAKFREDFTPLDETCPCYTCQNFTRAYLSHLVRSQEILAYTLLSIHNITELIHFTQRIRKAILEDRFVIEFAQWLTPESPEDSIETHSAPIED

SEQ ID NO: 58237 - protein, 385 aa, unidentified
  source 1..385: note = Notoacmeibacter marinus
  REGION 1..385: note = tr|A0A231UXX3|A0A231UXX3_9RHIZ Queuine tRNA-ribosyltransferase OS=Notoacmeibacter marinus; OX = 1876515 GN=tgt PE=3 SV=1
MSDEREQHPSETFTFTQLAQDGAARRGRIDMPRGSIRTPAFMPVGTAGTVKAMYLDQVRDLGADIILGNTYHLMLRPGAERVAKLGGLHEFARWPHPILTDSGGFQVMSLSGLRKITEEGVTFQSHVDGAKHFMSPERSIEIQGLLGSDIQMQLDECIALPAGEKEIARAMELSLRWAERCKAAFGDQPGKAMFGIVQGGDHKELRVQSAKALAAMDLKGYAIGGLAVGEPQDVMFDMIETVMPFLPQTKPRYLMGVGTPDDILGSVQRGVDMFDCVMPTRAGRHGLAFTRHGRINLKNARHAEDHRPLDATSDCPATRDYSRAYLHHLVRAGEPLAGMLLTWNNLAYYQQLMAGIRDAITGGRLAAFAAETRAEWVKGDLPPIG

SEQ ID NO: 58238 - protein, 385 aa, unidentified
  source 1..385: note = Notoacmeibacter sp.
  REGION 1..385: note = tr|A0A3L7JBY3|A0A3L7JBY3_9RHIZ Queuine tRNA-ribosyltransferase OS=Notoacmeibacter sp. M2BS9Y-3-1; OX = 2448481 GN=tgt PE=3 SV=1
MNLDREQTPSGQFFFTKLAEDGAARRGRIDMPRGSIRTPAFMPVGTAGTVKAMYLDQVRDLGADIILGNTYHLMLRPGAERVARLGGLHDFARWPYPILTDSGGFQVMSLSGLRKITEEGVTFQSHVDGTKHFMSPERSIEIQGLLDSDIQMQLDECIALPAEEKEIGRAMELSLRWAERCKAAFGDQPGKAMFGIIQGGDNARLRIESAEALAALDLKGYAIGGLAVGEPQNVMFDMIETVIPSMPKDRPRYLMGVGTPDDILGSVQRGVDMFDCVMPTRAGRHGLAFTRHGKINLKNARHAEDDRPLDEESDCAAARDYSRAYLHHLVRAGEPLAGMLLTWNNLAYYQQLMAGIRAAISEARLQEHAEKVRAAWAKGDLPPRS

SEQ ID NO: 58239 - protein, 377 aa, unidentified
  source 1..377: note = Novibacillus thermophilus
  REGION 1..377: note = tr|A0A1U9K5B5|A0A1U9K5B5_9BACL Queuine tRNA-ribosyltransferase OS=Novibacillus thermophilus; OX = 1471761 GN=tgt PE=3 SV=1
MAIRYELLKTCHQTGARLGRLHTPHGIVETPAFMPVGTLATVKAMSPEELEEMDAQIILSNTYHLFLRPGHEVVAAAGGLHRFMHWNRPILTDSGGFQVFSLSKLRHITEDGVTFRSHISGEPLFIGPEKAMEIQNALGSDIIMAFDECAPYPAEREYVETSLERTTRWAERCLKAHKRPDEQALFGIVQGGVYRDLRERSARSLTALDFPGYAIGGLSVGEPKEIMYDVLEYTVPLLPDTKPRYLMGVGSPDALVEGAVRGIDMFDCVLPTRIARNGTTMTSRGRLVVRNAKYARDFSPLDPACDCYTCRNYTRAYIRHLIKSDEILGLRLTTYHNLYFLLRLMENVRQAIREDRLRNFRDEFFAQYYGQNSHKPF

SEQ ID NO: 58240 - protein, 375 aa, unidentified
  source 1..375: note = Noviherbaspirillum autotrophicum
  REGION 1..375: note = tr|A0A0C2BT52|A0A0C2BT52_9BURK Queuine tRNA-ribosyltransferase OS=Noviherbaspirillum autotrophicum OX=709839 GN=tgt PE=3 SV=1
MLNFKLIKTDGHARRGRLTLNHGVVETPIFMPVGTYGSVKAMSPLELHDIDAQIILGNTFHLWLRPGLDVISKFDGLHRFIGWNKPVLTDSGGFQVFSLGAMRKITEEGVKFASPINGDKLFLSPEISMQIQRVLNSDIVMQFDECTPYEIEGRPATEAEAAKSMRMSLRWAKRSRDEFDRGENPNALFGIVQGGMFEHLRDESLAGLQEIGFGGIAIGGLSVGEPKEDMMRVLAHVGPRLPADKPHYLMGVGTPEDLVAGVANGVDMFDCVMPTRNARNGWLFTRFGDLKIKNARYKDDEKPLDETCECYACRNFSRAYLYHLHRAGEILGARLNTIHNLHYYLQLMREMRAAIDNDRFQAFVVQFHADRARGV

SEQ ID NO: 58241 - protein, 375 aa, unidentified
  source 1..375: note = Noviherbaspirillum denitrificans
  REGION 1..375: note = tr|A0A254TC63|A0A254TC63_9BURK Queuine tRNA-ribosyltransferase OS=Noviherbaspirillum denitrificans OX=1968433 GN=tgt PE=3 SV=1
MLNFKLLKTDGKARRGRLTLNHGVVETPIFMPVGTYGSVKAMSPEELHEVGAQIILGNTFHLWLRPGLDVVGKFDGLHRFIGWSKPILTDSGGFQVFSLGAMRKITEEGVKFASPINGDKLFLSPEISMQIQRVLNSDIVMQFDECTPYEIDGRPATEAEAGKSMRMSLRWAKRSRDEFDKGENPNALFGIVQGGMFEHLRDESLAGLQEVGFEGYAIGGLSVGEPKEDMMRVLEHVGPRLPADKPHYLMGVGTPEDLVAGVANGVDMFDCVMPTRNARNGWLFTRFGDLKIKNARYKDDDKPLDETCECYTCRNFSRAYLYHLHRAGEILGARLNTIHNLHYYLQLMREMRAAIDADRFQAFVVQFQADRARGI

SEQ ID NO: 58242 - protein, 375 aa, unidentified
  source 1..375: note = Noviherbaspirillum humi
  REGION 1..375: note = tr|A0A239K7J6|A0A239K7J6_9BURK Queuine tRNA-ribosyltransferase OS=Noviherbaspirillum humi; OX = 1688639 GN=tgt PE=3 SV=1
MLQYQLLKTDGKARRGRLTLNHGTIETPIFMPVGTYGSVKAMSPQDLNDIDAQIILGNTFHLWLRPGLEVVAKFGGLHRFIGWDKPILTDSGGFQVFSLGEMRKISEEGVKFASPINGDKLFLSPEISMQIQRVLNSDIVMQFDECTPYEIGGRPATRDEAGQSMRMSLRWARRSKNEFERELNPNALFGIVQGGMFEDLRDESLAGLEEVGFHGLAIGGLSVGEPKEDMMRILEHVGPKLHADKPHYLMGVGTPEDLVAGVANGVDMFDCVMPTRNARNGWIFTRFGDIKIKNARYKDDDKPLDETCSCYACRNFSRAYLFHLHRAGEILGARLNTIHNLHYYLQLMQEMRDAIDAGTFQAFVVRFKADRARGV

SEQ ID NO: 58243 - protein, 375 aa, unidentified
  source 1..375: note = Noviherbaspirillum sp.
  REGION 1..375: note = tr|A0A3A3G160|A0A3A3G160_9BURK Queuine tRNA-ribosyltransferase OS=Noviherbaspirillum sp. K1S02-23; OX = 2320865 GN=tgt PE=3 SV=1
MLKYQLLKTDGKARRGRLTLNHGTVETPIFMPVGTYGSVKAMSPQELHEIGAEIILGNTFHLWLRPGTEVLDKFGGLHDFMGWDRSILTDSGGFQVFSLGEMRKITEEGVKFASPINGDKLFLSPEVSMQIQKSLNSDIVMQFDECTPYEIDGRAATAKEAADSMRMSLRWGQRSRDEFDRGENPNALFGIVQGGMFEHLRDESLAGLEEIGFHGLAIGGLSVGEPKEDMLRILAHIGPRLPADKPHYLMGVGTPEDLVAGVANGIDMFDCVMPTRNARNGWLFTRFGDIKIKNARYKDDMAPLDETCGCHACRNFSRAYLHHLHRAGEILGARLNTIHNLYYYLQLMRDMRAAIEAGEFALFVARFAAERARGV

SEQ ID NO: 58244 - protein, 375 aa, unidentified
  source 1..375: note = Noviherbaspirillum sp.
  REGION 1..375: note = tr|A0A5B8ND10|A0A5B8ND10_9BURK Queuine tRNA-ribosyltransferase OS=Noviherbaspirillum sp. UKPF54; OX = 2601898 GN=tgt PE=3 SV=1
MLNFKLIKTDGNARRGRLTLNHGVVETPIFMPVGTYGSVKAMSPLELHDIDAQIILGNTFHLWLRPGLDVIGKFDGLHRFIGWNKPVLTDSGGFQVFSLGAMRKITEEGVKFASPINGDKLFLSPEISMQIQRVLNSDIVMQFDECTPYEIDGRPATEAEAAKSMRMSLRWAKRSRDEFDRGENPNALFGIVQGGMFEHLRDESLAGLQEIGFEGIAIGGLSVGEPKEDMMRVLEHVGPRLPADKPHYLMGVGTPEDLVAGVASGVDMFDCVMPTRNARNGWIFTRFGDIKIKNARYKDDEKPLDETCECYACRNFSRAYLYHLHRAGEILGARLNTIHNLHYYLQLMREMRAAIDNDRFQAFVAQFHADRARGV

SEQ ID NO: 58245 - protein, 367 aa, unidentified
  source 1..367: note = Novimethylophilus kurashikiensis
  REGION 1..367: note = tr|A0A2R5F9E8|A0A2R5F9E8_9PROT Queuine tRNA-ribosyltransferase OS=Novimethylophilus kurashikiensis OX=1825523 GN=tgt PE=3 SV=1
MQFNVIHTHQAARRGTLTLAHGTVQTPAFMPVGTYGTVKAMSPAEIREIGAHIVLGNTFHLWLRPGLEVIAAHGGLHRFMGWDGPILTDSGGFQVWSLGDLRKITEEGVKFRSPINGDACFLTPEESMRIQKVLNSDIVMIFDECTPYPASHDQAKASMELSLRWAARSKSAHEGNPNALFGIIQGGMYEDLRDVSLRGLTDIGFDGYAIGGLSVGEPKEDMLRILDHLPKQMPADKPRYLMGVGTPEDLVAAVSRGVDMFDCVMPTRNARNGWLFTRHGDVKIKNAKYKDDTAPLDPDCACYTCRNFTRAYLHHLHRVGEILGARLNTIHNLHYYQELMQGMRSAIESGTFAAFVAEFERQRNSLC

SEQ ID NO: 58246 - protein, 374 aa, Novosphingobium aromaticivorans
  REGION 1..374: note = sp|Q2G639|TGT_NOVAD Queuine tRNA-ribosyltransferase; OS = Novosphingobium aromaticivorans (strain ATCC 700278 / DSM 12444 / CIP 105152 / NBRC 16084 / F199) OX=279238 GN =tgt PE=3 SV=1
MTRFSFKIHATDGKARTGAIQMMRGEIRTPAFMPVGTAATVKAMKVEDVRASGADIILGNTYHLMLRPGAERVARLGGLHKFMGWDRPILTDSGGYQVMSLSDLRKITEEGVTFASHLDGSRHLLSPERSMEIQRLLGSDIVMCFDECPRADQPREVIARSMEMSMRWARRSRDAFDAGGEHAERSALFGIQQGALDEGLRKTSADALTDIGFDGYAIGGLAVGEGQEAMFATLDFAPQQLPADRPRYLMGVGKPDDLVGAVERGVDMFDCVLPTRSGRNGQAFTWNGPLNMRNARHAEDTGPLDERCPCPTCTKYSRAYLHHLHKSGEMLGAMLLTEHNLWFYQQLMAGMRAAIAEGRFAAFAADFRRDYFAR

SEQ ID NO: 58247 - protein, 378 aa, unidentified
  source 1..378: note = Novosphingobium barchaimii
  REGION 1..378: note = tr|A0A561H7H7|A0A561H7H7_9SPHN Queuine tRNA-ribosyltransferase OS=Novosphingobium barchaimii; OX = 1420591 GN=tgt PE=3 SV=1
MNPRFEFSIHATDGKARTGTIKMRRGEIRTPAFMPVGTAATVKAMKPQDVRATGADILLGNTYHLMLRPGAERVARLGGLHKFMNWDRPILTDSGGYQVMSLSDLRKITENGVTFASHLDGSRHLLTPERSMEIQRLLGSDIVMCFDECPKIDQPRDVIARSMEMSMRWARRSRDAFDAGGEHAANSALFGIQQGALDESLRKASADALIDIGFDGYAIGGLAVGEGQEAMFSTLEFAPGQLPADRPRYLMGVGKPDDLVGAVERGVDMFDCVLPSRSGRNGQAFTWNGPLNLRNARHAEDNNPLDERCKCPTCGTYSRAYLHHLVRSGEILGAMLMTEHNISFYQQLMQGMRDAIAAGTFVQFAADFRRDYFGGRDG

SEQ ID NO: 58248 - protein, 376 aa, unidentified
  source 1..376: note = Novosphingobium barchaimii
  REGION 1..376: note = tr|A0A0J8AZE3|A0A0J8AZE3_9SPHN Queuine tRNA-ribosyltransferase OS=Novosphingobium barchaimii LL02; OX = 1114963 GN=tgt PE=3 SV=1
MKPRFQFTIHATEGKARTGVIQMRRGEIRTPAFMPVGTAATVKAMKPQDVRATGADIILGNTYHLMLRPGAERMARLGGLHKFMNWDRPILTDSGGYQVMSLSELRKITEEGVTFASHIDGSRHMLSPERSMEIQRLLGSDIVMCFDECPKIDQPRDVIARSMEMSMRWAKRSREAFDAGGDHAECSALFGIQQGALDESLRKTSADALAEIGFDGYAIGGLAVGEGQEAMFSTLDFAPGQLPADRPRYLMGVGKPDDLVGAVERGVDMFDCVLPTRSGRNGQAFTWSGPLNMRNARHAEDTGPVDPRCSCPTCATYTRAYLHHLIKAGEMLGAMLLTEHNISFYQQLMQGMRDAIAEQRFTAFAADFRRDYFRKE

SEQ ID NO: 58249 - protein, 375 aa, unidentified
  source 1..375: note = Novosphingobium fuchskuhlense
  REGION 1..375: note = tr|A0A117UVZ6|A0A117UVZ6_9SPHN Queuine tRNA-ribosyltransferase OS=Novosphingobium fuchskuhlense; OX = 1117702 GN=tgt PE=3 SV=1
MTRFSFTVNATDGRARTGAITMQRGTIRTPAFMPVGTAGTVKAMKVEDVAATGADIILGNTYHLMLRPGAERMARLGGLHTFMRWDKPILTDSGGYQVMSLSDLRKITEDGVTFASHIDGSRHNLTPERSMEIQRLLGSDIVMAFDECPKIDQPREVIARSMQMSMRWARRSRDGFDAGGEHAERAALFGIQQGGLDEALRGESAGLLQDIGFDGYAIGGLAVGEGQEAMFATLDFAPGQLPADRPRYLMGVGKPDDLVGAVERGVDMFDCVLPTRSGRNGQGFTWDGPINMRNARHAEDMGPLDADCTCSVCAKYSRAYLHHLHKAGEMLGAMLLTEHNLAFYQQLMAAMRAAIAEGRFARFAAGFRARYLARR

SEQ ID NO: 58250 - protein, 376 aa, unidentified
  source 1..376: note = Novosphingobium ginsenosidimutans
  REGION 1..376: note = tr|A0A5B8S6K5|A0A5B8S6K5_9SPHN Queuine tRNA-ribosyltransferase OS=Novosphingobium ginsenosidimutans OX=1176536 GN=tgt PE=3 SV=1
MTAPRFQFEIHATDGKARTGTIRMRRGEIRTPAFMPVGTAATVKAMKPESVRATGADILLGNTYHLMLRPGAERVARLGGLHKFMNWDRPILTDSGGYQVMSLSDLRKITEEGVTFKSHLDGSRHLLTPERSMEIQRLLGSDIVMAFDECPRADAPYDTIAQSMRMSMRWAARSRAGFDSGAEHAERSALFGIQQGALNEDLRRESAQALQEIGFDGYAIGGLAVGEGQEAMFATLDFAPGMLPADRPRYLMGVGKPDDLVGAVERGVDMFDCVLPSRSGRNGQGFTWNGPVNLRNAKHAEDPAPLDERCPGDCCTRYSRAYLHHLHKSGEILGAMLLTEHNLTFYQQLMQAMRGAIAAGTFAAFAADFRRSYLGT

SEQ ID NO: 58251 - protein, 376 aa, unidentified
  source 1..376: note = Novosphingobium guangzhouense
  REGION 1..376: note = tr|A0A2K2G586|A0A2K2G586_9SPHN Queuine tRNA-ribosyltransferase OS=Novosphingobium guangzhouense; OX = 1850347 GN=tgt PE=3 SV=1
MNPRFQFSIHATDGKARTGTIQMRRGEIRTPAFMPVGTAATVKAMKPQDVRATGADILLGNTYHLMLRPGAERVARLGGLHKFMNWDRPILTDSGGYQVMSLSELRKITEEGVTFASHIDGSRHMLSPERSMEIQRLLGSDIVMCFDECPKIDQPRDVIARSMEMSMRWAKRSRAAFDAGGEHAANSALFGIQQGALDESLRKTSADALTEIGFDGYAIGGLAVGEGQEAMFATLEFAPGQLPADRPRYLMGVGKPDDLVGAVERGVDMFDCVLPTRSGRNGQAFTWNGPLNMRNARHAEDTGPIDERCKCPTCGTYTRAYLHHLIKAGEMLGAMLLTEHNLSFYQQLMQGMRDAIAEQRFSTFAADFRRDYFRKE

SEQ ID NO: 58252 - protein, 376 aa, unidentified
  source 1..376: note = Novosphingobium kunmingense
  REGION 1..376: note = tr|A0A2N0I222|A0A2N0I222_9SPHN Queuine tRNA-ribosyltransferase OS=Novosphingobium kunmingense; OX = 1211806 GN=tgt PE=3 SV=1
MTAPRFAFDVHSTCGKARTGTIRMRRGNIRTPAFMPVGTAATVKAMKPETVRATGADILLGNTYHLMLRPGAERVARLGGLHRFMNWDRPILTDSGGYQVMSLSDLRKITEEGVTFKSHLDGSKHLLTPERSMEIQRLLGSDIVMAFDECPRADAPRDVIEKSMQMSMRWAARSRAGFNSGDEHAGRSALFGIQQGALDEGLRRESAEALQAIGFDGYAIGGLAVGEGQEAMFATLDFAPDMLPADRPRYLMGVGKPDDLVGAVERGVDMFDCVLPSRSGRNGQGFTWNGPVNLRNARHAEDAAPLDETCPGDCCTKYSRAYLHHLHKSGEILGAMLLTEHNLTFYQQLMGAMRTAIAAGTFADFATAFRRDYVRN

SEQ ID NO: 58253 - protein, 378 aa, unidentified
  source 1..378: note = Novosphingobium lindaniclasticum
  REGION 1..378: note = tr|T0IBK0|T0IBK0_9SPHN Queuine tRNA-ribosyltransferase OS=Novosphingobium lindaniclasticum LE124 OX=1096930 GN=tgt PE=3 SV=1
MNPRFEFSIHATDGKARTGVIKMRRGEIRTPAFMPVGTAATVKAMKPQDVRATGADIILGNTYHLMLRPGAERVARLGGLHKFMNWDRPILTDSGGYQVMSLSDLRKITENGVTFASHLDGSRHLLTPERSMEIQRLLGSDIVMCFDECPKIDQPRDVIARSMEMSMRWAKRSRDGFDAGGEHAANSALFGIQQGALDEGLRKASADALIDIGFDGYAIGGLAVGEGQEAMFSTLEFAPGQLPADRPRYLMGVGKPDDLVGAVERGVDMFDCVLPSRSGRNGQAFTWNGPLNLRNARHAEDQNPLDERCKCPTCGTYSRAYLHHLVRSGEILGSMLMTEHNISFYQQLMQAMRDAIAAGTFAQFAADFRRDYFQGRSG

SEQ ID NO: 58254 - protein, 374 aa, unidentified
  source 1..374: note = Novosphingobium malaysiense
  REGION 1..374: note = tr|A0A0B1ZPW6|A0A0B1ZPW6_9SPHN Queuine tRNA-ribosyltransferase OS=Novosphingobium malaysiense; OX = 1348853 GN=tgt PE=3 SV=1
MNPRFDFQIHATDGKARTGTIGMRRGEIRTPAFMPVGTAGTVKAMKPQDVRATGADIILGNTYHLMLRPGAERVARLGGLHKFMNWSRPILTDSGGYQVMSLSDLRKISEEGVTFASHIDGSRHHLTPERSMEIQRLLGSDIVMCFDECPKIDQPREVIARSMEMSMRWAKRSRDGFDSGGKHAENSALFGIQQGALDEGLRKHSADALVDIGFDGYAIGGLAVGEGQEAMFATLDFAPSQLPADHPRYLMGVGKPDDLVGAVERGVDMFDCVLPTRSGRNGQAFTWNGPLNMRNARHAEDTGPIDERCSCTTCGTYSRAYIHHLIRSGEILGAMLLTEHNISFYQQLMQGMRDAIAEGRFATFAADFRRDYLR

SEQ ID NO: 58255 - protein, 375 aa, Novosphingobium mathurense
  REGION 1..375: note = tr|A0A1U6GWC7|A0A1U6GWC7_9SPHN Queuine tRNA-ribosyltransferase OS=Novosphingobium mathurense; OX = 428990 GN=tgt PE=3 SV=1
MNPRFEFSIHATDGKARTGVIKMRRGEIRTPAFMPVGTAATVKAMKPESVRATGADIILGNTYHLMLRPGAERVARLGGLHKFMNWDRPILTDSGGYQVMSLSDLRKITEEGVTFASHLDGSRHMLSPERSMEIQRLLGSDIVMCFDECPKIDQPRDVIARSMEMSMRWAKRSRDGFDSGGEHAANSALFGIQQGALDEGLRKASADALVDIGFDGYAIGGLAVGEGQEAMFATLEFAPGQLPVDRPRYLMGVGKPDDLVGAVERGVDMFDCVLPTRSGRNGQAFTWNGPLNMRNARHAEDNGPIDERCKCPTCGTYSRAYLHHLIRSGEILGAMLLTEHNVSFYQQLMQAMRDAIAESRFAAFAADFRRDYLKK

SEQ ID NO: 58256 - protein, 374 aa, Novosphingobium nitrogenifigens
  REGION 1..374: note = tr|F1Z8X5|F1Z8X5_9SPHN Queuine tRNA-ribosyltransferase OS=Novosphingobium nitrogenifigens DSM 19370 OX=983920 GN=tgt PE=3 SV=1
MTRFSFSIHATEGKARTGVIRMKRGEIRTPAFMPVGTAATVKAMKVEDVRAAGADIILGNTYHLMLRPGAERMARLGGLHKFMGWDRPILTDSGGYQVMSLASLRKITEEGVTFASHLDGSRHMLSPERSMEIQRLLGSSIVMAFDECPRIDQPRDVIARSMEMSMRWARRSRAGFDAGGEHAVNSALFGIQQGGLDEQLRGHSADALRDIGFDGYAIGGLAVGEGQEAMFATLDFAPSQLPADRPRYLMGVGKPDDLVGAVERGVDMFDCVLPTRSGRNGQGFTWNGPVNLRNARHAEDTEPLDPRCGCPVCAKYSRAYLHHLHRSGEILGAMLLTEHNIWFYQQLMAGMRAAIAEGRFAAFVADFRRDYLQR

SEQ ID NO: 58257 - protein, 378 aa, Novosphingobium pentaromativorans
  REGION 1..378: note = tr|A0A2W5QBZ1|A0A2W5QBZ1_9SPHN Queuine tRNA-ribosyltransferase OS=Novosphingobium pentaromativorans OX=205844 GN=tgt PE=3 SV=1
MNPRFEFSIHATDGKARTGVIRMRRGEIRTPAFMPVGTAATVKAMKPQDVRATGADIILGNTYHLMLRPGAERVARLGGLHKFMNWDRPILTDSGGYQVMSLSDLRKITENGVTFASHLDGSRHLLTPERSMEIQRLLGSDIVMCFDECPKIDQPRDVIARSMEMSMRWAKRSRNGFDSGGEHAESSALFGIQQGALDEGLRKASADALTDIGFDGYAIGGLAVGEGQEAMFSTLEFAPGQLPADRPRYLMGVGKPDDLVGAVERGVDMFDCVLPSRSGRNGQAFTWNGPLNLRNARHAEDNDPLDERCKCPTCATYSRAYLHHLVRSGEILGSMLMTEHNISFYQQLMQGMRDAISAGTFAQFAADFRRSYFGGRDG

SEQ ID NO: 58258 - protein, 375 aa, Novosphingobium pentaromativorans
  REGION 1..375: note = tr|G6E6S7|G6E6S7_9SPHN Queuine tRNA-ribosyltransferase OS=Novosphingobium pentaromativorans US6-1 OX=1088721 GN=tgt PE=3 SV=1
MNPRFEFSIHATDGKARTGVIKMRRGEIRTPAFMPVGTAATVKAMKPESVRATGADIILGNTYHLMLRPGAERVARLGGLHKFMNWDRPILTDSGGYQVMSLSDLRKITEEGVTFASHLDGSRHMLSPERSMEIQRLLGSDIVMCFDECPKIDQPRDVIARSMEMSMRWARRSRDGFDSGGEHAANSALFGIQQGALDEGLRKASADALVDIGFDGYAIGGLAVGEGQEAMFATLEFAPGQLPVDRPRYLMGVGKPDDLVGAVERGVDMFDCVLPTRSGRNGQAFTWNGPLNMRNARHAEDNGPIDERCKCPTCGTYSRAYLHHLIRSGEILGAMLLTEHNVSFYQQLMQAMRDAIAASRFAAFAADFRRDYLRK

SEQ ID NO: 58259 - protein, 376 aa, Novosphingobium resinovorum
  REGION 1..376: note = tr|A0A031K7E7|A0A031K7E7_9SPHN Queuine tRNA-ribosyltransferase OS=Novosphingobium resinovorum; OX = 158500 GN=tgt PE=3 SV=1
MKPRFQFSIHATDGKARTGTIQMRRGEIRTPAFMPVGTAATVKAMKPQDVRATGADILLGNTYHLMLRPGAERVARLGGLHKFMNWDRPILTDSGGYQVMSLSDLRKITEEGVTFASHIDGSRHMLSPERSMEIQRLLGSDIVMCFDECPKIDQPRDVIARSMEMSMRWAKRSRDAFDTGGAHAESSALFGIQQGALDEGLRKTSADALTEIGFDGYAIGGLAVGEGQEAMFATLEFAPGQLPADRPRYLMGVGKPDDLVGAVERGVDMFDCVLPTRSGRNGQAFTWNGPLNMRNARHAEDTGPIDERCKCPTCGTYTRAYIHHLIKSGEMLGAMLLTEHNLSFYQQLMQGMRDAIAEQRFAAFAADFRRDYFRKE

SEQ ID NO: 58260 - protein, 383 aa, unidentified
  source 1..383: note = Novosphingobium sediminis
  REGION 1..383: note = tr|A0A512AGH7|A0A512AGH7_9SPHN Queuine tRNA-ribosyltransferase OS=Novosphingobium sediminis; OX = 707214 GN=tgt PE=3 SV=1
MLSPENLPMTRFSFKVHATDGRARTGAITMKRGTIRTPAFMPVGTAGTVKAIKVEDVAATGADIILGNTYHLMLRPGAERMARLGGLHNFMRWDKPILTDSGGYQVMSLSDLRKITEEGVTFASHIDGSRHNLTPERSMEIQRLLGSDIVMAFDECPKIDQPRDVIARSMEMSMRWAKRSRDGFDAGGQHAEDAALFGIQQGGLDEALRGESAGKLRDIGFDGYAIGGLAVGEGQEAMFATLDFAPGQLPENAPRYLMGVGKPDDLVGAVERGVDMFDCVLPTRSGRNGQGFTWDGPVNLRNARHAEDMGPLDAECTCPTCAKYSRAYLHHLHKAGEMLGAMLLTEHNLAFYQQLMAAMRAAIAEGRFAAFAAGFRARYLAKR

SEQ ID NO: 58261 - protein, 374 aa, Novosphingobium sp.
  REGION 1..374: note = tr|A0A1W2D279|A0A1W2D279_9SPHN Queuine tRNA-ribosyltransferase OS=Novosphingobium sp. B1; OX = 1938756 GN=tgt PE=3 SV=1
MTRFAFDIHATDGKARTGTIRMMHGDIRTPAFMPVGTAATVKAMKMEDVRASGADIILGNTYHLMLRPGAERVARLGGLHKFGGWDRPILTDSGGYQVMSLSDLRKITEEGVTFASHLDGSRHLLSPERSMEIQRLLGSDIVMCFDECPRADQARDVIAKSMEMSMRWARRSRDAFDAGGEHAERSALFGIQQGALDEALRKASADALTDIGFDGYAIGGLAVGEGQEAMFATLDFAPQQLPAERPRYLMGVGKPDDLVGAVERGVDMFDCVLPTRSGRNGQAFTWNGPVNMRNARHAEDTGPLDERCPCPTCVKYSRAYLHHLHKSGEMLGAMLLTEHNLWFYQQLMAGMRAAISEGRFTRFAADFRRDYFAR

SEQ ID NO: 58262 - protein, 374 aa, Novosphingobium sp.
  REGION 1..374: note = tr|A0A3B7DYR6|A0A3B7DYR6_9SPHN Queuine tRNA-ribosyltransferase OS=Novosphingobium sp. THN1; OX = 1016987 GN=tgt PE=3 SV=1
MTRFAFDIHATDGKARTGTIRMMRGDIRTPAFMPVGTAATVKAMKMEDVRASGADIILGNTYHLMLRPGAERVARLGGLHKFGGWDRPILTDSGGYQVMSLSDLRKITEEGVTFASHLDGSRHLLSPERSMEIQRLLGSDIVMCFDECPRADQPRDVIAKSMEMSMRWARRSRDAFNAGGEHAERSALFGIQQGALDERLRKDSADALTDIGFDGYAIGGLAVGEGQEAMFATLEFAPQQLPADRPRYLMGVGKPDDLVGAVERGVDMFDCVLPTRSGRNGQGFTWNGPVNMRNARHAEDTGPLDERCPCPTCTKYSRAYLHHLHKSGEMLGAILLTEHNLWFYQQLMAGMRAAIAEGRFTAFAADFRRDYLAR

SEQ ID NO: 58263 - protein, 374 aa, Novosphingobium subterraneum
  REGION 1..374: note = tr|A0A0B9AIL5|A0A0B9AIL5_9SPHN Queuine tRNA-ribosyltransferase OS=Novosphingobium subterraneum; OX = 48936 GN=tgt PE=3 SV=1
MTRFAFDIHATDGKARTGTIRMMRGDIRTPAFMPVGTAATVKAMKMEDVRASGADIILGNTYHLMLRPGAERVARLGGLHKFGGWDRPILTDSGGYQVMSLSDLRKITEEGVTFASHLDGSRHLLSPERSMEIQRLLGSDIVMCFDECPRADQPRDVIAKSMEMSMRWARRSRDAFNAGAEHAERAALFGIQQGALDEGLRKASADALTDIGFDGYAIGGLAVGEGQEAMFATLDFAPQQLPADRPRYLMGVGKPDDLVGAVERGVDMFDCVLPTRSGRNGQGFTWNGPVNMRNARHAEDTGPLDERCPCPTCTKYSRAYLHHLHKSGEMLGAMLLTEHNLWFYQQLMAGMRAAIAEGRFAAFAADFRRDYFAR

SEQ ID NO: 58264 - protein, 374 aa, Novosphingobium taihuense
  REGION 1..374: note = tr|A0A562JY21|A0A562JY21_9SPHN Queuine tRNA-ribosyltransferase OS=Novosphingobium taihuense; OX = 260085 GN=tgt PE=3 SV=1
MTRFAFDIHATDGKARTGTIRMMRGDIRTPAFMPVGTAATVKAMKMEDVRASGADIILGNTYHLMLRPGAERVARLGGLHKFGGWDRPILTDSGGYQVMSLSDLRKITEEGVTFASHLDGSRHLLSPERSMEIQRLLGSDIVMCFDECPRADQSRDVIAKSMEMSMRWAKRSRDAFDAGGEHAERSALFGIQQGALDEGLRKYSADALTEIGFDGYAIGGLAVGEGQEAMFATLDFAPQQLPADRPRYLMGVGKPDDLVGAVERGVDMFDCVLPTRSGRNGQAFTWNGPLNMRNARHAEDTGPLDERCPCPTCTKYSRAYLHHLHKAGEMLGAMLLTEHNLWFYQRLMAGMRAAISEGRFAAFAADFRRDYFAR

SEQ ID NO: 58265 - protein, 374 aa, Novosphingobium tardaugens
  REGION 1..374: note = tr|U2YMC0|U2YMC0_9SPHN Queuine tRNA-ribosyltransferase OS=Novosphingobium tardaugens NBRC 16725 OX=1219035 GN=tgt PE=3 SV=1
MTRFAFTINARDGKARTGRIAMQRGEIRTPAFMPVGTAATVKAMKPEDVRQTGADIILGNTYHLMLRPGAERVARLGGLHRFMNWDRPILTDSGGYQVMSLSDLRKITEEGVRFSSHLDGSKHLLTPERSMEIQRLLGSDIVMAFDECPRADEPRDVIARSMEMSMRWAKRSRDGFDSGGDHAARAALFGIQQGALDEELRGQSAQALREIGFDGYAIGGLAVGEGQEAMFATLDFAPGQLPDDRPRYLMGVGKPDDLVGAVERGVDMFDCVLPSRSGRNGQAFTWNGPLNIRNAKHAEDTGPLDERCTCPTCGKYSRAYLHHLVKSGEILGAMLMTEHNLSFYQQLMQAMRDAIVEGRFAAYARDFRRNYLKS

SEQ ID NO: 58266 - protein, 375 aa, Obesumbacterium proteus
  REGION 1..375: note = tr|A0A4Q9CYX9|A0A4Q9CYX9_9GAMM Queuine tRNA-ribosyltransferase OS=Obesumbacterium proteus; OX = 82983 GN=tgt PE=3 SV=1
MKYELDTTDGRARRGRLIFERGVVETPAFMPVGTYGTVKGMTPEEVKETGAQILLGNTFHLWLRPGQEIMKLHGDLHDFMQWKGPILTDSGGFQVFSLGKMRKIKEEGVHFRHPINGSPIFLSPEKSMEIQYDLGSDIVMIFDECTPYPADWDYAKSSMEMSLRWAKRSRQRFDELGNKNSLFGIIQGGVYEDLRDVSLKGLVDIGFDGYAVGGLAVGEPKEDMHRILEHVCPQIPEDKPRYLMGVGKPEDLVEGVRRGIDMFDCVMPTRNARNGHLFVTNGIVKIRNAQYKDDVTTLDAECDCYTCRNYSRAYLHHLDRCNEILGARLNTIHNLRYYQRLMAGLRQAIEDGKLDEFVADFYGRQGKPVPPVGAK

SEQ ID NO: 58267 - protein, 375 aa, Obesumbacterium proteus; identical to SEQ ID NO: 58266
  REGION 1..375: note = tr|A0A1B7KDS3|A0A1B7KDS3_9GAMM Queuine tRNA-ribosyltransferase OS=Obesumbacterium proteus ATCC 12841 OX=1354268 GN=tgt PE=3 SV=1

SEQ ID NO: 58268 - protein, 374 aa, unidentified
  source 1..374: note = Oblitimonas alkaliphila
  REGION 1..374: note = tr|A0A0K1XCD6|A0A0K1XCD6_9GAMM Queuine tRNA-ribosyltransferase OS=Oblitimonas alkaliphila; OX = 1697053 GN=tgt PE=3 SV=1
MSFMQFELLATEGKARRGRLTFPRGVVETPAFMPVGTYGTVKGMLPRDIEAIGAHMILGNTFHLWLRPGTEVIQQQGDLHNFMQWQGPILTDSGGFQVFSLGAMRKIKEEGVYFSSPVDGRKVFMGPEESMQVQRALGSDVVMIFDECTPYPAEHDVAKRSMELSLRWAKRSKIAHGDNPSALFGIVQGGMYQDLRMRSLEGLCEIGFDGLAIGGLSVGEPKEEMIKVLDYLPEQMPADKPRYLMGVGKPEDLVEGVRRGVDMFDCVMPTRNARNGHLFVETGVIKIRNAVHRHDESPLDPSCDCYTCQHFSRAYLHHLDRCKEMLGSMLNTIHNLRHYQRLMAGLREAIEQGTLSAFVDEFYARRGLPTPPLN

SEQ ID NO: 58269 - protein, 377 aa, unidentified
  source 1..377: note = Oceanibacterium hippocampi
  REGION 1..377: note = tr|A0A1Y5T7T4|A0A1Y5T7T4_9PROT Queuine tRNA-ribosyltransferase OS=Oceanibacterium hippocampi; OX = 745714 GN=tgt PE=3 SV=1
MTEKSFSFAISGRDGRARTGLIRTAHGEIRTPAFMPVGTAATVKAMTPEMVRATGADILLGNTYHLMLRPGAERVAGQGGLHRFMNWERPILTDSGGFQVMSLNELRKITEDGVTFKSHLDGSRHELTPERSVEIQDLLDSTITMVLDECTPFPATEEVARLSMERSMRWAARCRAAFRERPGYGLFGIVQGGIYPELRERSAAALAEIGFEGYAVGGLAVGEGQELMFRMLDVTVPALPDAAPHYLMGVGKPDDIVGAVERGIDMFDCVLPTRSGRTGQAFTRRGPVNLRNARHADDPRPLDEASDCPASRDYSRAYLHHLVRSNEILGAILITWHNLHYYQSLMAGLRQAIADGRLGDFAAAFREEQAQGDIDPL

SEQ ID NO: 58270 - protein, 382 aa, Oceanibaculum indicum
  REGION 1..382: note = tr|K2JLW4|K2JLW4_9PROT Queuine tRNA-ribosyltransferase OS=Oceanibaculum indicum P24; OX = 1207063 GN=tgt PE=3 SV=1
MSAASQPVEFGFQLLGTDGAARRGRVTTAHGTIETPAFMPVGTAATVKAMRPESVAETGAEILLGNTYHLMLRPGAERVAALGGLHKFMNWPKPILTDSGGFQVMSLAGLRKIEEKGVTFRSHIDGSVHFLSPERSVEIQHLLDSNITMVLDECTPHPATHEQALSSMELSMRWAQRSKDGFKKRPGYGLFGIVQGSVYPDLRKRSAEALASIGFDGYAVGGLAVGEGQEIMFRVLEETVPHLPADRPHYLMGVGKPADIVGAVQRGIDMFDCVLPTRSGRTAQAFTARGTVNLRNARHQDDPRPLEEGCPCPACTSCSRAYLHHLVRSEEILGLMLLTWHNLAYYQRLMAGLRAAIEAGSLEDFVAGFHETQAGGDIPALG

SEQ ID NO: 58271 - protein, 382 aa, Oceanibaculum indicum
  REGION 1..382: note = tr|A0A420WQL0|A0A420WQL0_9PROT Queuine tRNA-ribosyltransferase OS=Oceanibaculum indicum OX=526216; GN = tgt PE=3 SV=1
MSAASQPVEFGFQLLGTDGAARRGRVTTAHGTIETPAFMPVGTAATVKAMRPESVAETGAEILLGNTYHLMLRPGAERIAALGGLHKFMNWPKPILTDSGGFQVMSLAGLRKIEEKGVTFRSHIDGSAHFLSPERSVEIQHLLDSNITMVLDECTPHPATHEQALSSMELSMRWAQRSKDGFKKRPGYGLFGIVQGSVYPDLRQRSAEALASIGFDGYAVGGLAVGEGQEIMFRVLEETVPHLPADRPHYLMGVGKPADIVGAVQRGIDMFDCVLPTRSGRTAQAFTARGTVNLRNARHQDDPRPLEEGCPCPACTSYSRAYLHHLVRSEEILGLMLLTWHNLAYYQRLMAGLRAAIEAGSLDDFAADFHERQAGGDIPALG

SEQ ID NO: 58272 - protein, 376 aa, Oceanicaulis sp.
  REGION 1..376: note = tr|A0A0P7VLR8|A0A0P7VLR8_9RHOB Queuine tRNA-ribosyltransferase OS=Oceanicaulis sp. HLUCCA04; OX = 1666904 GN=tgt PE=3 SV=1
MASFPFEIAAVDGQARTGTLKTARGDIRTPAFMPVGTAATVKALYPDQVRQAGADILLGNTYHLMLRPGAERVKRLGGLHHFMRWDGPILTDSGGFQVWSLSGLRKMSEEGVAFKSHIDGSKHMLTPERSIEIQADLLGADISMQLDECTPFPCERDAAAKSMELSIRWGKRSKEAFGERETQNLFGIVQGSVYPDLRRQSAEGLIETGFDGYAVGGLAVGEGFETMCAVLEATTPHLPHERPRYLMGVGRPVDLVEAVARGVDMFDCVMPTRSGRHGQAWSDYGPYNLKNAQYAEDESPLDEAVNCPASRDYSKAYIHHLVRAGEYLGSMLLSWHNVAYYEDLMARMRAAIAEGRFEVFRAEFLARWEQGTGKPV

SEQ ID NO: 58273 - protein, 375 aa, Oceanicaulis sp.
  REGION 1..375: note = tr|A0A2D9MMS6|A0A2D9MMS6_9RHOB Queuine tRNA-ribosyltransferase OS=Oceanicaulis sp. OX=1924941; GN = tgt PE=3 SV=1
MPSFDFDLHATDGAARTGVLKTPRGDIRTPAFMPVGTAATVKALYPEQVKAAGADIILGNTYHLMLRPGAERVKRLGGLHHFMRWDGPILTDSGGFQVWSLSDLRDMTEEGVAFKSHLDGSKHMLTPERSIEIQADLLGADISMQLDECTPYPCERDAAASSMQLSRRWGKRSKEAFGERSGQALFGIVQGSTYEDLRRESAEGLIEIGFDGYAIGGLAVGEGFEMMCQVLDVTTPHLPHERPRYLMGVGKPIDLVEAVARGVDMFDCVLPTRSGRHGQAWTDWGPVNVKNARFAEDTRPMDETLDCPASRDYSRAYLHHLIRAGEYLGSMLLSWHNIAYFETLTARMRAAIAAGEFEAFRAQFHARMDEGPDAI

SEQ ID NO: 58274 - protein, 375 aa, unidentified
  source 1..375: note = Oceanicella actignis
  REGION 1..375: note = tr|A0A1M7TGF1|A0A1M7TGF1_9RHOB Queuine tRNA-ribosyltransferase OS=Oceanicella actignis OX=1189325; GN = tgt PE=3 SV=1
MTRFSFTVHATDGAARTGVVSTPRGQIRTPAFMPVGTAATVKAMLPENVRATGADIILGNTYHLMLRPGAERIARLGGLHRFMNWERPILTDSGGFQVMSLAGLRKLDERGVTFKSHVDGSRHELTPERSMEIQRLLGSDIVMCFDECTPFPADEATAAESMRLSMRWAARSREAFGDRPGHALFGIQQGSVFRELREESSQALRAIGFDGYAIGGLAVGEGQEAMFAVLDYAPGLLPEDKPRYLMGVGKPDDIVGAVQRGVDMFDCVLPTRSGRTGQALTRRGAVNLRNARHQDDPRPLDPDCACPCCRNYSRAYLHHVHKAQEIIAAMLLTWHNLHYYQELMQGLRDAIAAGRLDAFVADFHARRAEGDLPPL

SEQ ID NO: 58275 - protein, 375 aa, unidentified
  source 1..375: note = Oceanicella actignis
  REGION 1..375: note = tr|A0A5D3WCG0|A0A5D3WCG0_9RHOB Queuine tRNA-ribosyltransferase OS=Oceanicella actignis OX=1189325; GN = tgt PE=3 SV=1
MTRFSFTVHATDGAARAGVVSTPRGQIRTPAFMPVGTAATVKAMLPENVRATGADIILGNTYHLMLRPGAERIARLGGLHRFMNWERPILTDSGGFQVMSLAGLRKLDERGVTFKSHVDGSRHELTPERSMEIQRLLGSDIVMCFDECTPFPADEATAAESMRLSMRWAARSREAFGDRPGHALFGIQQGSVFRELREESSQALRAIGFDGYAIGGLAVGEGQEAMFAVLDYAPGLLPEDKPRYLMGVGKPDDIVGAVQRGVDMFDCVLPTRSGRTGQALTRRGAVNLRNARHQDDPRPLDPDCACPCCRNYSRAYLHHVHKAQEIIAAMLLTWHNLHYYQELMQGLRDAIAAGRLDAFVADFHARRAEGDLPPL

SEQ ID NO: 58276 - protein, 385 aa, unidentified
  source 1..385: note = Oceanicoccus sagamiensis
  REGION 1..385: note = tr|A0A1X9NET6|A0A1X9NET6_9GAMM Queuine tRNA-ribosyltransferase OS=Oceanicoccus sagamiensis; OX = 716816 GN=tgt PE=3 SV=1
MTRECAMKFEREGNDGKARRGRITFPRGTIETPAFMPVGTYGTVKGMLPRDIEEIGAEIILGNTFHLWLRPGTDVVKQHGEDNNGTLHDFMHWDKPILTDSGGFQVFSLGALRKITEEGVSFKSPIDGSKVFLDPETSMQVQRELGSDIVMIFDECTPFPATHQEAKDSMELSLRWAQRSKDAHGDNPSALFGIVQGGMYEDLRKQSMAGLAAIDFDGFAIGGLSVGEPKDDMMNVLDIVAPEMPEDKPRYLMGVGTPQDLLEAVMRGVDMFDCVMPTRHARNAHLFTSQGVVKLRNAKHKKSNEPLDPNCDCYTCKNFSRSYLHHLDKCKEMLGGTLNTIHNLRYYQQHMQNIREAIEQNRLSDYAAEFYAAQGIAEEDQNPVA

SEQ ID NO: 58277 - protein, 311 aa, Oceanicola granulosus
  REGION 1..311: note = tr|Q2CG47|Q2CG47_OCEGH Queuine tRNA-ribosyltransferase OS=Oceanicola granulosus (strain ATCC BAA-861 / DSM 15982 / KCTC 12143 / HTCC2516); OX = 314256 GN=OG2516_03820 P E=3 SV=1
MLRPGAERIARLGGLHRFMNWDRPILTDSGGFQVMSLADLRKLTETGVTFRSHVDGSRHELTPERSMEIQRLLGSDIVMAFDECPALPADRARIEESMRLSMRWAERSRAAFGDRPGHALFGIQQGGLERDLRDESAAALTGIGFEGYAIGGLAVGEGQEAMFSVLDYAPGQLPADRPRYLMGVGKPDDIVGAVKRGVDMMDCVLPSRSGRTGQAWTRRGQVNLRNARHADDPRPLDEDCTCPACTGYSRAYLHHVVRAREMIAGMLLTWHNLHYYQALMGEMRAAIAAGRFAAWEQGFHAARDQGDVERL

SEQ ID NO: 58278 - protein, 376 aa, unidentified
  source 1..376: note = Oceanicola litoreus
  REGION 1..376: note = tr|A0A1N6ERZ6|A0A1N6ERZ6_9RHOB Queuine tRNA-ribosyltransferase OS=Oceanicola litoreus OX=1217970; GN = tgt PE=3 SV=1
MTTRVTYEVKARDGKARLGVLSTPRGEIRTPAFMPVGTAATVKAMLPESVAATGADILLGNTYHLMLRPGAERVARLGGLHGFMNWEKPILTDSGGFQVMSLADLRKLTEKGVTFRSHVDGSKHFLSPETSMEIQRLLGSDIVMCFDECPALPAEEAAVAESMRLSMRWAERSKAAFGDRPGHALFGIQQGGVTEALRGESAEALRAIGFDGYAIGGLAVGEGQEAMFGVLDYAPGMLPEDKPRYLMGVGKPDDIVGAVKRGVDMMDCVLPSRSGRTGQAWTRRGQVNLKNARHADDPRPLDEHCTCPACRGYSRAYLHHVFRAGEMISGMLLTWHNLHYYQELMAGMRAAIAEGRFAQFEAEFHAMRAEGDIPPL

SEQ ID NO: 58279 - protein, 376 aa, Oceanicola sp.
  REGION 1..376: note = tr|A0A5B8BRG9|A0A5B8BRG9_9RHOB Queuine tRNA-ribosyltransferase OS=Oceanicola sp. D3 OX=2587163; GN = tgt PE=3 SV=1
MTTRVTYEVKATDGKARLGVLTTPRGEIRTPAFMPVGTAATVKAMLPESVAATGADILLGNTYHLMLRPGAERVARLGGLHGFMNWDKPILTDSGGFQVMSLAELRKLTEDGVTFRSHVDGSKHFLSPETSMEIQRLLGSDIVMCFDECPALPATEAAVAESMRLSMRWAERSKAAFGDRPGHALFGIQQGGVTEELRGESAEALRAIGFDGYAIGGLAVGEGQEAMFGVLDYAPGMLPEEKPRYLMGVGKPDDIVGAVKRGVDMMDCVLPSRSGRTGQAWTRRGQVNLKNARHADDPRPLDEACSCPACRGYSRAYLHHVYRAGEMIAGMLLTWHNLHYYQELMGEMREAIAEGRFAAFEAAFHALRAEGDIERL

SEQ ID NO: 58280 - protein, 376 aa, Oceanicola sp.
  REGION 1..376: note = tr|A0A254RBK5|A0A254RBK5_9RHOB Queuine tRNA-ribosyltransferase OS=Oceanicola sp. 22II-s10i; OX = 1317116 GN=tgt PE=3 SV=1
MTDRFSFTLGATDGAARTGVIHTRRGEIRTPAFMPVGTAGTVKAMMPESVAATGADILLGNTYHLMLRPGAERVERLGGLHGFMNWDKPILTDSGGFQVMSLAELRKLTEDGVTFRSHVDGSKHFLSPETSMEIQRQLGSDIVMCFDECPALPADEARVAESMRMSMRWAQRSRDAFGDRPGHALFGIQQGGVTEELRGESAEALKAIGFDGFAIGGLAVGEGQEAMFGVLDYAPAMLPEDRPRYLMGVGKPDDILGAVARGVDMMDCVLPSRSGRTGQVFTRRGVVNIKNARHRDDPRPLDAHCTCPACRNYSRAYLHHVFRAQEIISSMLMTWHNLHYYQELMAGMREAIAAGRFEAFQSATREGWAEGDIPPV

SEQ ID NO: 58281 - protein, 376 aa, unidentified
  source 1..376: note = Oceanihabitans sediminis
  REGION 1..376: note = tr|A0A368P612|A0A368P612_9FLAO Queuine tRNA-ribosyltransferase OS=Oceanihabitans sediminis; OX = 1812012 GN=tgt PE=3 SV=1
MKFELKGKDPQSSARAGVMTTDHGVIETPIFMPVGTVASVKGVHQRELKNDINPDIILGNTYHLFLRPKTSILEKAGGLHKFMNWDRNILTDSGGYQVYSLSANRKIKEEGVKFKSHIDGSMHMFTPENVMEIQRSIGADIIMAFDECTPYPCDYNYAKRSMHMTHRWLDRCIKHLEKTPFKYDYSQTFFPIVQGSTYKDLRRQSAEYIANAGAEGNAIGGLSVGEPAEEMYAMTEVVTAILPEDKPRYLMGVGTPINILENIALGIDMFDCVMPTRNARNGMLFTAHGTINIKNKKWEDDFSPIDEMAITFVDTEYSKAYLRHLFTVNELLGKQIATIHNLGFYMWLVREARKHILAGDFREWKNKMVKQMDKRL

SEQ ID NO: 58282 - protein, 383 aa, Oceanimonas baumannii
  REGION 1..383: note = tr|A0A235CQV8|A0A235CQV8_9GAMM Queuine tRNA-ribosyltransferase OS=Oceanimonas baumannii OX=129578; GN = tgt PE=3 SV=1
MKFELDTTDGRARRGRLIFDRGVVETPAFMPVGTYGTVKGMTPEEVAATGAHILLGNTFHLWIRPGQEVMKMHGDLHDFMNWQGPILTDSGGFQVFSLGDIRKITEEGVHFRNPVNGDKIFLSPEVSMEIQYDLGSDIVMIMDECTPYPATWEEAKKSMEMSLRWAKRSRDHFDKQGNKNALFGIIQGSVYEDLRDQSLEGLLDIGFDGYAVGGLAVGEPKHEMHKVLEHTCPKIPADKPRYLMGVGKPEDLVEGVRRGVDMFDCVMPTRNARNGHLFTTDGVVKIRNAKHKTDTGPLDADCDCYTCKNYSRAYLYHLDKCNEILGARLNTIHNLRFYQRVMEGLRGAIEQGKLDDFVAEFYRRQGKPVPSLDNSDTEHGEEQ

SEQ ID NO: 58283 - protein, 380 aa, Oceanimonas doudoroffii
  REGION 1..380: note = tr|A0A233REF3|A0A233REF3_9GAMM Queuine tRNA-ribosyltransferase OS=Oceanimonas doudoroffii; OX = 84158 GN=tgt PE=3 SV=1
MKFELDTTDGRARRGRLIFDRGVVETPAFMPVGTYGTVKGMTPEEVAATGAHILLGNTFHLWIRPGQEVMKMHGDLHDFMNWQGPILTDSGGFQVFSLGDIRKITEEGVHFRNPVNGDKIFLSPEVSMEIQYDLGSDIVMIMDECTPYPATWEEAKKSMEMSLRWAKRSRDHFDKQGNKNALFGIIQGSVYEDLRDQSLEGLLDIGFDGYAVGGLAVGEPKHEMHKVLEHTCPKIPEDKPRYLMGVGKPEDLVEGVRRGIDMFDCVMPTRNARNGHLFTTDGVVKIRNAKHKTDTGPLDADCDCYTCKNYSRAYLYHLDKCNEILGARLNTIHNLRYYQRVMEGLRGAIEQGKLDDFVAEFYRRQGKPVPPLGQPASTSE

SEQ ID NO: 58284 - protein, 380 aa, Oceanimonas sp.
  REGION 1..380: note = tr|H2FZA5|H2FZA5_OCESG Queuine tRNA-ribosyltransferase OS=Oceanimonas sp. (strain GK1); OX = 511062 GN=tgt PE=3 SV=1
MKFELDTTDGRARRGRLVFDRGVVETPAFMPVGTYGTVKGMTPEEVAATGAHILLGNTFHLWIRPGQEVMKLHGDLHDFMNWQGPILTDSGGFQVFSLGDIRKITEEGVHFRNPVNGDKIFLSPEVSMEIQYDLGSDIVMIMDECTPYPATWEEAKKSMEMSLRWAKRSRDHFDKQGNKNALFGIIQGSVYEDLRDQSLEGLLEIGFDGYAVGGLAVGEPKHEMHKVLEHTCPKIPEDKPRYLMGVGKPEDLVEGVRRGIDMFDCVMPTRNARNGHLFTTDGVVKIRNAKHKTDTGPLDADCDCYTCKNYSRAYLYHLDKCNEILGARLNTIHNLRYYQRVMEGLRSAIEQGKLDDFVAEFYRRQGKPVPPLGQPEPTSE

SEQ ID NO: 58285 - protein, 375 aa, unidentified
  source 1..375: note = Oceaniovalibus guishaninsula
  REGION 1..375: note = tr|K2GLC0|K2GLC0_9RHOB Queuine tRNA-ribosyltransferase OS=Oceaniovalibus guishaninsula JLT2003 OX=1231392 GN=tgt PE=3 SV=1
MAGFGFSIVATDVKARAGTIRTPRGEIRTPAFMPVGTAATVKAMLPESVRATGADILLGNTYHLMLRPGAERIDRLGGLHRFMNWDRPILTDSGGFQVMSLSGLRKLTERGVTFRSHIDGSRHELTPERSMEIQRLLGSDIAMCFDECPALPADRDRIAASMALSMRWAARSRDAFGDRPGHALFGIQQGGLDRDLRAQSAEALTAIGFDGYAVGGLAVGEGQQAMFDVLDFAPSMLPADRPRYLMGVGKPDDIVGAVARGIDMMDCVLPSRSGRTGQAFTPRGVVNIKNARHADDPRPLDETCDCPACQSYSRAYLHHVFRAQEMISGMLLTWHNLRYYQRLMEGMRTAIAAGTFAGWQDDFHATRALGDIEPL

SEQ ID NO: 58286 - protein, 376 aa, unidentified
  source 1..376: note = Oceaniovalibus sp.
  REGION 1..376: note = tr|A0A5D0S2M7|A0A5D0S2M7_9RHOB Queuine tRNA-ribosyltransferase OS=Oceaniovalibus sp. ACAM 378; OX = 2599923 GN=tgt PE=3 SV=1
MTQRIKFSLAATDGAARTGTISTPRGDIRTPAFMPVGTAATVKAMMPDSVRETGADILLGNTYHLMLRPTAERIARLGGLHRFMNWDRPILTDSGGFQVMSLSGLRKMSEKGVTFKSHIDGSKHELTPERSMEIQALLLSDIVMCFDECPALPADRARLAESMRMSMRWAQRSRDAFGDRPGHALFGIQQGGLERDLREESAKALAEIGFDGYAVGGLAVGEGQAAMFECLDYAPAQLPVDKPRYLMGVGKPDDIVGAVKRGIDMMDCVLPSRSGRTGQAFTRAGVVNIKNARHMDDPRPLDENCRCPACRNYSRAYLHHVFRAQEMISGMLLTWHNLTYFQDIMQGMRDAIAAGEFATWETAFHANRSAGDIEQL

SEQ ID NO: 58287 - protein, 381 aa, unidentified
  source 1..381: note = Oceanisphaera arctica
  REGION 1..381: note = tr|A0A2P5TQ26|A0A2P5TQ26_9GAMM Queuine tRNA-ribosyltransferase OS=Oceanisphaera arctica OX=641510; GN = tgt PE=3 SV=1
MKFELQTTDGRARRGRLIFDRGVVETPAFMPVGTYGTVKGMTPEEVADTGAQILLGNTFHLWVRPGQEVMKLHGDLHDFMNWQGPILTDSGGFQVFSLGDIRKITEEGVYFRNPVNGDKIFLSPEVSMEIQYDLGSDVVMIMDECTPYPATWIDAKKSMEMSLRWAKRSRDHFDKQGNKNALFGIIQGGVYEDLRDESLTGLLEIGFDGYAVGGLAVGEPKHEMHKVLEHTCPKIPADKPRYLMGVGKPEDLVEGVRRGIDMFDCVMPTRNARNGHLFTTEGVVKIRNAKHKIDTGPLDADCDCYTCKNYSRSYLHHLDKCNEILGARLNTIHNLRYYQRVMEGLRGAIEQGKLDDFVAEFYARQDKPVPPLGQTAGEDGE

SEQ ID NO: 58288 - protein, 379 aa, unidentified
  source 1..379: note = Oceanisphaera avium
  REGION 1..379: note = tr|A0A1Y0CTQ9|A0A1Y0CTQ9_9GAMM Queuine tRNA-ribosyltransferase OS=Oceanisphaera avium OX=1903694; GN = tgt PE=3 SV=1
MKFELHTTDGLARRGRLVFDRGVVDTPAFMPVGTYGTVKGMTPEEVDATGAQILLGNTFHLWVRPGQEVMKLHGDLHDFMNWQGPILTDSGGFQVFSLGDIRKITEEGVYFRNPVNGDRIFLSPEVSMEIQYDLGSDIVMIMDECTPYPATWEEAKKSMEMSLRWAKRSREHFDKQENPNALFGIIQGGVYEDLRDESLQGLLDIGFDGYAMGGLAVGEPKAEMHKVLEHTCPKIPADKPRYLMGVGKPEDLVEGVRRGIDMFDCVMPTRNARNGHLFTTEGIVKIRNAKHKVDTGPLDAECDCYTCKNYSRSYLHHLDKCNEILGSRLNTIHNLRYYQRVMEGLRHAIEQGKLDDFVADFYARRGQEVPPLGQSQAAQ

SEQ ID NO: 58289 - protein, 381 aa, unidentified
  source 1..381: note = Oceanisphaera profunda
  REGION 1..381: note = tr|A0A1Y0D2W2|A0A1Y0D2W2_9GAMM Queuine tRNA-ribosyltransferase OS=Oceanisphaera profunda; OX = 1416627 GN=tgt PE=3 SV=1
MKFELHTTDGLARRGRLTFDRGVVDTPAFMPVGTYGTVKGMTPEEVHATGAQILLGNTFHLWVRPGQEVMKLHGDLHDFMNWQGPILTDSGGFQVFSLGDIRTITEEGVFFRNPVNGDKIFLSPEVSMEIQYDLGSDVVMIMDECTPFPATWEEAKKSMEMSLRWAKRSRDHFDKQGNKNALFGIVQGGMYEDLRDESLTGLLDIGFDGYAIGGLAVGEPKAEMHKILEHTCPLIPADKPRYLMGVGKPEDLVEGVRRGIDMFDCVMPTRNARNGHLFTTDGVVKIRNAKHKVDTGPLDAECDCYTCKNYSRSYLHHLDKCNEILGSRLNTIHNLRYYQRVMEGLRGAIEQGKLDDFVADFYARKGLAVPPLGQVATESDQ

SEQ ID NO: 58290 - protein, 379 aa, unidentified
  source 1..379: note = Oceanisphaera psychrotolerans
  REGION 1..379: note = tr|A0A1J4QJZ0|A0A1J4QJZ0_9GAMM Queuine tRNA-ribosyltransferase OS=Oceanisphaera psychrotolerans; OX = 1414654 GN=tgt PE=3 SV=1
MKFELQTTDGRARRGRLIFDRGVVETPAFMPVGTYGTVKGMTPEEVADTGAHILLGNTFHLWIRPGQEVMKMHGDLHDFMNWQGPILTDSGGFQVFSLGDIRKITEEGVHFRNPVNGDKIFLSPEVSMEIQYDLGSDVVMIMDECTPYPATWEEAKKSMEMSLRWAKRSRDHFDKQGNKNALFGIIQGSVYEDLRDQSLEGLLEIGFDGYAVGGLAVGEPKHEMHKVLEHTCPKIPADKPRYLMGVGKPEDLVEGVRRGVDMFDCVMPTRNARNGHLFTTEGVVKIRNAKHKTDTGPLDADCDCYTCKNYSRSYLHHLDKCNEILGARLNTIHNLRFYQRVMEGLRGAIEQGKLDDFVAEFYARQGKPVPPLGQTEQVE

SEQ ID NO: 58291 - protein, 371 aa, unidentified
  source 1..371: note = Oceanispirochaeta sp.
  REGION 1..371: note = tr|A0A370ASH5|A0A370ASH5_9SPIO Queuine tRNA-ribosyltransferase OS=Oceanispirochaeta sp. M1; OX = 2283433 GN=tgt PE=3 SV=1
MIDIQYRDPSCRGRGGILHLPHGDVEVPAFMPVGTNGTVKAIKHDSVEDMGYTLILGNTYHLYLRPGMEVIEAAGGLHNFSSWKHNILTDSGGFQVFSLAPFRKIREEGVRFRSHIDGAYHVFTPEKVVEIQETLGSDVQMALDVCTAPGISHKEAVESLEITTRWAARAKARWENCKDGYHGKLFGIIQGNFYEDLRKRSAEEILELDTPGIAIGGLSVGESPEMFRDYLHYTAQFLPEDKPRYVMGIGTPDYMLEAVEAGIDMFDCVYPTRIARNGTCFTLDGNLALKNEKCRLDQQPIEPTCTCPVCQQYSRSYLRHLFKAKEILGPMLVTEHNLHFLYTFMEEVRQSLREGRFLEYKKSFLDRFQKR

SEQ ID NO: 58292 - protein, 373 aa, unidentified
  source 1..373: note = Oceanispirochaeta sp.
  REGION 1..373: note = tr|A0A5C1QHN3|A0A5C1QHN3_9SPIO Queuine tRNA-ribosyltransferase OS=Oceanispirochaeta sp. K2; OX = 2518645 GN=tgt PE=3 SV=1
MIDIKYRDPSCRGRGGILHLPHGDVEIPAFMPVGTNGTVKAVKHDSVADMGYTLILGNTYHLYLRPGMEVIKAAGGLHEFSGWKHNILTDSGGFQVFSLAPFRKIREEGVRFRSHIDGAYHEFTPEKVVEIQETLGSDIQMALDICTEPGISHKDALKALEITTRWASRAKKRWENCRDDYEGKLFGIIQGNFYEDLRKRSAEEILELDTPGIAIGGLSVGESPQMFRDYLHYTSQFLPEDKPRYVMGIGTPDYMLEAVEAGIDMFDCVYPTRIARNGTCFTLDGNLALKNEQFRLDQQPIEPSCTCPVCQQYSRSYLRHLFKAKEILGPMLVTEHNLHFLYQFMAEVRLSLKEGRFLQYKKSFLDRFSKRTF

SEQ ID NO: 58293 - protein, 384 aa, Oceanithermus desulfurans
  REGION 1..384: note = tr|A0A511RMA2|A0A511RMA2_9DEIN Queuine tRNA-ribosyltransferase OS=Oceanithermus desulfurans NBRC 100063 OX=1227550 GN=tgt PE=3 SV=1
MAFEFRVLHQQGKARTGRLATPHGEVPTPLFMPVGTQATVKGLSNRELVEIGSRIVLANTYHLLLRPGPERVARLGGLHGFTGYDGPWLTDSGGFQVMSLGHRRVISEEGVAFSSHLNGDRILLTPERSIAVQEQLGADIVMAFDECPPFPSERAYLKRSLERTLRWLERSLAAKTRSDQALFGITQGGVEPDLRRTSTLETIRFDLPGYAIGGLAVGEPKEAMVPVVDLSTDLLPADRPRYLMGVGHPEDLVAGVALGVDLFDCVYPTRTGRFGYALVDEGRLNLGSARHKDDPAPIDAACDCYTCRNHSRAYLTHLVRTEELLGLRLLSLHNLRYLHRLMERARAAIEAGTYGDFARGFAERRWPEGAPGWFADALVRAGVW

SEQ ID NO: 58294 - protein, 384 aa, Oceanithermus profundus
  REGION 1..384: note = tr|E4U4K1|E4U4K1_OCEP5 Queuine tRNA-ribosyltransferase OS=Oceanithermus profundus (strain DSM 14977 / NBRC 100410 / VKM B-2274 / 506) OX=670487; GN = tgt PE=3 SV=1
MAFEFRVLHQQGKARTGRLTTPHGEVATPLFMPVGTQATVKGLSNRELVEIGSQIVLANTYHLLLRPGPERVARLGGLHGFTGYTGPWLTDSGGFQVMSLGHRRVISEEGVAFSSHLNGDRILLTPERSIAVQEQLGADIVMAFDECPPYPSEPDYLKRSLERTLRWLERSLAAKTRPDQALFGITQGGVEPDLRRTSTLETIRFDLPGYAIGGLAVGEPKEKMVPVVDLSTDLLPEDRPRYLMGVGHPEDLVAGVALGVDLFDCVYPTRTGRFGYALVDGGRLNLGSARHKDDPAPIDEACDCYACQNHSRAYLTHLVRTEELLGLRLLSLHNLRYLHRLMERARAAVEAGSYGAFARAFAERRWPEGAPGWFEDAMARAGVW

SEQ ID NO: 58295 - protein, 380 aa, unidentified
  source 1..380: note = Oceanobacillus arenosus
  REGION 1..380: note = tr|A0A3D8PWM2|A0A3D8PWM2_9BACI Queuine tRNA-ribosyltransferase OS=Oceanobacillus arenosus; OX = 1229153 GN=tgt PE=3 SV=1
MTIPITYELIKTDKQTGARLGRVHTPHGSFDTPTFMPVGTLATVKTMSPEDLHSMDARIILSNTYHLWLRPGEDIIREAGGLHKFMNWDGAILTDSGGFQVFSLSDMREITEEGVHFRNHLNGDKLFLSPEKAMQIQNALGSDIMMAFDECPPFPATHDYMKASVERTSRWAERCLAAHDRKDVQGLFGIVQGGEFEDLRTQSARDLVSLDFPGYAIGGLSVGEPKDIMNRMLEHTTPLLPTNKPRYLMGVGSPDSLIDGAIRGIDMFDCVLPTRIARNGTCMTSNGRLVVRNAKYARDFSPIDENCDCHVCKNYTRAYIRHLIRCNETFGFRLTTYHNLHFLVKLMEQVRAAIKEDRLGDFKEEFFEQYGLNKPDAKNF

SEQ ID NO: 58296 - protein, 379 aa, unidentified
  source 1..379: note = Oceanobacillus bengalensis
  REGION 1..379: note = tr|A0A494Z5U7|A0A494Z5U7_9BACI Queuine tRNA-ribosyltransferase OS=Oceanobacillus bengalensis; OX = 1435466 GN=tgt PE=3 SV=1
MTAITYELIKTDKQTGARLGRVHTPHGSFDTPTFMPVGTLATVKTMSPEELENMGAKIILSNTYHLWLRPGEEIIREAGGLHKFMNWDGAILTDSGGFQVFSLSDMREIKEEGVHFRNHLNGDKLFLSPEKAMQIQNALGSDIMMAFDECPPYPATHEYMKNSVERTSRWAERCLTAHERKNDQGLFGIVQGGEFEDLRKQSARDLVSLDFPGYAVGGLSVGEPKDVMNRVLDFTTPWLPANKPRYLMGVGSPDSLIDGAIRGIDMFDCVLPTRIARNGTCMTSNGRLVVRNAKYARDFSPIDENCDCHVCRNYTRAYIRHLIKCNETFGFRLTTYHNLHFLLKLMEQVRTAISEDRLGDFREEFFEQYGLNKPNAKNF

SEQ ID NO: 58297 - protein, 381 aa, Oceanobacillus caeni
  REGION 1..381: note = tr|A0A0N0M8Y6|A0A0N0M8Y6_9BACI Queuine tRNA-ribosyltransferase OS=Oceanobacillus caeni OX=405946; GN = tgt PE=3 SV=1
MKLTPITYELIKIDKQTGARLGRVHTPHGSFDTPTFMPVGTLATVKTMSPEELESMNANIILSNTYHLWLRPGEDIIREAGGLHKFMNWDGAILTDSGGFQVFSLSDMREIKEEGVHFRNHLNGEKLFLSPEKAMEIQNALGSDIMMAFDECPPYPATHEYMKSSVERTSRWAERCLEAHERKDVQGLFGIVQGGEFEDLRKQSANDLISLDFPGYAIGGLSVGEPKDVMNRVLEFTTPLLPANKPRYLMGVGSPDSLIDGAIRGVDMFDCVLPTRIARNGTCMTSTGRLVVRNAKYARDFRPIDENCDCHVCKNYSRAYIRHLVKCNETFGFRLTTYHNLYFLLKLMEQVRFAISEDRLGDFREEFFEQYGFNKPDAKNF

SEQ ID NO: 58298 - protein, 380 aa, unidentified
  source 1..380: note = Oceanobacillus chungangensis
  REGION 1..380: note = tr|A0A3D8Q0C8|A0A3D8Q0C8_9BACI Queuine tRNA-ribosyltransferase OS=Oceanobacillus chungangensis; OX = 1229152 GN=tgt PE=3 SV=1
MTTPITYELIKTDKQTGARLGRVHTPHGSFDTPTFMPVGTLATVKTMSPEDLHSMDARIILSNTYHLWLRPGEEIIREAGGLHKFMNWDGAILTDSGGFQVFSLSDMREITEKGVHFRNHLNGDKLFLSPEKAMQIQNALGSDIMMAFDECPPFPATYDYMKASVERTSRWAERCLAAHERSDVQGLFGIVQGGEFEELRSQSARDLVSLDFPGYAIGGLSVGEPKDIMNRMLEHTTPLLPANKPRYLMGVGSPDALIDGAIRGIDMFDCVLPTRIARNGTCMTSNGRLVVRNAKYARDFGPIDENCDCHVCKNYSRAYIRHLIRCNETFGFRLTTYHNLHFLVKLMEQVRAAIKEDRLGDFKEEFFEQYGLNKPDAKNF

SEQ ID NO: 58299 - protein, 379 aa, unidentified
  source 1..379: note = Oceanobacillus halophilus
  REGION 1..379: note = tr|A0A495AES0|A0A495AES0_9BACI Queuine tRNA-ribosyltransferase OS=Oceanobacillus halophilus; OX = 930130 GN=tgt PE=3 SV=1
MTPITYELIKTDKQTGARLGRVHTPHGSFDTPTFMPVGTLATVKTMSPEELKEMNANIILSNTYHLWLRPGEDIIREAGGLHKFMNWDGAILTDSGGFQVFSLSDMREIKEEGVHFRNHLNGDKLFLSPEKAMGIQNALGSDIMMAFDECPPYPATYDYMKSSVERTSRWAERCLEAHNRKDEQGLFGIVQGGEYEDLRKQSAEDLISLDFPGYAVGGLSVGEPKDVMNRVLDFTTPLLPTNKPRYLMGVGSPDSLIDGAIRGIDMFDCVLPTRIARNGTCMTSTGRLVVRNAKYARDFRPIDENCDCHVCKNYSRAYIRHLVKCNETFGFRLTTYHNLHFLLKLMEQVRIAISEDRLGDFKREFFEQYGLNKPNAKNF

SEQ ID NO: 58300 - protein, 379 aa, Oceanobacillus iheyensis
  REGION 1..379: note = sp|Q8CXC4|TGT_OCEIH Queuine tRNA-ribosyltransferase; OS = Oceanobacillus iheyensis (strain DSM 14371 / CIP 107618 / JCM 11309 / KCTC 3954 / HTE831) OX=221109 GN=tgt PE= 3; SV = 1
MNPITYELIKTDKQTGARLGRVHTPHGSFDTPTFMPVGTLATVKTMSPEDLQSMQANIILSNTYHLWLRPGEDIIREAGGLHKFMNWDGAILTDSGGFQVFSLSDMREIKEEGVHFRNHLNGEKLFLSPEKAMDIQNALGSDIMMAFDECPPYPAEYDYMKASVERTSRWAERCLQAHNRPHDQGLFGIVQGGEYEALRKQSAEDLVSLDFPGYAIGGLSVGEPKHVMNKVLEFTTPFLPSNKPRYLMGVGSPDALIDGAIRGVDMFDCVLPTRIARNGTCMTSNGRLVVRNAKYARDFNPIDEHCSCHVCKNYSRAYIRHLIKCNETFGFRLTTYHNLHFLLKLMEQVRTAIKEDRLGDFKESFFEQYGLNKANPKNF

SEQ ID NO: 58301 - protein, 379 aa, Oceanobacillus iheyensis
  REGION 1..379: note = tr|A0A2P1WKZ7|A0A2P1WKZ7_9BACI Queuine tRNA-ribosyltransferase OS=Oceanobacillus iheyensis; OX = 182710 GN=tgt PE=3 SV=1
MTPITYELIKTCKQTGARLGRVHTPHGSFDTPTFMPVGTLATVKTMSPEELQEMNANIILSNTYHLWLRPGEDIVREAGGLHKFMNWDGAILTDSGGFQVFSLSDMREIKEEGVHFRNHLSGDKLFLSPERAMEIQNALGSDIMMAFDECPPYPASYEYMKSSVERTSRWAERCLEAHQRQHDQGLFGIIQGGEYEDLRKLSAQDLVSLDLPGYAIGGLSVGEPKDVMNRVLDFTAPLMPSNKPRYLMGVGSPDSLIDGAIRGIDMFDCVLPTRIARNGTCMTSNGRLVVRNAKFARDFGPIDENCDCHVCKNYSRAYIRHLIKCNETFGFRLTTYHNLYFLLKLMEQVRTAIAEDRLGDFKEEFFEQYGLNKPDAKNF

SEQ ID NO: 58302 - protein, 380 aa, unidentified
  source 1..380: note = Oceanobacillus limi
  REGION 1..380: note = tr|A0A1I0HHT4|A0A1I0HHT4_9BACI Queuine tRNA-ribosyltransferase OS=Oceanobacillus limi OX=930131; GN = tgt PE=3 SV=1
MTTPIRYEFIKTCKQTGARLGRVHTPHGSFDTPTFMPVGTLATVKTMSPEELQEMNANIILSNTYHLWLRPGEDIIREAGGLHKFMNWDGAILTDSGGFQVFSLSDMREIKEEGVHFRNHLNGEKLFLSPEKAMQIQNALGSDIMMAFDECPPYPATKEYMKASVERTSRWAERCLAAHERKDVQGLFGIIQGGEYEDLRKQSAQDLVSLDFPGYAVGGLSVGEPKDVMNRVLDFTTPLMPTDKPRYLMGVGSPDSLIDGAIRGIDMFDCVLPTRIARNGTCMTSNGRLVVRNAKYARDFSPIDENCDCHVCKNYTRAYIRHLIKCNETFGFRLTTYHNLYFLLKLMEQVRNAIREDRLGDFREAFFEQYGLNQPNAKNF

SEQ ID NO: 58303 - protein, 380 aa, Oceanobacillus oncorhynchi
  REGION 1..380: note = tr|A0A0A1MLD8|A0A0A1MLD8_9BACI Queuine tRNA-ribosyltransferase OS=Oceanobacillus oncorhynchi; OX = 545501 GN=tgt PE=3 SV=1
MMTPITYELIKTDKQTGARLGRVHTPHGSFDTPTFMPVGTLATVKTMSPEELHSMQANIILSNTYHLWLRPGEDIIEEAGGLHKFMNWDKAILTDSGGFQVFSLSDMRQIEEKGVHFRNHLNGEKLFLSPEKAMHIQNALGSDIMMAFDECPPYPATYDYMKSSVERTSRWAERCLEAHKRPDTQGLFGIVQGGEYEELRKLSAQDLVSLDFPGYAIGGLSVGEPKDVMNHVLEFTTPLLPSNKPRYLMGVGSPDALIDGAIRGVDMFDCVLPTRIARNGTCMTSNGRLVVRNAKYARDFSPIDEHCDCHVCKNYTRAYIRHLIKCNETFGFRLTTYHNLHFLLKLMEQVRTAIKDDRLGDFKEEFFEQYGLNQENPKNF

SEQ ID NO: 58304 - protein, 379 aa, Oceanobacillus picturae; identical to SEQ ID NO: 58301
  REGION 1..379: note = tr|W9A7K1|W9A7K1_9BACI Queuine tRNA-ribosyltransferase OS=Oceanobacillus picturae; OX = 171693 GN=tgt PE=3 SV=1

SEQ ID NO: 58305 - protein, 379 aa, Oceanobacillus profundus
  REGION 1..379: note = tr|A0A417YJE2|A0A417YJE2_9BACI Queuine tRNA-ribosyltransferase OS=Oceanobacillus profundus; OX = 372463 GN=tgt PE=3 SV=1
MTPITYELIKTDKQTGARLGRVHTPHGSFDTPTFMPVGTLATVKTMSPEELQQMNANIILSNTYHLWLRPGEDIIREAGGLHKFMNWDGAILTDSGGFQVFSLSDMREITEEGVHFRSHLNGDKLFLSPEKAMQIQNALGSDIMMAFDECPPYPASHEYMKASVERTSRWAERCLEAHERKDVQGLFGIIQGGEYEDLRKQSAQDLVSLDFPGYAIGGLSVGEPKDIMNRVLESTTPLMPANKPRYLMGVGSPDSLIDGAIRGIDMFDCVLPTRIARNGTCMTSNGRLVVRNAKYARDFGPIDENCDCHVCKNYTRAYIRHLIKCNETFGFRLTTYHNLHFLLKLMEQVRAAIKEDRLGDFKESFFEQYGLNKPNAKNF

SEQ ID NO: 58306 - protein, 379 aa, Oceanobacillus sojae
  REGION 1..379: note = tr|A0A511ZDJ2|A0A511ZDJ2_9BACI Queuine tRNA-ribosyltransferase OS=Oceanobacillus sojae OX=582851; GN = tgt PE=3 SV=1
MIPITYELIKTDKQTGARLGRVHTPHGSFDTPTFMPVGTLATVKTMSPEELSSMQANIILSNTYHLWLRPGEDIIEEAGGLHKFMNWDKAILTDSGGFQVFSLSDMRQIEEKGVHFRNHLNGEKLFLSPEKAMHIQNALGSDIMMAFDECPPYPATYDYMKSSVERTSRWAERCLEAHKRPDIQGLFGIVQGGEYEELRRQSASELVSLDFPGYAIGGLSVGEPKDVMNQVLEFTTPLLPANKPRYLMGVGSPDALIDGAIRGVDMFDCVLPTRIARNGTCMTSHGRLVVRNAKYARDFSPIDENCDCHVCKNYTRAYIRHLIKCNETFGFRLTTYHNLHFLLKLMEQVRTAIKEDRLGDFKESFFEQYGLNQENPKNF

SEQ ID NO: 58307 - protein, 380 aa, Oceanobacillus sp.
  REGION 1..380: note = tr|A0A345PHU5|A0A345PHU5_9BACI Queuine tRNA-ribosyltransferase OS=Oceanobacillus sp. 160; OX = 2052660 GN=tgt PE=3 SV=1
MTTPITYELIKTDKQTGARLGRVHTPHGSFDTPTFMPVGTLATVKTMSPEDLHSMDARIILSNTYHLWLRPGEDIIREAGGLHKFMNWDGAILTDSGGFQVFSLSDMREITEKGVHFRNHLNGDKLFLSPEKAMQIQNALGSDIMMAFDECPPFPATYDYMKASVERTSRWAERCLAAHERSDVQGLFGIVQGGEFEELRSQSARDLVSLDFPGYAIGGLSVGEPKDIMNRMLEHTTPLLPVNKPRYLMGVGSPDSLIDGAIRGIDMFDCVLPTRIARNGTCMTSNGRLVVRNAKYARDFGPIDENCDCHVCKNYSRAYIRHLIRCNETFGFRLTTYHNLHFLVKLMEQVRAAIKEDRLGDFKEEFFEQYGLNKPNAKNF

SEQ ID NO: 58308 - protein, 379 aa, Oceanobacillus sp.
  REGION 1..379: note = tr|A0A498DAH1|A0A498DAH1_9BACI Queuine tRNA-ribosyltransferase OS=Oceanobacillus sp. YLB-02; OX = 2448030 GN=tgt PE=3 SV=1
MQPIRYELIKTDKQTGARLGRVHTPHGSFDTPTFMPVGTLATVKTMSPEELKQMDARIILSNTYHLWLRPGEDIIREAGGLHKFMNWDGAILTDSGGFQVFSLSDMREIKEEGVHFRNHLNGDKLFLSPEKAMHIQNALGSDIMMAFDECPPYPATHEYMKQSVERTSRWAERCLAAHERPDTQGLFGIVQGGEFEDLRKQSARDLVSLDFPGYAIGGLSVGEPKDIMNRVLEFTTPLLPSDKPRYLMGVGSPDSLIDGAIRGIDMFDCVLPTRIARNGTCMTSNGRLVVRNAKYARDFGPIDENCDCHVCKNYSRAYIRHLIKCNETFGFRLTTYHNLHFLVKLMEQVRFAIKEDRLGDFKEEFFEQYGLNKPDAKNF

SEQ ID NO: 58309 - protein, 389 aa, Oceanobacter sp.
  REGION 1..389: note = tr|A0A2G2JR90|A0A2G2JR90_9GAMM Queuine tRNA-ribosyltransferase OS=Oceanobacter sp. OX=2030817; GN = tgt PE=3 SV=1
MSRECFMQFDLHTEDNEGSFARRGTITFPRGKVETPAFMPVGTYGSVKGLNVDQIKALGADIILGNTFHLMLRPGTEIVKAHGDLHDFIGWEKPILTDSGGFQVFSLGKMRKITEEGVTFASPVNGDKVLMTPESSMQVQKDLGSDVVMIFDECTPYPATHEEAATSMRLSMRWAQRSKDAHGDNPAALFGIIQGGMHESLRDESLAGLVDIGFDGYAVGGLSVGEPKDDMMRVLRHTAPKMPKDKPRYLMGVGKPEDLVEGVRRGIDMFDCVMPTRNARNGHLFTHNGVVKLRNAANKVDTGPIDAECDCYTCKNHSRAYLHHLDKCGEILGPSLNTIHNLHYYQTLMAGLRRALEEGTFAAFVDDFYARRGRTTPPLDESPDESGLT

SEQ ID NO: 58310 - protein, 365 aa, unidentified
  source 1..365: note = Oceanococcus atlanticus
  REGION 1..365: note = tr|A0A1Y1SFA7|A0A1Y1SFA7_9GAMM Queuine tRNA-ribosyltransferase OS=Oceanococcus atlanticus; OX = 1317117 GN=tgt PE=3 SV=1
MSFELLAQDAGARRGRLSFERGVVETPIFMPVGTYGTVKGMTPEELRGIGASIILGNTFHLWLRPGTEVISAHGDLHDFMHWHGPILTDSGGFQVWSLAELRKLTEQGVEFRSPVNGDKVFLSPEISIEIQQALGSDIIMQFDECTAYPATHDEARQSMELSLRWAARCKQAHAGRGGALFGIVQGGMHEDLRAQSIVGLADIGFDGYAIGGLSVGEPEADRIRVLDALEDKMPAQSPRYLMGVGTPLDMVEAVARGVDMFDCVMPTRNARNGHLFTSEGIIRIRNARHRNDTGPLDPQCDCYTCQNYSRAYLYHLQRCGEILSARLNTIHNLHYYLNLMAEMREAIEQGRFSAFYTEFRRRFMA

SEQ ID NO: 58311 - protein, 365 aa, unidentified
  source 1..365: note = Oceanococcus sp.
  REGION 1..365: note = tr|A0A520STE8|A0A520STE8_9GAMM Queuine tRNA-ribosyltransferase OS=Oceanococcus sp. OX=1958892; GN = tgt PE=3 SV=1
MSFELLAQDAGARRGRLSFERGAVETPIFMPVGTYGTVKGMTPEELRGIGASIILGNTFHLWLRPGTEVISAHGDLHDFMHWHGPILTDSGGFQVWSLAELRKLTEQGVEFRSPVNGDKVFLSPEISIEIQQALGSDIIMQFDECTAYPATHDEARQSMELSLRWAARCKQAHAGRGGALFGIVQGGMHEDLRAQSIAGLADIGFDGYAIGGLSVGEPEADRIRVLDALEDKMPAQSPRYLMGVGTPLDMVEAVARGVDMFDCVMPTRNARNGHLFTSEGIIRIRNARHRNDTGPLDPQCDCYTCQNYSRAYLYHLQRCGEILSARLNTIHNLHYYLNLMAEMREAIEQGRFSAFYTEFRRRFMA

SEQ ID NO: 58312 - protein, 391 aa, unidentified
  source 1..391: note = Oceanospirillaceae bacterium
  REGION 1..391: note = tr|A0A2D5PGY2|A0A2D5PGY2_9GAMM Queuine tRNA-ribosyltransferase OS=Oceanospirillaceae bacterium; OX = 1899355 GN=tgt PE=3 SV=1
MTRECFMKFELLSETEDSGSKARRGQLTFPRGTIQTPAFMPVGTYGTVKGLTPQQIKDIGAEIILGNTFHLMLRPGTEIVKLHGDLHDFIGWDKPILTDSGGFQVFSLGDMRKITEEGVSFRSPVNGEKVLMTPESSMQVQRDLGSDIVMIFDECTPYPATEKEAADSMRMSLRWAKRSKDAHGDNPSAQFGIIQGGMYEDLRDESLAGLLDIGFDGYAIGGLSVGEPKDEMMRVLKHIAPKMPEDKPRYLMGVGKPEDLVEGVRRGVDMFDCVMPTRNARNAHLFTSTGTLKIRNSANKTNNGPVDPECSCYTCRNFSRAYLHHLDKCKEILGATLNSIHNLHYYQTLMAGLRRSLEEGTFAGFVDEFYAKRGMKTPPLDDSTATEEPAS

SEQ ID NO: 58313 - protein, 40 aa, unidentified
  source 1..40: note = Oceanospirillaceae bacterium
  REGION 1..40: note = tr|A0A350JAN0|A0A350JAN0_9GAMM tRNA guanosine(34) transglycosylase Tgt (Fragment) OS=Oceanospirillaceae bacterium OX=1899355 GN=tgt PE=4 SV=1
MSRRCFMKFERLTQSGEARRGRLTFPRGSVETPCFMPVGT

SEQ ID NO: 58314 - protein, 149 aa, unidentified
  source 1..149: note = Oceanospirillales bacterium
  REGION 1..149: note = tr|A0A357LXW7|A0A357LXW7_9GAMM tRNA guanosine(34) transglycosylase Tgt (Fragment) OS=Oceanospirillales bacterium OX=1914300 GN=tgt PE=4 SV=1
KPRYLMGVGTPADLVESVSRGVDMFDCVMPTRNARNGHLFTHTGVVKIRNATNKTDTGPVDPQCDCYTCRNYSRAYLYHLDKCGEMLGATLNSIHNLHYYQTLMAGLRRSLEEGTFAAFVEDFYQQRNLPVPPLDGDEPDSAQQDSGAE

SEQ ID NO: 58315 - protein, 373 aa, unidentified
  source 1..373: note = Oceanospirillales bacterium
  REGION 1..373: note = tr|A0A2A4XK52|A0A2A4XK52_9GAMM Queuine tRNA-ribosyltransferase OS=Oceanospirillales bacterium; OX = 1914300 GN=tgt PE=3 SV=1
MSFEKLGEDGLARRGRLTFPRGTVETPAFMPVGTYGTVKGMLPRDIHEIGAEIILGNTFHLMLRPGTEVVKAHGDLHDFTQWKGPILTDSGGFQVFSLGEMRKITEEKVTFRSPVDGSPVELSPEIAIRVQRELGSDIVMIFDECTPYPATEKQAKESMELSLRWAKRSKDAHEGNPAALFGIVQGGMYESLRDRSLEGLTDIGFDGYAIGGLSVGEPKEDMIRILDHLPPKMPSDKPRYLMGVGRPEDLVEAVRRGVDMFDCVMPTRNARNGYLFTSTGIVKIRNARHRHDTLPLDDRCDCYTCKNFSRSYLHHLDKCGEMLGSQLNTIHNLRYYQNLMAGLRGAIEAGTLSDFINHFYALRGETVPAMGNG

SEQ ID NO: 58316 - protein, 378 aa, Oceanospirillum linum
  REGION 1..378: note = tr|A0A1T1HFU3|A0A1T1HFU3_OCELI Queuine tRNA-ribosyltransferase OS=Oceanospirillum linum OX=966; GN = tgt PE=3 SV=1
MSRECFMKYELKATDGKARRGELTFPRGKVQTPAFMPVGTYGTVKGMLPRDIEEIGAEIILGNTFHLMLRPGTEVVKKHGDLHDFIQWKGPILTDSGGFQVFSLGAMRKITEKGVEFRSPVNGEKVFIDPERSMQVQRDLGSDVVMIFDECTPYPATHKEAKESMEMSLRWAKRSKDAHGDNPSALFGIIQGGMFKDLRDVSLKGLTDIGFDGYAIGGLSVGEPKDEMIQVLDYLPAMMPEDRPRYLMGVGKPEDLVEGVRRGVDMFDCVMPTRNARNGHLFTADGVIKIRNAVHRHDDGPLEKECDCYTCQNFSRSYLHHLDKCKEMLGAQLNTIHNLRYYQRLMAGLRDAIEQGKLDDFVSDFYARLGREVPELAE

SEQ ID NO: 58317 - protein, 381 aa, Oceanospirillum multiglobuliferum
  REGION 1..381: note = tr|A0A1T4M1Z7|A0A1T4M1Z7_9GAMM Queuine tRNA-ribosyltransferase OS=Oceanospirillum multiglobuliferum OX=64969 GN=tgt PE=3 SV=1
MSRECFMQFELKATDGKARRGELNFPRGKVQTPAFMPVGTYGTVKGMLPRDIEAIGAEIILGNTFHLMLRPGTEVIKAHGDLHDFTQWKGPILTDSGGFQVFSLGAMRKITEKGVEFRSPVNGEKVFIDPERSMQVQRDLGSDVVMIFDECTPYPASHKEAKDSMEMSLRWAKRSKDAHGDNPSALFGIIQGGMYKDLREVSLKGLSEIGFDGYAIGGLSVGEPKEEMIKVLDYLPAMMPADRPRYLMGVGKPEDLVEGVRRGIDMFDCVMPTRNARNGHLFTADGVVKIRNAMHRNDPQSLEAECDCYTCQNFSRGYLHHLDKCKEMLGAMLNTIHNLRYYQRLMAGLRDAIEQGKLDDFVSDFYARRGLEVPELAEQID

SEQ ID NO: 58318 - protein, 378 aa, Oceanospirillum sp.
  REGION 1..378: note = tr|A0A2D5GDA3|A0A2D5GDA3_9GAMM Queuine tRNA-ribosyltransferase OS=Oceanospirillum sp. OX=2021254; GN = tgt PE=3 SV=1
MSRECFMNFELKTTDGKARRGQLNFPRGSVQTPAFMPVGTYGTVKGMLPRDIEEIGAEIILGNTFHLMLRPGTEVVKAHGDLHDFVQWKGPILTDSGGFQVFSLGAMRKITEKGVEFRSPVNGEKVFIDPERSMQVQRDLGSDVVMIFDECTPYPATHQEAKDSMEMSLRWAKRSKDAHGDNPSALFGIIQGGMYKDLREVSLEGLTNIGFDGYAIGGLSVGEPKDEMIKVLDYLPAMMPTDRPRYLMGVGKPEDLVEGVRRGVDMFDCVMPTRNARNGHLFTADGVIKIRNAKHRHDTGPLEEGCDCYTCQNFSRSYLHHLDKCKEMLGAQLNTIHNLRYYQRLMASLRDAIEQGKLDDFVSDFYARRDMEVPELAE

SEQ ID NO: 58319 - protein, 373 aa, Oceanotoga teriensis
  REGION 1..373: note = tr|A0A316CPJ6|A0A316CPJ6_9THEM Queuine tRNA-ribosyltransferase OS=Oceanotoga teriensis OX=515440; GN = tgt PE=3 SV=1
MSKIKYELLHVDKYSKARRGRIHTPHGIIETPVFMPVGTNSTVKGLTNDQIKNIDSEIILSNAFHLFLRPGMEIMKDFEGIHNFMNWNKPLLTDSGGFQVFSLKDRKISEEGVLFRSPLDGSKIMMTPEKSMEIQQTIGSDIAMAFDECVNAKWGYEYMKDSVDRTYRWAKRSFEAHKKENQSLFGIVQGGLFSDLRQRSLEQITSIPFDGFALGGLAVGEKYQESEKVLKEFGDKLPKDKPRYIMGIGSPTMMFLSVENGMDMFDCVLPTRMGRHGTALTWNGKLNLKSAKNKFDHSPIENDCNCYACKNHTRGYINHLLKRDEMLGKTLISIHNLYFNIHLIHKMREAIENDSFLDFKKEFFSNSSYPLQN

SEQ ID NO: 58320 - protein, 383 aa, Ochrobactrum anthropi
  REGION 1..383: note = tr|A0A011UIC9|A0A011UIC9_OCHAN Queuine tRNA-ribosyltransferase OS=Ochrobactrum anthropi OX=529; GN = tgt PE=3 SV=1
MTLENLKTSENFEFKVLATDGAARQGEISMPRGVVRTPAFMPVGTAGTVKAMYMDQVKELGADIILGNTYHLMLRPGAERVARLGGLHEFGGWKGPILTDSGGFQVMSLAQLRKLDEKGVTFRSHIDGKPYEMTPERSIEIQGLLDSDIQMQLDECVALPSPEKNTERAMELSLRWAERSKVAFGNQPGKAMFGIVQGGDVARLREKSAEALKALDLKGYSVGGLAVGEPQQVMLDMLEVVCPILPSEKPRYLMGVGTPDDILKSVARGIDMFDCVMPTRAGRHGLAFTRFGKVNLRNARHADDHRPLDPESDCPASRDYSRAYLHHLVKSGEALGAMLLTWNNLAYYQYLMKGIRASIADGRFGDFSAETSEGWARGDIPAL

SEQ ID NO: 58321 - protein, 383 aa, Ochrobactrum anthropi
  REGION 1..383: note = tr|A0A137XSD3|A0A137XSD3_OCHAN Queuine tRNA-ribosyltransferase OS=Ochrobactrum anthropi OX=529; GN = tgt PE=3 SV=1
MTLENLKTSENFEFKVLATDGAARQGEISMPRGVVRTPAFMPVGTAGTVKAMYMDQVKELGADIILGNTYHLMLRPGAERVARLGGLHEFGGWKGPILTDSGGFQVMSLAQLRKLDENGVTFRSHIDGKPYEMTPERSIEIQGLLDSDIQMQLDECVALPSPEKNTERAMELSLRWAERCKVAFGNQPGKAMFGIVQGGDVARLREKSAEALKAMDLKGYSVGGLAVGEPQQVMLDMLEVVCPILPSEKPRYLMGVGTPDDILKSVARGIDMFDCVMPTRAGRHGLAFTRFGKVNLRNARHADDHRPLDPESDCPASRDYSRAYLHHLVKSGEALGAMLLTWNNLAYYQYLMKGIRASIADGRFGEFSAETSEGWARGDIAPL

SEQ ID NO: 58322 - protein, 383 aa, Ochrobactrum cytisi
  REGION 1..383: note = tr|A0A1J6HH93|A0A1J6HH93_9RHIZ Queuine tRNA-ribosyltransferase OS=Ochrobactrum cytisi OX=407152; GN = tgt PE=3 SV=1
MTLENLKTSENFEFKVLATDGAARQGEISMPRGVVRTPAFMPVGTAGTVKAMYMDQVKELGADIILGNTYHLMLRPGAERVARLGGLHEFGGWKGPILTDSGGFQVMSLAQLRKLDEKGVTFRSHIDGKPYEMTPERSIEIQGLLDSDIQMQLDECVALPSPEKNTERAMELSLRWAERCKVAFGNQPGKAMFGIVQGGDVARLREKSAEALRAMDLKGYSVGGLAVGEPQQVMLDMLEVVCPILPSEKPRYLMGVGTPDDILKSVARGIDMFDCVMPTRAGRHGLAFTRFGKVNLRNARHADDHRPLDPESDCPASRDYSRAYLHHLVKSGEALGAMLLTWNNLAYYQYLMKGIRISIADGRFGDFSAETSEGWARGDIPAL

SEQ ID NO: 58323 - protein, 377 aa, Ochrobactrum gallinifaecis
  REGION 1..377: note = tr|A0A502BS84|A0A502BS84_9RHIZ Queuine tRNA-ribosyltransferase OS=Ochrobactrum gallinifaecis; OX = 215590 GN=tgt PE=3 SV=1
MTSENFEFKVLARDGAARQGEISMPRGVVRTPAFMPVGTAGTVKAMYMDQVKDLGADIILGNTYHLMLRPGAERVARLGGLHEFGGWKGPILTDSGGFQVMSLAQLRKLDENGVTFRSHIDGKPYEMTPERSIEIQGLLDSDIQMQLDECVALPSPEKNTERAMELSLRWAERCKAAFGTQAGKAMFGIVQGGDNARLRERSAEALKAMDLKGYSVGGLAVGEPQNVMLDMLEVVCPILPSEKPRYLMGVGTPDDILKSVARGIDMFDCVMPTRAGRHGLAFTRFGKVNLRNARHADDHRPLDPESSCPAARDYSRAYLHHLVKSGEALGGMLLTWNNLAYYQYLMQGIRKAISEGCFVDFSAETTNGWERGDIPAL

SEQ ID NO: 58324 - protein, 377 aa, Ochrobactrum grignonense
  REGION 1..377: note = tr|A0A256FMX7|A0A256FMX7_9RHIZ Queuine tRNA-ribosyltransferase OS=Ochrobactrum grignonense; OX = 94627 GN=tgt PE=3 SV=1
MTSENFEFKVLARDGAARQGEISMPRGVVRTPAFMPVGTAGTVKAMYMDQVKDLGADIILGNTYHLMLRPGAERVARLGGLHEFGGWKGPILTDSGGFQVMSLAQLRKLNENGVTFRSHIDGKPYEMTPERSIEIQGLLDSDIQMQLDECVALPSPEKNTERAMELSLRWAERCKVAFGTQAGKAMFGIVQGGDNARLRERSAEALKAMDLKGYSVGGLAVGEPQNVMLDMLEVVCPILPSEKPRYLMGVGTPDDILKSVARGIDMFDCVMPTRAGRHGLAFTRFGKVNLRNARHADDHRPLDPESNCPATRDYSRAYLHHLVKSGEALGGMLLTWNNLAYYQYLMQGIRAAIAEGRFEDFAAETTAGWERGDIPAP

SEQ ID NO: 58325 - protein, 377 aa, Ochrobactrum haematophilum
  REGION 1..377: note = tr|A0A397L6L9|A0A397L6L9_9RHIZ Queuine tRNA-ribosyltransferase OS=Ochrobactrum haematophilum; OX = 419474 GN=tgt PE=3 SV=1
MTSENFEFKVLATDGAARQGEISMPRGVVRTPAFMPVGTAGTVKAMYMDQVKELGADIILGNTYHLMLRPGAERVARLGGLHEFGGWQGPILTDSGGFQVMSLAQLRKLDEKGVTFRSHIDGKAYEMTPERSIEIQGLLDSDIQMQLDECVALPSPEKNTERAMELSLRWAERCKAAFGDQPGKAMFGIVQGGDNARLRARSAEALKAMDLKGYSVGGLAVGEPQEVMLDMLEVVCPILPAEKPRYLMGVGTPDDILKSVARGIDMFDCVMPTRAGRHGLAFTRFGKVNLRNARHADDHRPLDPESGCPASRDYSRAYLHHLVKSGEALGAMLLTWNNLAYYQYLMQGIRAAIAAGRFADFATETTAGWERGDIPAL

SEQ ID NO: 58326 - protein, 377 aa, Ochrobactrum haematophilum; identical to SEQ ID NO: 52901
  REGION 1..377: note = tr|A0A2P9HMI0|A0A2P9HMI0_9RHIZ Queuine tRNA-ribosyltransferase OS=Ochrobactrum haematophilum; OX = 419474 GN=tgt PE=3 SV=1

SEQ ID NO: 58327 - protein, 385 aa, Ochrobactrum intermedium
  REGION 1..385: note = tr|U4VCC9|U4VCC9_9RHIZ Queuine tRNA-ribosyltransferase OS=Ochrobactrum intermedium 229E; OX = 1337887 GN=tgt PE=3 SV=1
MTLENLKTSENFEFKVLAIDGAARQGEISMPRGVVRTPAFMPVGTAGTVKAMYMDQVKELGADIILGNTYHLMLRPGAERVARLGGLHEFGGWKGPILTDSGGFQVMSLAQLRKLDENGVTFRSHIDGKPYEMTPERSIEIQGLLDSDIQMQLDECVALPSPEKNTERAMELSLRWAERCKVAFGNQPGKAMFGIVQGGDVARLREKSAEALKAMDLKGYSVGGLAVGEPQQVMLDMLEVVCPILPSEKPRYLMGVGTPDDILKSVARGIDMFDCVMPTRAGRHGLAFTRFGKVNLRNARHADDHRPLDPESDCPASRDYSRAYLHHLVKSGEALGAMLLTWNNLAYYQYLMKGIRASIAGGGRFADFSAETSEGWARGGDIAPL

SEQ ID NO: 58328 - protein, 383 aa, Ochrobactrum intermedium
  REGION 1..383: note = tr|C4WHS7|C4WHS7_9RHIZ Queuine tRNA-ribosyltransferase OS=Ochrobactrum intermedium LMG 3301 OX=641118 GN=tgt PE=3 SV=1
MTLENLKTSENFEFKVLAIDGAARQGEISMPRGVVRTPAFMPVGTAGTVKAMYMDQVKELGADIILGNTYHLMLRPGAERVARLGGLHEFGGWKGPILTDSGGFQVMSLAQLRKLDENGVTFRSHIDGKPYEMTPERSIEIQGLLDSDIQMQLDECVALPSPEKNTERAMELSLRWAERCKVAFGNQPGKAMFGIVQGGDVARLREKSAEALKAMDLKGYSVGGLAVGEPQQVMLDMLEVVCPILPSEKPRYLMGVGTPDDILKSVARGIDMFDCVMPTRAGRHGLAFTRFGKVNLRNARHADDHRPLDPESDCPASRDYSRAYLHHLVKSGEALGAMLLTWNNLAYYQYLMKGIRASIAGGRFADFSAETSEGWARGDIAPL

SEQ ID NO: 58329 - protein, 383 aa, Ochrobactrum lupini
  REGION 1..383: note = tr|A0A256GXP7|A0A256GXP7_9RHIZ Queuine tRNA-ribosyltransferase OS=Ochrobactrum lupini OX=255457; GN = tgt PE=3 SV=1
MTLENLKTSENFEFKVLATDGAARQGEISMPRGVVRTPAFMPVGTAGTVKAMYMDQVKELGADIILGNTYHLMLRPGAERVARLGGLHEFGGWKGPILTDSGGFQVMSLAQLRKLDENGVTFRSHIDGKPYEMTPERSIEIQGLLDSDIQMQLDECVALPSPEKNTERAMELSLRWAERCKVAFGIQPGKAMFGIVQGGDVARLREKSAEALKAMDLKGYSVGGLAVGEPQQVMLDMLEVVCPILPSEKPRYLMGVGTPDDILKSVARGIDMFDCVMPTRAGRHGLAFTRFGKVNLRNARHADDHRPLDPESDCPASRDYSRAYLHHLVKSGEALGAMLLTWNNLAYYQYLMKGIRASIADGRFGDFSAETSEGWARGDIPAL

SEQ ID NO: 58330 - protein, 377 aa, Ochrobactrum oryzae
  REGION 1..377: note = tr|A0A2S7IXQ0|A0A2S7IXQ0_9RHIZ Queuine tRNA-ribosyltransferase OS=Ochrobactrum oryzae OX=335286; GN = tgt PE=3 SV=1
MTTENFEFKVLATDGAARQGEISMPRGVVRTPAFMPVGTAGTVKAMYMDQVKELGADIILGNTYHLMLRPGAERVARLGGLHEFGGWQGPILTDSGGFQVMSLAQLRKLNEHGVTFRSHIDGKPYEMTPERSIEIQGLLDSDIQMQLDECVALPSPEKNTERAMELSLRWAERCKVAFGNQPGKAMFGIVQGGDVARLREKSAEALKAMDLKGYSVGGLAVGEPQQVMLDMLEVVCPILPSEKPRYLMGVGTPDDILKSVARGIDMFDCVMPTRAGRHGLAFTRFGKVNLRNARHADDHRPLDPESDCPASRDYSRAYLHHLVKSGEALGAMLLTWNNLAYYQYLMKGIRASIADGRFNDFAAETSEGWARGDIAPL

SEQ ID NO: 58331 - protein, 383 aa, Ochrobactrum pecoris
  REGION 1..383: note = tr|A0A5C5CT31|A0A5C5CT31_9RHIZ Queuine tRNA-ribosyltransferase OS=Ochrobactrum pecoris OX=867683; GN = tgt PE=3 SV=1
MTLENLKTSENFEFKVLARDGAARQGEISMPRGVVRTPAFMPVGTAGTVKAMYMDQVKELGADIILGNTYHLMLRPGAERVAKLGGLHEFGGWKGPILTDSGGFQVMSLAQLRKLDENGVTFRSHIDGKAYEMTPERSIEIQGLLDSDIQMQLDECVALPSPEKNTERAMELSLRWAERCKVAFGDQPGKAMFGIVQGGDVARLREKSAEALKAMDLKGYSVGGLAVGEPQQVMLDMLEVVCPILPSEKPRYLMGVGTPDDILKSVARGIDMFDCVMPTRAGRHGLAFTRFGKVNLRNARHADDHRPLDPESDCPASRDYSRAYLHHLVKSGEALGAMLLTWNNLAYYQYLMEGIRASIADGRFGEFAAETSEGWARGDMAPL

SEQ ID NO: 58332 - protein, 377 aa, Ochrobactrum pseudogrignonense
  REGION 1..377: note = tr|A0A1A9FKT2|A0A1A9FKT2_9RHIZ Queuine tRNA-ribosyltransferase OS=Ochrobactrum pseudogrignonense; OX = 419475 GN=tgt PE=3 SV=1
MTSENFEFKVLARDGAARQGEISMPRGVVRTPAFMPVGTAGTVKAMYMDQVKDLGADIILGNTYHLMLRPGAERVARLGGLHEFGGWKGPILTDSGGFQVMSLAQLRKLNENGVTFRSHIDGKPYEMTPERSIEIQGLLDSDIQMQLDECVALPSPEKNTERAMELSLRWAERCKVAFGTQAGKAMFGIVQGGDNARLRERSAEALKAMDLKGYSVGGLAVGEPQNVMLEMLEVVCPILPTEKPRYLMGVGTPDDILKSVARGIDMFDCVMPTRAGRHGLAFTRFGKVNLRNARHADDHRPLDPESNCPATRDYSRAYLHHLVKSGEALGGMLLTWNNLAYYQYLMQGIRAAIAEGRFEDFAAETTAGWERGDIPAL

SEQ ID NO: 58333 - protein, 377 aa, Ochrobactrum pseudogrignonense
  REGION 1..377: note = tr|A0A256GTZ6|A0A256GTZ6_9RHIZ Queuine tRNA-ribosyltransferase OS=Ochrobactrum pseudogrignonense; OX = 419475 GN=tgt PE=3 SV=1
MTSENFEFKVLARDGAARQGEISMPRGVVRTPAFMPVGTAGTVKAMYMDQVKDLGADIILGNTYHLMLRPGAERVARLGGLHEFGGWKGPILTDSGGFQVMSLAQLRKLNENGVTFRSHIDGKPYEMTPERSIEIQGLLDSDIQMQLDECVALPSPEKNTERAMELSLRWAERCKVAFGTQAGKAMFGIVQGGDNARLRERSAEALKAMDLKGYSVGGLAVGEPQNVMLEMLEVVCPILPTEKPRYLMGVGTPDDILKSVARGIDMFDCVMPTRAGRHGLAFTRFGKVNLRNARHADDHRPLDPESNCPATRDYSRAYLHHLVKSGEALGGMLLTWNNLAYYQYLMQGIRAAIAEGRFEDFAAETTAGWQRGDIPAL

SEQ ID NO: 58334 - protein, 377 aa, unidentified
  source 1..377: note = Ochrobactrum quorumnocens
  REGION 1..377: note = tr|A0A248UJC0|A0A248UJC0_9RHIZ Queuine tRNA-ribosyltransferase OS=Ochrobactrum quorumnocens; OX = 271865 GN=tgt PE=3 SV=1
MTSENFEFKVLARDGAARQGEISMPRGVVRTPAFMPVGTAGTVKAMYMDQVKDLGADIILGNTYHLMLRPGAERVARLGGLHEFGGWKGPILTDSGGFQVMSLAQLRKLNENGVTFRSHIDGKPYEMTPERSIEIQGLLDSDIQMQLDECVALPSPENNTERAMELSLRWAERCKVAFGTQAGKAMFGIVQGGDNARLRERSAEALKAMDLKGYSVGGLAVGEPQCVMLDMLEVVCPILPTEKPRYLMGVGTPDDILKSVARGIDMFDCVMPTRAGRHGLAFTRFGKVNLRNARHADDHRPLDPESNCPATRDYSRAYLHHLVKAGEALGGMLLTWNNLAYYQYLMQGIRAAIAEGRFEDFAAETTAGWERGDISPL

SEQ ID NO: 58335 - protein, 377 aa, Ochrobactrum rhizosphaerae
  REGION 1..377: note = tr|A0A256FI97|A0A256FI97_9RHIZ Queuine tRNA-ribosyltransferase OS=Ochrobactrum rhizosphaerae; OX = 571254 GN=tgt PE=3 SV=1
MTSENFEFKVLARDGAARRGEISMPRGVVRTPAFMPVGTAGTVKAMYMDQVKELGADIILGNTYHLMLRPGAERVARLGGLHEFGGWKGPILTDSGGFQVMSLAQLRKLNENGVTFRSHIDGKPYEMTPERSIEIQGLLDSDIQMQLDECVALPSPEQNTERAMELSLRWAERCKVAFGTQAGKAMFGIVQGGDNARLRERSAEALKAMDLKGYSVGGLAVGEPQNVMLDMLEVVCPILPSEKPRYLMGVGTPDDILKSVARGIDMFDCVMPTRAGRHGLAFTRFGKVNLRNARHADDHRPLDPESNCPATRDYSRAYLHHLVKAGEALGGMLLTWNNLAYYQYLMQGIRAAIAEGRFEDFAAETTAGWERGDIPAL

SEQ ID NO: 58336 - protein, 377 aa, Ochrobactrum sp.
  REGION 1..377: note = tr|A0A4R7WT07|A0A4R7WT07_9RHIZ Queuine tRNA-ribosyltransferase OS=Ochrobactrum sp. LP_5_YM; OX = 2485134 GN=tgt PE=3 SV=1
MTSENFEFKVLARDGAARQGEISMPRGVVRTPAFMPVGTAGTVKAMYMDQVKELGADIILGNTYHLMLRPGAERVARLGGLHEFGGWRGPILTDSGGFQVMSLAQLRKLNENGVTFRSHIDGKPYEMTPERSIEIQGLLDSDIQMQLDECVALPSPENNTERAMELSLRWAERCKVAFGTQAGKAMFGIVQGGDNARLRERSAEALKAMDLKGYSVGGLAVGEPQSVMLDMLEVVCPILPTDKPRYLMGVGTPDDILKSVARGIDMFDCVMPTRAGRHGLAFTRFGKVNLRNARHADDHRPLDPESNCPATRDYSRAYLHHLVKAGEALGGMLLTWNNLAYYQYLMQGIRAAIAEGRFEDFAAETTAGWERGDIPAL

SEQ ID NO: 58337 - protein, 376 aa, Ochrobactrum sp.
  REGION 1..376: note = tr|A0A3D2CYH1|A0A3D2CYH1_9RHIZ Queuine tRNA-ribosyltransferase OS=Ochrobactrum sp. OX=42190; GN = tgt PE=3 SV=1
  VARIANT 200: note = Xaa can be any naturally occurring amino acid
MTLENLKTSENFEFKVLATDGAARQGEISMPRGVVRTPAFMPVGTAGTVKAMYMDQVKELGADIILGNTYHLMLRPGAERVARLGGLHEFGGWKGPILTDSGGFQVMSLAQLRKLDKNGVTFRSHIDGKPYEMTPERSIEIQGLLDSDIQMQLDECVALPSPEKNTERAMELSLRWAERCKVAFGNQPGKAMFGIVQGGXAEALKAMDLKGYSVGGLAVGEPQQVMLDMLEVVCPILPSEKPRYLMGVGTPDDILKSVARGIDMFDCVMPTRAGRHGLAFTRFGKVNLGNARHADDHRPLDPESDCPASRDYSRAYLHHLVKSGEALGAMLLTWNNLAYYQYLMKGIRASIAGGRFADFSTETSEGWARGDIPALL

SEQ ID NO: 58338 - protein, 377 aa, Ochrobactrum thiophenivorans
  REGION 1..377: note = tr|A0A256FXN3|A0A256FXN3_9RHIZ Queuine tRNA-ribosyltransferase OS=Ochrobactrum thiophenivorans; OX = 571255 GN=tgt PE=3 SV=1
MTSENFEFKVLARDGAARQGEISMPRGVVRTPAFMPVGTAGTVKAMYMDQVKDLGADIILGNTYHLMLRPGAERVARLGGLHEFGGWKGPILTDSGGFQVMSLAQLRKIDETGVTFRSHIDGKAYEMTPERSIEIQGLLDSDIQMQLDECVALPSPEKNTERAMEMSLRWAERCKVAFGTQAGKAMFGIVQGGDNARLRERSAEALKAMDLKGYSVGGLAVGEPQNVMLEMLEVVCPILPTEKPRYLMGVGTPDDMLKSVARGIDMFDCVMPTRAGRHGLAFTRFGKVNLRNARHADDHRPLDPESNCPATRDYSRAYLHHLVKSGEALGGMLLTWNNLAYYQYLMQGIRAAIAEGRFEDFAAETTAGWERGDIAAL

SEQ ID NO: 58339 - protein, 293 aa, unidentified
  source 1..293: note = Unknown
  REGION 1..293: note = tr|A0A2A4Z1D4|A0A2A4Z1D4_9PROT Queuine tRNA-ribosyltransferase (Fragment) OS=OCS116 cluster bacterium OX=2030921 GN=COB13_08805 PE=3 SV=1
MGKNIKFELKNSNGKARLGVLRTPRGDINTPAFMPVGTAGTVKAMYTDQVKELGAEVVLGNTYHLMLRPGAERIERLGGLHEFMQWDKPILTDSGGFQVMSLSKLRKMTEEGVTFQSHIDGSKHHLTPERSIEIQCLLGSDIQMQLDECTPHPATEKQAADSLRMSLRWADRSKVQFGDRPNQALFGIMQGSTYQDLREESAKGLVDMDFDGYSIGGLAVGEGQEIMLEVLDYAPDLLPQDKPRYLMGVGTPSDLIESVRRGVDMFDCVMPTRAGRHGLCYTHRGKVNLKNAR

SEQ ID NO: 58340 - protein, 376 aa, Octadecabacter antarcticus
  REGION 1..376: note = tr|M9RAL4|M9RAL4_9RHOB Queuine tRNA-ribosyltransferase OS=Octadecabacter antarcticus 307; OX = 391626 GN=tgt PE=3 SV=1
MTVPFSFDLAATDGAARTGVMHTPRGDIRTPAFMPVGTAATVKAMMPESVRKTGADILLGNTYHLMLRPTAERIARLGGLHKFMNWDRPILTDSGGFQVMSLAGMRKLTEEGVVFQSHYDGSKHNLTPERSMEIQALLGSDIVMCFDECPALPADRARLEDSMQMSMRWAKRSRVAFGGRPGHALFGIQQGGLDEGLRKQSADALQEIGFEGYAVGGLAVGEGQEAMFGCLDFAPDQLPTQKPRYLMGVGKPDDIVGAVKRGIDMMDCVLPSRSGRTGQVFTRNGVLNIKNARHADDPRPLDEGCGCPACSNYSRAYLHHVFRSQEMISGMLLTWHNLTYFQDIMAGMRNAIATQTFAAWEADFHRTRAQGDIDPL

SEQ ID NO: 58341 - protein, 376 aa, Octadecabacter arcticus
  REGION 1..376: note = tr|M9RM71|M9RM71_9RHOB Queuine tRNA-ribosyltransferase OS=Octadecabacter arcticus 238; OX = 391616 GN=tgt PE=3 SV=1
MTVPFSFDLQATDGSARTGVMRTQRGDIRTPAFMPVGTAATVKAMMPESVRATGADILLGNTYHLMLRPTAERIARLGGLHKFMNWDRPILTDSGGFQVMSLAGMRKLTEEGVVFQSHYDGSKHNLTPERSMEIQALLGSDIVMCFDECPALPADRTRLEDSMQMSMRWAKRSRAAFGDRPGHALFGIQQGGLDEDLRKQSADALQDIGFEGYAVGGLAVGEGQEAMFGCLDFAPDQLPTQKPRYLMGVGKPDDIVGAVKRGIDMMDCVLPSRSGRTGQIFTRTGVLNIKNARHADDPRPLDEGCRCPACSNYSRAYLHHVFRSQEMISGMLLTWHNLTYFQDIMAGMRDAIATQSFAAWEADFHAGRAQGDIDPL

SEQ ID NO: 58342 - protein, 376 aa, unidentified
  source 1..376: note = Octadecabacter ascidiaceicola
  REGION 1..376: note = tr|A0A238JNC1|A0A238JNC1_9RHOB Queuine tRNA-ribosyltransferase OS=Octadecabacter ascidiaceicola; OX = 1655543 GN=tgt PE=3 SV=1
MTDTFSFDLQKTDGAARTGVMRTPRGDIRTPAFMPVGTAATVKAMMPESVRQTGADILLGNTYHLMLRPTAERIAKLGGLHKFMNWERPILTDSGGFQVMSLSGMRKLTEEGVVFQSHYDGSKHNLTPERSMEIQRLLGSDIVMCFDECPALPADRKRLEDSMEMSMRWAKRSRDAFGDRPGHALFGIQQGGLEEDLRKRSADALQEIGFDGYAVGGLAVGEGQEAMFDTLDFAPDQLPVDKPRYLMGVGKPDDIVGAVKRGIDMMDCVLPSRSGRTGQVFTRNGVVNIKNARHADDPRPLDENCRCPACSNYSRAYLHHVFRSQEMISGMLLTWHNLTYFQDIMQGMRDAIAAGMFAAWEADFHAGRAQGDIEPL

SEQ ID NO: 58343 - protein, 376 aa, unidentified
  source 1..376: note = Octadecabacter temperatus
  REGION 1..376: note = tr|A0A0K0Y5U1|A0A0K0Y5U1_9RHOB Queuine tRNA-ribosyltransferase OS=Octadecabacter temperatus; OX = 1458307 GN=tgt PE=3 SV=1
MTKTFSFELQKTDGAARTGVMHTPRGDIRTPAFMPVGTAATVKAMMPESVRETGADILLGNTYHLMLRPTAERIAKLGGLHKFMNWERPILTDSGGFQVMSLAGMRKLTEEGVVFQSHYDGSKHNLTPERSMEIQRLLGSDIVMCFDECPALPADRKRLEDSMEMSMRWAKRSRDAFGDRPGHALFGIQQGGLEEDLRKRSADALQEIGFEGYAVGGLAVGEGQEAMFDCLDFAPDQLPVDKPRYLMGVGKPDDIVGAVKRGIDMMDCVLPSRSGRTGQVFTRHGVVNIKNARHADDPRPLDENCRCPACSNYSRAYLHHVFRSHEMISGMLLTWHNLTYFQDIMQGMRDAISGGTFAAWESDFHSKRAQGDIDPL

SEQ ID NO: 58344 - protein, 376 aa, Odoribacter laneus
  REGION 1..376: note = tr|R5USN1|R5USN1_9BACT Queuine tRNA-ribosyltransferase OS=Odoribacter laneus CAG:561; OX = 1263089 GN=tgt PE=3 SV=1
MQYTLLAKDKNSEARCGVLTTAHGDIHTPIFMPVGTVGTVKAVHARELKEDIRAEIILGNTYHLYLRPGTEVLQAAGGLHRFNAWDRPILTDSGGFQVFSLTENRKITEEGVIFRSHIDGSKHIFTPEKVMDIQRKIGSDIIMAFDECPPGTSEYGYAKKSLELTQRWLERCVARIDATEPLYGYEQNLFPIVQGCVYKDLREKSAEHAVALNRAGYAIGGLAVGEPAEDMYAMIEVVNRILPQDKPRYLMGVGTPENILEAIALGVDMFDCVMPTRNGRNGMLFTTEGIINIKNQKWERDFSPLDPAEICYVDADYSKAYLRHLIKANEILGLQICSIHNLAFYLWLVREARKHIMEGDFLDWKNRMIRKVTTRL

SEQ ID NO: 58345 - protein, 376 aa, Odoribacter laneus
  REGION 1..376: note = tr|H1DDK3|H1DDK3_9BACT Queuine tRNA-ribosyltransferase OS=Odoribacter laneus YIT 12061; OX = 742817 GN=tgt PE=3 SV=1
MQYTLLAKDKNSEARCGVLTTAHGDIHTPIFMPVGTVGTVKAVHARELKEDIRAEIILGNTYHLYLRPGTEVLQAAGGLHRFNAWDRPILTDSGGFQVFSLTENRKITEEGVIFRSHIDGSKHIFTPEKVMDIQRKIGSDIIMAFDECPPGTSEYGYAKKSLELTQRWLERCIARIDATEPLYGYEQNLFPIVQGCVYKDLREKSAEHAVALNRAGYAIGGLAVGEPAEDMYAMIEVVNRILPQDKPRYLMGVGTPENILEAIALGVDMFDCVMPTRNGRNGMLFTTEGIINIKNQKWERDFSPLDPAEICYVDADYSKAYLRHLIKANEILGLQICSIHNLAFYLWLVREARKHIMEGDFLEWKNRMIRKVTTRL

SEQ ID NO: 58346 - protein, 376 aa, Odoribacter sp.
  REGION 1..376: note = tr|R5PPK7|R5PPK7_9BACT Queuine tRNA-ribosyltransferase OS=Odoribacter sp. CAG:788; OX = 1262909 GN=tgt PE=3 SV=1
MQYTLLAKDKNSEARCGVLTTAHGEIHTPIFMPVGTVGTVKAVHARELKNDIRAEIILGNTYHLYLRPGTDILQAAGGLHKFNGWDRPILTDSGGFQVFSLTDRRKITEEGVIFHSHIDGSKHIFTPESVMDIQRKIGADIIMAFDECPPGTSEYGYAKKSLELTQRWLERCVKHLDATEPLYGYEQNLFPIVQGCVYKDLRERSAEHAVALDRAGYAIGGLAVGEPAEDMYAMIEVVNRILPQNKPRYLMGVGTPENILEAIALGVDMFDCVMPTRNGRNGMLFTTEGVINIKNRKWDRDFSPLDPAGLCFVDTDYTKAYLRHLIKADEILGLQICSIHNLAFYLWLVREARKHILEGDFAVWKSRMVKKVTTRL

SEQ ID NO: 58347 - protein, 376 aa, Odoribacter sp.
  REGION 1..376: note = tr|A0A417WR49|A0A417WR49_9BACT Queuine tRNA-ribosyltransferase OS=Odoribacter sp. OF09-27XD; OX = 2293112 GN=tgt PE=3 SV=1
MQYTLLAKDKNSEARCGVLTTAHGEIHTPIFMPVGTVGTVKAVHARELKTDIRAEIILGNTYHLYLRPGTDILQAAGGLHKFNGWDRPILTDSGGFQVFSLTDRRKITEEGVIFHSHIDGSKHIFTPESVMDIQRKIGADIIMAFDECPPGTSEYGYAKKSLELTQRWLERCVKHLDATEPLYGYEQNLFPIVQGCVYKDLRERSAEHAVALDRAGYAIGGLAVGEPAEDMYAMIEVVNRILPQNKPRYLMGVGTPENILEAIALGVDMFDCVMPTRNGRNGMLFTTEGVINIKNRKWDRDFSPLDPAGLCFVDTDYTKAYLRHLIKADEILGLQICSIHNLAFYLWLVREARKHILEGDFAVWKSQMVKKVTTRL

SEQ ID NO: 58348 - protein, 377 aa, Odoribacter splanchnicus
  REGION 1..377: note = tr|A0A412TVG6|A0A412TVG6_9BACT Queuine tRNA-ribosyltransferase OS=Odoribacter splanchnicus; OX = 28118 GN=tgt PE=3 SV=1
MQYTLLAKDKNSEARCGVLTTAHGEIHTPVFMPVGTVGSVKAVHMRELKEDIRAEIILGNTYHLYLRPGTEILQAAGGLHRFNGWDRPILTDSGGFQVFSLTGTGRKITEEGVTFRSHIDGSKHLFTPENVMDIQRKIGADIVMAFDECPPGTSDYNYARHSLGLTQRWLERCVARFDETAPLYGYEQNLFPIVQGCTYRDLREKAAEHAVSLNRAGYAIGGLAVGEPAEEMYAMIEVVNRILPQDKPRYLMGVGTPENILEGIQRGVDMFDCVMPTRNGRNGMIFTTEGTINIKNQKWERDFSSIDPAALSYVDTDYSKAYLRHLIKSDEILGLQICSIHNLSFYLWLVREARKHIQEGDFVEWKTKLLPKITRRL

SEQ ID NO: 58349 - protein, 377 aa, Odoribacter splanchnicus
  REGION 1..377: note = tr|R6F2N0|R6F2N0_9BACT Queuine tRNA-ribosyltransferase OS=Odoribacter splanchnicus CAG:14; OX = 1263090 GN=tgt PE=3 SV=1
MQYTLLAKDKNSEARCGVLTTAHGEIHTPVFMPVGTVGSVKAVHMRELKEDIRAEIILGNTYHLYLRPGTEILQAAGGLHRFNGWDRPILTDSGGFQVFSLTGTGRKITEEGVTFRSHIDGSKHLFTPENVMDIQRQIGADIVMAFDECPPGTSDYNYARHSLGLTQRWLERCVARFDETAPLYGYEQNLFPIVQGCTYRDLREKAAEHAVSLNRAGYAIGGLAVGEPAEEMYAMIEVVNRILPQDKPRYLMGVGTPENILEGIQRGVDMFDCVMPTRNGRNGMIFTTEGTINIKNQKWERDFSSIDPAALSYVDTDYSKAYLRHLIKSDEILGLQICSIHNLSFYLWLVREARKHIQEGDFVEWKTKLLPKITRRL

SEQ ID NO: 58350 - protein, 383 aa, unidentified
  source 1..383: note = Oenococcus alcoholitolerans
  REGION 1..383: note = tr|A0A0A0M5V7|A0A0A0M5V7_9LACT Queuine tRNA-ribosyltransferase OS=Oenococcus alcoholitolerans; OX = 931074 GN=tgt PE=3 SV=1
MTKATQAVTYELLHVDKHTGARRGIIHTPHGDWQTPMFMPVGTQATVKSVQPRELKEIGAQFILGNTYHLWLRPGDELIAAAGGLHKFMDWNGPILTDSGGFQVFSLADSRSISEKGVTFKNNIDGSTMFLSPEVAIKIQNNLGSDVIMQLDEAAPYFESFDYLKESSERSVRWAERALKAHKNKDKQALFGIVQGAGFYDLRKNSAKNLVSLDLPGYAIGGLSVGESKKEMNRVLDFTTQWLPTNKARYLMGVGAPDSLIDCVNAGIDMFDCVLPTRIARKGSLMTRFGRIVITNHKYKNDFSQLDPDLDDYASTHFTKAYLHHLFNTHELLGYNLASIHNLRFLLKLMEDMRQAIENDQMVDFRKKVLDEYGYNRPNARLF

SEQ ID NO: 58351 - protein, 381 aa, Oenococcus kitaharae
  REGION 1..381: note = tr|G9WJP7|G9WJP7_9LACT Queuine tRNA-ribosyltransferase OS=Oenococcus kitaharae DSM 17330; OX = 1045004 GN=tgt PE=3 SV=1
MTKSPVSYELLHVDKHSGARRGIIHTPHGDWQTPMFMPVGTQATVKSMQPRELKEVGSQIILANTYHLWIRPGDELIKKAGGLHKFMDWDQAILTDSGGFQVFSLADTRSITEKGVTFKNNVDGSTMFLSPEVAMKIQNNLGPDIMMQLDEAVPYFETYDYIKESTERSARWALRALKAHKRPDEQALFGIVQGAGFKELRQNSAKDLASLDLPGYAIGGLSVGESKKEMNRVLDFTTPWLPEDKPRYLMGVAAPDSLFDSVARGIDMFDCVLPTRIARKGSLMTRFGRIVITNHKYKDDFSQLDPDLDDYASTHFTKAYLHHLFNTNELLGYNLASMHNLRYLLKLMADMRTAIENDQFLDFRAQVLEEYGYNKPNARLF

SEQ ID NO: 58352 - protein, 381 aa, Oenococcus oeni
  REGION 1..381: note = tr|A0A5E9PBZ2|A0A5E9PBZ2_OENOE Queuine tRNA-ribosyltransferase OS=Oenococcus oeni OX=1247 GN=tgt; PE = 3 SV=1
MTKDPVTYELLHVDKHTGARRGVIHTPHGDWQTPMFMPVGTQATVKSLQPRELKEIGSQFILGNTYHLWIRPGDDLIAQAGGLHKFMDWDQAILTDSGGFQVFSLADSRSITEKGVTFKNNIDGSTMFLSPEVAMKIQNNLGADIIMQLDEAVPYFETYDYVKKSTERSARWAQRALEAHKCSKQQALFGIVQGAGFRKLRENSAKDLASLNLPGYAIGGLSVGESKTEMNRVLDFTTQWLPENKPRYLMGVGAPDSLFDSVIRGIDMFDCVLPTRIARKGSLMTRFGRVVITNHKYKDDFSQLDENLDDYASTHFTKAYLHHLFNTNELLAYNLASMHNLRYLLKLMEDMRAAIENDQLLDLKEKVLEEYGYNKANARLF

SEQ ID NO: 58353 - protein, 347 aa, Oenococcus oeni
  REGION 1..347: note = tr|Q04EG0|Q04EG0_OENOB Queuine tRNA-ribosyltransferase OS=Oenococcus oeni (strain ATCC BAA-331 / PSU-1) OX=203123 GN=tgt PE=3 SV=1
MFMPVGTQATVKSLQPRELKEIGSQFILGNTYHLWIRPGDDLIAKAGGLHKFMDWDQAILTDSGGFQVFSLADSRSITEKGVTFKNNIDGSTMFLSPEVAMKIQNNLGADIIMQLDEAVPYFETYDYVKKSTERSARWAQRALEAHKCSKQQALFGIVQGAGFRKLRENSAKDLASLNLPGYAIGGLSVGESKTEMNRVLDFTTQWLPENKPRYLMGVGAPDSLFDSVIRGIDMFDCVLPTRIARKGSLMTRFGRVVITNHKYKDDFSQLDENLDDYASTHFTKAYLHHLFNTNELLAYNLASIHNLRYLLKLMEDMRAAIENDQLLDLKEKVLEEYGYNKANARLF

SEQ ID NO: 58354 - protein, 381 aa, unidentified
  source 1..381: note = Oenococcus sicerae
  REGION 1..381: note = tr|A0A410N7H5|A0A410N7H5_9LACT Queuine tRNA-ribosyltransferase OS=Oenococcus sicerae OX=2203724; GN = tgt PE=3 SV=1
MTKLPVTYELLHVDKHTGARRGVIHTPHGDWQTPMFMPVGTQATVKSVQPRELKEIGSQFILGNTYHLWIRPGDDLIAKAGGLHKFMDWDQAILTDSGGFQVFSLADSRSITEKGVTFKNNIDGSTMFLSPEVAMKIQNNLGADIMMQLDEAVPYFESYDYIKQSTERSARWAQRALKAHKKTDSQALFGIVQGAGFKKIRENSAKDLVSLGLPGYAIGGLSVGESKAEMNRVLDFTTQWLPENKPRYLMGVGAPDSLFDSVIRGIDMFDCVLPTRIARKGSLMTRFGRIVITNHKYKEDFSQLDEDLDDYASTHFTKAYLHHLFNTNELLAYNLASIHNLRYLLKLMEDMRTAIENDQLLDLREKVLEEYGYNRPNARLF

SEQ ID NO: 58355 - protein, 381 aa, Oenococcus sp.
  REGION 1..381: note = tr|A0A3T0TSA0|A0A3T0TSA0_9LACT Queuine tRNA-ribosyltransferase OS=Oenococcus sp. UCMA 16435; OX = 2259623 GN=tgt PE=3 SV=1
MIKDPVTYELLHVDKHTGARRGVIHTPHGDWQTPMFMPVGTQATVKSLQPRELKEIGSQFILGNTYHLWIRPGDDLIAKAGGLHKFMDWDQAILTDSGGFQVFSLADSRSITEKGVTFKNNIDGSTMFLSPEVAMQIQNNLGADIIMQLDEAVPYFETYEYVKKSTERSARWAQRALTAHKCSDQQALFGIVQGAGFRKLRENSAKDLASLDLPGYAIGGLSVGESKIEMNRVLDFTTQWLPENKPRYLMGVGAPDSLFDSVIRGIDMFDCVLPTRIARKGSLMTRFGRIVITNHKYKDDFSQLDENLDDYASTHFTKAYLHHLFNTNELLAYNLASMHNLRYLLKLMEDMRTAIENDQLLDLKEKILEEYGYNKPNARLF

SEQ ID NO: 58356 - protein, 381 aa, Oenococcus sp.
  REGION 1..381: note = tr|A0A484HE69|A0A484HE69_9LACT Queuine tRNA-ribosyltransferase OS=Oenococcus sp. WK4 OX=1806810; GN = tgt PE=3 SV=1
MTKLPVTYELLHVDKHTGARRGVIHTPHGDWQTPMFMPVGTQATVKSVQPRELKEIGSQFILGNTYHLWIRPGDDLIAKAGGLHKFMDWDQAILTDSGGFQVFSLADSRSITEKGVTFKNNIDGSTMFLSPEVAMKIQNNLGADIMMQLDEAVPYFESYDYIKQSTERSARWAQRALKAHKKADSQALFGIVQGAGFKKIRENSAKDLVSLGLPGYAIGGLSVGESKAEMNRVLDFTTQWLPENKPRYLMGVGAPDSLFDSVIRGIDMFDCVLPTRIARKGSLMTRFGRIVITNHKYKEDFSQLDEDLDDYASTHFTKAYLHHLFNTNELLAYNLASIHNLRYLLKLMEDMRTAIENDQLLDLREKVLEEYGYNRPNARLF

SEQ ID NO: 58357 - protein, 390 aa, unidentified
  source 1..390: note = Oharaeibacter diazotrophicus
  REGION 1..390: note = tr|A0A4R6RJB1|A0A4R6RJB1_9RHIZ Queuine tRNA-ribosyltransferase OS=Oharaeibacter diazotrophicus; OX = 1920512 GN=tgt PE=3 SV=1
MTEDTTGADGGESAARPFSFRLLATDGTARRGEITTPHGVVRTPAFMPVGTQGTVKAMFMDDVRATGADVVLGNTYHLMLRPGAERVAALGGLHRFANWPHTILTDSGGFQVMSLAQLRKLDETGVTFQSHIDGRRYELTPERSIEIQGLLGSDIQMQLDECVRLPAPPAEVERGMRLSLRWADRSRRAFEAMGGPGKGQGLYGIVQGGDVPALRAESARALAAMPFEGYSVGGLAVGEPQAVMLAMIEVVEPLLPVDKPRYLMGVGTPDDILESVARGIDQFDCVMPTRAGRHGLAYTRFGKLNFRNARHADDPRPIDPESSCPAARDYSRAYLHHLVRTGEALGAMLLTWVNVDYYQRLMQGARDAIEAGRYADYVAETKDGWRRGEG

SEQ ID NO: 58358 - protein, 376 aa, Ohtaekwangia koreensis
  REGION 1..376: note = tr|A0A1T5IMZ1|A0A1T5IMZ1_9BACT Queuine tRNA-ribosyltransferase OS=Ohtaekwangia koreensis; OX = 688867 GN=tgt PE=3 SV=1
MKFQLTATDPKSSARAGVLQTDHGEIQTPIFMPVGTAGSVKAVHQRELELDIQAQIILGNTYHLYLRPGLGILEKAGGLHKFNGWSRPILTDSGGYQVYSLAANRKIVDEGVTFKSHIDGSKHHFTPENVMDIQRTIGADIIMAFDECTPYPCEYAYAKSSMQLTHQWLKRCVDRIQSTEPKYGYEQALFPIVQGSVYKDLREQSAGFIASQNQQGNAIGGLSVGEPHEDMYAMTSLVCSILPKEKPRYLMGVGTPENILECIALGIDMFDCVMPTRNARNGMLFTTEGIINIRNEKWKDDLSPIDAALGGYVSTFHSKAYLRHLIINKEILGAQIASIHNLTFYLWLVKEARKQIEAGTFAAWKNKMVKTVSQRL

SEQ ID NO: 58359 - protein, 366 aa, unidentified
  source 1..366: note = Okeania hirsuta
  REGION 1..366: note = tr|A0A3N6R8A5|A0A3N6R8A5_9CYAN Queuine tRNA-ribosyltransferase OS=Okeania hirsuta OX=1458930; GN = tgt PE=3 SV=1
MSQNFSFHFQACCSNTKARAGVFLTPHGSVDTPRFMPVGTLATVKTLTPTQLEKAGAQMILANTYHLHLQPGESIIAGAGGLHKFMAWSGPILTDSGGFQVFSLGEIRTISETGVKFRSPRDGSIIDITPERSIQIQNELGADVIMAFDECPPYPASREEVELATNRTYRWLKRCIEAHQRQDQALFGIVQGGVYPDLRSVAARQLVDLDLPGYAIGGVSVGEPGELIDDIVKVTAPLLPEDKPRYLMGVGTYREMVRAIASGIDLFDCVIPTRLGRHGVALVRGERWNLKNAKFREDYTPLDESCPCYCCQNFSRAYLAHLVRAKESLGYTLLSLHNVTELIRFTQRIRDAILGDRFTTEFAGWL

SEQ ID NO: 58360 - protein, 373 aa, unidentified
  source 1..373: note = Olavius algarvensis
  REGION 1..373: note = tr|A0A3P5VDD9|A0A3P5VDD9_9SPIR Queuine tRNA-ribosyltransferase OS=Olavius algarvensis spirochete endosymbiont OX=260710 GN=tgt PE=3 SV=1
MLEIVANDKDCSARTGTLHLPRGDVEIPTFLPVGTNGTVKAIQHSTLRHIGYSLILSNTYHLYLRPGVQVIEKYGGLHNFSSWNGSILTDSGGFQVFSLASFRKIARDGVAFTSHIDGSRHFLTPESVVDIQVALGSDIQMQLDVCTAPGIEADEAREAVELTALWAKRAKQRYLEHSASSRGYLFGIVQGNFFKELRVLSSSLLSELDLPGYAIGGLSVGEKPEVFKEFLGYTAPLLPRDKPRYIMGIGTPEYMLESIEEGIDFFDCAYPTRVARNGTCFTRFGMINVKNSQFKDDVRPIDTECICPACAHYSRGYLRHLFVAKEILGPMLLTHHNLQFLFTMMEEARGAIRNGTFLGFKTAFLERFGTVDK

SEQ ID NO: 58361 - protein, 374 aa, unidentified
  source 1..374: note = Oleiagrimonas soli
  REGION 1..374: note = tr|A0A099CYE2|A0A099CYE2_9GAMM Queuine tRNA-ribosyltransferase OS=Oleiagrimonas soli OX=1543381; GN = tgt PE=3 SV=1
MSSLKFDLQATDGAARRGRMTFPRGSVETPAFMPVGTYGTVKAMTPRDLTEIGAQMILGNTFHLFLRPGLDVIGDFGGLHRMIGWDGPILTDSGGFQVFSLAHKRKITEEGVTFASPVDGSKVFLSPEESMRIQRVLDSDVAMIFDECTPYPATEKQAADSMELSLRWAARSRRAFDDLGNPNNLFGIVQGGVYESLRTRSAKGLIDIGFDGYAVGGLAVGEPEDERNRTLDHTVPLLPTDKPRYLMGVGRPEDIVEAVRRGIDMFDCVMPTRNARNGFLFTRGGTLRIRNAKFARDTRVIEEGCDCYTCRSGFSRAYLRHLDRCNEMLGSQLATMHNLRHYQRLMQGLRDAIAAGALDDFVAGFYAERRAGAA

SEQ ID NO: 58362 - protein, 374 aa, unidentified
  source 1..374: note = Oleiagrimonas sp.
  REGION 1..374: note = tr|A0A328SV73|A0A328SV73_9GAMM Queuine tRNA-ribosyltransferase OS=Oleiagrimonas sp. MCCC 1A03011; OX = 1926883 GN=tgt PE=3 SV=1
MPSLKFDLQATDGAARRGRMTFPRGTVETPAFMPVGTYGTVKAMTPRDLTEIGAQMILGNTFHLFLRPGLDVIGDFGGLHRMIGWDGPILTDSGGFQVFSLAHKRKITEEGVTFASPVDGSKVFLSPEESMRIQHVLDSDVAMIFDECTPYPATEKQAADSMELSLRWAERSRRAFDELGNPNNLFGIVQGGVYEALRTRSARGLVDIGFDGYAVGGLAVGEPEDERNRTLEHTVPLLPADKPRYLMGVGRPQDIVEAVRRGIDMFDCVMPTRNARNGFLFTRTGTLRIRNAKFARDTRVIEEGCDCYTCRSGFSRAYLRHLDRCNEMLGSHLATMHNLRHYQRLMQGLRDAIAAGGLEDFVADFYAALRSGAD

SEQ ID NO: 58363 - protein, 388 aa, Oleibacter marinus
  REGION 1..388: note = tr|A0A1N7KNH3|A0A1N7KNH3_9GAMM Queuine tRNA-ribosyltransferase OS=Oleibacter marinus OX=484498; GN = tgt PE=3 SV=1
MTRECFMQFELHGTDTPKDEGGSFARRGTITFPRGKVETPAFMPVGTYGSVKGLNPEQVEALGAHIILGNTFHLMLRPGTEIIKAHGDLHDFIGWDKPILTDSGGFQVFSLGDMRKITEEGVTFASPVNGDKVLMTPESSMEVQRDLGSDVVMIFDECTPYPATTQEAADSMRMSLRWAQRSKDAHGDNPSALFGIIQGGMYEDLRDESLQGLMDIGFDGYAIGGLSVGEPKDDMMRILRHTAPKMPEDKPRYLMGVGKPEDLVEGVRRGVDMFDCVMPTRNARNGHLFTHNGVVKLRNAANKTDTGPIDAECDCYTCKNYSRAYLHHLDKCGEILGATLNTIHNLHYYQTLMAGLRSALEEGTFAAFVSDFYARRGREVPPLDTPAS

SEQ ID NO: 58364 - protein, 80 aa, Oleibacter sp.
  REGION 1..80: note = tr|A0A2D8A7J0|A0A2D8A7J0_9GAMM tRNA guanosine(34) transglycosylase Tgt (Fragment) OS=Oleibacter sp.; OX = 2024845 GN=tgt PE=4 SV=1
FSPCRNFSRAYLHHLDKCKEILGATLNSIHNLHYYQTLMAGLRRSLEEGTFAGFVDEFYAKRGMKTPPLDDSPATEESAS

SEQ ID NO: 58365 - protein, 95 aa, Oleibacter sp.
  REGION 1..95: note = tr|A0A2D8AEL1|A0A2D8AEL1_9GAMM tRNA guanosine(34) transglycosylase Tgt (Fragment) OS=Oleibacter sp.; OX = 2024845 GN=tgt PE=4 SV=1
MTRECFMKFELISETEDSGSKARRGQLTFPRGTIQTPAFMPVGTYGTVKGLTPEQIKELGAEIILGNTFHLMLRPGTEIVKLHGDLHDFIGWDKP

SEQ ID NO: 58366 - protein, 371 aa, Oleiphilus messinensis
  REGION 1..371: note = tr|A0A1Y0IAT6|A0A1Y0IAT6_9GAMM Queuine tRNA-ribosyltransferase OS=Oleiphilus messinensis; OX = 141451 GN=tgt PE=3 SV=1
MQFQVSGTDGQARRGQLTFERGTIETPAFMPVGTYGTVKGMLPRDILEIGAEIILGNTFHLMLRPGTEIIRAHGDLHDFMQWDKPILTDSGGFQVFSLGELRKISEQGVKFKSPIDGSPVELTPEKSMEVQAALGSDIVMIFDECTPYPATREEAKSSMELSLRWAKRSKEAHGESKSALFGIIQGGMFEDLRDISLEGLAEIGFDGYAIGGLSVGEPKGEMLKVLDSVTGKMPADHPRYLMGVGKPEDIVEAVRRGVDMFDCVMPTRNARNGHLFTSTGVIKIRNSVHKSDPAPLDAECDCYTCQQFSRSYLHHLDKCGEILGSQLNTIHNLRFYQNLMSGLRQAIEQGKLSDFVDDFYAKQGKQSPPLT

SEQ ID NO: 58367 - protein, 378 aa, Oleiphilus messinensis; identical to SEQ ID NO: 58316
  REGION 1..378: note = tr|A0A1H5WT75|A0A1H5WT75_9GAMM Queuine tRNA-ribosyltransferase OS=Oleiphilus messinensis; OX = 141451 GN=tgt PE=3 SV=1

SEQ ID NO: 58368 - protein, 378 aa, Oleispira antarctica
  REGION 1..378: note = tr|R4YPT8|R4YPT8_OLEAN Queuine tRNA-ribosyltransferase OS=Oleispira antarctica RB-8; OX = 698738 GN=tgt PE=3 SV=1
MTRKCFMDFELKGTSGEARRATLTFPRGKVETPAFMPVGTYGTVKGMTPQQIHDIGADIILGNTFHLMLRPGTEIIKMHGDLHDFTQWDKPILTDSGGFQVFSLGKMRKITEEGVAFRSPVNGEKVFMSPESSMQVQRDLGSDVVMIFDECTPHPATPKEAADSMRLSLRWAQRSKDSHGDSPSALFGIIQGGMYEELRDESLAKLTDINFDGYAIGGLSVGEPKEDMMRILSHLTHQMPADKPRYLMGVGKPEDLVEGVRRGVDMFDCVMPTRNARNAHIFTHTGVLKLRNATHKTDIRPLDDQCDCYTCKNFSRAYLHHLDKCKEILGSTLNTIHNLRYYQILMAGMRKSLDEGTFDQFVIDFYAARDLEVPPLEP

SEQ ID NO: 58369 - protein, 375 aa, unidentified
  source 1..375: note = Oleomonas sp.
  REGION 1..375: note = tr|A0A418WBE2|A0A418WBE2_9PROT Queuine tRNA-ribosyltransferase OS=Oleomonas sp. K1W22B-8; OX = 2320859 GN=tgt PE=3 SV=1
MTATDFRFHVEARDGAARVGNIRTGRGVIRTPAFMPVGTAATVKAVPPEAVRKAGADILLGNTYHLMLRPGAERVAGLGGLHKFMNWPHPILTDSGGFQVMSLASLRKITEEGVAFRSHHDGSAHAMSPERSIEIQRLLDSDIAMQLDECVALPASREETARAMQLSLRWARRSKAAFEASAPPPGRALFGIVQGGTEQDLRQESAQGLIEIGFPGYALGGLAVGEPQAVMFEVIAATTPHLPQERPRYLMGVGKPADIVGAVARGIDMFDCVIPTRSGRNGQAFTRQGAVNIRNAKYADEPRPLDDKCRCPACRDYSAAYIHHLVRSSEILGATLMTAHNLTYYQDLMAGLRTAIRRGQLAAFVADFETGAADY

SEQ ID NO: 58370 - protein, 379 aa, Oligella ureolytica
  REGION 1..379: note = tr|A0A378XI46|A0A378XI46_9BURK Queuine tRNA-ribosyltransferase OS=Oligella ureolytica OX=90244; GN = tgt PE=3 SV=1
MSALEFKLLNTQGKARRASIKLNHGTVQTPMFMPVGTYGSVKAMLPHELEEVGSQVILGNTFHLWLRPGTEIIKKFGGLHDFMQWQKPILTDSGGFQVFSLSNLRSKLTEEGVRFSSPLNGEKLFLDPEESMRIQTVLNSDIAMVLDECTPYEIDGRPATHEEAARSMRLSLRWAKRSKTAFTELENPNALFGIVQGGMFEDLRQESLEGLVDIGFHGYAIGGLSVGEPKEDMVRILEHIAHKLPDNAPRYLMGVGTPEDLVYAVSQGVDMFDCVMPTRNARNGWLFTRFGDIKIRNARYKDDTKPLDPSCTCHSCQHFSRAYLHHLHRANEITGARLNTLHNLHYYLTLMEEMRNALEHNQFDQWQEQFHKDRAKGIE

SEQ ID NO: 58371 - protein, 379 aa, Oligella urethralis
  REGION 1..379: note = tr|A0A095ZAU5|A0A095ZAU5_9BURK Queuine tRNA-ribosyltransferase OS=Oligella urethralis DNF00040; OX = 1401065 GN=tgt PE=3 SV=1
MSALEFTLLNTHGKARRAAIKLNHGTVQTPMFMPVGTYGSVKAMLPHELESIGSQVILGNTFHLWLRPGTEVIQKFGGLHDFMQWKKPILTDSGGFQVFSLSNLRSKLHEEGVKFSSPLNGEKLFLSPEESMRIQTALNSDIAMVLDECTPYLIDGRPATHEEAARSMRLSLRWAKRSKNAFNELANSNALFGIVQGGMFEDLRKESLDGLVDIGFHGYAIGGLSVGEPKEDMQRVLQHVAHQLPDNAPRYLMGVGTPEDLVYAVSQGVDMFDCVMPTRNARNGWLFTRFGDLKIRNARYKDDMRPLDPSCSCHTCSHFSRAYLHHLHRANEITGARLNTLHNLHYYLNLMQEIREALEQNRFDQWQAQFHKDRAKGIE

SEQ ID NO: 58372 - protein, 379 aa, Oligella urethralis
  REGION 1..379: note = tr|A0A2N6QFD6|A0A2N6QFD6_9BURK Queuine tRNA-ribosyltransferase OS=Oligella urethralis OX=90245; GN = tgt PE=3 SV=1
MSALEFTLLNTHGKARRAAIKLNHGTVQTPMFMPVGTYGSVKAMLPHELESIGSQVILGNTFHLWLRPGTEVIQKFGGLHDFMQWKKPILTDSGGFQVFSLSNLRSKLHEEGVKFSSPLNGEKLFLSPEESMRIQTALNSDIAMVLDECTPYLIDGRPATHEEAARSMRLSLRWAKRSKNAFNELANSNALFGIVQGGMFEDLRKESLDGLVDIGFHGYAIGGLSVGEPKEDMQRVLQHIAHQLPDNAPRYLMGVGTPEDLVYAVSQGVDMFDCVMPTRNARNGWLFTRFGDLKIRNARYKDDTRPLDPSCSCHTCSHFSRAYLHHLHRANEITGARLNTLHNLHYYLNLMQEIREALEQNRFDQWQAQFHKDRAKGIE

SEQ ID NO: 58373 - protein, 377 aa, Oligotropha carboxidovorans
  REGION 1..377: note = tr|B6JFC1|B6JFC1_OLICO Queuine tRNA-ribosyltransferase OS=Oligotropha carboxidovorans (strain ATCC 49405 / DSM 1227 / KCTC 32145 / OM5); OX = 504832 GN=tgt PE=3 SV=1
MSLPNSFRLLAADGTARTGVLETPHGVVRTPAFMPVGTAGAMKGIHWREIRESGADIVLGNTYHLMLRPTAERIAALGGLQKFTGWNGPMLTDSGGFQVMSLAKLRKVTEQGVRFKSHIDGAVLDLSPERAIEVQRLFGSDIAMQLDECVRLPASRDEVDRAMQLSLRWAERCKRAFEGAPQGHMLFGIVQGGDVAKLRRQSAAGLGEIGFHGYAIGGLAVGEPQDVMLAMIEEAAPLLPQDRPRYLMGVGTPDDMIEAVKRGIDMFDCVLPTRNGRHGHAFTRRGVINLRNARHADDPRPLDEESSWPPARSYSRAYLHHLVKAGEALGAMLLSEINIAYFQSLMAGVREAIAAGQFADFRAATKAGWAAGDLPPR

SEQ ID NO: 58374 - protein, 376 aa, Olivibacter sp.
  REGION 1..376: note = tr|A0A5C0ZHS8|A0A5C0ZHS8_9SPHI Queuine tRNA-ribosyltransferase OS=Olivibacter sp. LS-1 OX=2592345; GN = tgt PE=3 SV=1
MKFTLQSTDKNSKARAGELVTAHGTIQTPIFMPVGTAGSVKGVHQHELKQDIQAQIILGNTYHLYLRPGLDVIQAAGGLHKFNGWDKPILTDSGGYQVYSLTEVRKIKEEGVTFRSHIDGSKHLFTPENVMDTQRIIGADIIMAFDECTPYPCDYRYAKRSLDMTHRWLKRCCDRFDNTDPLYGYEQTLFPIVQGSVYRDLREKSAETIASFGRDGNAIGGLSVGEPAEEMYAMTEVVNAILPFDKPRYLMGVGTPINILENIALGIDMFDCVMPTRNARNGMLFTRNGIINIKNKKWEADFSPIDPDSDLHTDLFYSKAYLRHLIHSKELLGAQIATLHNLHFYLWLVQEARTKILEGTFYEWKNKMVKQLGERL

SEQ ID NO: 58375 - protein, 376 aa, Olleya aquimaris
  REGION 1..376: note = tr|A0A327R9Z1|A0A327R9Z1_9FLAO Queuine tRNA-ribosyltransferase OS=Olleya aquimaris OX=639310; GN = tgt PE=3 SV=1
MTFDLKAKDTQSNARAGVITTDHGVIETPIFMPVGTVASVKGVHQRELKEDINPDIILGNTYHLYLKPQTEILEKAGGLHKFMNWDRNILTDSGGYQVYSLSANRKIKEEGVKFKSHIDGSYHTFTPENVMEIQRSIGADIIMAFDECTPYPCDYNYARRSMHMTHRWLDRCINHLEKVPFKYDYSQAFFPIVQGSTYKDLRKQSAEYIANAGAVGNAIGGLSVGEPAEEMYAMTEVVTDILPEDKPRYLMGVGTPINILENIALGVDMFDCVMPTRNARNGMLFTAHGTINIKNLKWRDDFSPIDEMGITFVDTEYSKAYLRHLFTVNELLGKQIATIHNLGFYLWLTREARKHILAGDFRTWKDQMVKQMDKRL

SEQ ID NO: 58376 - protein, 392 aa, unidentified
  source 1..392: note = Olleya namhaensis
  REGION 1..392: note = tr|A0A1I3NTS2|A0A1I3NTS2_9FLAO Queuine tRNA-ribosyltransferase OS=Olleya namhaensis OX=1144750; GN = tgt PE=3 SV=1
MCFSYIYLLAEDLRDIMTFDLKAKDTQSNARAGVMTTDHGVIETPIFMPVGTVGSVKGVHQRELKNDINPDIILGNTYHLYLKPQIDVLEKAGGLHKFMNWDRNILTDSGGYQVYSLSGNNKIKEEGVKFKSHIDGSYHMFTPENVMEIQRSIGADIIMAFDECTPYPCDYNYARRSMHMTHRWLERCITHLEKTPFKYDYSQSFFPIVQGSTYKDLRKQSAEYIAGVGAEGNAIGGLSVGEPAEEMYAMTEVVTDILPWDKPRYLMGVGTPINILENIALGVDMFDCVMPTRNARNGMLFTAYGSINIKNLKWREDFSPIDEMGITFVDTEYSKAYLRHLFNVNELLGKQIATIHNLGFYLWLTREARKHIIAGDFKAWKDKMVKQMNNRL

SEQ ID NO: 58377 - protein, 376 aa, Olleya sp.
  REGION 1..376: note = tr|A0A2K8X4D7|A0A2K8X4D7_9FLAO Queuine tRNA-ribosyltransferase OS=Olleya sp. Bg11-27 OX=2058135; GN = tgt PE=3 SV=1
MTFDLKAKDTQSNARAGVITTDHGVIETPIFMPVGTVGSVKGVHQRELKDDINPDIILGNTYHLYLKPQIDVLEKAGGLHKFMNWDRNILTDSGGYQVYSLSGNNKIKEEGVKFKSHIDGSYHMFAPENVMEIQRSIGADIIMAFDECTPYPCDYNYARRSMHMTHRWLERCIAHLEKTPLKYDYSQAFFPIVQGSTYKDLRKQSAEYIAGVGAEGNAIGGLSVGEPADEMYAMTEVVTDILPWDKPRYLMGVGTPINILENIALGVDMFDCVMPTRNARNGMLFTAHGSINIKNLKWREDFSPIDEMGITYVDTEYSKAYLRHLFNVNELLGKQIATIHNLGFYLWLTREARKHIIAGDFRAWKDKMVKQMDNRL

SEQ ID NO: 58378 - protein, 376 aa, Olleya sp.
  REGION 1..376: note = tr|A0A559RHS3|A0A559RHS3_9FLAO Queuine tRNA-ribosyltransferase OS=Olleya sp. Hel_I_94 OX=1250001; GN = tgt PE=3 SV=1
MTFDLKAKDTQSNARAGVITTDHGVIETPIFMPVGTAGTVKGVHQRELKNDINPDIILGNTYHLYLKPQIDVLEKAGGLHKFMNWDRNILTDSGGYQVYSLSGNNKIKEEGVKFKSHIDGSYHTFTPENVMEIQRSIGADIIMAFDECTPYPCEYNYARRSMHMTHRWLERCLTHLDKTPLKYDYSQSFFPIVQGSTYKDLRKQSAEYIAGVGAEGNAIGGLSVGEPAEEMYAMTEVVTDILPWDKPRYLMGVGTPINILENIALGVDMFDCVMPTRNARNGMLFTAFGSINIKNLKWRDDFSPIDEMGITYVDTEYSKAYLRHLFNTNELLGKQIATIHNLGFYLWLTREARKHILAGDFRTWKDKMVKQMNNRL

SEQ ID NO: 58379 - protein, 380 aa, Olsenella profusa
  REGION 1..380: note = tr|U2UYL2|U2UYL2_9ACTN Queuine tRNA-ribosyltransferase OS=Olsenella profusa F0195; OX = 1125712 GN=tgt PE=3 SV=1
MGEHRWFTFDVVATDSATHARAGVLHTPHGDIPTPIFMPVGTKATVKGILPGQLGELGAKIILANAYHLSQRPGADLVAEMGGLHDFMRWHGPILTDSGGFQVFSHGDFTKLTDDGVTFRTVDYDGSYVHWTPEDNMEIAQRLGADIVMQLDQCPGYPAPRPLVERAVELSGMWAERCFRSHDRTDQALFGIVQGGMHLDLRLRSLRHLEECGNFPGYGIGGYSVGEDHQTMFETLAPLVSEHMPQGKPRYLMGVGNPTTLVHGVACGVDMFDCVLPTRTARMGTAFSSEGRLNLKNARFAHDRGPLDDACTCPVCMGGYTRAYLHHLVRQREMLGPILLSLHNLYYLLDLMRRAREAIISGRYGAFVSTWEGLPAAQDW

SEQ ID NO: 58380 - protein, 379 aa, unidentified
  source 1..379: note = Olsenella scatoligenes
  REGION 1..379: note = tr|A0A100YUF5|A0A100YUF5_9ACTN Queuine tRNA-ribosyltransferase OS=Olsenella scatoligenes; OX = 1299998 GN=tgt PE=3 SV=1
MEPKWFTYDIVAEDPATHARAGVLHTPHGDVPTPIFMPVGTKGTVKGVLVPQLKELGAKIVLANTYHLAMRPGADLVAEMGDLHGFTRWDGPILTDSGGFQVFSHEEFCKLSADGVRFRAVDYDGRWFTWTPEENMDIAQKLGADIVMQLDQCVGYPAPRSKVERAVELSAMWAERCWKAHTRTDQALFGIVQGGMDLTLRRRSLQHLLDVGDFPGFGIGGYSVGEDHETMFESLAPLASQFMPREKPRYLMGVGNPTTLVRGVAYGIDMFDCVLPTRTARMGTAFSSEGKLNLRHARFTHDAGPLDPACSCPVCQGGYSRAYLHHLVRQKEMAGSILLSMHNLYFLLDLMRRARESIIAGTYGEFVSRWMDSPAAADW

SEQ ID NO: 58381 - protein, 379 aa, Olsenella sp.
  REGION 1..379: note = tr|A0A1Y4DUW8|A0A1Y4DUW8_9ACTN Queuine tRNA-ribosyltransferase OS=Olsenella sp. An270 OX=1965615; GN = tgt PE=3 SV=1
MDQTLFTYDIVAEDVGTHARAGLLHTPHGDVPTPIFMPVGTKATVKGIMPSTLREIGTKILLANTYHLSMRPGADLVAEMGGLHGFMRWDGPILTDSGGFQVFSHEEFCRLSDDGVRFRAVDYDGKWVSWTPEENMSIAQKLGADIVMQLDQCVGYPASRAKVARSVELSSRWAERCYAAHTRPDQALFGIVQGGMHLDLRLRSLRHLEEVGDFPGYGIGGYSVGEDHETMFETLAPLVSEHMPRNKPRYLMGVGNPTTLVRAVACGVDMFDCVLPTRTARTGSAFTSEGRLNFRHARFAHDARPIDETCTCPACSQGFSRAYLHHLVRQHEMLASVLISQHNIHFLLDLMRRAREAVVAGTYAAFLDDWMSSPAARDW

SEQ ID NO: 58382 - protein, 379 aa, Olsenella sp.
  REGION 1..379: note = tr|A0A1I0AF49|A0A1I0AF49_9ACTN Queuine tRNA-ribosyltransferase OS=Olsenella sp. KH3B4 OX=1855394; GN = tgt PE=3 SV=1
MEPQWFSYDIVAEDPATHARAGVLHTPHGDVPTPIFMPVGTKGTVKGVLVPQLRELGAKIVLANTYHLAMRPGADLVAEMGGLHGFTRWDGPILTDSGGFQVFSHEEFCKLSADGVRFRAVDYDGRWFTWTPEENMDIAQKLGADIVMQLDQCVGYPAPRSKVERAVELSAMWAERCWKAHTRPDQALFGIVQGGMDLTLRRRSLQHLLDVGDFPGFGIGGYSVGEDHETMFESLAPLASQYMPREKPRYLMGVGNPTTLVRGVACGIDMFDCVLPTRTARMGTAFSSEGRLNLRHARFAHDAGPLDPACTCPVCQGGYTRAYLHHLVRQKEMAGSILLSMHNLYFLLDLMRRARESIIAGTYGEFVSRWMDSPAAADW

SEQ ID NO: 58383 - protein, 407 aa, Olsenella uli
  REGION 1..407: note = tr|X8HRG1|X8HRG1_9ACTN Queuine tRNA-ribosyltransferase OS=Olsenella uli MSTE5 OX=1190621; GN = tgt PE=3 SV=1
MRGVAVSGRVASNTTRLEGSTVNDTHTNPRESWFTYDIVAEDPLTHARAGVLHTPHGDVPTPIFMPVGTKATVKGLLPGQLEEIGTKILLANTYHLAMRPGADLVVEMGGLHEFMQWKGPILTDSGGFQVFSHGDFTKLTDDGVTFRTVDYDGSYVTWTPERNMEIAQKLGADIAMQLDQCPGYPATRAFVERAVELSSMWAERCWKAHGRDDQALFGIVQGGMHLDLRLRSLAHLEECGDFPGYGIGGYSVGEDHETMFETLEPLVSDYMPRDKPRYLMGVGNPTTLVRGVSCGIDMFDCVLPTRTARMGCAFTGQGRVNLRHAAHTHSHDPLDPDCACPVCTGGYTRAYLHHLVRQREMVGSILLSLHNLHYLLDLMRRVRQAIMEGRYGEFVSAWGDLPAANDW

SEQ ID NO: 58384 - protein, 386 aa, Olsenella uli
  REGION 1..386: note = tr|E1QZN2|E1QZN2_OLSUV Queuine tRNA-ribosyltransferase OS=Olsenella uli (strain ATCC 49627 / DSM 7084 / CIP 109912 / JCM 12494 / NCIMB 702895 / VPI D76D-27C) OX=6331 47 GN=tgt PE=3 SV=1
MNDTHTNPRESWFTYDIVAEDPLTHARAGVLHTPHGDVPTPIFMPVGTKATVKGLLPGQLEEIGTKILLANTYHLAMRPGADLVEEMGGLHEFMQWKGPILTDSGGFQVFSHGDFTKLTDDGVTFRTVDYDGSYVTWTPERNMEIAQKLGADIAMQLDQCPGYPATRAFVERAVELSSMWAERCWKAHGRDDQALFGIVQGGMHLDLRLRSLAHLEECGDFPGYGIGGYSVGEDHETMFETLEPLVSDYMPRDKPRYLMGVGNPTTLVRGVSCGIDMFDCVLPTRTARMGCAFTGQGRVNLRHAAHTHSHDPLDPDCACPVCTGGYTRAYLHHLVRQREMVGSILLSLHNLHYLLDLMRRARQAIMEGRYGEFVSAWGDLPAANDW

SEQ ID NO: 58385 - protein, 385 aa, Olsenella umbonata
  REGION 1..385: note = tr|A0A1H1LRC9|A0A1H1LRC9_9ACTN Queuine tRNA-ribosyltransferase OS=Olsenella umbonata OX=604330; GN = tgt PE=3 SV=1
MSESQAPESRWFTYDIVAEDPTTHARAGVLHTPHGDIPTPIFMPVGTKATVKGILPSQLERLGAKIILANTYHLANRPGEDLVAEMGGLHEFMRWRGPILTDSGGFQVFSHGEFTRLTNDGVEFRTVDYDGQHVFWTPEKNMEIAQKLGADIVMQLDQCPGYPSPRPFVERAVELSSMWAERCFRAHTRTDQALFGIVQGGMDLDLRLRSLRHLEECGDFPGYGIGGYSVGEDHETMFESLAPLASEYMPKGKPRYLMGVGNPTTLVHGVECGVDMFDCVLPTRTARMGSAFSSEGRLNFRNARFTHDHGPIDPDCTCPVCAGGYTRAYIHHLVKQKEMVGSILLSLHNVYYLLELMRRARQAIVEHRYGQFVSEWDQLPAAKDW

SEQ ID NO: 58386 - protein, 385 aa, Olsenella umbonata
  REGION 1..385: note = tr|A0A1G6LV37|A0A1G6LV37_9ACTN Queuine tRNA-ribosyltransferase OS=Olsenella umbonata OX=604330; GN = tgt PE=3 SV=1
MSESQTPESRWFTYDIVAEDPTTHARAGVLHTPHGDIPTPIFMPVGTKATVKGILPSQLERLGAKIILANTYHLANRPGEDLVAEMGGLHEFMRWRGPILTDSGGFQVFSHGEFTRLTNDGVEFRTVDYDGQHVFWTPEKNMEIAQKLGADIVMQLDQCPGYPSPRPFVERAVELSSMWAERCFRAHTRTDQALFGIVQGGMDLDLRLRSLRHLEECGDFPGYGIGGYSVGEDHETMFESLAPLASEYMPKGKPRYLMGVGNPTTLVHGVECGIDMFDCVLPTRTARMGSAFSSEGRLNFRNARFTHDHGPIDPDCTCPVCTGGYTRAYIHHLVKQKEMVGSILLSLHNVYYLLELMRRARQAIVEHRYGQFVSEWDQLPAAKDW

SEQ ID NO: 58387 - protein, 379 aa, unidentified
  source 1..379: note = Unknown
  REGION 1..379: note = tr|A0A0R2XQY6|A0A0R2XQY6_9GAMM Queuine tRNA-ribosyltransferase OS=OM182 bacterium BACL3 MAG-120531-bin86 OX=1655628 GN=tgt PE=3 SV=1
MSFDIAATDGKARTGKMCFPRGEVATPAFMPVGTYGTVKGLTPEQVRGTGADILLGNTFHLMLRPGTETINVHGDLHDFIGWDRPILTDSGGFQVFSLGEMRKINEEGVTFSSPVDGAKIFLGPESAIEVQHALGSDIIMVFDECTPYPATREQARESMELSMRWAGRCKEAHGEHESALFGIVQGGMYGDLREESLAGLVELGFDGYALGGLSVGEPKNEMREVIQHCGALLPAEKPRYLMGVGTPQDIVYAVTQGIDMFDCVMPTRNARNAHIFTSKGLLRLRNKRYRQDTKPLDENCGCYTCQNFSRAYLHHLDKCREMLGAQLNTIHNLHYYQDLMVGLRDAIAKGKLSEFVATFEENQQALQAESLALEAQAES

SEQ ID NO: 58388 - protein, 379 aa, unidentified; identical to SEQ ID NO: 58387
  source 1..379: note = Unknown
  REGION 1..379: note = tr|A0A0R2T2Y7|A0A0R2T2Y7_9GAMM Queuine tRNA-ribosyltransferase OS=OM182 bacterium BACL3 MAG-120920-bin41 OX=1655580 GN=tgt PE=3 SV=1

SEQ ID NO: 58389 - protein, 365 aa, unidentified
  source 1..365: note = Omnitrophica bacterium
  REGION 1..365: note = tr|A0A1G1K772|A0A1G1K772_9BACT Queuine tRNA-ribosyltransferase OS=Omnitrophica bacterium RIFCSPLOWO2_01_FULL_50_24 OX=1801829 GN=tgt PE=3 SV=1
MHKDPSCGARAGVVHTAHGTFETPVFMPVGTQGTVKSLAPDDLEEAGAQIILANAYHLYIRPGIDTIKLANGLHAFMGWQRPILTDSGGYQVFSLARLRGISEEGVRFHSHFDGREIFLTPETVIEAEEHLGSDIAMMFDECPPHDAARAHVEEAVHRTVRWAERAKRVHRRKEQLLFGIVQGGRFKDLRVQSLEETVKIGFDGYAIGGVSVGEPKPLMEEIVRAVAPLLPEEKPRYLMGVGTPLDLLWAVEAGIDMFDCVNPTRYGRNGCAFTHSGKVVVRNAEYARDQAPLDETCSCYTCRTFSRSYLRHLFNCEELLAYRLVTLHNVSFFISLVQSARRAIVNGEFVPFKNHFLSEYDESSR

SEQ ID NO: 58390 - protein, 372 aa, unidentified
  source 1..372: note = Omnitrophica bacterium
  REGION 1..372: note = tr|A0A1G1KSD5|A0A1G1KSD5_9BACT Queuine tRNA-ribosyltransferase OS=Omnitrophica bacterium RIFCSPLOWO2_12_FULL_44_17 OX=1801832 GN=tgt PE=3 SV=1
MSKTFELIKKDSETNARLGRVHTAHGTIETPVFMPVGTQGSVKTLTPKELEEVGAEIILGNAYHLYIRPGIDIIREIGGLHEFVSWRKPILTDSGGYQVFSLSRLRKITDEGVTFHSHFDGREIFLTPEEVIKAEERLGSDIAMIFDVCPPHGAGRPEVELAVRRTYDWAKRGKAAHHKNDQLLFGIIQGGRFPDLRRESLSQMCEIDFPGYAVGGVSVGESREEMGEVVYPLARLMPEDKPRYLMGVGTPIDFFWAIEAGMDMFDCVTPTRYARNGCAFTRAGKIVVRNSEYAKDKSPLDPKCLCYTCRNFSRAYLRHLFNCEEILGPRLVTYHNVFFFVSLVKEIREAIRNEKFLKFKNEFLSNYDENLR

SEQ ID NO: 58391 - protein, 396 aa, unidentified
  source 1..396: note = Unknown
  REGION 1..396: note = tr|A0A1G1N1J0|A0A1G1N1J0_9BACT Queuine tRNA-ribosyltransferase OS=Omnitrophica WOR_2 bacterium RIFCSPHIGHO2_02_FULL_45_21 OX=1801854 GN=tgt PE=3 SV=1
MSFTLLHQDSKTKARLGRLKTAHGLIQTPAFMPVGTQGTVKALSPGELLEAESQIILGNAYHLYLRPGLKIIKNSGGLHKFISWDKPILTDSGGYQVFSLAGFRKLSDEGVEFQSHLDGSRHFLTPEKVIEIENILGSDIMMPLDECVHYPCAYEDAKIAVHRTIDWAGRSKTVTGHRSQVTEINLNLRRKTSNMRPLLFGIIQGATYDDLRKQSAEQTVKIGFDGYAIGGLSVGEDKDLRYNIISFTLQFLPGDFARYLMGIGLPEDIVEAVKLGVDLFDCVIPTRYGRNGTAFTSEGKVVIRNALYADDLSPLDKDCDCYTCKNFSRSYIRHLFNTGEILGLRLVSFHNIYFYNHLLKAIRQAIKENRMEEFDLSQTYILEKKPETCNQKTDKT

SEQ ID NO: 58392 - protein, 349 aa, unidentified
  source 1..349: note = Unknown
  REGION 1..349: note = tr|A0A0S8IIE6|A0A0S8IIE6_9BACT Queuine tRNA-ribosyltransferase (Fragment) OS=Omnitrophica WOR_2 bacterium SM23_72 OX=1703777 GN=AMJ95_10030 PE=3 SV=1
MFFKLTRQDKFTRARLGKLITSRGEIATPCFMPVGTQGTVKALSVEELEEAKAQILLSNSYHLFLRPGVEVIRKAGSLHDFMSWKKPILTDSGGYQIFSLALLRKVSDPGVEFQSHIDGLKHFLTPEDVIKIQRDLGSDIIMPLDECVHYPCAKDHAEIAMRRTMDWARRSLAVERPRETQSLFGIIQGATYEDLRKICVEQMLDLDFDGYAIGGVSVGEPMNLRYNIVNVVVDLLPRHSPRYLMGVGLPQDIIEAVGAGVDMFDCVVPTRYGRNGTAFTSEGKITIRNAPYTEDFSPLDKNCACATCRNYSRAYLRHLFSSEEILGLRLVSLHNVYFYLELMQKIREA

SEQ ID NO: 58393 - protein, 714 aa, unidentified
  source 1..714: note = Opitutaceae bacterium
  REGION 1..714: note = tr|I6AXA0|I6AXA0_9BACT Queuine tRNA-ribosyltransferase OS=Opitutaceae bacterium TAV1; OX = 278956 GN=tgt PE=3 SV=1
MSRLRFTLENTAPGSQARAATFHTLHGPVKTPVFMPVGTQATVKSQTVETLKTAGASVLLANTYHLLLRPGPEVFEKFGGIHRFMNWDRPVLTDSGGFQIFSLPHSRAMNEEGARFQSYVDGACHLLSPESSIRMQKTIGSDIMMVLDQCIPSTAPHAQARAAMELTHRWAVRSLAARGDSPQALFGIVQGACHRDLREQSAAFLRELPFDGLAIGGLAVGETHDERYAFTGLVTACLPQNLPCYLMGVGTPLDILEAVHRGVDMFDCIIPSQVAGRGLAFTSHGRLQLRRTVYKFSEEPLDAACDCAACRSYSRAYLHHLVKADEHLGWHLLGLHNMTFYHRLIAEMRTRILDGTFAGYYESKRIDLTRTDEDHPGHAPAKPRNKNRQRHRRLGDYEVQISPQGFSSIRQTSSGEVMHSVTAPDDEAQRLYIDQSCLTARLGVPKQPEESGAGIPPIMWHGHPAHEVARASSPCSAGFPPSLVIWDVGLGAAHNAMAAIRCFEQLQDPRPLRLVSFERDLDPLRLAFKNAGRHFPHLRHPAPYHLLEYGRWEPPSGLLHWELQKGDFLETLDAAPPPDVIFYDPFSAKTDSPLWTAAAFGRVFARCTANPNPAGAELYTYSNATAVRVALLTAGFFVAAGAGTGPKADTTIAFTTTDGAAAHPLSPRLLGPEWLARWRRSHSQFPPALADAEKPAFARRIETHPQFADASVSG

SEQ ID NO: 58394 - protein, 377 aa, unidentified
  source 1..377: note = Opitutaceae bacterium
  REGION 1..377: note = tr|A0A2T6DZC1|A0A2T6DZC1_9BACT Queuine tRNA-ribosyltransferase OS=Opitutaceae bacterium EW11; OX = 2161865 GN=tgt PE=3 SV=1
MPAHFQLLKTDTATAARRGRLRTRHGVIETPIFMPVGTQGTVKAVTPAHLKEIGAQIILGNTYHLNLRPGSDLIRELGGLHGFMGWNGPILTDSGGFQVFSLAKLRDIRDDGVAFQSHIDGASLFLGPREVMKIQENLGSDIAMVLDECPPWPCERAACVEAVARSYRWAQQCKRIAEDSGFLGSGHHVFAIVQGSTFDDLRREAAESLAALDFPGYAVGGVSVGEPEPEMLKQVGATTPFMPADKPRYTMGLGTPPQLLKMIALGVDMFDCVLPTRVARNGLVFTPDGPINLRNERFRTDPKPIAESIQNYTTNFSRAYLRHLTLANEMLSGTLLTIHNLHFFLDLMAQARAHIEAGDYGPWHRAWIERYEADQEG

SEQ ID NO: 58395 - protein, 382 aa, unidentified
  source 1..382: note = Opitutae bacterium
  REGION 1..382: note = tr|A0A2A2QJC4|A0A2A2QJC4_9BACT Queuine tRNA-ribosyltransferase OS=Opitutae bacterium Tous-C5TDCM; OX = 1982322 GN=tgt PE=3 SV=1
MPEHFQLLKTDTITAARRGRLRTRHGMIETPIFMPVGTQGTVKSLTPQHLKDIGSQIILGNTYHLNLRPTSEVIRDLGGLHKFMGWDGPILTDSGGFQVFSLAKLRDIREDGVAFQSHLDGKKLFLGPKEVMSIQQNLGSDIAMVIDECPPWPCERDACAAAVGRSYRWAQQCKQIATDNGFLGAGHHVFAIVQGSTFDDLRREAAESLAALDFPGYAVGGVSVGEPEPEMLKQVGASTPFMPADKPRYTMGLGTPPQLLKMVALGVDMFDCVLPSRVARNGLVFTPDGPINLKNEKHRADPNPIVEGLDNYTCRNFSRAYLRHLLMAGEMLAATLCTLHNLHFYLDLMAQARAHIEAGDYGVWHRAWVERYETGARARVGG

SEQ ID NO: 58396 - protein, 677 aa, unidentified
  source 1..677: note = Opitutae bacterium
  REGION 1..677: note = tr|A0A2A2Q7I4|A0A2A2Q7I4_9BACT Queuine tRNA-ribosyltransferase OS=Opitutae bacterium Tous-C1TDCM; OX = 1982319 GN=tgt PE=3 SV=1
MSRLSFTLEREAAGSRARAGRLHTLHGPVETPVFMPVGTQATVKGQTVHTLKAAGARVLLANTFHLLLRPGPEVFRKFGGIHRFMNWDGPVLTDSGGFQIFSLPGSRRMTEAGATFQSYVDGATHLLSPETSIGMQRAIGSDIMMVLDQCIPSTASFAEAEAAMELTHRWAVRSLAARGDSPQALFGIVQGACHPDLRRRSAEFLRALPFEGLAIGGLAVGETPAQRYEFTGLATAHLPKHLPRYLMGVGTPLDLLEAVHRGVDMFDCIIPSQLAQRGTVFTSLGRLHLRRSVHKFSTEPLDPNCPCAACREYSRAYLHHLVKADELLGWHLLSIHNLTFYHRLMAAMRAHILADTFGSFYERMRTDLARGDEENPEVHPKPAKVFRYPSCGDYEIVPGTGGYNSVRQISSGETMHSVNRPDDEAERLYIGQSQLTARLAADAPAAEDLVIWDVGLGAATNAMAVLRCFEAVLAARGAETIRPVRLVSFECDLDPLRLAVRWGGYFPHIRHGAPSALLATGAWTHPTGRLRWELQHGDFLEKYAATPRPDVIFYDPFSYKTDSALWTAGTFARLAEFCAPKPTELYTYSAATAARVALLAAGFFVGAGVGTGPKAETTIACNRPEPLRVHPSGARLLGPEWLARWRRSTAQVPASVPAEERAGFVARIEAHPQFGSG

SEQ ID NO: 58397 - protein, 387 aa, unidentified
  source 1..387: note = Opitutales bacterium
  REGION 1..387: note = tr|A0A2E7PYA5|A0A2E7PYA5_9BACT Queuine tRNA-ribosyltransferase OS=Opitutales bacterium OX=2026772; GN = tgt PE=3 SV=1
MTGSTINLRPTEGFAEFEISPEGGPRVGSLRLPGGSVPTPVFMPVGTQATVKGILPRDLLEEVRCPIILGNTYHLNLRPGVGVIAQAGGLAKFMNWTGPVLTDSGGFQVFSLSKLRKISDEGVLFHSHLDGSEVFLGPNEAIGIQDGLKSDIAMCLDECPAADASEKEIVHAVDRTTLWAQRCQREWQSRKADQSGRKLFGIVQGGRFRDLRMRSAEQLIQMEFPGYAVGGVSVGETEDEMLEQVEWTTQVLPTDKPRYIMGVGTPVQLLKMIGLGVDMFDCVLPSRAARHGTAYTRLGKLNIRNERFRNDLSPLDEEADCYVSREFSKSYLRHLFMTKESLGGVLLTMHNLRFFVRLMEEARGHILAGTFANWSRNWIETFSKGPD

SEQ ID NO: 58398 - protein, 387 aa, unidentified
  source 1..387: note = Opitutales bacterium
  REGION 1..387: note = tr|A0A2E7PTH9|A0A2E7PTH9_9BACT Queuine tRNA-ribosyltransferase OS=Opitutales bacterium OX=2026772; GN = tgt PE=3 SV=1
MTGSTINLRPTEGFAEFEISPEGGPRVGSLRLPGGSVPTPVFMPVGTQATVKGILPRDLLEEVRCPIILGNTYHLNLRPGVEVIAQAGGLAKFMNWTGPVLTDSGGFQVFSLSKLRKISDEGVRFHSHLDGSEVFLGPNEAIGIQDGLKSDIAMCLDECPAADASEKEIVQAVDRTTLWAQRCQREWQSRKADQSGRKLFGIVQGGRFRDLRMRSAEQLIQMEFPGYAVGGVSVGETEDEMLEQVEWTTQVLPPDKPRYVMGVGTPVQLLKMIGLGVDMFDCVLPSRAARHGTAYTRLGKLNIRNERFRNDLSPLDEEADCYVSREFSKSYLRHLFMTKESLGGVLLTMHNLRFFVRLMEEARGHVLAGTFANWSRNWIETFSKGPD

SEQ ID NO: 58399 - protein, 380 aa, Opitutus sp.
  REGION 1..380: note = tr|A0A1H1LQN5|A0A1H1LQN5_9BACT Queuine tRNA-ribosyltransferase OS=Opitutus sp. GAS368 OX=1882749; GN = tgt PE=3 SV=1
MSGPFQLLQTDSATAARRGRLQTLHGVIETPIFMPVGTQGTVKALTPAQIKETGAQIILGNTYHLNLRPGSELIRELGGLHKFMGWDGPILTDSGGFQAFSLAKLRDIREDGIAFASHLDGAKVFLGPREVMTIQANLGSDIAMVIDECPPWPCTKEECRRAVDRSLRWAQQCQQIATDNGFLGAGHHVFAIAQGSTFDDLRREAAESLAALDFPGYAVGGVSVGEPEPEMIKQVAATTPFLPANKPRYTMGLGTPPQILKMIALGVDMFDCVHPTRVARNGAAFTPDGLINLRNERYRTDPKPLVEGLDNYTCRNFSRAYLRHLTMAGEILSSTLISLHNVHFYLDLVAQARAHIAAGDYGPWHRAWIGRYEAGEPTMA

SEQ ID NO: 58400 - protein, 382 aa, Opitutus sp.
  REGION 1..382: note = tr|A0A2T6CQK2|A0A2T6CQK2_9BACT Queuine tRNA-ribosyltransferase OS=Opitutus sp. ER46 OX=2161864; GN = tgt PE=3 SV=1
MAAHFQLLKTDTNTAARRGRLQTRHGTIETPIFMPVGTQGTVKAITPNHLREIGAQIILGNTYHLSLRPGSDLIRELGGLHAFMGWNGPILTDSGGFQVFSLAKLRDISDAGVAFQSHLDGARHFLGPREVMKIQQDLGSDIAMVLDECPPWPCERDACAKAVARSLRWAAQCRDIATGSGFLAAGHHVFAIVQGSTFDDLRREAAEALAAFDFPGYAVGGVSVGEPEPEMLKQVGATTPFMPADKPRYTMGLGTPPQLLRMIALGVDMFDCVMPTRVARNGLVFTPDGPINLRNEQFRADPRPIVEGMDNYTCRNFSRAYLRHLTVAGEMLSGTLLTIHNLHFFLDLMAQARAHIEAGDYASWHLAWIARYEAGAHARRAS

SEQ ID NO: 58401 - protein, 381 aa, Opitutus terrae
  REGION 1..381: note = tr|B1ZN97|B1ZN97_OPITP Queuine tRNA-ribosyltransferase OS=Opitutus terrae (strain DSM 11246 / JCM 15787 / PB90-1) OX=452637 GN=tgt PE=3 SV=1
MGTPFQLLKTDTATQARRGRLQTRHGVVETPIFMPVGTQGTVKSITPAHLHEIGAQIILGNTYHLNLRPGSELIRDLGGLHRFMGWDGPILTDSGGFQVFSLAKLRDIRDDGVAFQSHLDGAKLFLGPREVMRIQQNLGSDIAMVLDECPPWPCERDACARAVARSQRWALQCKQIATESGFLAAGHHVFAIAQGSTFDDLRREAAEALSALDFPGYAVGGVSVGEPEPEMLKQVAATTPFLPANKPRYTMGLGTPPQMLKMIALGVDMFDCVLPTRVARNGLAFTPDGPMNLRNEKYRTDPRPIVEGLANYTSGFSRAYLRHVTLAGEIISCTLLTLHNLHFYLDLMAQARAHLESGDYGSWHRSWIERYEAGAAARVAG

SEQ ID NO: 58402 - protein, 379 aa, Orbus hercynius
  REGION 1..379: note = tr|A0A495RB98|A0A495RB98_9GAMM Queuine tRNA-ribosyltransferase OS=Orbus hercynius OX=593135; GN = tgt PE=3 SV=1
MKFELDTTDGLARRGRMKFDRRGVECTVETPAFMPVGTYGTVKGMTPEEVAATGAQILLGNTFHLWLRPGQEIMRQHGDLHDFMQWHGPILTDSGGFQVFSLGDIRKIKEEGVHFRNPINGDSIFLSPEISMEIQYDLGSDIVMIFDECAPYPAEWDYVKRSMEMSARWAKRSRDRFDELGNKNALFGIVQGGVYQELRDISVKALTQIGFDGYAIGGLAVGEPKADMHRILEGTCPQLPTDKPRYLMGVGKPEDLVEGVRRGIDMFDCVMPTRNARNGHLFVTDGVIKIRNAKYKDDTSPLDAECDCYTCKNYTKAYLHHLDKCGEILGARLNTIHNLRYYQRLMAEIRKAIAEQRYEQFVIEFYQRIGKTPAPLNAR

SEQ ID NO: 58403 - protein, 372 aa, Orenia marismortui
  REGION 1..372: note = tr|A0A4R8H6S2|A0A4R8H6S2_9FIRM Queuine tRNA-ribosyltransferase OS=Orenia marismortui OX=46469; GN = tgt PE=3 SV=1
MSFEYTLKKKSKDTKARLGELSTPHGNIETPIFMPVGTKATVKTMTPDELEDINAQIILSNTYHLYLRPGHDLIEEAGGLHKFMNWDKPILTDSGGFQVFSLSDMNNITEEGVEFKSHIDGSKHFISPEKSIEIQTALGSDIMMAFDECPPYPADRDYVKKSLEMTTRWLERCIDAKTRDDQALFGIMQGGMYKDLREESAKQIVEFDLPGYAIGGLSVGEPKELMMEVLDYAPDLLPENKPRYLMGVGTPFDLFEGVMRGVDMFDCVFPTRVARNGLVFTSEGRVTVRNATYSRDFTPLDHNCDCYVCQNYTRGYIRHLLKQNEILGVRLTTYHNLHFLLEMMENIRNAIAEDRFLEYREEFYKSYGLEVD

SEQ ID NO: 58404 - protein, 371 aa, unidentified
  source 1..371: note = Orenia metallireducens
  REGION 1..371: note = tr|A0A285G6G2|A0A285G6G2_9FIRM Queuine tRNA-ribosyltransferase OS=Orenia metallireducens; OX = 1413210 GN=tgt PE=3 SV=1
MSFEYTLKKKCKDTKARLGELSTPHGKIETPIFMPVGTKATVKTMTPEELKEINSQIILSNTYHLYLRPGHDLIAEAGGLHKFMNWDRPILTDSGGFQVFSLSDMNKISEEGVEFKSHIDGSKHFISPEKSIEIQTALGADIMMAFDECPPYPADRDYVKKSLEMTTRWLERCIEAKTRDDQALFGIMQGGMYKDLREESAKQIVEFDLPGYAIGGLSVGEPKELMIEVLDYAPDFLPENKPRYLMGVGTPFDLFEGVMRGIDMFDCVFPTRVARNGMVFTSQGRVTVRNATYERDFSPLDQDCDCYVCQNYTRAYIRHLIKQNEILGVRLTTYHNLHFLLDMMENIRKAIAEDRFLEYRADFYEKYGLEV

SEQ ID NO: 58405 - protein, 371 aa, unidentified
  source 1..371: note = Orenia metallireducens
  REGION 1..371: note = tr|A0A1C0A4U8|A0A1C0A4U8_9FIRM Queuine tRNA-ribosyltransferase OS=Orenia metallireducens; OX = 1413210 GN=tgt PE=3 SV=1
MSFEYTLKKKCKDTKARLGELSTPHGKIETPIFMPVGTKATVKTMTPEELREINSQIILSNTYHLYLRPGHDLIEEAGGLHKFMNWDRPILTDSGGFQVFSLSDMNKITEEGVEFKSHIDGSKHFISPEKSIEIQTALGADIMMAFDECPPYPADREYVKKSLEMTTRWLERCIKAKTRDDQALFGIMQGGMYKDLREESAKQIVEFDLPGYAIGGLSVGEPKELMIEVLDYAPDFLPENKPRYLMGVGTPFDLFEGVMRGIDMFDCVFPTRVARNGLVFTSQGRVTVRNATYERDFTPLDHDCDCYVCKNYTRAYIRHLIKQNEILGVRLTTYHNLHFLLDMMENIRKAIAEDRFLEYRAEFYERYGLEV

SEQ ID NO: 58406 - protein, 395 aa, unidentified
  source 1..395: note = Oribacterium asaccharolyticum
  REGION 1..395: note = tr|G9WRH3|G9WRH3_9FIRM Queuine tRNA-ribosyltransferase OS=Oribacterium asaccharolyticum ACB7 OX=796944 GN=tgt PE=3 SV=1
MAAVKMKYEIVGQCGRAKSAHMETVHGVIETPVFMNVGTVAAIKGGVSTDDLRLIGTQVELSNTYHLHVRTGDKVIKELGGLHRLMNWDKPILTDSGGFQVYSLAKTGRKIREEGVEFRSHIDGRKIFMGPEESMEIQSNLASTIAMAFDECPPALADRQYIEPSVERTTRWLLRCKNRIEELNDEESTINKNQLLFGINQGGILSDVRINHAKQIAELDLPGYAVGGLAVGESHEDMYRILEDVVPFLPKEKPTYLMGVGTPENMVMAVDRGIDFFDCVFPSRNGRHGHVYHASGKLNLWNLAYEKDFRPIEEGCDCPACKGIRLEDGSYTGGYSRAYIRHLLKAKEMLGMRLCVLHNLSYYNRLMREMRFAIREGRWEAWKTDALYKLKIQNS

SEQ ID NO: 58407 - protein, 395 aa, unidentified
  source 1..395: note = Oribacterium parvum
  REGION 1..395: note = tr|G9WNS6|G9WNS6_9FIRM Queuine tRNA-ribosyltransferase OS=Oribacterium parvum ACB1; OX = 796943 GN=tgt PE=3 SV=1
MATVKMKYEIVGQCGRAKSAHMETVHGVIETPVFMNVGTVAAIKGGVSTDDLRLIGTQVELSNTYHLHVRTGDKVIKELGGLHRMMKWDKPILTDSGGFQVYSLAKTGRKIREEGVEFRSHIDGRRIYMGPEESMEIQSNLASTIAMAFDECPPALADRQYIEPSVERTTRWLLRCKKRMEELSQEESTINKNQLLFGINQGGVLSDVRINHAKQISELELPGYAVGGLAVGESHEDMYRILDDVVPFLPKDKPTYLMGVGTPENMVQAVDRGIDFFDCVFPSRNGRHGHVYHASGKLNLWNLAYEKDFRPIEEGCDCPACKGIRLEDGSYTGGYSRAYIRHLLKAKEMLGMRLCVLHNLSYYNRLMREMRFAIREGRWEAWKTEALYKLKIQNS

SEQ ID NO: 58408 - protein, 395 aa, Oribacterium sinus
  REGION 1..395: note = tr|C2KU81|C2KU81_9FIRM Queuine tRNA-ribosyltransferase OS=Oribacterium sinus F0268; OX = 585501 GN=tgt PE=3 SV=1
MAAAKMKYEIKGQCGRAKSAHVETVHGVIETPVFMNVGTVAAIKGGVSTDDLRLVHTQVELSNTYHLHVRTGDKVIRELGGLHRMMNWDKPILTDSGGFQVYSLAKTGRKIREEGVEFRSHIDGRRIFMGPEESMQIQSNLGSTIAMAFDECPPALAERDYILPSVERTTRWLLRCQAEMDRLNSLEDTLNPKQILFGINQGGVLEDIRIDHAKRITELDLEGYAVGGLAVGESHEDMYRILDAVVPHLPRHKPTYLMGVGTPENMIQAVDRGIDFFDCVFPSRNGRHGHVYHAAGKLNLWNLAYEKDMRPIEEGCDCPACKGIRKEDGTYTGGYSRAYIRHLLKAKEMLGMRLCVLHNLSYYNRLMVEMRNAIRENCWESWKTEALYKLKIQNS

SEQ ID NO: 58409 - protein, 395 aa, Oribacterium sp.
  REGION 1..395: note = tr|F5T9M3|F5T9M3_9FIRM Queuine tRNA-ribosyltransferase OS=Oribacterium sp. oral taxon 108 str. F0425 OX=904296 GN=tgt PE=3 SV=1
MAAVKMKYEIVGQCGRAKSAHMETVHGVIETPVFMNVGTVAAIKGGVSTDDLRLIGTQVELSNTYHLHVRTGDKVIKELGGLHRLMNWDKPILTDSGGFQVYSLAKTGRKIREEGVEFRSHIDGRKIFMGPEESMEIQSNLASTIAMAFDECPPALADRQYIEPSVERTTRWLLRCKKKMEELNEEESTINKNQLLFGINQGGILSDVRINHAKQISELDLPGYAVGGLAVGESHEDMYRILEDVVPFLPKEKPTYLMGVGTPENMVMAVDRGIDFFDCVFPSRNGRHGHVYHAYGKLNLWNLAYEKDFRPIEEGCDCPACKGIRLEDGSYTGGYSRAYIRHLLKAKEMLGMRLCVLHNLSYYNRLMREMRFAIREGRWEAWKTDALYKLKIQNS

SEQ ID NO: 58410 - protein, 393 aa, Oribacterium sp.
  REGION 1..393: note = tr|A0A1S9BYF3|A0A1S9BYF3_9FIRM Queuine tRNA-ribosyltransferase OS=Oribacterium sp. C9 OX=1943579; GN = tgt PE=3 SV=1
MKYEIVKTSGRAKSAHMETVHGTIETPVFMNVGTVAAIKGGVSTDDLRNIGTQVELSNTYHLHVRTGDPLIKKFGGLHKFMNWDRPILTDSGGFQVFSLAGTGRKIKEEGVYFHSHIDGRKIFMGPEESMQIQSNLGSTIAMAFDECPPALADRQYIVPSVERTTRWLERCKKEMARLNSLPDTVNKEQLLFGINQGGVFDDIRIQHAETISRMDLDGYAVGGLAVGETHEQMYHVLDEVVPHLPKNKPTYLMGVGTPANIIEAVDRGIDFFDCVYPSRNGRHGHVYTHKGKINLFNQKYELDERPIEEGCMCPVCAGQKRADGTYTGGYSRAYIRHLLKAKEMLGMRMCVLHNLYFYNHLTEEIRGAIRGGSWDEWKTKALSDLGTYDRGEE

SEQ ID NO: 58411 - protein, 378 aa, unidentified
  source 1..378: note = Oricola cellulosilytica
  REGION 1..378: note = tr|A0A4V2MNK0|A0A4V2MNK0_9RHIZ Queuine tRNA-ribosyltransferase OS=Oricola cellulosilytica; OX = 1429082 GN=tgt PE=3 SV=1
MSREFSFELLGENGAARRGVVHTARGDIRTPAFMPVGTLGTVKAMYLDQVRDAGADIILGNTYHLMLRPGAERVARLGGLHEFIRWPHPILTDSGGFQVMSLSGLRTMSEKGVTFQSHIDGSRHEMTPERSIEIQGLLGSDIQMQLDECVALPADPDAIRRAMELSVRWAERCKTAFGNQPSRAMFGIVQGGDDARLRETSAKALTALDLKGYAIGGLAVGEPQDVMLAVLDATCPLLPGDKPRYLMGVGTPQDILRSVARGIDMFDCVMPTRSGRHGLAFTRRGRVNLKNARHAEDLRPLDEESDCPAARDYSRAYLHHLVRSGEALGGMLLSWNNVAYYQQLMQGIREAIEAENFPEFSARTESEWERGDLPPLPL

SEQ ID NO: 58412 - protein, 375 aa, unidentified
  source 1..375: note = Oricola sp.
  REGION 1..375: note = tr|A0A3M8GY85|A0A3M8GY85_9RHIZ Queuine tRNA-ribosyltransferase OS=Oricola sp. OX=1979950 GN=tgt; PE = 3 SV=1
MAEFGFTLHATDGGARRGTVTTGRGDIATPAFMPVGTAGTVKGLYLDQVKGAGADIILGNTYHLMLRPGAERIDRLGGLHGFIGWDGPILTDSGGFQVMSLSALRQMSEKGVTFKSHIDGAIHEMSPERSIEIQGLLGSDIQMQLDECVALPADTDTMKAAMELSLRWAERCRVAFGDQPGKAMFGIVQGGDDEKLRVQSTEALKAMDLKGYSIGGLAVGEPQEVMLAMLDVVCPILPAHKPRYLMGVGTPQDLLRSVARGVDMFDCVMPTRSGRHGLAFTRRGRVNLKNARHAEDHRPLDDEMNCPASRTYSRAYLHHLIRSGEMLGMMLLSWHNTYYYQWLMSEMRRAIEQGRFADFSAETEAMWEAGDIAAL

SEQ ID NO: 58413 - protein, 368 aa, unidentified
  source 1..368: note = Ornatilinea apprima
  REGION 1..368: note = tr|A0A0N8GL46|A0A0N8GL46_9CHLR Queuine tRNA-ribosyltransferase OS=Ornatilinea apprima OX=1134406; GN = ADN00_17545 PE=3 SV=1
MSRFPSELNLAHGRLDFPVFLPDATFGVVRAVDASDLEDCRVQALVMNTFHLMQKPGSSTISALGGLHRMSGWPRPIITDSGGFQAYSLIRQNAQFGQLTDKGLFFQPEGSSRKYQLTPEKTVQLQMSYGADVVICLDDCTHAENDPAEQRKSVDRTVAWAKRCKSEYARLVEQKKLNEQDRPRIFAVVQGGGSRDLRRECAERLLEIGFDGYGYGGWPLDGQGNLLEDMLAWTRELIPAEYPMHALGIGHPENVLACYKMGYGMFDCAMPTRDARHGRLYVFNFPADGDQSGLNEKWFKYLYIHDEKHLKGDQPLSPYCDCLTCRRYSAGYLRHLFKMNDSLYMRLATVHNLRFMTQLTERIRAGEK

SEQ ID NO: 58414 - protein, 373 aa, unidentified
  source 1..373: note = Ornatilinea apprima
  REGION 1..373: note = tr|A0A0P6XJQ8|A0A0P6XJQ8_9CHLR Queuine tRNA-ribosyltransferase OS=Ornatilinea apprima OX=1134406; GN = tgt PE=3 SV=1
MLSQVSPAFQFELIAQDGNARAGVFHTPHGDILTPVFAPVGTQATVKAVSSRQLTELGASLILANTYHLYLRPGSDLIAEFGGLHQFMNWHGPILTDSGGYQVFSLSSIRKVDEDGVTFRSHIDGSTHRLTPEKAISIQEQLGSDIIMAFDECPDPYDPKYNQKAMERTHRWAERCLAAQTRRDQALFGIVQGGVFPDLRARSAEFISSLGFPGHAIGGLSVGETKEEMHAMLEVVTPILPADRPRYLMGVGSPEDLVNGVLRGVDIFDCVLPTRLARHKAALTMTGRINLLNSVNTRSQSPIEEGCQCYTCQHYSRAYLRHMLVAKEILGATLISIHNLHVLLELMRQARQAIIEHRYSAFASNFLENYRLP

SEQ ID NO: 58415 - protein, 380 aa, unidentified
  source 1..380: note = Ornithinibacillus halophilus
  REGION 1..380: note = tr|A0A1M5DGK7|A0A1M5DGK7_9BACI Queuine tRNA-ribosyltransferase OS=Ornithinibacillus halophilus; OX = 930117 GN=tgt PE=3 SV=1
MTTPIRYEFIKTCKQTGARLGRVHTPHGSFDTPTFMPVGTLATVKTMSPEDLQSMNANIILSNTYHLWLRPGEDIIREAGGLHKFMNWDGAILTDSGGFQVFSLSDMREIKEEGVHFRNHLSGEKLFLSPEKAMQIQNALGSDIMMAFDECPPYPATYDYMKSSVERTSRWAERCLEAHERQDVQGLFGIIQGGEYEDLRRQSAQDLISLDFPGYAVGGLSVGEPKDVMNRVLDFTTPLMPTDKPRYLMGVGSPDSLIDGAIRGIDMFDCVLPTRIARNGTCMTSNGRLVVRNAKYARDFSPIDENCDCHVCKNYTRAYIRHLIKCNETFGFRLTTYHNLYFLLKLMEQVRNAIRNDELGDFKEAFFEQYGLNQPNAKNF

SEQ ID NO: 58416 - protein, 380 aa, Ornithinibacillus sp.
  REGION 1..380: note = tr|A0A3C1I5C2|A0A3C1I5C2_9BACI Queuine tRNA-ribosyltransferase OS=Ornithinibacillus sp.; OX = 1898027 GN=tgt PE=3 SV=1
MTSPITYELIKTDKQTGARLGRVHTPHGTFETPMFMPVGTLATVKTMSPEDLHSMDAKIILSNTYHLWLRPGEDIIREAGGLHKFMNWDGAILTDSGGFQVFSLSDMREITEEGVHFRNHLNGDKLFLSPEKAIQIQNALGSDIMMAFDECPPYPATHEYMKASVERTSRWAERCLNAHQRPDVQGLFGIIQGGEFEDLRRLSASDLVSLDLPGYAVGGLSVGEPKDVMNRVLEFTTPLMPSNKPRYLMGVGSPDSLIDGAIRGIDMFDCVLPTRIARNGTCMTSTGRLVVRNAKYARDFGPIDENCDCHVCKNYTRAYIRHLIRCNETFGFRLTTYHNLHFLLKLMEQVRQAIREDRLGDFKEEFFEQYGLNKPDAKNF

SEQ ID NO: 58417 - protein, 382 aa, Ornithobacterium rhinotracheale
  REGION 1..382: note = tr|I3ZZW1|I3ZZW1_ORNRL Queuine tRNA-ribosyltransferase OS=Ornithobacterium rhinotracheale (strain ATCC 51463 / DSM 15997 / CCUG 23171 / CIP 104009 / LMG 9086) OX=867 902 GN=tgt PE=3 SV=1
MYLCPDMKFTIEKSDIESSARAGEITTDHGKIQTPIFMPVGTVASVKAVHQRELKEDIKAQIILGNTYHLYLRPGTEILNQAGGLHKFINWDRPILTDSGGYQVFSLAGRRKITEEGVRFKSHIDGSYHFFSPERSMEIQRNIGADIIMAFDECTPYPCDYTPAKESMEMTHRWLKRCEKWLSENPELYGYKQTLFPIVQGSTYRDLRTQSAEFIASIGADGNAIGGLSVGEPEEAMYETTELVNSILPKDKPRYLMGVGTPWNIIEGISLGVDMFDCVMPTRNARNGMLFTWDGVINIKNAKWKDDFSPLDPKGSAYVDWDYSKAYVRHLFVAKEYLAKQIASVHNLAFYLDLVRVAREHILAGDFASWKKSIIPQLKTRL

SEQ ID NO: 58418 - protein, 376 aa, Ornithobacterium rhinotracheale
  REGION 1..376: note = tr|A0A410JPE4|A0A410JPE4_9FLAO Queuine tRNA-ribosyltransferase OS=Ornithobacterium rhinotracheale; OX = 28251 GN=tgt PE=3 SV=1
MKFTIEKLDIASSARAGEITTDHGKIQTPIFMPVGTVASVKAVHQRELKEDIKAQIILGNTYHLYLRPGTEILNQAGGLHKFINWDSPILTDSGGYQVFSLAGRRKITEEGVRFKSHIDGSYHFFSPERSMEIQRNIGADIIMAFDECTPYPCDYTPAKESMEMTHRWLKRCEKWLSENPELYGYKQTLFPIVQGSTYRDLRTQSAEFIASIGADGNAIGGLSVGEPEEAMYETTELVNSILPKDKPRYLMGVGTPWNIIEGISLGVDMFDCVMPTRNARNGMLFTWDGVINIKNAKWKDDFSPLDPKGSAYVDWDYSKAYVRHLFVAKEYLAKQIASVHNLAFYLDLVRVAREHILAGDFATWKKSIIPQLKTRL

SEQ ID NO: 58419 - protein, 378 aa, unidentified
  source 1..378: note = Orrella dioscoreae
  REGION 1..378: note = tr|A0A1C3K4A4|A0A1C3K4A4_9BURK Queuine tRNA-ribosyltransferase OS=Orrella dioscoreae OX=1851544; GN = tgt PE=3 SV=1
MTGLSFDLLATDGQARRGQVTLNHGVVQTPIFMPVGTYGAVKAMLPHEVEEVGAQIVLGNTFHLWLRPGPEIVRKHGGLHGFMQWNKPILTDSGGFQVFSLEGLRKITEDGVTFASPIDGARLFLTPEESMRIQHALNSDIVMVFDECTPYEIKGRPATAEEAARSMRMSLRWARRSRQEFDGLENPNALFGIVQGGMYEHLRDESLAGLTEIGFHGYAIGGLSVGEPKEDMLRILKHVAPRLPANAPRYLMGVGTPEDLVEGVANGIDMFDCVMPTRNARNGWLFTRYGDLKIRNARYRDDIRALDPTCACHTCGKFSRAYLHHMQRSNEITGARLNTQHNLHFYLQIMAEMREAIEAGRFDAWREQFARDRARGVE

SEQ ID NO: 58420 - protein, 390 aa, unidentified
  source 1..390: note = Oryzisolibacter propanilivorax
  REGION 1..390: note = tr|A0A1G9V740|A0A1G9V740_9BURK Queuine tRNA-ribosyltransferase OS=Oryzisolibacter propanilivorax; OX = 1527607 GN=tgt PE=3 SV=1
MLQFDLLATDPASHARRGRLTLNHGVVQTPIFMPVGTYGTVKGVMPQSLRDMGAQIILGNTFHLWMRPGLDVVQSFGGLHAFEQWDKPILTDSGGFQVWSLGAMRKITEEGVYFQSPVNGDKLFMSPEVSMQIQTTLNSDIVMQLDECTPYETQGRLTTEAEARKSMEMSRRWALRSKAEFERLGNPNALFGIVQGGMFEHLRQESLQALVEMDFPGYAIGGVSVGEPKDEMLRIMAHTPHRLPATKPRYLMGVGTPEDLVDGVACGVDMFDCVMPTRNARNGTLFTRYGDLKIRNARHRADHQPLDATCTCHACAGPQGIAWNDGGRGGFSRAYLHHLERCGEMLGPMLTSIHNLHYYLNLMQGIRDALDAGTFSQFHAQFKADRARGV

SEQ ID NO: 58421 - protein, 373 aa, unidentified
  source 1..373: note = Oryzomicrobium terrae
  REGION 1..373: note = tr|A0A5C1E9E1|A0A5C1E9E1_9RHOO Queuine tRNA-ribosyltransferase OS=Oryzomicrobium terrae; OX = 1735038 GN=tgt PE=3 SV=1
MSDKKFELLATDGRARRGRLTLPHGVVETPVFMPVGTYGTVKAMTPQALRDIEAQICLGNTFHLWLRPGLDVIRAHGGLHGFMGWEKPILTDSGGFQVFSLGALRKITEEGVKFASPIDGAKLFLTPEESMRIQTVLNSDVVMIFDECTPYPASHDEAAKSMRLSLRWAKRSREEFDRQENPNTLFAIVQGGMYEDLRDESLAALEEIGFFGFAIGGLSVGEPKEDMERILAHTAPKLPADKPHYLMGVGTPEDIVNAVAQGIDMFDCVMPTRNARNGHLFTRYGDVKIKNARYREDTRPLDESCDCYACRNFSRAYLHHLFRTGEILGSMLNTIHNLRYYQVLTGEIRAAIAAGEYEDFRRRFAAERGRGPA

SEQ ID NO: 58422 - protein, 370 aa, Oscillatoria acuminata
  REGION 1..370: note = tr|K9TRE4|K9TRE4_9CYAN Queuine tRNA-ribosyltransferase OS=Oscillatoria acuminata PCC 6304; OX = 56110 GN=tgt PE=3 SV=1
MGRDFTFQCQGKCSHTHARAGVWMTPHGPVETPIFMPVGTLATVKTVTPAQLEATGAQMILANTYHLHLQPGEDIVAAAGGLHRFMVWDGPILTDSGGFQVFSLSELRTITEKGVTFRSPRDGRKIEITPERSIQIQNKLGADVIMAFDECPPYPASREAVELATARTYRWLERCMEAHSRSDQALFGIVQGGVYIDLRLQAVEALTQLDLPGYAIGGVSVGEPGETISEIVRATAPKLPVEKPRYLMGVGTYREMAQAIASGVDLFDCVIPTRWARHGAVMVQGERWNIKNAQFREDFTPLDETCSCYTCQNFSRAYLNHLWKSGEILVYTLLSIHNLTELIRFTKQIRESILSDRFTTDFAHWLEPMP

SEQ ID NO: 58423 - protein, 376 aa, unidentified
  source 1..376: note = Oscillatoria nigroviridis
  REGION 1..376: note = tr|K9VJ05|K9VJ05_9CYAN Queuine tRNA-ribosyltransferase OS=Oscillatoria nigro-viridis PCC 7112 OX=179408 GN=tgt PE=3 SV=1
MTEDKAKFSFKCQANCSHTQARAGVFATPHGVVETPKFMPVGTLANVKTLTPAHLEAAGSQMVLANTYHLHLQPGEAIVAGAGGLHKFMAWPGPMLTDSGGFQVFSLSQMRKITDDGVTFRSPRDGRMINLTPERSIEIQNDLGADVIMAFDECPPYPATREEVEAATNRTYRWLQRCIQAHSRPDQALFGIVQGGVFPDLRSRAANQLVDLDLPGYAIGGVSVGESGDLIAEIVKVTAPLLPANKPRYLMGIGTYREMALAVASGVDMFDCVIPTRLARHGTAFVGGERWSLKNARFREDFAPLDESCPCYTCQKFSRAYLAHLARANEVLGYTLLALHNVTELIRFTGRMREAILADRFTEEFACWLAPRVDRS

SEQ ID NO: 58424 - protein, 378 aa, unidentified
  source 1..378: note = [Oscillatoria] sp.
  REGION 1..378: note = tr|D8FU25|D8FU25_9CYAN Queuine tRNA-ribosyltransferase OS=[Oscillatoria] sp. PCC 6506; OX = 272129 GN=tgt PE=3 SV=1
MPDNFSFQSQAKCSQTQARAGIFTTPHGSVETPRFMPVGTLANVKTLTPAHLEAAGAQMVLANTYHLHLQPGEGIVAGAGGLHKFMAWKGPILTDSGGFQVFSLSEIRTIGEDGVKFRSPRDGMMIHMTPELSIQIQNDLGADVIMAFDECPPYPASREDVAAATDRTYRWLKRCIASHQRSDQALFGIVQGGVYPDLRSRAANQLVDLDLPGYAIGGVSVGEPGEMIEDIVKVTAPLLPPEKPRYLMGIGTYREMAVAIAAGVDLFDCVIPTRLARHGAVLVGGERWNLKNAQFREDYGPVDKNCPCYTCQTFSRAYLSHLVRAHEALGHTLLSIHNVTELIRFTVRIREAILSDRFTEEFAHWLAPSTRSSANASC

SEQ ID NO: 58425 - protein, 372 aa, unidentified
  source 1..372: note = Oscillatoriales cyanobacterium
  REGION 1..372: note = tr|A0A1C0V3X5|A0A1C0V3X5_9CYAN Queuine tRNA-ribosyltransferase OS=Oscillatoriales cyanobacterium USR001 OX=1880991 GN=tgt PE=3 SV=1
MPENFCFQCLANCSHTQARVGVFMTPHGPVETPRFMPVGTLANVKTLTPAHLEAAGAQMVLANTYHLHLQPGEGIVAGAGGLHKFMAWKGPILTDSGGFQVFSLSDIRTIGEDGVKFRSPRDGMMIDMTPERSIQIQNDLGADVIMAFDECPPYPASREDVAMATDRTYRWLKRCIVAHQRSDQALFGIVQGGVFPDLRSRAVHQLVDLDLPGYAIGGVSVGEPGEMIEQIVKVTAPLLPPEKPRYLMGIGTYREMACAIAAGVDLFDCVIPTRVARHGAVLVRGERWNLKNAQFREDFGPVDDSCPCYTCQNFSRAYLSHLVRAHEALGHTLLSIHNVTELIRFTVRIRDAILGDRFVEEFAHWLAPVDPL

SEQ ID NO: 58426 - protein, 383 aa, unidentified
  source 1..383: note = Oscillatoriales cyanobacterium
  REGION 1..383: note = tr|A0A1J5GRZ8|A0A1J5GRZ8_9CYAN Queuine tRNA-ribosyltransferase OS=Oscillatoriales cyanobacterium CG2_30_40_61 OX=1805291 GN=tgt PE=3 SV=1
MSHPFSFEVQACCSQTKARVGLFHTPHGWVETPRFMPVGTLANVKTLTPAHLKDAGAQMVLSNTYHLHLQPGEKIVAGAGGLHRFMGWDGPMLTDSGGFQVFSLSKINTITEEGVTFRSPHDGRLINFTPELSIQIQNELGADVIMAFDECPPYPATREAVVKATERTKRWLERCIKAHKRPDQALFGIVQGGVHADLRQQAARDLVEFDLPGYAIGGVSVGEPSALIEKIVQVTTPILPFNKPRYLMGIGTYREMAQAIAAGVDLFDCVIPTRLGRHGAALVQGERWNLKNAQFREDFRPLDATCPCYTCQNFSRAYLSHLVRAKEVLSYTLIAIHNVTELIRFTQRIRESILNNRFADEFQFWLTSTDAVATLEDYEIDPP

SEQ ID NO: 58427 - protein, 378 aa, Oscillibacter sp.
  REGION 1..378: note = tr|A0A3D2YH53|A0A3D2YH53_9FIRM Queuine tRNA-ribosyltransferase OS=Oscillibacter sp. OX=1945593; GN = tgt PE=3 SV=1
MFKVIKKEGKARRGVFTCAHGGEVQTPVFMNVGTQAAIKGGVSAVDLKERLGTQIELSNTYHLHLRPGDDVVRAMGGLHRFMRWDGPILTDSGGFQVFSLAGLRKISEEGVTFASHLDGHRIFMGPEESMRIQSNLGSDIAMAFDECVENPAPYDYAKASCERTLRWLERCKKEHDRLNSLPDTVNPGQMLFGINQGATYADLRIWHMQQIARIDCDGYAIGGLAVGEPTEVMYEIIDAVEPYMPADKPRYLMGVGTPSNIIEGVARGVDFFDCVMPARNARHGKLFTWKGTLNIKNAKYKLDEQPIDPECDCPVCRQFSRAYIRHLFTAEEMLGMRLAVMHNLYFYNKLTERIRDSLDNGCFEAFREEYSKKLAEKL

SEQ ID NO: 58428 - protein, 377 aa, Oscillibacter sp.
  REGION 1..377: note = tr|R6GM56|R6GM56_9FIRM Queuine tRNA-ribosyltransferase OS=Oscillibacter sp. CAG:241; OX = 1262911 GN=tgt PE=3 SV=1
MFKVIKKEGHARRGEFQCAHGGVVQTPVFMNVGTQAAIKGGVDAFDLRDLGCQIELSNTYHLHLRPGDDVVRQMGGLHRFMRWDGPILTDSGGFQVFSLASLRKITEEGVTFASHLDGHRIFMGPEESMRIQSNLGSDIAMAFDECVENPAEYDYAKASCERTLRWLERCKAEHDRLNALPDTVNPRQMLFGINQGATYEDLRVWHMQQIAKIDCDGFAIGGLAVGEPTEVMYQIIEAVEPYMPAHKPRYLMGVGTPSNIIEGVARGVDFFDCVMPARNARHGKLFTWQGAMNIKNAKYKLDDRPIDPECDCPVCRRFSRAYIRHLFAAEEMLAMRLAVMHNLYFYNKLAQRIRDSLDAGCFADFRREYSEKLSGRI

SEQ ID NO: 58429 - protein, 377 aa, Oscillibacter valericigenes
  REGION 1..377: note = tr|G4KPA6|G4KPA6_OSCVS Queuine tRNA-ribosyltransferase OS=Oscillibacter valericigenes (strain DSM 18026 / NBRC 101213 / Sjm18-20) OX=693746; GN = tgt PE=3 SV=1
MFKVIKYQGRARRGQFSCAHGGMVQTPVFMNVGTQGAIKGGVSAHDLREIGCQIELSNTYHLHLRPGDTVVRKMGGLHRFMDWDGPILTDSGGFQVFSLASLRKIKEEGVTFASHIDGHRIFMGPEESMQIQSNLGSDIAMAFDECVENPATYEYAKASCERTARWLERCAAEHERLNSLADTVNPRQMLFGINQGATFPDLRVWHMDEIAKLNCDGYAIGGLAVGEPADVMYGIIDAVEPHMPQDKPRYLMGVGTPSNIIEAVSRGVDFFDCVMPSRNGRHGKLFTWEGTVNILNRKYETDPSPVSESCGCPCCRSFSRAYLRHLFKADEVLALRLSVLHNLWFYNELMQKLRNALDTGTFDEFREKYSGKLERRA

SEQ ID NO: 58430 - protein, 403 aa, Oscillochloris trichoides
  REGION 1..403: note = tr|E1IDU5|E1IDU5_9CHLR Queuine tRNA-ribosyltransferase OS=Oscillochloris trichoides DG-6; OX = 765420 GN=tgt PE=3 SV=1
MSIFTITAKDPHSRARAGVVRTPHGDVPTPVFMPVGTRGTVKSLSPRELREHGATIILGNTYHLYLQPGHELIARHGGLHGFASWDGPMLTDSGGFQVFSLIYGGISNEIKGRRPQRANPMQGMVKVTEDAVIFKSYLDGSRHIFTPERSIQIQHGLGADIIVCFDELPPFHATYKYTRQSMDRTHRWAARCLTAHREREAEQLPNPGQSLFGIVHGGVFPDLRQASAEHLATLGFDGFCIGGSLGGDKPQMYDVVDMTVPHMPDGMARHLLGVGDIDDLLEGVARGIDMFDCVSPTRLGRHATALVRRDGEQGSRRWKLNVLNASMRDDRNPLQPGCTCETCRTYSRAYIHHLFKANEILGIRLVSLHNIAFLLNLMREVRAAIIAGRFGEMYADWLGKPLR

SEQ ID NO: 58431 - protein, 372 aa, unidentified
  source 1..372: note = Osedax symbiont
  REGION 1..372: note = tr|S6GQ35|S6GQ35_9GAMM Queuine tRNA-ribosyltransferase OS=Osedax symbiont Rs2 OX=1330035; GN = tgt PE=3 SV=1
MKFEKLQQDGKARRGRITFPRGVVETPAFMPVGTYGTVKGMLPRDVEEIGAHMILGNTFHLMLRPGTEIIKQHGDLHDFMQWQGPILTDSGGFQVFSLGNMRKITEKGVTFHSPVNGDKVFIDPEKSMQVQRDLGSDVVMIFDECTPYPATEQEAADSMRLSLRWADRSKKAHGDSSSALFAIVQGGMYENLRDESLQGLTDIGFDGYAIGGLSVGEPKDEMIKILDHTAHQLPEDKPRYLMGVGKPEDLVEGVRRGVDMFDCVMPTRNARNGHLFVDTGVVKLRNASNKTDTGPLDETCDCYTCRNFSRAYLHHLDKCKEILGSQLNTIHNLRFYQRLMMDIRSALDEGNFDQFVTEFYRKRGIEVPSLRE

SEQ ID NO: 58432 - protein, 378 aa, unidentified
  source 1..378: note = Osedax symbiont
  REGION 1..378: note = tr|S6GPF5|S6GPF5_9GAMM Queuine tRNA-ribosyltransferase OS=Osedax symbiont Rs1 OX=1330036; GN = tgt PE=3 SV=1
MSRKCFMKFEKLQQEGKARRGRITFPRGVVDTPAFMPVGTYGTVKGMLPRDIEETGAQMILGNTFHLMLRPGTEVIKKHGDLHDFMQWKGPILTDSGGFQVFSLGKTRKITEKGVHFQSPVNGSKVFMGPEESMQVQRDLGSDVVMIFDECTPYPATEQQAADSMRLSLRWAERSKNAHADNPAALFAIVQGGMYDSLRDESLKGLIEIEFDGYAIGGLSVGEPKDEMVKVLDHIAHQLPEDKPRYLMGVGKPEDLVEGVRRGIDMFDCVMPTRNARNGHLFVDTGVVKLRNASNKTDTRPLDETCDCYTCRNFSRAYLHHLDKCKEILGSQLNTIHNLRFYQRLMQGLRDALDQGKLSDFVVEFYRKRGLDVPECRE

SEQ ID NO: 58433 - protein, 372 aa, unidentified
  source 1..372: note = Osedax symbiont
  REGION 1..372: note = tr|A0A1Y5HX88|A0A1Y5HX88_9BACT Queuine tRNA-ribosyltransferase OS='Osedax' symbiont bacterium Rs2_46_30_T18 OX=1856298 GN=tgt PE=3 SV=1
MKFEKLQQDGKARRGRITFPRGVVETPAFMPVGTYGTVKGMLPRDVEEIGAHMILGNTFHLMLRPGTEIIKQHGDLHDFMQWQGPILTDSGGFQVFSLGNMRKITEKGVTFHSPVNGDKVFIDPEKSMQVQRDLGSDVVMIFDECTPYPATEQEAADSMRLSLRWADRSKKAHGDSPSALFAIVQGGMYENLRDESLQGLTDIGFDGYAIGGLSVGEPKDEMIKILDHTAHQLPEDKPRYLMGVGKPEDLVEGVRRGVDMFDCVMPTRNARNGHLFVDTGVVKLRNASNKTDTSPLDETCDCYTCRNFSRAYLHHLDKCKEILGSQLNTIHNLRFYQRLMMDIRKALDEGNFDEFVAEFYRKRGIEVPSLRE

SEQ ID NO: 58434 - protein, 379 aa, unidentified
  source 1..379: note = Otariodibacter oris
  REGION 1..379: note = tr|A0A420XIZ6|A0A420XIZ6_9PAST Queuine tRNA-ribosyltransferase OS=Otariodibacter oris OX=1032623; GN = tgt PE=3 SV=1
MKYELKKTSGQARRGRLTFSRPKGEYHVETPAFMPVGTYGTVKGMTPEEVAATGAQILLGNTFHLWLRPGQEVMRQHGDLHDFMQWHGPILTDSGGFQVFSLGKLRKIKEEGVHFQNPINGEKIFLSPEKSMEIQYDLGSDIVMIFDECPPYPSTFDYAKQSMEMSLRWAKRSRDRFDELGNKNALFGIIQGGVYEELRKISTEELVKIGFDGYAVGGLAVGEPKEDMHRILEYVCPQIPQDKPRYLMGVGKPEDLVEGVRRGIDMFDCVMPTRNARNGHLFVTDGIVKIRNAKYRNDTTPLDPECDCYTCKNYTKAYLYHLDKCGEILGARLNTIHNLRYYQRLMAQIRQAIEDDRFDDFVVEFYEKMGKKVPPLQLS

SEQ ID NO: 58435 - protein, 390 aa, unidentified
  source 1..390: note = Ottowia oryzae
  REGION 1..390: note = tr|A0A2S0MD45|A0A2S0MD45_9BURK Queuine tRNA-ribosyltransferase OS=Ottowia oryzae OX=2109914; GN = tgt PE=3 SV=1
MLNFELLGTDPASHARRGRLTLNHGVVQTPIFMPVGTYGTVKGVMPRSLHEMGAQIILGNTFHLWMRPGLDVMAQFGGLHGFENWQKPILTDSGGFQVWSLGEMRKISEEGVKFASPVNGDKLFLTPEISMQIQTVLNSDIVMQFDECTPYETKGHITTEREARSSMELSLRWAKRCQAEFARLENRNALFGIVQGGMFENLRQESLEQLVAMDFPGYAIGGVSVGEPKEDMARITAHTPHRLPAHKPRYMMGVGTPEDLVYGVQHGVDMFDCVMPTRNARNGHTFTRYGDLKIRNARHKADPRPIDETCTCYACAGTSGVPWADGGREGFSRAYLHHLDRCGEMLGPMLATVHNLHYYLNLMQEMRDALDAGSFSAFRQRFATDRARGV

SEQ ID NO: 58436 - protein, 390 aa, Ottowia sp.
  REGION 1..390: note = tr|A0A5C7USY2|A0A5C7USY2_9BURK Queuine tRNA-ribosyltransferase OS=Ottowia sp. OX=1898956 GN=tgt; PE = 3 SV=1
MLRFELLGQDPSSHARRGRLTLNHGVVETPIFMPVGTYGTVKGVLPRSLREMGAQIILGNTFHLWMRPGLDVLRQFGGLHGFENWHQPILTDSGGFQVWSLGEMRKISEEGVKFASPVNGDRLFLTPEISMQIQTVLNSDIVMQFDECTPYETRGHVTTEAEAHASMALSLRWARRSQAEFERLGNPNALFGIVQGGMFEQLREESLAQLVELDLPGYAIGGVSVGEPKEDMLRITAHTPHRLPAHKPRYLMGVGTPEDLVYGVQHGVDMFDCVMPTRNARNGHLFTRFGDLKIRNARHKSDPRPIDESCTCHTCAGASGVAWQDGGREGFSRAYLHHLERCGEMLAPMLASIHNLHYYLNLMRDIRAALDAGAFGAFRQRFAAERARGV

SEQ ID NO: 58437 - protein, 397 aa, Ottowia sp.
  REGION 1..397: note = tr|A0A5C8J419|A0A5C8J419_9BURK Queuine tRNA-ribosyltransferase OS=Ottowia sp. GY511 OX=2603274; GN = tgt PE=3 SV=1
MLNFEILGTDAGSHARRGRLTLNHGVVQTPIFMPVGTYGTVKGVMPRSLHEMGAQIILGNTFHLWMRPGLDIMKSFGGLHGFEKWDKPILTDSGGFQVWSLGAMRKITEEGVHFQSPVNGDKLFMSPEISMQIQTILNSDIVMQLDECTPYETNGKKTTEAEARKSMEMSRRWAQRSKDEFERLGNPNALFGIVQGGMFTNLREESLQALVEMDFPGYAVGGVSVGEPKDEMLEIMAHTPHLLPANKPRYLMGVGTPEDLVQGVADGVDMFDCVMPTRNARNGTLFTRYGDLKIRNARHKTDHQPIDTTCTCYACAGSPGGPSGSGGVSWDDGGRNGFSRAYLHHLDRCGEMLGPMLTTIHNLHYYLNLMQEVRDALDAGQFSHFRARFAADRARGV

SEQ ID NO: 58438 - protein, 376 aa, Owenweeksia hongkongensis
  REGION 1..376: note = tr|G8R0N2|G8R0N2_OWEHD Queuine tRNA-ribosyltransferase OS=Owenweeksia hongkongensis (strain DSM 17368 / CIP 108786 / JCM 12287 / NRRL B-23963 / UST20020801) OX=92656 2 GN=tgt PE=3 SV=1
MNFELKAQDSKSKARAGVLTTAHGEIQTPIFMPVGTVASVKAVHQRELKEDIKAQIILGNTYHLYLRPGTDIINGAGGLHKFMNWDRPILTDSGGYQVYSLSNNNKITEEGVKFKSHIDGSRHFFSPEKSMEIQRNIGADIIMAFDECPPYPSTYEYAKNSMDMTHRWLQRCIDWLKENPELYGFEQSLFPIVQGSTYNDLRKESAETIASHPCDGYAIGGLSVGEPHDEMYAMSDLVCSYLPEDKPRYLMGVGTPANILENIALGVDMFDCVMPTRNGRNGMIFTSEGIINIKNKKWERDFSPLDPNGTSFVDSDYSKAYLRHLFAANEYLGRQIASLHNLRFYLWLVNEAREKIIDGTFASWKNVMVEKLQTRL

SEQ ID NO: 58439 - protein, 376 aa, Owenweeksia sp.
  REGION 1..376: note = tr|A0A1Z8LEK9|A0A1Z8LEK9_9FLAO Queuine tRNA-ribosyltransferase OS=Owenweeksia sp. TMED14; OX = 1986609 GN=tgt PE=3 SV=1
MNFELKSLDKKSSARAGIFYTDHGEIKTPIFMPVGTSGAVKSMYTDHLISDSSAQIILGNTYHLYLRPGTEIIKKAGGLHKFITWERPMLTDSGGFQVHSLQDIRKISEEGVTFQSHIDGSKHMFTPESVMEIQRKIGADIVMAFDECTNYPCQKKYAKEAMNRTHRWLDRCMKYWNTGKNYFGYEQTLFPIVQGSTYSDLRKESAEYIAKKEALGNAIGGLSVGEPAEEMYAMTNDVCSILPKDKPRYLMGVGTPTNLLENIALGVDMFDCVMPTRNARNGQLFTSEGIINIKNAKWADDFSSIDPSGDSIVDNHFSKAYLRHLFVSNESLGKQIASLHNLRFYLWLVEEARNRIILGDFTSWKARIIPRLEKRL

SEQ ID NO: 58440 - protein, 376 aa, Owenweeksia sp.
  REGION 1..376: note = tr|A0A2D8SNF3|A0A2D8SNF3_9FLAO Queuine tRNA-ribosyltransferase OS=Owenweeksia sp. OX=2024847; GN = tgt PE=3 SV=1
MRYTLQAQDPGSKARAGIFKTDHGEIETPIFMPVGTVGSVKAVHQRELKNDVQAQIILGNTYHLYLRPGTSLMQQAGGLHHFIGWDRPILTDSGGYQVYSLANNRKITEEGVAFKSHIDGSKHFFSPEKSMEIQRIIGADIIMAFDECPPYPSTYEYARTSMEMTHRWLKRCVDWLDKNPELYGHGQSIFPIVQGSTFNDLRTRSAETIASFDCEGYAIGGLSVGEPHEEMYAMSELVCDVLPEDRPRYLMGVGTPANILENIALGVDMFDCVMPTRNGRNGMLFTSEGIINIKNQKWADDFSPVDPNGTSFVDGDYTKAYLRHLFAANEYLGRQIASLHNLSFYLWLVKEAREKIKEGIFSQWKNEMVIKLQTRL

SEQ ID NO: 58441 - protein, 375 aa, Oxalobacter formigenes
  REGION 1..375: note = tr|C3X619|C3X619_OXAFO Queuine tRNA-ribosyltransferase OS=Oxalobacter formigenes HOxBLS; OX = 556268 GN=tgt PE=3 SV=1
MLEFELVNTDGNARRGRLKLAHGTVETPIFMPVGTYGSVKAMSPSNLNDINAQIVLGNTFHLWLRPGLDIVRQFGGLHQFMGWNRPILTDSGGFQVFSLGAMRKISEEGVKFASPIDGSRLFLSPEISMQIQHVLNSDIVMQFDECTPYLINDRPASKDEAAQSMRLSLRWAQRSKQEFENNANPNALFGIVQGGMYTDLRDESLAGLTDMGFHGIAIGGLSVGEPKDEMFRILKHIGPRLPDNLPHYLMGVGTPEDLVAGVASGIDMFDCVMPTRNARNGWLFTRFGDIRLRNARYKDDRRPLDETCQCYTCRHFSRAYLHHLNRVGEILGAQLSTIHNLHYYLQLMSEMRKAIETNRFAEFTAQFHAERQRGF

SEQ ID NO: 58442 - protein, 375 aa, Oxalobacter formigenes
  REGION 1..375: note = tr|C3XC98|C3XC98_OXAFO Queuine tRNA-ribosyltransferase OS=Oxalobacter formigenes OXCC13; OX = 556269 GN=tgt PE=3 SV=1
MLDFELINTSSNARRGRLKLAHGTVETPIFMPVGTYGSVKAMSPENLDDIEAQIILGNTFHLWLRPGLDVIGQFGGLHDFIGWDKPILTDSGGFQVFSLGAMRKISEEGVKFASPINGSKLFLSPEISMQIQHVLNSDIVMQFDECTPYLINDRPATKDEAAQSMRLSLRWGQRSKDEFDRNENKNALFGIVQGGMFTDLRDESLAGLSQMGFNGIAIGGLSVGEPKEEMNRILSHIGPRLPAHMPHYLMGVGTPEDLVAGVANGIDMFDCVMPTRNARNGWLFTRFGDIRIRNARYKDDGKPLDETCQCYACRHFSRAYIHHLNRVGEILGAQLSTIHNLHYYLQLMNDMRKAIENDRFNEFTAQFHAERQRGI

SEQ ID NO: 58443 - protein, 375 aa, Oxalobacter sp.
  REGION 1..375: note = tr|A0A3A6PAA5|A0A3A6PAA5_9BURK Queuine tRNA-ribosyltransferase OS=Oxalobacter sp. OX=2093374; GN = tgt PE=3 SV=1
MLKFELLKIDGHARRGRLKLNHGTVETPVFMPVGTYGSVKAMSPLDLHDIDAQIILGNTFHLWLRPGLQVIEKFGGLHRFMGWERPILTDSGGFQVFSLGAMRKISEEGVRFASPINGDKLFLSPEISMQIQRVLNADVVMQFDECTPYKIGERVATKDEAAKSMQLSLRWGKRSIDEFQREENPNALFGIVQGGMFEDLREESLGALNALGFHGMAIGGLSVGEPKEDMRRILSHIGPKLPAHQPHYLMGVGTPEDLVEGVANGIDMFDCVMPTRNARNGWLFTRFGDIRIRNARYRDDETPLDDSCTCYCCRHFSRAYLHHLDRIGEMLGGRLNTIHNLHYYLQLMQDMRGAIENGRFAQFVTQFQAGRTRGI

SEQ ID NO: 58444 - protein, 265 aa, unidentified
  source 1..265: note = Oxalobacteraceae bacterium
  REGION 1..265: note = tr|A0A4V1TD23|A0A4V1TD23_9BURK Queuine tRNA-ribosyltransferase (Fragment) OS=Oxalobacteraceae bacterium OX=1871070 GN=EOO79_07915 PE=3 SV=1
MSRTCRMSFELLATDGKARRGRLTFPRGVVETPAFMPVGTYGTVKGMLPRDIEAIGAQMILGNTFHLWLRPGTAVIKAHGDLHDFMQWKGPILTDSGGFQVFSLGAMRKIKEEGVYFASPVDGSKVFMGPEESMQVQRDLGSDVVMIFDECTPYPADEHTARTSMELSLRWAQRSKDAHGESTAALFGIVQGGMHENLRMRSLEGLDKIGFDGLAIGGLSVGEPKHEMIKVLDYLPGQMPADKPRYLMGVGKPEDLVEGVRRGVD

SEQ ID NO: 58445 - protein, 374 aa, unidentified
  source 1..374: note = Oxalobacteraceae bacterium
  REGION 1..374: note = tr|A0A4Y9RRC4|A0A4Y9RRC4_9BURK Queuine tRNA-ribosyltransferase OS=Oxalobacteraceae bacterium OM1; OX = 2561929 GN=tgt PE=3 SV=1
MKYELIKTDGKARRGRLTLNHGVVETPIFMPVGTYGSVKAMSPLELEEIGAQIILGNTFHLWLRPGLDVVEKFKGLHDFIGWKKPMLTDSGGFQVFSLGAMRKITEEGVKFASPVNGDKLFLSPEISMQIQRVLNSDIVMQFDECTPYEIDGRPATELEAANSMRMSLRWAKRSRDEFDKGENPNALFGIVQGGMFTHLRDESLAGLQDIDFDGIAIGGLSVGEPKEEMLRVLEHVGPRLPADKPHYLMGVGTPEDLVAGVANGVDMFDCVMPTRNARNGWIFTRFGDIKIKNSRYKDDQKPLDESCECYACRNFSRAYLYHLHRVGEILGARLNTIHNLHYYLQLMKEIRQAIDEDRFQAFVVKFQADRARGV

SEQ ID NO: 58446 - protein, 376 aa, Oxobacter pfennigii
  REGION 1..376: note = tr|A0A0P8YYW5|A0A0P8YYW5_9CLOT Queuine tRNA-ribosyltransferase OS=Oxobacter pfennigii OX=36849; GN = tgt PE=3 SV=1
MDAISYELIKKSNGCDARLGKLHTPHGVIDTPVFMPVGTQATVKAMSPDELKDLGAHIILSNTYHLYMRPGEKLVKKSGGLHKFMNWDRAILTDSGGFQVFSLSNLRDIKEEGVTFKSHIDGSKHFISPEKAIEIQNDLGADIIMCFDECLPYPVEHDYASSSLNRTIRWAVRCKETHKDTERQSLFGIIQGGMFKDLRERSAKEMVALDFPGYSIGGLSIGEPKPIMYDVLDWTVHLLPDNKPRYLMGVGSPDCLIEGAIRGVDMFDCVLPTRIARNGTVFTSQGKLVVRNAEYAEDLRPMDTECDCYACRNYSRAYIRHLFKAKEILGARLTTIHNLHFLIKLMEKIRQAIKDDNLLKLRDEFYAKYGYNRDEI

SEQ ID NO: 58447 - protein, 376 aa, unidentified
  source 1..376: note = Pacificibacter marinus
  REGION 1..376: note = tr|A0A1Y5RSY0|A0A1Y5RSY0_9RHOB Queuine tRNA-ribosyltransferase OS=Pacificibacter marinus; OX = 658057 GN=tgt PE=3 SV=1
MTQRISFSLDATDGKARTGVISTPRGDIRTPAFMPVGTAGTVKAMMPESVRATGADILLGNTYHLMLRPTAERIDRLGGLHKFMNWERPILTDSGGFQVMSLAGLRKLTEEGVTFASHVDGSKHVITPERSMEIQKLLGSDIVMCFDECPALPATEEDVAKSMRMSMRWAQRSRDAFGDRPGHALFGIMQGGVTQELREESSQALTDIGFDGYAVGGLAVGEGQEAMFGVLDYAPDYLPQDKPRYLMGVGKPDDIVGAVKRGIDMMDCVLPSRSGRNGQVFTRHGAINIKNARHADDPRPLDENCTCPACSQYSRAYLHHVFRSHEMISGMLLTWHNLHYFQEIMQGMRDAIAAGTFAAWEADFHAVRAAGDIEPL

SEQ ID NO: 58448 - protein, 376 aa, Pacificibacter maritimus
  REGION 1..376: note = tr|A0A3N4UW42|A0A3N4UW42_9RHOB Queuine tRNA-ribosyltransferase OS=Pacificibacter maritimus; OX = 762213 GN=tgt PE=3 SV=1
MTQRISFSLDATDGKARTGVISTPRGDIRTPAFMPVGTAGTVKAMMPESVRATGADILLGNTYHLMLRPTAERIDRLGGLHKFMNWERPILTDSGGFQVMSLAGLRKLTEEGVTFASHVDGSKHVITPERSMEIQKLLGSDIVMCFDECPALPASDEDVAKSMRMSMRWAQRSKDAFGDRPGHALFGIMQGGVTPDLREESAKALIDIGFDGYALGGLAVGEGQEAMFGVLDYAPDFLPQDKPRYLMGVGKPDDIVGAVKRGVDMMDCVLPSRSGRNGQVFTRRGTLNMKNARHADDPRPMDENCSCPACSQYSRAYLHHVYRSHEMISGMLLTWHNLHYFQDIMQGMRDAIAAGTFDAWEAEFHATRALGDIEPL

SEQ ID NO: 58449 - protein, 380 aa, unidentified
  source 1..380: note = Pacificimonas flava
  REGION 1..380: note = tr|A0A219B1X9|A0A219B1X9_9SPHN Queuine tRNA-ribosyltransferase OS=Pacificimonas flava OX=1234595; GN = tgt PE=3 SV=1
MAPRFAFELSATDGRARRGTIRMRRGEIRTPAFMPVGTAATVKAMKPQAVRDTGADILLGNTYHLMLRPGDERIARLGGLHEFMKWERPILTDSGGFQVMSLSELTQQSEEGVAFKSHLDGSRHLLSPERSMEIQRNLDSDIVMAFDECTSWPVERDAAAASMHRSMRWAARSRAGFDSGEAHAAGATLFGIQQGSMFEDLRWESSHALQDIGFDGYAVGGLAVGEGQEQMFAVLDYAPELLPRDRPRYLMGVGKPDDLVGAVARGIDMFDCVLPTRSGRTGQAFTHDGPINIKNARFAEDRGPIDGDCRCAVCETFERAYLHHLVRSGEILGAMLMTEHNLSFYQQLMAGMRAAIEEARFGTFAAEFTTRYGRTKNGTG

SEQ ID NO: 58450 - protein, 376 aa, unidentified
  source 1..376: note = Pacificimonas flava
  REGION 1..376: note = tr|M2U3U8|M2U3U8_9SPHN Queuine tRNA-ribosyltransferase OS=Pacificimonas flava OX=1234595; GN = tgt PE=3 SV=1
MTPRFEFDIAASDGAARTGTIRMQRGDIRTPAFMPVGTAATVKAMKPETVRAIGADIILGNTYHLMLRPGDERIARLGGLHAFSRWTRPILTDSGGFQVMSLGDLTEQSEEGVAFKSHLDGSRHMLSPERSMEIQRNLGSDIVMAFDECTAYPVERDVAAASMRRSMRWARRSREGFDSGADHAGRAALFGIQQGSMHEDLRRESSEALMEIGFDGYAVGGLAVGEGQAQMLEVLDFAPGMLPADRPRYLMGVGKPDDIVHAVMRGIDMFDCVLPTRSGRTGQAFTHDGPLNIRNARFKEDVEPLDADCRCSVCGEFSRAYLHHLIRAGEILGAMLMTEHNLAFYQQVMAGLRGAIAGGRAEAHARAFLSRYSGAN

SEQ ID NO: 58451 - protein, 378 aa, Paenalcaligenes hominis
  REGION 1..378: note = tr|A0A1U9K1M8|A0A1U9K1M8_9BURK Queuine tRNA-ribosyltransferase OS=Paenalcaligenes hominis; OX = 643674 GN=tgt PE=3 SV=1
MSGLNFQLVKTDGKARRGTITLNHGEVQTPIFMPVGTYGSVKSMLPHELKDIGAQIVLGNTFHLWLRPGTHTMENHGGLHSFMGWDKPILTDSGGFQVFSLKGMRKITEEGVTFASPINGDKLFLTPEESMRIQRSLNSDIAMVFDECTPYLIDGRPATHDEAAQSMRMSLRWAKRSRQAFKDTENPNALFGIVQGGMYEDLRDESLAGLTDIGFEGYAIGGLSVGEPKEDMLRILEHTTPALPEQAPRYLMGVGTPEDLVDGVANGIDMFDCVMPTRNARNGWLFTRFGDVKIRNARYKDDTKPLDPSCSCHTCQHFSRSYLHHLQRANEITGARLNTLHNLHFYLQIMQEMRDAIEAGRFEAWRKQFASDRARGIE

SEQ ID NO: 58452 - protein, 436 aa, unidentified
  source 1..436: note = Paenarthrobacter aurescens
  REGION 1..436: note = tr|A1R2S5|A1R2S5_PAEAT Queuine tRNA-ribosyltransferase OS=Paenarthrobacter aurescens (strain TC1) OX=290340 GN=tgt PE=3 SV=1
MPASSSAPASSPALPGLSQRQSEFSFSVGKRLTETCSPSDSQVDANGGAFLGRTGTITTPHGTIQTPAFIAVGTKATVKAVLPESIAELGAQAVLANAYHLYLQPGPEILDAAGGLGAFMNWSGPTFTDSGGFQVMSLGSGFKKVIDMKNVDSSGPDDAVAPGKERLAHIDDDGVWFKSHLNGDRHRFSPEISMQVQHQIGADIMFAFDELTTLQNSRAYQEESLERTRLWALRCLEEHARLTSSRVGKPYQALFGVIQGAQYEDLRRKACQDLGAMPFDGYGIGGALEKENLGTIVRWCNEELPEDKPRHLLGISEPDDIFTAIENGADTFDCVSPTRVARNSAFYTPFGRFNLSGAKYKTDFGPLQDGCDCYTCVNYSRAYIHHLFKAKEMLSATLISIHNERFVVKMVDDARLAIESGDFFEFKAETLGRYYS

SEQ ID NO: 58453 - protein, 409 aa, unidentified
  source 1..409: note = Paenarthrobacter aurescens
  REGION 1..409: note = tr|A0A4Y3NAM0|A0A4Y3NAM0_PAEAU Queuine tRNA-ribosyltransferase OS=Paenarthrobacter aurescens; OX = 43663 GN=tgt PE=3 SV=1
MGTRLTETCSPSDAQVDANGGAFLGRTGTITTPHGTIQTPAFIAVGTKATVKAVLPESIAQLGAQAVLANAYHLYLQPGPEILDAAGGLGAFMNWSGPTFTDSGGFQVMSLGSGFKKVIDMKNVDNSGPDDAVAPGKERLAHIDDDGVWFKSHLNGDRHRFSPEISMQVQHQIGADIMFAFDELTTLQNSRAYQEESLERTRLWALRCLEEHASLTSSRAAKPYQALFGVIQGAQYEDLRRKACQDLGAMPFDGYGIGGALEKENLGTIVRWCNEELPENKPRHLLGISEPDDIFTAIENGADTFDCVSPTRVARNSAFYTPFGRFNLSGARYKTDFGPLQDGCDCYTCVNYSRAYIHHLFKAKEMLSATLISIHNERFVVKMVDDARLAIESGDFFEFKAETLGRYYS

SEQ ID NO: 58454 - protein, 409 aa, unidentified
  source 1..409: note = Paenarthrobacter nicotinovorans
  REGION 1..409: note = tr|A0A318WEN2|A0A318WEN2_PAENI Queuine tRNA-ribosyltransferase OS=Paenarthrobacter nicotinovorans; OX = 29320 GN=tgt PE=3 SV=1
MGTRLTETCSPSDAQVDANGGAFLGRTGTITTPHGTIQTPAFIAVGTKATVKAVLPESIAELGAQAVLANAYHLYLQPGPEILDAAGGLGAFMNWSGPTFTDSGGFQVMSLGSGFKKVIDMKNVDSSGPDDAVAPGKERLAHIDDDGVWFKSHLNGDRHRFSPEISMQVQHQIGADIMFAFDELTTLQNSRAYQEESLERTRLWALRCLEEHASLTASRVGKPYQALFGVIQGAQYEDLRRKACQDLGAMPFDGYGIGGALEKENLGTIVRWCNEELPEDKPRHLLGISEPDDIFTAIENGADTFDCVSPTRVARNSAFYTPFGRFNLSGARYKTDFGPLQDGCDCYTCVNYSRAYIHHLFKAKEMISATLISIHNERFVVKMVDDARLAIESGDFFEFKAETLGRYYS

SEQ ID NO: 58455 - protein, 436 aa, unidentified
  source 1..436: note = Paenarthrobacter nicotinovorans
  REGION 1..436: note = tr|A0A175J6C2|A0A175J6C2_PAENI Queuine tRNA-ribosyltransferase OS=Paenarthrobacter nicotinovorans; OX = 29320 GN=tgt PE=3 SV=1
MPASVPAPASSPALPGLSDRQSEFSFSVGTRLTETCSPSDAQVDANGGAFLGRTGTITTPHGTIQTPAFIAVGTKATVKAVLPESIAELGAQAVLANAYHLYLQPGPEILDAAGGLGAFMNWSGPTFTDSGGFQVMSLGSGFKKVIDMKNVDSSGPDDAVAPGKERLAHIDDDGVWFKSHLNGDRHRFSPEISMQVQHQIGADIMFAFDELTTLQNSRAYQEESLERTRLWALRCLEEHASLTASRVGKPYQALFGVIQGAQYEDLRRKACQDLGAMPFDGYGIGGALEKENLGTIVRWCNEELPEDKPRHLLGISEPDDIFTAIENGADTFDCVSPTRVARNSAFYTPFGRFNLSGARYKTDFGPLQDGCDCYTCVNYSRAYIHHLFKAKEMISATLISIHNERFVVKMVDDARLAIESGDFFEFKAETLGRYYS

SEQ ID NO: 58456 - protein, 436 aa, unidentified
  source 1..436: note = Paenarthrobacter nitroguajacolicus
  REGION 1..436: note = tr|A0A558H140|A0A558H140_PAENT Queuine tRNA-ribosyltransferase OS=Paenarthrobacter nitroguajacolicus OX=211146 GN=tgt PE=3 SV=1
MPASSSAPASSPALPGLSHRQSEFSFSVGTRLTETCSPSDAQVDANGGAFLGRTGTITTPHGTIQTPAFIAVGTKATVKAVLPESIAELGAQAVLANAYHLYLQPGPEILDAAGGLGAFMNWSGPTFTDSGGFQVMSLGSGFKKVIDMKNVDSSGPDDAVAPGKERLAHIDDDGVWFKSHLNGDRHRFSPEISMQVQHQIGADIMFAFDELTTLQNSRAYQEESLERTRLWALRCLTEHASLTASRVGKPYQALFGVIQGAQYEDLRRKACQDLGAMPFDGYGIGGALEKENLGTIVRWCNEELPEDKPRHLLGISEPDDIFTAIENGADTFDCVSPTRVARNSAFYTPFGRFNLSGARYKTDFGPLQDGCDCYTCVNYSRAYIHHLFKAKEMISATLISIHNERFVVKMVDDARLAIESGDFFEFKAETLGRYYS

SEQ ID NO: 58457 - protein, 441 aa, unidentified
  source 1..441: note = Paenarthrobacter ureafaciens
  REGION 1..441: note = tr|A0A444GXE7|A0A444GXE7_9MICC Queuine tRNA-ribosyltransferase OS=Paenarthrobacter ureafaciens; OX = 37931 GN=tgt PE=3 SV=1
MPASVSQSSPLPTAAPRSNGALPAEQTEFGFTVGRRLTETSSPSSSLVEANGGEFLGRTGTITTPHGTIQTPAFIAVGTKATVKAVLPESIAELGAQAVLANAYHLYLQPGPEILDAAGGLGAFMNWQGPTFTDSGGFQVMSLGSGFKKVIDMKNVDTSGPDDAVAPGKERLAHIDDDGVWFKSHLNGDKHRFSPEISMQVQHQIGADIMFAFDELTTLQNSRGYQEESLERTRLWALRCLEEHFALTASRVGKPYQALFGVIQGAQYEDLRRKACRDLGAMPFDGYGIGGALEKENLGTIVRWCNEELPEDKPRHLLGISEPDDIFTAIENGADTFDCVSPTRVARNSAFYTPFGRFNLSGAKYKKDFGPLQDGCDCYTCTNYSRAYIHHLFKAKEMVSATLISIHNERFVVKMVDDARLAIESGDFFEFKAETLGRYYS

SEQ ID NO: 58458 - protein, 376 aa, unidentified
  source 1..376: note = Paenibacillaceae bacterium
  REGION 1..376: note = tr|A0A2A6DZX4|A0A2A6DZX4_9BACL Queuine tRNA-ribosyltransferase OS=Paenibacillaceae bacterium JTherm OX=1906605 GN=tgt PE=3 SV=1
MSAIRFELIKTCRQTGARLGRVHTPHGSFETPAFMPVGTQATVKTLSPEELKEMGAEIILSNTYHLFVRPGHELIREAGGLHRFMNWDRPILTDSGGFQVFSLSDRRKIDEEGVEFRSHLNGDRLFLSPEKATEVQNALGADIIMAFDECPPYPADYAYVRASAERTVRWAERCLRAHARPTDQAMFAIVQGGVYPDLRRACAEQLTSLDFPGYAIGGLSVGEPKPIMYEMLEATVPLLPADRPRYLMGVGSPDALIEGAMRGIDMFDCVLPTRIARNGTVMTSKGRLVVRNAEYARDLSPLDPDCDCYACRHYTRAYVRHLLKADEVFGIRLTSYHNLYFLLRLMRRIRQAILEDRLRDFRDEFFAAYAARGEGF

SEQ ID NO: 58459 - protein, 377 aa, unidentified
  source 1..377: note = Paenibacillaceae bacterium
  REGION 1..377: note = tr|A0A1Y3QKK2|A0A1Y3QKK2_9BACL Queuine tRNA-ribosyltransferase OS=Paenibacillaceae bacterium ZCTH02-B3 OX=1861638 GN=tgt PE=3 SV=1
MAVRYELIKTCRQTGARLGRLHTPHGVIDTPAFMPVGTQATVKAVSPEELKALGAQIILSNTYHLFIRPGHELIREAGGLHRFMNWDRAILTDSGGFQVFSLADRRKIREEGVEFRSHLDGSLLFLSPEKATEVQNALGADIIMCFDECAPYPADYEYVRESTARTSRWAERCLKAHRRPDDQALFGIVQGGMYPDLRRQSAKDLTSLDFPGYAIGGLSVGEPKPVMYELLETTVPLLPDRKPRYLMGVGSPDALIEGSIRGIDMFDCVLPTRIARNGTVMTSRGRLVIRNAAYERDFGPLDPACDCYTCTHYSRAYIRHLIKADEIFGLRLTTIHNLHFLGSLMARIRQAIREDRLADFRDEFFESYGMARHKSGF

SEQ ID NO: 58460 - protein, 377 aa, Paenibacillus agaridevorans
  REGION 1..377: note = tr|A0A2R5EQ76|A0A2R5EQ76_9BACL Queuine tRNA-ribosyltransferase OS=Paenibacillus agaridevorans; OX = 171404 GN=tgt PE=3 SV=1
MAVKYEFIKECKQSGARLGRVHTPHGIIDTPTFMPVGTQATVKTMSPEELKDMDAHIILSNTYHLFLRPGHGIVKQAGGLHKFMNWDRPILTDSGGFQVFSLSEMRKITEEGVHFRSHLNGDKLFISPEVAMEIQNALGSDIMMAFDECPPYPAEYEYVKQSTERTSRWAERCLAAHARPQDQALFAIVQGGMHKDLRIQSAKDLTSMDFPGYAIGGLSVGEPKHLMYEVLDYTVPELPADKPRYLMGVGSPDALLEGSIRGIDMFDCVLPTRIARNGTTMTSSGRLVIKNAKFTEDFGPLDPNCSCYTCRNYSRAYIRHLLKADETFGIRLTTYHNLHFLLQLMRDVRQAIMEDRLLDFRDSFFEAYGLNDNDKGF

SEQ ID NO: 58461 - protein, 377 aa, Paenibacillus algorifonticola
  REGION 1..377: note = tr|A0A1I2AZ41|A0A1I2AZ41_9BACL Queuine tRNA-ribosyltransferase OS=Paenibacillus algorifonticola; OX = 684063 GN=tgt PE=3 SV=1
MAVTYELLKVCKQSGARLGRVHTPHGVIETPAFMPVGTQATVKTMSPEELKTMDAHIILSNTYHLFLRPGHDLIGRAGGLHKFMNWDRPILTDSGGFQVFSLSEMRKITEEGVQFRSHLNGDKMFLSPEKAMEIQNALGSDIMMAFDECPPYPAEHAYVKQSLERTTRWAERCLESHARPHDQGLFAIVQGGMYEDLRIQSAKDLTSMDFPGYAIGGLSVGEPKHLMYQALEYTVPLLPTGKPRYLMGVGSPDALLEGSIRGIDMFDCVLPTRIARNGTTMTSEGRLVIRNAKYAEDFGPLDPKCSCYTCTNYSRAYIRHLMKADETFGMRLTTYHNLHFLLQLMRDVRQAITEDRLLDFRDEFFDSYGLRDNDKGF

SEQ ID NO: 58462 - protein, 378 aa, Paenibacillus alvei
  REGION 1..378: note = tr|S9UCG5|S9UCG5_PAEAL Queuine tRNA-ribosyltransferase OS=Paenibacillus alvei TS-15; OX = 1117108 GN=tgt PE=3 SV=1
MAAVTYELIKTCKQTGARLGKVHTPHGSFDTPIFMPVGTLATVKTMSPEELKEMEAKIILSNTYHLFLRPGHEIIREAGGLHKFMNWDRAILTDSGGFQVFSLSDMRKIEEEGVHFRSHLNGDKLFLSPEKAMEIQNALGSDIMMAFDECPPYPAEPQYIKPSLERTTRWAERCLESHARPHDQALFAIIQGGMYEDLRRQSAKDLTSMDFPGYAIGGLSVGEPKHLMYEVLDYTTPLLPANKPRYLMGVGSPDALIEGAMRGVDMFDCVLPTRIARNGTTMTSQGRLVVRNAKYARDFGPLDPKCDCYTCRNYSRAYLRHLIKADETFGLRLTTYHNLYFLVNLMSQVREAIREDRLRDFRDEFFEAYGMDRNESGF

SEQ ID NO: 58463 - protein, 378 aa, Paenibacillus alvei
  REGION 1..378: note = tr|K4ZEH7|K4ZEH7_PAEA2 Queuine tRNA-ribosyltransferase OS=Paenibacillus alvei (strain ATCC 6344 / DSM 29 / NBRC 3343 / NCIMB 9371 / NCTC 6352); OX = 1206781 GN=tgt PE=3SV=1
MAAVTYELIKTCKQTGARLGKVHTPHGSFETPIFMPVGTLATVKTMSPEELKEMEAKIILSNTYHLFLRPGHDIIREAGGLHKFMNWDRAILTDSGGFQVFSLSDMRKIEEEGVHFRSHLNGDKLFLSPEKAMEIQNALGSDIMMAFDECPPYPAEREYVKPSLERTTRWAERCLESHTRPHDQALFAIIQGGMYEDLRRQSAKDLTSMDFPGYAIGGLSVGEPKHLMYEVLDYTTPLLPDNKPRYLMGVGSPDALIELAMRGVDMFDCVLPTRIARNGTTMTSQGRLVVRNAKYARDFGPLDPKCDCYTCRNYSRAYLRHLIKADETFGLRLTTYHNLYFLVNLMSQVREAIREDRLRDFRDEFFEAYGMDRNESGF

SEQ ID NO: 58464 - protein, 378 aa, Paenibacillus amylolyticus
  REGION 1..378: note = tr|A0A100VPR6|A0A100VPR6_PAEAM Queuine tRNA-ribosyltransferase OS=Paenibacillus amylolyticus; OX = 1451 GN=tgt PE=3 SV=1
MAAITYEHIKTCKQSGARLGRVHTPHGIIETPTFMPVGTQATVKTMSPEELKEMDAQIILSNTYHLFLRPGHEIIREAGGLHKFMNWDRPILTDSGGFQVFSLSEMRKITEEGVNFRSHLNGDKKFLSPEVAMEIQNALGSDIMMAFDECPPYPAEYEYVKKSLERTSRWAERCLESHARPHDQGLFAIVQGGMHEDLRRQSAADLTSMDFPGYAIGGLSVGEPKHLMYGVLDYTLPLLPSNKPRYLMGVGSPDALIEGSIRGVDMFDCVLPTRIARNGTTMTSQGRLVVRNAKFATDFGPLDPECDCYTCRNYSRAYLRHLIKADETFGLRLTTIHNLHFLQNLMRNVRKAIMEDRLLDFRDEFFDQYGLHDNDKGF

SEQ ID NO: 58465 - protein, 379 aa, Paenibacillus anaericanus
  REGION 1..379: note = tr|A0A433Y4J5|A0A433Y4J5_9BACL Queuine tRNA-ribosyltransferase OS=Paenibacillus anaericanus; OX = 170367 GN=tgt PE=3 SV=1
MTAPIRYEHIKTCKQSGARLGRVHTPHGIIETPVFMPVGTQATVKTMSPEELKEMDARIILSNTYHLFLRPGHETIKEAGGLHKFMNWDRAILTDSGGFQVFSLSDMRKISEEGVHFRSHLNGDKMFLSPEVAMEIQNALGPDIMMAFDECAPFPAEYDYVKHSMERTTRWAERCLKSHARPNDQGLFAIVQGGMFEDLRKQSARDLTSLDFPGYAIGGLSVGEPKHLMYEVLDYTVPFLPTDKPRYLMGVGSPDALIEGSIRGIDMFDCVLPTRIARNGTTMTSQGRLVVRNAQYAKDFGPLDPECGCYTCRNYSRAYLRHLIKSDETFGLRLTTYHNLYFLISLMGKIRQAIMDDRLLDFRDEFFEQYGLIGNTKGF

SEQ ID NO: 58466 - protein, 379 aa, Paenibacillus antarcticus
  REGION 1..379: note = tr|A0A168JJI0|A0A168JJI0_9BACL Queuine tRNA-ribosyltransferase OS=Paenibacillus antarcticus; OX = 253703 GN=tgt PE=3 SV=1
MVAAITYEHIKTCKQSGARLGRVHTPHGIIETPTFMPVGTLATVKTMSPEELKQMDAQIILSNTYHLFLRPGHDIIREAGGLHKFMNWDRPILTDSGGFQVFSLSEMRKITEEGVHFRSHLNGDKLFLSPEVAMEIQNALGSDIMMAFDECPPYPAEYDYLKKSLERTSRWAERCLESHARPNDQGLFAIVQGGMYEDLRKQSARDLTSMDFPGYAIGGLSVGESKKLMYDVLDYTIPLLPSNKPRYLMGVGSPDALIEGSIRGVDMFDCVLPTRIARNGTTMTSEGRVVIRNAKYARDYGPLDPACDCYTCKNYSRAYLRHLIKADETFGLRLTTYHNLHFLLELMRKVRQSIMDDRLLDFRDEFFEQYGLYENLKGF

SEQ ID NO: 58467 - protein, 378 aa, unidentified
  source 1..378: note = Paenibacillus aquistagni
  REGION 1..378: note = tr|A0A1X7I3H9|A0A1X7I3H9_9BACL Queuine tRNA-ribosyltransferase OS=Paenibacillus aquistagni; OX = 1852522 GN=tgt PE=3 SV=1
MAAVTYEHIKTCKQTGARLGIVHTPHGSFETPIFMPVGTLATVKTMSPEDLKEMDARIILSNTYHLFLRPGHELVREAGGLHKFMNWDRAILTDSGGFQVFSLSDMRKIEEEGVHFKSHLNGDKLFLSPEKVMEIENALGPDIMMAFDECAPFPADYDYVKHSMERTTRWAERCLEAHARPHDQALFAIVQGGMYADLRKQSAMDLTSMDFPGYAIGGLSVGEPKHLMYEVLDSTMPLLPFNKPRYLMGVGSPDALIEGAIRGVDMFDCVLPTRIARNGTTMTSEGRLVVRNAKFERDFGPLDPNCDCYTCRNYSRAYLRHLIKCDETFGLRLTTYHNLYFLLNLMKQVRQAIRDDRLGDFRDEFFEKYGMDQNKSGF

SEQ ID NO: 58468 - protein, 377 aa, unidentified
  source 1..377: note = Paenibacillus baekrokdamisoli
  REGION 1..377: note = tr|A0A3G9J065|A0A3G9J065_9BACL Queuine tRNA-ribosyltransferase OS=Paenibacillus baekrokdamisoli; OX = 1712516 GN=tgt PE=3 SV=1
MAINYELIKTCKQSGARLGRVHTPHGVVETPAFMPVGTQATVKTMSPEELKTMDAQIILSNTYHLFIRPGHEIVKQAGGLHKFMNWDRPILTDSGGFQVFSLSNMRKIKEEGVEFRNHLNGDKLFLSPEKAMEIQNALGSDIMMAFDECAPFPAEYDYVKKSLERTTRWAERCLASHTRPHDQALFAIVQGGMYEDLRRQSALELTSMDFPGYAIGGLSVGEPKDMMYKVLECTVPLLPTTKPRYLMGVGSPDALIDGSIRGIDMFDCVLPTRIARNGTTMTSSGRLNIKNAKFAEDFGPLDSECSCYTCTNYSRAYIRHLIKADETFGLRLTTIHNLHFLLQLMRDVRQAIMDDRLLDFREAFFTKYGLFENNKGF

SEQ ID NO: 58469 - protein, 378 aa, Paenibacillus barcinonensis
  REGION 1..378: note = tr|A0A2V4V9P3|A0A2V4V9P3_PAEBA Queuine tRNA-ribosyltransferase OS=Paenibacillus barcinonensis; OX = 198119 GN=tgt PE=3 SV=1
MAAITYEHIKTCKQSGARLGRVHTPHGIIETPTFMPVGTQATVKTMSPEELKEMDAQIILSNTYHLFLRPGHEIIRQAGGLHKFMNWDRPILTDSGGFQVFSLSEMRKITEEGVHFRSHLNGDKKFLSPEVAMEIQNALGSDIMMAFDECPPYPAEYEYVKKSLERTTRWAERCLESHARPHDQGLFAIVQGGMHEDLRRQSAADLTSMDFPGYAIGGLSVGEPKHLMYGVLDYTVPLLPSNKPRYLMGVGSPDALIEGSIRGVDMFDCVLPTRIARNGTTMTSQGRLVVRNAKFATDFGPLDPECDCYTCRNYSRAYLRHLIKADETFGLRLTTIHNLHFLQNLMRNVRKAIMEDRLLDFRDEFFDQYGLHDNDKGF

SEQ ID NO: 58470 - protein, 379 aa, Paenibacillus barengoltzii
  REGION 1..379: note = tr|R9LR93|R9LR93_9BACL Queuine tRNA-ribosyltransferase OS=Paenibacillus barengoltzii G22; OX = 1235795 GN=tgt PE=3 SV=1
MAAAITYEHIKTCKQSGARLGRVHTPHGSFETPIFMPVGTQATVKTMSPEELKEMDAKIILSNTYHLFLRPGHEIIREAGGLHKFMNWDRAILTDSGGFQVFSLSEMRKITEEGVHFRSHLNGDKLFLSPEVAMEIQNALGSDIMMAFDECPPYPADYEYVKNSLERTTRWAERCLKSHARPQDQGLFAIVQGGMYEDLRKQSARDLTSLDFPGYAIGGLSVGEPKPLMYEVLEYTVPLLPADKPRYLMGVGSPDALIEGAIRGIDMFDCVLPTRIARNGTTMTSQGRLVVRNAQYANDFGPLDPECDCYTCRNYSRAYLRHLIKADETFGLRLTTYHNLHFLINLMGKVRQAIMEDRLLSFRDEFFEQYGLFGNDKGF

SEQ ID NO: 58471 - protein, 377 aa, unidentified
  source 1..377: note = Paenibacillus beijingensis
  REGION 1..377: note = tr|A0A0D5NM61|A0A0D5NM61_9BACL Queuine tRNA-ribosyltransferase OS=Paenibacillus beijingensis; OX = 1126833 GN=tgt PE=3 SV=1
MAVKYELIKVCKQSGARLGRLHTPHGIIETPTFMPVGTQATVKTMSPEELKAMDAQIILSNTYHLFLRPGHDLIRRAGGLHRFMNWDRPILTDSGGFQVFSLSEMRKITEEGVQFRSHLNGDKLFLSPEKAMEVQNALGPDIMMAFDECPPYPADYEYVKNSLERTTRWAERCLKAHARPHDQALFAIVQGGMYEDLRRQSALDLTSMDFPGYAIGGLSVGEPKHLMFEMLESTVPLLPSGKPRYLMGVGSPDALIEGSIRGIDMFDCVLPTRIARNGTTMTSGGRLVVRNAQFAEDLGPLDPECSCYTCRNYSRAYIRHLIKADETFGLRLTTYHNLHFLLQLMRDVRQAIMEDRLLDFRDTFFAKYGLHDNDKGF

SEQ ID NO: 58472 - protein, 378 aa, Paenibacillus borealis
  REGION 1..378: note = tr|A0A1R0YMU5|A0A1R0YMU5_9BACL Queuine tRNA-ribosyltransferase OS=Paenibacillus borealis; OX = 160799 GN=tgt PE=3 SV=1
MAAITYEHIKTCKQSGARLGRVHTPHGVIETPAFMPVGTQATVKTMSPEELKEMDAHIILSNTYHLFLRPGHDIIREAGGLHKFMNWDRPILTDSGGFQVFSLSDMRKITEEGVHFRSHLNGDKKFLSPEVAMEVQNALGSDIMMAFDECPPFPAEYDYVKKSLERTSRWAERCLKSHARPEDQGLFAIVQGGMHEDLRRQSAADLTSMDFPGYAIGGLSVGESKQLMYEVLDYTVPLLPQGKPRYLMGVGSPDALLEGSIRGVDMFDCVLPTRIARNGTTMTSQGRLVVRNAQYARDFGPLDPECSCYTCRNYSRAYLRHLIKADETFGLRLTTYHNLHFLLDLMRKVREAIREDRLLDFRDEFFAQYGLYDNLKGF

SEQ ID NO: 58473 - protein, 378 aa, Paenibacillus borealis
  REGION 1..378: note = tr|A0A089LMN8|A0A089LMN8_9BACL Queuine tRNA-ribosyltransferase OS=Paenibacillus borealis; OX = 160799 GN=tgt PE=3 SV=1
MAAITYEHIKTCKQSGARLGRVHTPHGIIETPTFMPVGTQATVKTMSPEELKQMNAQIILSNTYHLFLRPGHEIIGEAGGLHKFMNWDRPILTDSGGFQVFSLSDMRKITEEGVHFRSHLNGDKKFLSPEVAMEVQNALGSDIMMAFDECPPYPAEYEYVKKSLERTTRWAERCLKSHARPNDQGLFAIVQGGMHEDLRRQSAADLTSMDFPGYAIGGLSVGESKQLMYEVLDYTVPLLPQGKPRYLMGVGSPDALLEGSIRGIDMFDCVLPTRIARNGTTMTSQGRLVVRNAQYARDFGPLDPECDCYTCRNYSRAYLRHLIKADETFGLRLTTYHNLHFLLELMRKVREAIMEDRLLDFRDEFFAQYGLYDNLKGF

SEQ ID NO: 58474 - protein, 379 aa, unidentified
  source 1..379: note = Paenibacillus bovis
  REGION 1..379: note = tr|A0A172ZLM8|A0A172ZLM8_9BACL Queuine tRNA-ribosyltransferase OS=Paenibacillus bovis OX=1616788; GN = tgt PE=3 SV=1
MSGPITYEHIKTCKQSGARLGRVHTPHGIIETPAFMPVGTLATVKTMSPEELKEMDAHIILSNTYHLFLRPGHDLIKEAGGLHKFMNWDRPILTDSGGFQVFSLSEMRKITEEGVHFRSHLNGDKLFLSPEVAMEIQNALGSDIMMAFDECPPYPAEYDYVKKSLERTTRWAERCLNSHARPQDQGLFAIVQGGMHEDLRRQSALDLTSMDFPGYAIGGLSVGEPKHLMYEALEYTMPFLPSNKPRYLMGVGSPDALLEGSIRGVDMFDCVLPTRIARNGTTMTSEGRVVVRNAKYARDFGPLDPNCDCYTCRNYSRAYLRHLIKADETFGLRLTTYHNLHFLLNLMKNVRQAIMDDRLLDFRDEFFDQYGLHDNDKGF

SEQ ID NO: 58475 - protein, 377 aa, unidentified
  source 1..377: note = Paenibacillus catalpae
  REGION 1..377: note = tr|A0A1I1YZJ0|A0A1I1YZJ0_9BACL Queuine tRNA-ribosyltransferase OS=Paenibacillus catalpae; OX = 1045775 GN=tgt PE=3 SV=1
MAVKYELIKVCKQSGARLGRVHTPHGVIETPAFMPVGTQATVKTMSPEELKTMDAQIILSNTYHLFLRPGHDIVGRAGGLHKFMNWDRPILTDSGGFQVFSLSDMRKITEEGVQFRSHLNGDKLFLSPEKAMEIQNALGSDIMMAFDECPPYPAEYDYVKQSLERTTRWAERCLNSHARKHDQGLFAIVQGGMYKDLRIQSAKDLTSMDFPGYAIGGLSVGEPKHLMYEVLDYTVPELPTGKPRYLMGVGSPDALIEGSIRGVDMFDCVLPTRIARNGTTMTSQGRLVVRNAKFAEDFGPLDPECSCYTCKNYSRAYIRHLLKADETFGIRLTTYHNLHFLLQLMRDVRQAIMEDRLLDFRDDFFTKYGLFDNDKGF

SEQ ID NO: 58476 - protein, 378 aa, Paenibacillus cellulosilyticus
  REGION 1..378: note = tr|A0A2V2YGH3|A0A2V2YGH3_9BACL Queuine tRNA-ribosyltransferase OS=Paenibacillus cellulosilyticus; OX = 375489 GN=tgt PE=3 SV=1
MAAVKYELIKVCKQSGARLGRVHTPHGVIETPTFMPVGTQATVKTMSPEELKSMDAQIILSNTYHLFIRPGHEIVRQAGGLHKFMNWDRPILTDSGGFQVFSLANMRKITEEGVTFRSHLNGDKLFISPEVAMEIQNALGPDIMMAFDECPPYPADYEYVKNSLERTTRWAERCLKAHARPDDQALFAIIQGGMYADLRKQSAEQLTAMDFPGYAIGGLSVGESKPLMYEMLDVTVPLMPANKPRYLMGVGSPDALIEGSIRGIDMFDCVLPTRIARNGTTMTSEGRLVIRNAKFADDFGPLDPNCDCYTCRNYSRAYIRHLIKADETFGIRLTTYHNLHFLIQLMKDVRQAIMDDRLLDFRDEFFAKYGLNDNERGF

SEQ ID NO: 58477 - protein, 378 aa, Paenibacillus chitinolyticus
  REGION 1..378: note = tr|A0A410X1Y7|A0A410X1Y7_9BACL Queuine tRNA-ribosyltransferase OS=Paenibacillus chitinolyticus; OX = 79263 GN=tgt PE=3 SV=1
MAAVTYEHIKTCKQTGARLGRVHTPHGVIETPAFMPVGTQATVKTMSPEELKAMDAHIILSNTYHLFLRPGHELVKKAGGLHKFMNWDRPILTDSGGFQVFSLSDIRKITEEGVQFRSHLNGDKLFISPEKAMEIQNALGSDIMMAFDECPPYPATYEYVKDSLERTTRWAERCLKSHARPGDQGLFAIVQGGMYADLRKQSAEQLTSMDFPGYAIGGLSVGEPKHLMYEMLECTTPLLPTGKPRYLMGVGSPDALIEGAIRGVDMFDCVLPTRIARNGTVMTSAGRLVIRNAKHADDLGPLDPECSCYTCTNYSRAYIRHLIKADETFGIRLTTYHNLHFLLELMRGVRQAIREDRLGDFRDEFFTKYGLHDNDKGF

SEQ ID NO: 58478 - protein, 378 aa, Paenibacillus contaminans
  REGION 1..378: note = tr|A0A329MRJ8|A0A329MRJ8_9BACL Queuine tRNA-ribosyltransferase OS=Paenibacillus contaminans; OX = 450362 GN=tgt PE=3 SV=1
MAAVTYELLKVCKQSGARLGRVHTPHGVIETPAFMPVGTQATVKTMSPEELKQMDAHIILSNTYHLFLRPGHDLVKRAGGLHKFMNWDRPILTDSGGFQVFSLSDIRKIREEGVEFRSHLNGDKLFISPEKAMEIQNALGSDIMMAFDECAPYPAEYDYVKQSLERTSRWAERCLQSHARPHDQGLFAIVQGGMYADLRKQSAADLTSLDFPGYAIGGLSVGEPKHLMYEVLETTVPLLPGGKPRYLMGVGSPDALVEGSIRGIDMFDCVLPTRIARNGTCMTSEGRLVIRNAKHMEDFGPLDPNCSCYTCTNYSRAYIRHLIKADETFGIRLTTYHNLHFLLELMRGVRQAIREDRLLDFRDEFFDKYGMEANGKGF

SEQ ID NO: 58479 - protein, 379 aa, unidentified
  source 1..379: note = Paenibacillus crassostreae
  REGION 1..379: note = tr|A0A167CH64|A0A167CH64_9BACL Queuine tRNA-ribosyltransferase OS=Paenibacillus crassostreae; OX = 1763538 GN=tgt PE=3 SV=1
MTAAITYEHIKTCKQSGARLGRVHTPHGIIETPTFMPVGTLATVKTMSPEELKQMDAQIILSNTYHLFLRPGHDIIREAGGLHKFMNWDRPILTDSGGFQVFSLSEMRKITEEGVHFRSHLNGDKLFLSPEVVMEIQNALGSDIMMAFDECPPYPAEYEYVKKSLERTTRWAERCLESHARSHDQGLFGIVQGGMYEDLRRQSAQDLTSMDFPGYAIGGLSVGESKQLMYDVLDYTVPLLPSNKPRYLMGVGSPDALIEGSIRGIDMFDCVLPTRIARNGTTMTSEGRVVIRNAKYARDFGPLDPACDCYTCKNYSRAYLRHLIKADETFGLRLTTYHNLHFLLDLMRKVRQSIMEDRLLDFRDEFFEQYGLYENLKGF

SEQ ID NO: 58480 - protein, 377 aa, Paenibacillus curdlanolyticus
  REGION 1..377: note = tr|E0IDX5|E0IDX5_9BACL Queuine tRNA-ribosyltransferase OS=Paenibacillus curdlanolyticus YK9 OX=717606 GN=tgt PE=3 SV=1
MAVKYELIKVCKQSGARLGRVHTPHGIIETPTFMPVGTQATVKTMSPEELKSMEAQIILSNTYHLFIRPGHEIVRQAGGLHKFMNWDRPILTDSGGFQVFSLANMRKITEEGVTFRSHLNGDKLFISPEVAMEIQNALGSDIMMAFDECPPYPAEYDYVKQSLERTTRWAERCLKAHARPHDQALFAIVQGGMYADLRKMSAEQLTSMDFPGFAIGGLSVGESKPLMYDMLDHTVPLLPAGKPRYLMGVGSPDALIEGSIRGIDMFDCVLPTRIARNGTTMTSEGRLVIRNAKFADDFGPLDPACDCYTCRNYSRAYIRHLIKADETFGIRLTTYHNLHFLLQLMKDVRQAIMDDRLLDFRDEFFARYGLNDNERGF

SEQ ID NO: 58481 - protein, 379 aa, unidentified
  source 1..379: note = Paenibacillus darwinianus
  REGION 1..379: note = tr|A0A015KMD8|A0A015KMD8_9BACL Queuine tRNA-ribosyltransferase OS=Paenibacillus darwinianus; OX = 1380763 GN=tgt PE=3 SV=1
MIVAITYELIKVCKQSGARLGRVHTPHGVIETPCFMPVGTQATVKTMSPEELKTMDARIILSNTYHLFLRPGHELIARAGGLHKFMNWDRAILTDSGGFQVFSLSEMRKITEEGVQFRSHLNGDKLFLSPEKAMEIQNALGSDIMMAFDECPPFPAEYGYVKRSIERTSRWAERCLQAHARPEDQGLFAIVQGGEYEDLRKQSATDLTSMDFPGYAIGGLSVGEPKPIMYRVLDYTVPLLPSGKPRYLMGVGSPDALIEGAIRGIDMFDCVLPTRIARNGTTMTSKGRVVVRNAANAEDFGPLDPACNCYTCQNYSRAYIRHLLKADETFGIRLTTYHNLHFLLQLMRDVRQAIMEDRLLDFRDEFFAQYGLNDNDKGF

SEQ ID NO: 58482 - protein, 379 aa, Paenibacillus dendritiformis
  REGION 1..379: note = tr|A0A4V3B528|A0A4V3B528_9BACL Queuine tRNA-ribosyltransferase OS=Paenibacillus dendritiformis; OX = 130049 GN=tgt PE=3 SV=1
MAAAVTYELIKTCKQTGARLGIVHTPHGSFETPTFMPVGTQATVKTMSPEELKEMSAKIILSNTYHLFLRPGHEIVREAGGLHKFMNWDRAILTDSGGFQVFSLSDMRNIEEEGVHFRSHLNGDKLFISPEKAMEIQNALGSDIMMAFDECAPYPAEHSYVKHSLERTTRWAERCLNSHARPHDQALFAIVQGGMYEDLRIQSAKDLTSMDFPGYAIGGLSVGEPKPLMYVALETTVPLLPDSKPRYLMGVGSPDALVEGSMRGIDMFDCVLPTRIARNGTTMTSQGRLVVRNAKFTRDFGPLDPNCDCYTCRNYSRAYLRHLIKADETFGLRLTTYHNLYFLLNLMRQVREAIREDRLRDFRDEFFEAYGMDRNESGF

SEQ ID NO: 58483 - protein, 379 aa, Paenibacillus dendritiformis; identical to SEQ ID NO: 58482
  REGION 1..379: note = tr|H3SNV9|H3SNV9_9BACL Queuine tRNA-ribosyltransferase OS=Paenibacillus dendritiformis C454 OX=1131935 GN=tgt PE=3 SV=1

SEQ ID NO: 58484 - protein, 378 aa, unidentified
  source 1..378: note = Paenibacillus donghaensis
  REGION 1..378: note = tr|A0A2Z2KK61|A0A2Z2KK61_9BACL Queuine tRNA-ribosyltransferase OS=Paenibacillus donghaensis; OX = 414771 GN=tgt PE=3 SV=1
MAAITYEHIKTCKQSGARLGRVHTPHGVIETPAFMPVGTLATVKTMSPEELKEMDAHIILSNTYHLFLRPGHDIIREAGGLHKFMNWDRPILTDSGGFQVFSLSEMRKITEEGVHFRSHLNGDKKFLSPEVAMEIQNALGSDIMMAFDECPPYPAEYDYIKKSLERTSRWAERCLKSHARPNDQGLFAIVQGGMHEDLRRQSAADLTSMDFPGYAIGGLSVGESKQLMYEVLDYTLPLLPQGKPRYLMGVGSPDALLEGSIRGVDMFDCVLPTRIARNGTTMTSQGRLVVRNAQYARDFGPLDPECDCYTCRNYSRAYLRHLIKADETFGLRLTTYHNLHFLLELMRKVREAIMEDRLLDFRDEFFAKYGLYDNLKGF

SEQ ID NO: 58485 - protein, 378 aa, Paenibacillus durus
  REGION 1..378: note = tr|A0A089IYN5|A0A089IYN5_PAEDU Queuine tRNA-ribosyltransferase OS=Paenibacillus durus OX=44251; GN = tgt PE=3 SV=1
MAAITYEHIKTCKQSGARLGRVHTPHGVIETPTFMPVGTQATVKTMSPEELKDMDAQIILSNTYHLFLRPGHDIVREAGGLHKFMNWDRPILTDSGGFQVFSLSEMRKITEEGVHFRSHLNGDKKFLSPEVAMEVQNALGSDIMMAFDECPPYPAEYDYVKKSLERTTRWAERCLKAHARPHDQGLFAIVQGGMFEDLRKQSAAELTSMDFPGYAIGGLSVGESKQLMYEVLDYTVPLLPQDKPRYLMGVGSPDALLEGAIRGVDMFDCVLPTRIARNGTTMTSQGRLVVRNAQYARDFGPLDPECGCYTCRNYSRAYLRHLIKSDETFGLRLTTYHNLYFLLELMRKVRKAIMEDRLLDFRDEFFAQYGLNDNSKGF

SEQ ID NO: 58486 - protein, 378 aa, Paenibacillus durus
  REGION 1..378: note = tr|A0A0F7FC11|A0A0F7FC11_PAEDU Queuine tRNA-ribosyltransferase OS=Paenibacillus durus ATCC 35681; OX = 1333534 GN=tgt PE=3 SV=1
MAAITYEHIKTCKQSGARLGRVHTPHGVIETPTFMPVGTQATVKTMSPEELKDMDAQIILSNTYHLFLRPGHDIVREAGGLHKFMNWDRPILTDSGGFQVFSLSEMRKITEEGVHFRSHLNGDKKFLSPEVAIEVQNALGSDIMMAFDECPPYPAEYDYVKKSLERTTRWAERCLKAHARPHDQGLFAIVQGGMFEDLRKQSAAELTSMDFPGYAIGGLSVGESKQLMYEVLDYTVPLLPQDKPRYLMGVGSPDALLEGAIRGVDMFDCVLPTRIARNGTTMTSQGRLVVRNAQYARDFGPLDPECGCYTCRNYSRAYLRHLIKSDETFGLRLTTYHNLYFLLELMRKVRKAIMEDRLLDFRDEFFAQYGLNDNSKGF

SEQ ID NO: 58487 - protein, 379 aa, Paenibacillus elgii
  REGION 1..379: note = tr|A0A2T6FZT3|A0A2T6FZT3_9BACL Queuine tRNA-ribosyltransferase OS=Paenibacillus elgii OX=189691; GN = tgt PE=3 SV=1
MGLAVTYEHIKTCKQSGARLGRVHTPHGVIETPAFMPVGTQATVKTMSPEELKQMDAHIILSNTYHLFLRPGHEIVKKAGGLHRFMNWDRPILTDSGGFQVFSLSEMRKISEEGVQFRSHLNGDKLFISPEKSIEIQNALGSDIMMAFDECPPYPAEHSYAKQSLERTTRWAERCLKAHARPNEQALFAIVQGGMYEDLRKQSALELTSMDFPGYAIGGLSVGEPKHLMYEVLDYTVPYLPTHKPRYLMGVGSPDALVEGSIRGIDMFDCVLPTRIARNGTVMTSEGRLVVRNAKFAEDFGPLDPECSCYTCRNYSRAYIRHLIKADETFGIRLTTYHNLHFLLELMRGVRQAIREDRLLDFRDEFFAKYGIDENSKGF

SEQ ID NO: 58488 - protein, 377 aa, Paenibacillus elgii
  REGION 1..377: note = tr|A0A161S8N0|A0A161S8N0_9BACL Queuine tRNA-ribosyltransferase OS=Paenibacillus elgii OX=189691; GN = tgt PE=3 SV=1
MAVTYEHIKTCKQSGARLGRVHTPHGVIETPAFMPVGTQATVKTMSPEELKQMDAHIILSNTYHLFLRPGHEIVKKAGGLHRFMNWDRPILTDSGGFQVFSLSEMRKISEEGVQFRSHLNGDKLFISPEKSIEIQNALGSDIMMAFDECPPYPAEHSYAKQSLERTTRWAERCLKAHARPNDQALFAIVQGGMYEDLRKQSALELTSMDFPGYAIGGLSVGEPKHLMYEVLGYTVPYLPTHKPRYLMGVGSPDALVEGSIRGIDMFDCVLPTRIARNGTVMTSEGRLVVRNAKFAEDFGPLDPECSCYTCRNYSRAYIRHLIKADETFGIRLTTYHNLHFLLELMRGVRQAIREDRLLDFRDEFFAKYGIDENSKGF

SEQ ID NO: 58489 - protein, 378 aa, unidentified
  source 1..378: note = Paenibacillus etheri
  REGION 1..378: note = tr|A0A0W1B3V9|A0A0W1B3V9_9BACL Queuine tRNA-ribosyltransferase OS=Paenibacillus etheri OX=1306852; GN = tgt PE=3 SV=1
MAAITYEHIKTCKQSGARLGRVHTPHGVIETPAFMPVGTQATVKTMSPEELKEMDAHIILSNTYHLFLRPGHDIVREAGGLHKFMNWDRPILTDSGGFQVFSLSDMRKITEEGVHFRSHLNGDKKFLSPEVAMEVQNALGSDIMMAFDECPPFPAEYDYVKKSLERTTRWAERCLKSHARPNDQGLFAIVQGGMYEDLRRQSAADLTSMDFPGYAIGGLSVGESKQLMYEVLDYTVPLLPQGKPRYLMGVGSPDALLEGSIRGVDMFDCVLPTRIARNGTTMTSQGRLVVRNAKYARDFGPLDPECNCYTCRNYSRAYLRHLIKADETFGLRLTTYHNLHFLLDLMRKVREAIKEDRLLDFRDEFFTKYGLYDNLKGF

SEQ ID NO: 58490 - protein, 379 aa, unidentified
  source 1..379: note = Paenibacillus faecis
  REGION 1..379: note = tr|A0A5D0CTR8|A0A5D0CTR8_9BACL Queuine tRNA-ribosyltransferase OS=Paenibacillus faecis OX=862114; GN = tgt PE=3 SV=1
MAAAITYEHIKTCKQSGARLGRVHTPHGSFDTPVFMPVGTQATVKTMSPEELKEMDARIILSNTYHLFLRPGHEIIREAGGLHKFMNWDRAILTDSGGFQVFSLSEMRKITEEGVHFRSHLNGDKLFLSPEVAMEIQNALGSDIMMAFDECPPYPADYEYVKKSLERTSRWAERCLKSHARPHDQGLFAIVQGGMHEDLRKQSAKDLTSLDFPGYAIGGLSVGEPKHLMYEVLDYTVPLLPTDKPRYLMGVGSPDALIEGAIRGVDMFDCVLPTRIARNGTTMTSQGRLVVRNAQYAKDFGPLDPECDCYTCRNYSRAYLRHLIKADETFGLRLTTYHNLHFLIKLMDNVRQAIMDDRLLDFRDEFFEKYGLFGNEKGF

SEQ ID NO: 58491 - protein, 379 aa, unidentified
  source 1..379: note = Paenibacillus ferrarius
  REGION 1..379: note = tr|A0A1V4HA78|A0A1V4HA78_9BACL Queuine tRNA-ribosyltransferase OS=Paenibacillus ferrarius; OX = 1469647 GN=tgt PE=3 SV=1
MAAAVTYEPIKTCKQSGARLGKVHTPHGVIETPAFMPVGTQATVKTMSPEELKTMDAQIILSNTYHLFIRPGHDIVKAAGGLHKFMNWDRPILTDSGGFQVFSLSNMRKITEEGVTFKSHLNGDKLFLSPEVAMEIQNALGSDIMMAFDECPPFPAEYDYVKKSLERTTRWAERCLKSHSRPEDQGLFAIIQGGMHEDLRRLSAEQLTSMDFPGYAIGGLSVGEPKHLMYEVLDYTTPLMPANKPRYLMGVGSPDALIEGAIRGIDMFDCVLPTRIARNGTCMTSEGRLVIRNAKHATDFGPLDPKCSCYTCKNYSRAYIRHLIKADETFGIRLTTIHNLHFLLQLMRDVRGAIQEDRLLDFRDEFFASYGLNDNERGF

SEQ ID NO: 58492 - protein, 378 aa, Paenibacillus ginsengarvi
  REGION 1..378: note = tr|A0A3B0CFE6|A0A3B0CFE6_9BACL Queuine tRNA-ribosyltransferase OS=Paenibacillus ginsengarvi; OX = 400777 GN=tgt PE=3 SV=1
MAAVRYELIKTCKQSGARLGRLHTPHGVIDTPTFMPVGTQATVKTMSPEELKQMDAHIILSNTYHLFLRPGHDIVREAGGLHKFMNWDRPILTDSGGFQVFSLSAMRKITEEGVHFRNHLNGDKLFISPEIAMEIQNALGSDIMMAFDECPPYPATYEYVDQSLERTTRWAERCLASHKRTDDQALFGIVQGGMFADLRKKSASQLTSLDFPGYAIGGLSVGESKELMYEMLECTVPLLPAQKARYLMGVGSPDALLEGSIRGVDMFDCVLPTRIARNGTVMTSGGRLVVKGAKNARDFGPLDPACSCYTCTNYSRAYLRHLLKADETFGIRLTTYHNLHFLLELMRNVRQAIAEDRLLDFRDEFFDRYGMKDNDRGF

SEQ ID NO: 58493 - protein, 379 aa, Paenibacillus glacialis
  REGION 1..379: note = tr|A0A168DGU6|A0A168DGU6_9BACL Queuine tRNA-ribosyltransferase OS=Paenibacillus glacialis; OX = 494026 GN=tgt PE=3 SV=1
MVAAITYEHIKTCKQSGARLGRVHTPHGIIETPTFMPVGTLATVKTMSPEELKKMDAQIILSNTYHLFLRPGHEIIREAGGLHKFMNWDRPILTDSGGFQVFSLSEMRKITEEGVHFRSHLNGDKLFLSPEVAMEIQNALGSDIMMAFDECPPYPAEYDYLKKSLERTSRWAERCLESHARSKDQGLFAIVQGGMYEDLRKQSARDLTSMDFPGYAIGGLSVGESKKLMYDVLDYTVPLLPSNKPRYLMGVGSPDALIEGSIRGVDMFDCVLPTRIARNGTTMTSEGRVVIRNAKYARDYGPLDPACDCYTCKNYSRAYLRHLIKADETFGLRLTTYHNLHFLLELMRKVRQSIMDDRLLDFRDEFFEQYGLYENLKGF

SEQ ID NO: 58494 - protein, 379 aa, Paenibacillus glucanolyticus
  REGION 1..379: note = tr|A0A163KT62|A0A163KT62_9BACL Queuine tRNA-ribosyltransferase OS=Paenibacillus glucanolyticus; OX = 59843 GN=tgt PE=3 SV=1
MAAAVTYEHIKTCKQSGARLGRVHTPHGVIDTPTFMPVGTLATVKTMSPEELKAMDAHIILSNTYHLFLRPGHDIVKEAGGLHKFMNWDRPILTDSGGFQVFSLAEMRKITEEGVHFRSHLNGDKLFISPEVAMEIQNALGSDIMMAFDECPPYPAEYEYVKQSTERTSRWAERCLKSHARPEDQALFAIVQGGMHEDLRRQSARDLTSMDFPGYAIGGLSVGESKQLMYEVLDHTVPLLPNNKPRYLMGVGSPDALIEGSIRGVDMFDCVLPTRIARNGTTMTSQGRLVVRNAQYARDYGPLDPECDCYTCRNYSRAYLRHLIKSDETFGMRLTTYHNLHFLLNLMRGVRQSIMEDRLLDFRDEFFDKYGLHDNKKGF

SEQ ID NO: 58495 - protein, 378 aa, Paenibacillus graminis
  REGION 1..378: note = tr|A0A089M9X6|A0A089M9X6_9BACL Queuine tRNA-ribosyltransferase OS=Paenibacillus graminis; OX = 189425 GN=tgt PE=3 SV=1
MAAITYEHIKTCKQSGARLGRVHTPHGIIETPAFMPVGTLATVKTMSPEELKQMDAHIILSNTYHLFLRPGHDIIREAGGLHKFMNWDRPILTDSGGFQVFSLSDMRKITEEGVHFRSHLNGDKKFLSPEVAMEVQNALGSDIMMAFDECPPYPAEYDYVKKSLERTTRWAERCLKSHARPEDQGLFAIVQGGMHEDLRRQSAADLTSMDFPGYAIGGLSVGESKQLMYEVLDYTVPLLPQGKPRYLMGVGSPDALLEGSIRGVDMFDCVLPTRIARNGTTMTSQGRLVVRNAQYARDFGPLDPECGCYTCRNYSRAYLRHLIKADETFGLRLTTYHNLYFLLELMRKVREAIREDRLLDFRDEFFAQYGLYDNLKGF

SEQ ID NO: 58496 - protein, 378 aa, unidentified
  source 1..378: note = Paenibacillus hemerocallicola
  REGION 1..378: note = tr|A0A5C4TFR5|A0A5C4TFR5_9BACL Queuine tRNA-ribosyltransferase OS=Paenibacillus hemerocallicola; OX = 1172614 GN=tgt PE=3 SV=1
MAAVRYELIKTCKQSGARLGRLHTPHGVIDTPAFMPVGTQATVKTMSPEELKQMDAHIILSNTYHLFLRPGHDIVREAGGLHKFMNWDRPILTDSGGFQVFSLSKLRKITEEGVHFRNHLNGDKLFISPEIAMEIQNALGSDIMMAFDECPPYPADYDYVDKSLERTTRWAERCLQSHARPHDQALFGIVQGGMYADLRKKSAAQLTSMDFPGYAIGGLSVGESKDLMYGMLESTVPILPTGKPRYLMGVGSPDALLEGAIRGVDMFDCVLPTRIARNGTVMTSGGRLVAKGAKLARDYGPLDPQCGCYTCTNYSRAYLRHLLKADETFGIRLTTYHNLYFLLDLMRNVRQAIAEDRLLDYRDEFFDRYGMKDNESGF

SEQ ID NO: 58497 - protein, 377 aa, unidentified
  source 1..377: note = Paenibacillus herberti
  REGION 1..377: note = tr|A0A229P051|A0A229P051_9BACL Queuine tRNA-ribosyltransferase OS=Paenibacillus herberti; OX = 1619309 GN=tgt PE=3 SV=1
MAVTYELIKVCKQSGARLGRVHTPHGVIETPAFMPVGTQATVKTMSPEELKGMDAHIILSNTYHLWLRPGHELIQKAGGLHKFMNWDRPILTDSGGFQVFSLSNMRKIKEEGVEFRSHLNGDRLFLSPEKAMEIQNALGSDIMMAFDECPPYPAEYEYIKNSLERTTRWAERCLKAHARPEDQGLFAIVQGGMHADLRRQSAADLTSLDFPGYAIGGLSVGEPKHLMYEVLEETVPLLPDNKPRYLMGVGSPDALLEGSIRGIDMFDCVLPTRIARNGTTMTSEGRVNIRNAKYAEDFGPLDPKCSCYTCVNYSRAYLRHLIKADETFGIRLTSYHNLHFLLEMMRGVRQAIMEDRLLDFRDEFFTMYGLHDNDKGF

SEQ ID NO: 58498 - protein, 379 aa, unidentified
  source 1..379: note = Paenibacillus ihbetae
  REGION 1..379: note = tr|A0A1B2DXE5|A0A1B2DXE5_9BACL Queuine tRNA-ribosyltransferase OS=Paenibacillus ihbetae; OX = 1870820 GN=tgt PE=3 SV=1
MAAAVTYEHIKTCKQSGARLGRVHTPHGVIDTPTFMPVGTLATVKTMSPEELKAMDAHIILSNTYHLFLRPGHEIVKEAGGLHKFMNWDRPILTDSGGFQVFSLAEMRKISEEGVHFRSHLNGDKLFISPEVAMEIQNALGSDIMMAFDECPPYPAEYEYVKQSTERTSRWAERCLQSHARPKDQALFGIVQGGMYEDLRRQSALDLTSMDFPGYAIGGLSVGESKQLMYEVLDYTVPLLPDNKPRYLMGVGSPDALIEGSIRGVDMFDCVLPTRIARNGTTMTSQGRLVVRNAQYARDFGPLDPECDCYTCRNYSRAYLRHLIKSDETFGLRLTTYHNLHFLLDLMRKVRQSIMEDRLLDFRDEFFDKYGLHDNEKGF

SEQ ID NO: 58499 - protein, 378 aa, Paenibacillus illinoisensis
  REGION 1..378: note = tr|A0A2W0CBC6|A0A2W0CBC6_9BACL Queuine tRNA-ribosyltransferase OS=Paenibacillus illinoisensis; OX = 59845 GN=tgt PE=3 SV=1
MAAITYEHIKTCKQSGARLGRVHTPHGIIETPTFMPVGTQATVKTMSPEELKEMDAQIILSNTYHLFLRPGHEIVRQAGGLHKFMNWDRPILTDSGGFQVFSLSEMRKITEEGVHFRSHLNGDKKFLSPEVAMEVQNALGSDIMMAFDECPPYPAEYEYVKKSLERTSRWAERCLESHARPHDQGLFAIVQGGMHEDLRRQSVADLTSMDFPGYAIGGLSVGEPKHLMYGVLDYTVPLLPSNKPRYLMGVGSPDALIEGSIRGVDMFDCVLPTRIARNGTTMTSQGRLVVRNAKFATDFGPLDPECDCYTCRNYSRAYLRHLIKADETFGLRLTTIHNLHFLQNLMRNVRKAIMEDRLLDFRDEFFDQYGLHDNDKGF

SEQ ID NO: 58500 - protein, 378 aa, Paenibacillus jilunlii
  REGION 1..378: note = tr|A0A1G9V590|A0A1G9V590_9BACL Queuine tRNA-ribosyltransferase OS=Paenibacillus jilunlii; OX = 682956 GN=tgt PE=3 SV=1
MAAITYEHIKTCKQSGARLGRVHTPHGVIETPAFMPVGTLATVKTMSPEELKQMDAHIILSNTYHLFLRPGHDIIREAGGLHKFMNWDRPILTDSGGFQVFSLSDMRKITEEGVHFRSHLNGDKKFLSPEVAMEVQNALGSDIMMAFDECPPYPAEYDYVKKSLERTTRWAERCLKSHARPEDQGLFAIVQGGMYEDLRRQSAADLTSMDFPGYAIGGLSVGESKQLMYEVLDYTVPLLPQGKPRYLMGVGSPDALLEGSIRGVDMFDCVLPTRIARNGTTMTSQGRLVVRNAQYARDFGPLDPECNCYTCRNYSRAYLRHLIKADETFGLRLTTYHNLHFLLDLMRKVREAIREDRLLDFRDEFFAQYGLYDNLKGF

SEQ ID NO: 58501 - protein, 379 aa, Paenibacillus kribbensis
  REGION 1..379: note = tr|A0A222WK12|A0A222WK12_9BACL Queuine tRNA-ribosyltransferase OS=Paenibacillus kribbensis; OX = 172713 GN=tgt PE=3 SV=1
MAPAIRYEHIKTCKQSGARLGRVHTPHGVIETPTFMPVGTQATVKTMSPEELKEMDAQIILSNTYHLFLRPGHDIIREAGGLHKFMNWDRPILTDSGGFQVFSLSEMRKISEEGVHFRSHLNGDKKFLSPEVAMEIQNSLGSDIMMAFDECPPFPAEYEYVKKSLERTSRWAERCLEAHARPHDQGLFAIVQGGMHEDLRKQSAADLTSMDFPGYAIGGLSVGEPKHLMYEVLDYTVPLLPTNKPRYLMGVGSPDALIEGSIRGVDMFDCVLPTRIARNGTTMTSQGRLVVRNANFASDFGPLDPACDCYTCRNYSRAYLRHLIKADETFGLRLTTYHNLHFLIQLMRNVRQAIMDDRLLDFRDEFFEQYGLHDNDKGF

SEQ ID NO: 58502 - protein, 379 aa, Paenibacillus lactis
  REGION 1..379: note = tr|G4HPV7|G4HPV7_9BACL Queuine tRNA-ribosyltransferase OS=Paenibacillus lactis 154; OX = 743719 GN=tgt PE=3 SV=1
MAAAVTYEHIKTCKQSGARLGRVHTPHGVIDTPTFMPVGTLATVKTMSPEELKAMDAHIILSNTYHLFLRPGHEIVKEAGGLHKFMNWDRPILTDSGGFQVFSLAEMRKISEEGVHFRSHLNGDKLFISPEVAMEIQNALGSDIMMAFDECPPYPAEYEYVKQSTERTSRWAERCLQSHARPKDQALFGIVQGGMYEDLRRQSAADLTSMDFPGYAIGGLSVGESKQLMYEVLDYTVPLLPDNKPRYLMGVGSPDALIEGSIRGVDMFDCVLPTRIARNGTTMTSQGRLVVRNAQYARDFGPLDPECDCYTCRNYSRAYLRHLIKSDETFGLRLTTYHNLHFLLDLMRKVRQSIMEDRLLDFRDEFFDKYGLHDNEKGF

SEQ ID NO: 58503 - protein, 378 aa, Paenibacillus larvae
  REGION 1..378: note = tr|V9WBT2|V9WBT2_9BACL Queuine tRNA-ribosyltransferase OS=Paenibacillus larvae subsp. larvae DSM 25430 OX=697284 GN=tgt PE=3 SV=1
MPAVKYEHIKTCKQSGARLGRVHTPHGVIETPIFMPVGTLATVKTMSPEELKEMNAQIILSNTYHLFLRPGHDIVKAAGGLHKFMNWDRPILTDSGGFQVFSLSDIRKITEEGVAFRSHLNGDKLFISPEKAMEIQNALGSDIMMAFDECAPYPADYEYVKQSMERTTRWAERCLQAHKRPEDQALFGIVQGGMYRDLREESAKQLTSIDFPGYAIGGLSVGEPKHLMYEVLDYTTPLLPTNKPRYLMGVGSPDALIEGSIRGVDMFDCVLPTRIARNGTVMTSSGRLVVRNAKYAEDFGPLDPECSCYTCKHYSRAYIRHLIKADETFGIRLTTYHNLHFLLDLMRQVREAIREDRLLDFRDEFFAKYGLFDNEKGF

SEQ ID NO: 58504 - protein, 378 aa, Paenibacillus larvae; identical to SEQ ID NO: 58503
  REGION 1..378: note = tr|A0A1U9YJ89|A0A1U9YJ89_9BACL Queuine tRNA-ribosyltransferase OS=Paenibacillus larvae subsp. pulvifaciens OX=1477 GN=tgt PE=3 SV=1

SEQ ID NO: 58505 - protein, 379 aa, Paenibacillus lautus
  REGION 1..379: note = tr|A0A385TTW8|A0A385TTW8_PAELA Queuine tRNA-ribosyltransferase OS=Paenibacillus lautus OX=1401; GN = tgt PE=3 SV=1
MAAAVTYEHIKTCKQSGARLGRVHTPHGVIDTPTFMPVGTLATVKTMSPEELKAMDAHIILSNTYHLFLRPGHDIVKEAGGLHKFMNWDRPILTDSGGFQVFSLAEMRKISEEGVHFRSHLNGDKLFISPEVAMEIQNALGSDIMMAFDECPPYPAEYEYVKQSTERTSRWAERCLKSHARPEDQALFAIVQGGMHEDLRRQSARDLTSMDFPGYAIGGLSVGESKQLMYEVLDYTVPLLPNNKPRYLMGVGSPDALIEGSIRGVDMFDCVLPTRIARNGTTMTSQGRLVVRNAQYARDYGPLDPECDCYTCRNYSRAYLRHLIKSDETFGLRLTTYHNLHFLINLMRDVRQSIMEDRLLDFRDEFFDKYGLHDNEKGF

SEQ ID NO: 58506 - protein, 379 aa, Paenibacillus lautus
  REGION 1..379: note = tr|A0A1R1B7E8|A0A1R1B7E8_PAELA Queuine tRNA-ribosyltransferase OS=Paenibacillus lautus OX=1401; GN = tgt PE=3 SV=1
MVAAVTYEHIKTCKQSGARLGRVHTPHGVIDTPTFMPVGTLATVKTMSPEELKAMDAHIILSNTYHLFLRPGHDIVKEAGGLHKFMNWDRPILTDSGGFQVFSLAEMRKISEEGVHFHSHLNGDKLFISPEVAMEIQNALGSDIMMAFDECPPYPAEYEYVKQSTERTSRWAERCLKSHARPEDQALFGIVQGGMHEDLRRQSARDLTSMDFPGYAIGGLSVGESKQLMYEVLDYTVPLLPNNKPRYLMGVGSPDALIEGSIRGVDMFDCVLPTRIARNGTTMTSQGRLVVRNAQYARDYGPLDPECDCYTCRNYSRAYLRHLIKSDETFGLRLTTYHNLHFLLNLMRNVRQSIMEDRLLDFRDEFFDKYGLHDNEKGF

SEQ ID NO: 58507 - protein, 379 aa, unidentified
  source 1..379: note = Paenibacillus lentus
  REGION 1..379: note = tr|A0A3Q8SEL6|A0A3Q8SEL6_9BACL Queuine tRNA-ribosyltransferase OS=Paenibacillus lentus OX=1338368; GN = tgt PE=3 SV=1
MAAAVTYEHIKTCKQSGARLGRVHTPHGVIETPIFMPVGTQATVKTMSPEELKEMNAQIILSNTYHLFLRPGHEIIREAGGLHKFMNWDRPILTDSGGFQVFSLSEMRKITEEGVHFRSHLNGDKLFLSPEVAMEIQNALGPDIMMAFDECAPYPAEYDYVKKSLERTSRWAERCLKSHARPQDQGLFGIVQGGMFEDLRKQSAKDLTSLDFPGYAIGGLSVGEPKHLMYEVLDYTVPLLPANKPRYLMGVGSPDALIEGSIRGVDMFDCVLPTRIARNGTTMTSQGRLVVRNAQYAKDFGPLDPECDCYTCRNYSRAYLRHLIKSDETFGLRLTTYHNLYFLINLMRQVRQAIMDDRLLDFRDEFFERYGLFGNDKGF

SEQ ID NO: 58508 - protein, 379 aa, Paenibacillus macerans
  REGION 1..379: note = tr|A0A090ZIN7|A0A090ZIN7_PAEMA Queuine tRNA-ribosyltransferase OS=Paenibacillus macerans OX=44252; GN = tgt PE=3 SV=1
MAAAITYEHIKTCKQSGARLGRVHTPHGTFDTPAFMPVGTQATVKTMSPEELKEMDARIILSNTYHLFLRPGHEIIREAGGLHKFMNWDRAILTDSGGFQVFSLAEMRKITEEGVHFRSHLNGDKLFLSPEVAMEIQNALGSDIMMAFDECPPYPAEYDYVKSSTERTSRWAERCLKSHSRPHDQGLFAIVQGGMHEDLRKQSARDLTSLDFPGYAIGGLSVGEPKQLMYEVLEYTVPLLPADKPRYLMGVGSPDALIEGAIRGVDMFDCVLPTRIARNGTTMTSQGRLVVRNAQYANDFGPLDPECDCYTCRNYSRAYLRHLIKADETFGLRLTTYHNLHFLITLMKNVRQAIMEDRLLSFRDEFFEKYGLFGNDKGF

SEQ ID NO: 58509 - protein, 379 aa, Paenibacillus macquariensis; identical to SEQ ID NO: 58466
  REGION 1..379: note = tr|A0A168JSC9|A0A168JSC9_9BACL Queuine tRNA-ribosyltransferase OS=Paenibacillus macquariensis subsp. defensor OX=467974 GN=tgt PE=3 SV=1

SEQ ID NO: 58510 - protein, 379 aa, Paenibacillus macquariensis; identical to SEQ ID NO: 58466
  REGION 1..379: note = tr|A0A168BFE3|A0A168BFE3_PAEMC Queuine tRNA-ribosyltransferase OS=Paenibacillus macquariensis; OX = 1468 GN=tgt PE=3 SV=1

SEQ ID NO: 58511 - protein, 377 aa, unidentified
  source 1..377: note = Paenibacillus montanisoli
  REGION 1..377: note = tr|A0A328U5P9|A0A328U5P9_9BACL Queuine tRNA-ribosyltransferase OS=Paenibacillus montanisoli; OX = 2081970 GN=tgt PE=3 SV=1
MAITYELIKTCKQSGARLGRVHTPHGVIETPAFMPVGTQATVKTVSPEELKTLDAHIILSNTYHLFIRPGHEIVKKAGGLHKFMNWDRPILTDSGGFQVFSLSNMRKIKEEGVEFRSHLSGDKLFLSPEKAMEIQNALGSDIMMAFDECAPYPADYEYVKKSLERTTRWAERCLAAHARPEDQGLFAIIQGGMYEDLRRQSAAELTSMDFPGYAIGGLSVGEPKDLMYNVLDCTVPLMPANKPRYLMGVGSPDALLEGAIRGVDMFDCVLPTRIARNGTTMTSSGRLVIRNAKFMEDFGPLDPECSCYTCTNYSRAYIRHLIKADETFGIRLTTIHNLHFLLELMRGVRGAIMEDRLLDFRNEFFDKYGLNDNDKGF

SEQ ID NO: 58512 - protein, 378 aa, Paenibacillus mucilaginosus
  REGION 1..378: note = tr|F8FMX4|F8FMX4_PAEMK Queuine tRNA-ribosyltransferase OS=Paenibacillus mucilaginosus (strain KNP414) OX=1036673 GN=tgt PE=3 SV=1
MPAVTYEHIKTCKQSGARLGRVHTPHGVIETPAFMPVGTQATVKTMAPEELKAMDAHIILSNTYHLFLRPGHETVKAAGGLHKFMNWDRPILTDSGGFQVFSLSDMRKISEEGVEFRSHLNGDKLFLSPEKAMEIQNALGSDIMMAFDECPPYPAEHSYAKQSLERTTRWAERCLKAHSRPEDQALFAIVQGGMYEDLRKQSAAELTSLDFPGYAIGGLSVGEPKHLMYEVLDYTVPLLPEQKPRYLMGVGSPDALVEGSIRGIDMFDCVLPTRIARNGTIMTSAGRLVIRNAKFANDFGPLDPACSCYTCKNYSRAYIRHLIKADETFGIRLTTYHNLHFLLELMRGVRQAIREDRLLDFRDEFFAAYGIDENSKGF

SEQ ID NO: 58513 - protein, 378 aa, Paenibacillus mucilaginosus; identical to SEQ ID NO: 58512
  REGION 1..378: note = tr|H6NQF2|H6NQF2_9BACL Queuine tRNA-ribosyltransferase OS=Paenibacillus mucilaginosus 3016 OX=1116391 GN=tgt PE=3 SV=1

SEQ ID NO: 58514 - protein, 382 aa, Paenibacillus nanensis
  REGION 1..382: note = tr|A0A3A1UQM8|A0A3A1UQM8_9BACL Queuine tRNA-ribosyltransferase OS=Paenibacillus nanensis; OX = 393251 GN=tgt PE=3 SV=1
MERDEVAVKYELIKQCKQSGARLGRVHTPHGVIETPAFMPVGTQATVKTMSPEELKAMDAHIILSNTYHLFLRPGHELVKKAGGLHKFMNWDRPILTDSGGFQVFSLAEMRKITEEGVHFRSHLNGDKLFLSPEVVMEIENALGPDIMMAFDECPPYPAEYEYVKQSTERTSRWAERCLKAHARPHDQALFAIVQGGMYKDLRIQSAKDLTSMDFPGYAIGGLSVGEPKHLMYEVLDYTVPELPADKPRYLMGVGSPDALVEGAIRGVDMFDCVLPTRIARNGTTMTSQGRLVIRNAKYAEDLGPLDPNCSCYTCQNYSRAYIRHLLKADETFGIRLTTYHNLHFLLQLMRDVRQAIMEDRLLDFRDSFFESYGLHDNDKGF

SEQ ID NO: 58515 - protein, 377 aa, Paenibacillus naphthalenovorans
  REGION 1..377: note = tr|A0A0U2VUJ8|A0A0U2VUJ8_9BACL Queuine tRNA-ribosyltransferase OS=Paenibacillus naphthalenovorans; OX = 162209 GN=tgt PE=3 SV=1
MAITYEHIKTCKQSGARLGRVHTPHGIVETPAFMPVGTQATVKTMSPEELKEMDAHIVLSNTYHLFLRPGHDIVKAAGGLHRFMNWDRPILTDSGGFQVFSLSEMRKISEEGVQFRSHLNGDKLFISPEKSIEIQNALGADIIMAFDECPPYPADHSYAKQSLERTTRWAERCLKAHSQPEEQGLFAIVQGGMYEDLRKQSAAELTSMDFPGYAIGGLSVGEPKHLMFEVLDYTVPLLPFGKPRYLMGVGSPDALIEGAIRGIDMFDCVLPTRIARNGTVMTSSGRLVIRNAKFAEDFGPLDPECSCYTCRNYSRAYVRHLIKADETFGIRLTTYHNLHFLLELMRGVRQAIREDRLLDFRDEFFARYGIDENSKGF

SEQ ID NO: 58516 - protein, 379 aa, unidentified
  source 1..379: note = Paenibacillus nuruki
  REGION 1..379: note = tr|A0A1E3KYU1|A0A1E3KYU1_9BACL Queuine tRNA-ribosyltransferase OS=Paenibacillus nuruki OX=1886670; GN = tgt PE=3 SV=1
MAGPITYEHIKTCKQSGARLGRVHTPHGVIETPAFMPVGTQATVKTMSPEELKQMDAHIILSNTYHLFLRPGHDLIRDAGGLHKFMNWDRPILTDSGGFQVFSLSDMRKISEEGVHFKSHLNGDKLFLSPEIAMDIQNSLGSDIMMAFDECPPYPAEYEYVKKSLERTSRWAERCLESHGRPQDQGLFAIVQGGMHEDLRKQSALDLTSMDFPGYAIGGLSVGEPKDLMYQALDFTIPFLPHNKPRYLMGVGSPDALIEGSIRGVDMFDCVLPTRIARNGTTMTSEGRVVVRNAKYARDFGPLDPNCDCYTCRNYSRAYLRHLIKADETFGLRLTTYHNLHFLLNLMKNVRQAIMDDRLLDFKEEFFTQYGLHDNDKGF

SEQ ID NO: 58517 - protein, 378 aa, Paenibacillus odorifer
  REGION 1..378: note = tr|A0A1R0X4T2|A0A1R0X4T2_9BACL Queuine tRNA-ribosyltransferase OS=Paenibacillus odorifer; OX = 189426 GN=tgt PE=3 SV=1
MAAITYEHIKTCKQSGARLGRVHTPHGVIETPAFMPVGTQATVKTMSPEELKEMDAHIILSNTYHLFLRPGHDIVREAGGLHKFMNWDRPILTDSGGFQVFSLSDMRKITEEGVHFRSHLNGDKKFLSPEVAMEVQNSLGSDIMMAFDECPPFPAEYDYVKKSLERTTRWAERCLKSHARPNDQGLFAIVQGGMYEDLRRQSAADLTSMDFPGYAIGGLSVGESKQLMYEVLDYTVPLLPQGKPRYLMGVGSPDALLEGSIRGVDMFDCVLPTRIARNGTTMTSQGRLVVRNAKYARDFGPLDPECNCYTCRNYSRAYLRHLIKADETFGLRLTTYHNLHFLLDLMRKVREAIKEDRLLDFRDEFFAKYGLYDNLKGF

SEQ ID NO: 58518 - protein, 378 aa, Paenibacillus odorifer
  REGION 1..378: note = tr|A0A1R0Y8M4|A0A1R0Y8M4_9BACL Queuine tRNA-ribosyltransferase OS=Paenibacillus odorifer; OX = 189426 GN=tgt PE=3 SV=1
MAAITYEHIKTCKQSGARLGRVHTPHGVIETPAFMPVGTQATVKTMSPEELKEMDAHIILSNTYHLFLRPGHDIVREAGGLHKFMNWDRPILTDSGGFQVFSLSDMRKITEEGVHFRSHLNGDKKFLSPEVAMEVQNALGSDIMMAFDECPPFPAEYDYVKKSLERTTRWAERCLKSHARPNDQGLFAIVQGGMYEDLRRQSAADLTSMDFPGYAIGGLSVGESKQLMYEVLDYTVPLLPQGKPRYLMGVGSPDALLEGSIRGVDMFDCVLPTRIARNGTTMTSQGRLVVRNAKYARDFGPLDPECNCYTCRNYSRAYLRHLIKADETFGLRLTTYHNLHFLLDLMRKVREAIKEDRLLDFRDEFFAKYGLYDNLKGF

SEQ ID NO: 58519 - protein, 377 aa, unidentified
  source 1..377: note = Paenibacillus oryzae
  REGION 1..377: note = tr|A0A1A5YJR9|A0A1A5YJR9_9BACL Queuine tRNA-ribosyltransferase OS=Paenibacillus oryzae OX=1844972; GN = tgt PE=3 SV=1
MAVKYELIKQCKQSGARVGRVHTPHGVIETPAFMPVGTQATVKTMSPEELKAMDAHIILSNTYHLFLRPGHDIVKRAGGLHSFMNWDRPILTDSGGFQVFSLSEMRKITEEGVNFRSHLNGDKLFLSPEVAMEIQNALGSDIMMAFDECPPYPAEYQYVKQSTERTSRWAERCLKSHARPHDQALFAIVQGGMHKDLRIQSAKDLTSMDFPGYAIGGLSVGEPKHLMYEVLDYTVPELPATKPRYLMGVGSPDALVEGAIRGVDMFDCVLPTRIARNGTTMTSQGRLVIRNAKYAEDFGPLDPNCTCYTCSNYSRAYIRHLLKADETFGIRLTTYHNLHFLLQLMRDVRQAIMDDRLLDFRDSFFESYGLHNNDKGF

SEQ ID NO: 58520 - protein, 379 aa, unidentified
  source 1..379: note = Paenibacillus oryzisoli
  REGION 1..379: note = tr|A0A198A954|A0A198A954_9BACL Queuine tRNA-ribosyltransferase OS=Paenibacillus oryzisoli; OX = 1850517 GN=tgt PE=3 SV=1
MTAAVTYEPIKTCKQSGARLGRVHTPHGVIETPAFMPVGTQATVKTMSPEELKTMDAQIILSNTYHLFIRPGHEIVKEAGGLHKFMNWDRPILTDSGGFQVFSLSNMRKITEEGVTFKSHLNGDKLFLSPEKAMEIQNALGSDIMMAFDECPPFPAEYDYVKKSLERTTRWAERCLQSHARPQDQGLFAIIQGGMHEDLRKLSAEQLTSMDFPGYAIGGLSVGEPKHLMYEVLDYTTPLMPANKPRYLMGVGSPDALIEGAIRGIDMFDCVLPTRIARNGTCMTSSGRLVIRNAKYATDFGPLDAKCSCYTCTNYSRAYIRHLIKADETFGIRLTTIHNLHFLLQLMREVREAIKEDRLLDFRDTFFAAYGLNDNERGF

SEQ ID NO: 58521 - protein, 378 aa, Paenibacillus pabuli
  REGION 1..378: note = tr|A0A327QFZ7|A0A327QFZ7_9BACL Queuine tRNA-ribosyltransferase OS=Paenibacillus pabuli OX=1472; GN = tgt PE=3 SV=1
MAAITYEHIKTCKQSGARLGRVHTPHGIIETPTFMPVGTQATVKTMSPEELKEMDAQIILSNTYHLFLRPGHEIIRQAGGLHKFMNWDRPILTDSGGFQVFSLSEMRKITEEGVNFRSHLNGDKKFLSPEVAMEIQNALGSDIMMAFDECPPYPAEYEYVKKSLERTSRWAERCLESHARPNDQGLFAIVQGGMHEDLRRQSAADLTSMDFPGYAIGGLSVGEPKHLMYGVLDYTVPLLPSNKPRYLMGVGSPDALIEGSIRGVDMFDCVLPTRIARNGTTMTSQGRLVVRNAKFATDFGPLDPECDCYTCRNYSRAYLRHLIKADETFGLRLTTIHNLHFLQNLMRNVRKAIMEDRLLDFRDEFFDQYGLHDNDKGF

SEQ ID NO: 58522 - protein, 382 aa, unidentified
  source 1..382: note = Paenibacillus paeoniae
  REGION 1..382: note = tr|A0A371PJW0|A0A371PJW0_9BACL Queuine tRNA-ribosyltransferase OS=Paenibacillus paeoniae; OX = 2292705 GN=tgt PE=3 SV=1
MECDNVAVKYELIKQCKQSGARLGRVHTPHGIIETPTFMPVGTQATVKTMSPEELKSMDAQIILSNTYHLFLRPGHDLIKRAGGLHKFMNWDRPILTDSGGFQVFSLSEMRKITEEGVNFRSHLNGDKLFLSPEVAMEIQNALGPDIMMAFDECPPYPAEYEYIKQSTERTSRWAERCLKAHARPHDQALFAIVQGGMHKDLRIQSAKDLTSMDFPGYAIGGLSVGEPKHLMYEMLDYTLPELPANKPRYLMGVGSPDALVEGAIRGVDMFDCVLPTRIARNGTTMTSGGRLVIRNAKFAEDFGPLDPNCSCYTCQNYSRAYIRHLLKADETFGMRLTTYHNLHFLLQLMRDVRQAIMEDRLLDFRDSFFDAYGLHDNDKGF

SEQ ID NO: 58523 - protein, 377 aa, Paenibacillus pasadenensis
  REGION 1..377: note = tr|A0A2N5N973|A0A2N5N973_9BACL Queuine tRNA-ribosyltransferase OS=Paenibacillus pasadenensis; OX = 217090 GN=tgt PE=3 SV=1
MAVTYELIKTCKQTGARLGRVHTPHGVIETPAFMPVGTQATVKTMSPEELKQMDAHIILSNTYHLWLRPGHELIAKAGGLHRFMNWDRPILTDSGGFQVFSLSNMRKIREEGVDFRSHLNGDKLFLSPEKAMEIQNALGSDIMMAFDECPPYPAEYDYIKQSLERTTRWAERCLKAHARPGDQGLFAIVQGGMHADLRRQSAADLTSLDFPGYAIGGLSVGEPKHLMYEVLEETVPLLPSNKPRYLMGVGSPDALLDGAIRGIDMFDCVLPTRIARNGTTMTSQGRVNIRNAKYTEDFGPLDPECSCYTCRNYSRAYLRHLIKADETFGIRLTTYHNLHFLLEMMRGVRQAIQDDRLLDFRNEFFTMYGLHDNEKGF

SEQ ID NO: 58524 - protein, 379 aa, Paenibacillus pectinilyticus
  REGION 1..379: note = tr|A0A1C1A327|A0A1C1A327_9BACL Queuine tRNA-ribosyltransferase OS=Paenibacillus pectinilyticus; OX = 512399 GN=tgt PE=3 SV=1
MTAAVTYEPIKTCKQSGARLGRVHTPHGVIETPAFMPVGTQATVKTMSPEELKTMDAQIILSNTYHLFIRPGHEIVKEAGGLHKFMNWDRPILTDSGGFQVFSLSNMRKITEEGVQFKSHLNGDKLFLSPEKAMEIQNALGSDIMMAFDECPPFPAEYEYVKKSLERTTRWAERCLQSHARPQDQGLFAIIQGGMHEDLRRLSAEQLTSMDFPGYAIGGLSVGEPKHLMYEVLDYTTPLMPANKPRYLMGVGSPDALIEGAIRGIDMFDCVLPTRIARNGTCMTSSGRLVIRNAKYMKDFGPLDDKCSCYTCKNYSRAYIRHLIKADETFGIRLTTIHNLHFLLQLMREVREAIKEDRLLDFRDTFFAAYGLNDNERGF

SEQ ID NO: 58525 - protein, 379 aa, Paenibacillus peoriae
  REGION 1..379: note = tr|A0A0K2FCW7|A0A0K2FCW7_9BACL Queuine tRNA-ribosyltransferase OS=Paenibacillus peoriae OX=59893; GN = tgt PE=3 SV=1
MAPAIRYEHIKTCKQSGARLGRVHTPHGVIETPTFMPVGTQATVKTMSPEELKAMDAQIILSNTYHLFLRPGHDIIREAGGLHKFMNWDRPILTDSGGFQVFSLSEMRKISEEGVHFRSHLNGDKKFLSPEVAMEIQNSLGSDIMMAFDECPPFPAEYEYVKKSLERTSRWAERCLEAHARPHDQGLFAIVQGGMHEDLRKQSAADLTSMDFPGYAIGGLSVGEPKHLMYEVLDYTLPLLPTNKPRYLMGVGSPDALIEGAIRGVDMFDCVLPTRIARNGTTMTSQGRLVVRNAQYASDFGPLDPACDCYTCRNYSRAYLRHLIKADETFGLRLTTYHNLHFLIQLMRNVRQAIMDDRLLDFRDEFFEQYGLHDNDKGF

SEQ ID NO: 58526 - protein, 379 aa, Paenibacillus pini
  REGION 1..379: note = tr|W7YGN6|W7YGN6_9BACL Queuine tRNA-ribosyltransferase OS=Paenibacillus pini JCM 16418; OX = 1236976 GN=tgt PE=3 SV=1
MAAAVWYEHIKTCKQSGARLGRVHTPHGIIETPTFMPVGTLATVKTMSPEELKAMDAQIILSNTYHLFLRPGHDIIREAGGLHKFMNWDRPILTDSGGFQVFSLSDMRKITEEGVHFRSHLNGDKLFISPEVAMEIQNALGSDIMMAFDECPPYPAEYDYVKKSLERTTRWAERCLNSHARSHDQGLFAIVQGGMYEDLRKQSARDLTSMDFPGYAIGGLSVGESKQIMYDVLDYTVPLLPQDKPRYLMGVGSPDALLEGSIRGVDMFDCVLPTRIARNGTTMTSQGRLVVRNAKFARDFGPLDPECDCYTCQNYSRAYLRHLIKADETFGLRLTTYHNLHFLLNLMKQVRQSIMDDRLLDFRDEFFEKYGLYENKSGF

SEQ ID NO: 58527 - protein, 377 aa, unidentified
  source 1..377: note = Paenibacillus pinisoli
  REGION 1..377: note = tr|A0A3A6PU71|A0A3A6PU71_9BACL Queuine tRNA-ribosyltransferase OS=Paenibacillus pinisoli; OX = 1276110 GN=tgt PE=3 SV=1
MAVKYELIKQCKQSGARLGRVHTPHGIIETPTFMPVGTQATVKTMSPEELKSMDAQIILSNTYHLFLRPGHDLIKRAGGLHKFMNWDRPILTDSGGFQVFSLSEMRKITEEGVHFRSHLNGDKLFLSPEVVMEIENALGPDIMMAFDECPPYPAEYEYIKQSTERTTRWAERCLKAHARPHDQALFGIVQGGMHKDLRIQSARDLTSMDFPGYAIGGLSVGEPKHLMYEVLDYTVPELPANKPRYLMGVGSPDALVEGAIRGVDMFDCVLPTRIARNGTTMTSGGRLVIRNAKFAEDFGPLDPNCSCYTCQNYSRAYIRHLLKADETFGIRLTTYHNLHFLLQLMRDVRQAIMEDRLLDFRDSFFDAYGLHDNDKGF

SEQ ID NO: 58528 - protein, 379 aa, Paenibacillus polymyxa
  REGION 1..379: note = tr|A0A4U2P7Y8|A0A4U2P7Y8_PAEPO Queuine tRNA-ribosyltransferase OS=Paenibacillus polymyxa OX=1406; GN = tgt PE=3 SV=1
MAPAIRYEHIKTCKQSGARLGRVHTPHGVIETPTFMPVGTQATVKTMSPEELKAMDAHIILSNTYHLFLRPGHDIIREAGGLHKFMNWDRPILTDSGGFQVFSLSEMRKISEEGVHFRSHLNGDKKFLSPEVAMEVQNSLGSDIMMAFDECPPFPAEYEYVKKSLERTSRWAERCLEAHARPHDQGLFAIVQGGMHEDLRKQSAADLTSMDFPGYAIGGLSVGEPKHLMYEVLDYTVPLLPTNKPRYLMGVGSPDALIEGSIRGVDMFDCVLPTRIARNGTTMTSQGRLVVRNANYASDFGPLDPACDCYTCRNYSRAYLRHLIKADETFGLRLTTYHNLHFLIQLMRNVRQAIMDDRLLDFRDEFFEQYGLHDNDKGF

SEQ ID NO: 58529 - protein, 379 aa, Paenibacillus polymyxa
  REGION 1..379: note = tr|A0A5B8JSS8|A0A5B8JSS8_PAEPO Queuine tRNA-ribosyltransferase OS=Paenibacillus polymyxa OX=1406; GN = tgt PE=3 SV=1
MAPAIRYEHIKTCKQSGARLGRVHTPHGVIETPTFMPVGTQATVKTMSPEELKAMDAQIILSNTYHLFLRPGHDIIREAGGLHKFMNWDRPILTDSGGFQVFSLSEMRKISEEGVHFRSHLNGDKKFLSPEVAMEVQNSLGSDIMMAFDECPPFPAEYEYVKKSLERTSRWAERCLEAHARPHDQGLFAIVQGGMHEDLRKQSAADLTSMDFPGYAIGGLSVGEPKHLMYEVLDYTVPLLPTNKPRYLMGVGSPDALIEGSIRGVDMFDCVLPTRIARNGTTMTSQGRLVVRNANYASDFGPLDPACDCYTCRNYSRAYLRHLIKADETFGLRLTTYHNLHFLIQLMRNVRQAIMDDRLLDFRDEFFEQYGLHDNDKGF

SEQ ID NO: 58530 - protein, 378 aa, unidentified
  source 1..378: note = Paenibacillus polysaccharolyticus
  REGION 1..378: note = tr|A0A1G5BV13|A0A1G5BV13_9BACL Queuine tRNA-ribosyltransferase OS=Paenibacillus polysaccharolyticus OX=582692 GN=tgt PE=3 SV=1
MAAITYEHIKTCKQSGARLGRVHTPHGVIETPTFMPVGTQATVKTMSPEELKEMDAQIILSNTYHLFLRPGHEIIRQAGGLHKFMNWDRPILTDSGGFQVFSLSEMRKITEEGVHFRSHLNGDKKFLSPEVAMEIQNALGSDIMMAFDECPPYPAEYEYVKKSLERTTRWAERCIESHARPHDQGLFAIVQGGMHEDLRRQSAADLTSMDFPGYAIGGLSVGEPKHLMYGVLDYTVPLLPSNKPRYLMGVGSPDALIEGSIRGVDMFDCVLPTRIARNGTTMTSQGRLVVRNAKFATDFGPLDPECDCYTCRNYSRAYLRHLIKADETFGLRLTTIHNLHFLQNLMRNVRKAIMEDRLLDFRDEFFDQYGLHDNDKGF

SEQ ID NO: 58531 - protein, 379 aa, Paenibacillus popilliae
  REGION 1..379: note = tr|M9L7J4|M9L7J4_PAEPP Queuine tRNA-ribosyltransferase OS=Paenibacillus popilliae ATCC 14706 OX=1212764 GN=tgt PE=3 SV=1
MAAAVTYELMKTCKQTGARLGIVHTPHGSFETPTFMPVGTQATVKTMSPEELKEMNAKIILSNTYHLFLRPGHEIVREAGGLHTFMNWDRAILTDSGGFQVFSLSEMRKIEEEGVHFRSHLNGDKLFISPEKAMEIQNALGPDIMMAFDECAPYPAEHSYVKHSLERTTRWAERCLNSHARPHDQALFAIVQGGMYEDLRIQSAKDLTSMDFPGYAIGGLSVGEPKPLMYEVLETTVPLLPDSKPRYLMGVGSPDALVEGAMRGIDMFDCVLPTRIARNGTTMTSQGRLVVRNAKFTRDFGPLDPNCDCYTCRNYSRAYLRHLIKADETFGLRLTTYHNLYFLLNLMRQVREAIRDDRLRDFRDEFFEAYGMERNESGF

SEQ ID NO: 58532 - protein, 377 aa, Paenibacillus prosopidis
  REGION 1..377: note = tr|A0A368VM51|A0A368VM51_9BACL Queuine tRNA-ribosyltransferase OS=Paenibacillus prosopidis; OX = 630520 GN=tgt PE=3 SV=1
MAVKYELIKQCKQSGARLGRVHTPHGVIETPAFMPVGTQATVKTMSPEELKTMDAHIILSNTYHLFLRPGHDIVKAAGGLHKFMNWDRPILTDSGGFQVFSLSEMRKITEEGVHFRSHLNGDKKFLSPEVAMEIQNALGSDIMMAFDECPPFPAEHEYVKKSLERTTRWAERCLEAHARPHDQGLFAIVQGGMYKDLRIQSANDLTSMDFPGYAIGGLSVGEPKHLMYEVLDYTVPILPAAKPRYLMGVGSPDALIDGAIRGIDMFDCVLPTRIARNGTTMTSQGRLVIRNAKYAEDFGPLDPECSCYTCTNYSRAYIRHLIKADETFGMRLTTYHNLHFLLQLMRDVRQAILEDRLLDFRDSFFTSYGLFDNEKGF

SEQ ID NO: 58533 - protein, 379 aa, Paenibacillus rhizosphaerae
  REGION 1..379: note = tr|A0A1R1DXB3|A0A1R1DXB3_9BACL Queuine tRNA-ribosyltransferase OS=Paenibacillus rhizosphaerae; OX = 297318 GN=tgt PE=3 SV=1
MAAAITYEHIKTCKQSGARLGRVHTPHGVIETPIFMPVGTLATVKTMSPEELKEMNAQIILSNTYHLFLRPGHDIIREAGGLHRFMNWDRPILTDSGGFQVFSLSEMRKITEEGVHFRSHLNGDKLFLSPEVAMEIQNALGSDIMMAFDECPPYPAEYDYVKKSLERTTRWAERCLNSHARPHDQGLFAIVQGGMYEDLRKQSARDLTSMDFPGYAIGGLSVGESKQLMYEVLDYTVPLLPDNKPRYLMGVGSPDALIEGSIRGVDMFDCVLPTRIARNGTTMTSQGRLVVRNAQYARDFGPLDPACDCYTCRNYSRAYLRHLIKADETFGLRLTTYHNLHFLINLMKQVRQAIMEDRLLDFRDEFFEQYGLYDNDKGF

SEQ ID NO: 58534 - protein, 378 aa, Paenibacillus rigui
  REGION 1..378: note = tr|A0A229UT63|A0A229UT63_9BACL Queuine tRNA-ribosyltransferase OS=Paenibacillus rigui OX=554312; GN = tgt PE=3 SV=1
MPAVTYEHIKTCKQSGARLGRVHTPHGVIETPAFMPVGTQATVKTMSPEELKAMDAHIILSNTYHLFLRPGHEIVKQAGGLHRFMNWDRPILTDSGGFQVFSLSDMRKISEEGVAFKSHLNGDKLFLSPEKAMEIQNALGSDIMMAFDECPPFPAEHAYAKQSLERTTRWAERCLQSHSRPKEQALFAIIQGGMYEDLRKQSAAELTSMDFPGYAIGGLSVGEPKHLMYEVLEYTVPLMPFNKPRYLMGVGSPDALVEGAIRGIDMFDCVLPTRIARNGTCMTSSGRLVIRNAKYAEDFGPLDPECSCYTCKNYSRAYIRHLLKADETFGIRLTTYHNLHFLLELMRQVRQAIQEDRLLDFRNVFFEKYGLDENGKGF

SEQ ID NO: 58535 - protein, 378 aa, Paenibacillus riograndensis
  REGION 1..378: note = tr|A0A0E4HEH0|A0A0E4HEH0_9BACL Queuine tRNA-ribosyltransferase OS=Paenibacillus riograndensis SBR5 OX=1073571 GN=tgt PE=3 SV=1
MAAITYEHIKTCKQSGARLGRVHTPHGVIETPAFMPVGTLATVKTMSPEELKQMDAHIILSNTYHLFLRPGHDIIREAGGLHKFMNWDRPILTDSGGFQVFSLSDMRKITEEGVHFRSHLNGDKKFLSPEVAMEVQNALGSDIMMAFDECPPYPAEYDYVKKSLERTTRWAERCLKSHARPEDQGLFAIVQGGMYEDLRRQSAADLTSMDFPGYAIGGLSVGESKQLMYEVLDYTVPLLPQGKPRYLMGVGSPDALLEGSIRGVDMFDCVLPTRIARNGTTMTSQGRLVVRNAQYARDFGPLDPECGCYTCRNYSRAYLRHLIKADETFGLRLTTYHNLYFLLELMRKMREAIREDRLLDFRDEFFAQYGLYDNLKGF

SEQ ID NO: 58536 - protein, 378 aa, Paenibacillus riograndensis
  REGION 1..378: note = tr|A0A132U0F6|A0A132U0F6_9BACL Queuine tRNA-ribosyltransferase OS=Paenibacillus riograndensis; OX = 483937 GN=tgt PE=3 SV=1
MAAITYEHIKTCKQSGARLGRVHTPHGVIETPAFMPVGTLATVKTMSPEELKQMDAHIILSNTYHLFLRPGHDIIREAGGLHKFMNWDRPILTDSGGFQVFSLSDMRKITEEGVHFRSHLNGDKKFLSPEVAMEVQNALGSDIMMAFDECPPYPAEYDYVKKSLERTTRWAERCLKSHARPEDQGLFAIVQGGMYEDLRRQSAADLTSMDFPGYAIGGLSVGESKQLMYEVLDYTVPLLPQGKPRYLMGVGSPDALLEGSIRGVDMFDCVLPTRIARNGTTMTSQGRLVVRNAQYARDFGPLDPECGCYTCRNYSRAYLRHLIKADETFGLRLTTYHNLYFLLELMRKVREAIREDRLLDFRDEFFAQYGLYDNLKGF

SEQ ID NO: 58537 - protein, 378 aa, Paenibacillus sabinae
  REGION 1..378: note = tr|X4ZMR1|X4ZMR1_9BACL Queuine tRNA-ribosyltransferase OS=Paenibacillus sabinae T27; OX = 1268072 GN=tgt PE=3 SV=1
MAAITYEHIKTCKQSGARLGRVHTPHGVIETPTFMPVGTQATVKTMSPEELKEMDAQIILSNTYHLFLRPGHDIVREAGGLHKFMNWDRPILTDSGGFQVFSLSEMRKITEEGVHFRSHLNGDKKFLSPEVAMEIQNALGSDIMMAFDECPPYPAEYDYVKKSLERTTRWAERCLKSHARPHDQGLFAIVQGGMYEDLRRQSAAELTSMDFPGYAIGGLSVGESKQIMYEVLDYTVPLLPQDKPRYLMGVGSPDALVEGAIRGVDMFDCVLPTRIARNGTTMTSQGRLVVRNAQYARDFGPLDPECGCYTCRNYSRAYLRHLIKSDETFGLRLTTYHNLYFLLELMRKVRKAIMEDRLLDFRDEFFAQYGLHENSKGF

SEQ ID NO: 58538 - protein, 378 aa, unidentified
  source 1..378: note = Paenibacillus selenitireducens
  REGION 1..378: note = tr|A0A1T2XKH3|A0A1T2XKH3_9BACL Queuine tRNA-ribosyltransferase OS=Paenibacillus selenitireducens; OX = 1324314 GN=tgt PE=3 SV=1
MAAITYEHIKTCKQSGARLGRVHTPHGVIETPTFMPVGTQASVKTMSPEELKQMDAHIILSNTYHLFLRPGHDIVREAGGLHKFMNWDRPILTDSGGFQVFSLSEMRKITEEGVNFRSHLNGDKLFLSPEVAMEIQNALGSDIMMAFDECAPFPAEHAYVKHSLERTSRWAERCLKSHARPEDQGLFAIVQGGMYEDLRRQSAADLTSLDFPGYAIGGLSVGEPKHLMYEVLDYTVPLLPTNKPRYLMGVGSPDALVEGSIRGVDMFDCVLPTRIARNGTTMTSQGRLVVRNAKYARDFGPLDPNCDCYTCKNYSRAYLRHLIKADETFGLRLTTYHNLHFLIQLMRNVRQAIREDRLLDFRDEFFEQYGMKDNESGF

SEQ ID NO: 58539 - protein, 378 aa, unidentified
  source 1..378: note = Paenibacillus silvae
  REGION 1..378: note = tr|A0A2W6NQL0|A0A2W6NQL0_9BACL Queuine tRNA-ribosyltransferase OS=Paenibacillus silvae OX=1325358; GN = tgt PE=3 SV=1
MAAITYEHIKTCKQSGARLGRVHTPHGVIETPTFMPVGTQATVKTMSPEELKEMDAQIILSNTYHLFLRPGHEIIRQAGGLHKFMNWDRPILTDSGGFQVFSLSEMRKITEEGVHFRSHLNGDKKFLSPEVAMEIQNALGSDIMMAFDECPPYPAEYEYVKKSLERTSRWAERCLESHARPHDQGLFAIVQGGMHEDLRRQSAADLTSMDFPGYAIGGLSVGEPKHLMYGVLDYTVPLLPANKPRYLMGVGSPDALIEGSIRGVDMFDCVLPTRIARNGTTMTSQGRLVVRNAKFATDFGPLDPECDCYTCRNYSRAYLRHLIKADETFGLRLTTIHNLHFLQNLMRNVRKAIMEDRLLDFRDEFFDQYGLHDNDKGF

SEQ ID NO: 58540 - protein, 379 aa, unidentified
  source 1..379: note = Paenibacillus solani
  REGION 1..379: note = tr|A0A0M1P2E7|A0A0M1P2E7_9BACL Queuine tRNA-ribosyltransferase OS=Paenibacillus solani OX=1705565; GN = tgt PE=3 SV=1
MAAAVTYEHIKTCKQSGARLGRVHTPHGVIETPTFMPVGTLATVKTMSPEELKSMDAQIILSNTYHLFLRPGHDIVKEAGGLHKFMNWDRPILTDSGGFQVFSLAEMRKISEEGVHFRSHLNGDKLFISPEVAMEIQNALGSDIMMAFDECPPYPAEYEYVKQSTERTSRWAERCLKSHARPEDQALFAIVQGGMHEDLRRQSARDLTSMDFPGYAIGGLSVGESKQLMYEVLDYTVPLLPNNKPRYLMGVGSPDALIEGSIRGVDMFDCVLPTRIARNGTTMTSQGRLVVRNAQYARDYGPLDPECDCYTCRNYSRAYLRHLIKSDETFGLRLTTYHNLHFLLNLMRNVRQSIMEDRLLDFRDEFFDKYGLHDNKKGF

SEQ ID NO: 58541 - protein, 378 aa, Paenibacillus sophorae
  REGION 1..378: note = tr|A0A1H8REZ3|A0A1H8REZ3_9BACL Queuine tRNA-ribosyltransferase OS=Paenibacillus sophorae; OX = 1333845 GN=tgt PE=3 SV=1
MAAITYEHIKTCKQSGARLGRVHTPHGVIETPTFMPVGTQATVKTMSPEELKDMDAQIILSNTYHLFLRPGHDIVREAGGLHKFMNWDRPILTDSGGFQVFSLSEMRKITEEGVHFRSHLNGDKKFLSPEVAMEVQNALGSDIMMAFDECPPYPAEYDYVKRSLERTTRWAERCLKAHARPHDQGLFAIVQGGMFEDLRRQSAAELTSMDFPGYAIGGLSVGESKQIMYEVLDYTVPLLPQDKPRYLMGVGSPDALVEGAIRGVDMFDCVLPTRIARNGTTMTSQGRLVVRNAQYARDFGPLDPECGCYTCRNYSRAYLRHLIKSDETFGLRLTTYHNLYFLLELMRKVRKAIMEDRLLDFRDEFFAQYGLHENSKGF

SEQ ID NO: 58542 - protein, 378 aa, Paenibacillus sp.
  REGION 1..378: note = tr|A0A089I709|A0A089I709_9BACL Queuine tRNA-ribosyltransferase OS=Paenibacillus sp. FSL H7-0357; OX = 1536774 GN=tgt PE=3 SV=1
MAAITYEHIKTCKQSGARLGRVHTPHGVIETPAFMPVGTQATVKTMSPEELKEMDAHIILSNTYHLFLRPGHDIIREAGGLHKFMNWDRPILTDSGGFQVFSLSDMRKITEEGVHFRSHLNGDKKFLSPEVAMEIQNALGSDIMMAFDECPPFPAEYDYVKKSLERTSRWAERCLKSHARPEDQGLFAIVQGGMHEDLRRQSAADLTSMDFPGYAIGGLSVGESKQLMYEVLDYTVPLLPQGKPRYLMGVGSPDALLEGSIRGVDMFDCVLPTRIARNGTTMTSQGRLVVRNAQYARDFGPLDPECSCYTCRNYSRAYLRHLIKADETFGLRLTTYHNLHFLLDLMRKVREAIREDRLLDFRDEFFAQYGLYDNLKGF

SEQ ID NO: 58543 - protein, 378 aa, Paenibacillus sp.
  REGION 1..378: note = tr|A0A1R0ZU39|A0A1R0ZU39_9BACL Queuine tRNA-ribosyltransferase OS=Paenibacillus sp. FSL A5-0031; OX = 1920420 GN=tgt PE=3 SV=1
MVAVKYELIKQCKQSGARLGRVHTPHGVIETPTFMPVGTQATVKTMAPEELKAMDAQIILSNTYHLFLRPGHDIVRNAGGLHKFMNWDRPILTDSGGFQVFSLSEMRKITEEGVHFRSHLNGDKKFLSPEVAMEIQNALGSDIMMAFDECPPFPAEHDYVKKSLERTTRWAERCLKAHARPHDQGLFAIVQGGMYKDLRIQSANDLTSMDFPGYAIGGLSVGEPKHLMYDVLDYTVPILPANKPRYLMGVGSPDALIEGSIRGIDMFDCVLPTRIARNGTTMTSQGRLVIRNAKYAEDYGPLDPECSCYTCTNYSRAYIRHLIKADETFGMRLTTYHNLHFLLQLMRDVRQAIMDDRLLDFRDSFFTSYGLFDNEKGF

SEQ ID NO: 58544 - protein, 378 aa, unidentified
  source 1..378: note = Paenibacillus spiritus
  REGION 1..378: note = tr|A0A5J5GJN6|A0A5J5GJN6_9BACL tRNA guanosine(34) transglycosylase Tgt OS=Paenibacillus spiritus OX=2496557; GN = tgt PE=4 SV=1
MAAITYEHIKTCKQSGARLGRVHTPHGVIETPCFMPVGTQATVKTMSPEELKAMDAHIILSNTYHLFLRPGHEIVREAGGLHKFMNWDRPILTDSGGFQVFSLAEMRKISEEGVHFRSHLNGDKLFLSPEVAMEIQNALGSDIMMAFDECPPYPAEYEYVKKSTERTSRWAERCLNAHGRKEDQGLFAIVQGGMYEDLRRQSAADLTSMDFPGYAIGGLSVGESKELMYEVLDYTVPLLPENKPRYLMGVGSPDALLEGAIRGVDMFDCVLPTRIARNGTTMTSQGRLVVRNAQYARDFGPLDPECDCYTCRNYSRAYLRHLIKADETFGLRLTTYHNLHFLLNLMRQVRQAIMEDRLLDFRDEFFAQYGLNDNPKGF

SEQ ID NO: 58545 - protein, 378 aa, Paenibacillus stellifer
  REGION 1..378: note = tr|A0A089M0T4|A0A089M0T4_9BACL Queuine tRNA-ribosyltransferase OS=Paenibacillus stellifer; OX = 169760 GN=tgt PE=3 SV=1
MAAITYEHIKTCKQSGARLGRVHTPHGIIETPTFMPVGTQATVKTMSPEELKEMDAQIILSNTYHLFLRPGHDIVREAGGLHKFMNWDRPILTDSGGFQVFSLAEMRKITEEGVHFRSHLNGDKKFLSPEVAMEVENALGSDIMMAFDECPPYPAEYDYVKRSMERTTRWAERCLKAHARPNDQGLFAIVQGGMYEDLRRQSAADLTSMDFPGYAIGGLSVGESKQLMYEVLDYTVPLLPQNKPRYLMGVGSPDALLEGAIRGVDMFDCVLPTRIARNGTTMTSQGRLVVRNAQYARDFGPLDPECDCYTCRNYSRAYLRHLIKSDETFGLRLTTYHNLYFLLDLMRKVRKAIMEDRLLDFRDEFFAQYGLHENTKGF

SEQ ID NO: 58546 - protein, 378 aa, unidentified
  source 1..378: note = Paenibacillus swuensis
  REGION 1..378: note = tr|A0A172TJG6|A0A172TJG6_9BACL Queuine tRNA-ribosyltransferase OS=Paenibacillus swuensis; OX = 1178515 GN=tgt PE=3 SV=1
MAAVTYEHIKTCKQSGARLGRVHTPHGIIETPTFMPVGTQATVKTMSPEELKEMDAHIILSNTYHLFLRPGHDLIKEAGGLHKFMNWDRPILTDSGGFQVFSLSDMRKITEEGVSFKSHLNGDKLFISPEVAMEIQNALGSDIMMAFDECPPFPAEKEYVRKSTERTSRWAERCLESHARPDDQALFAIVQGGMHEDLRKQSALDLTSMDFPGYAIGGLSVGEPKHLMYEVLEHTVPLLPANKPRYLMGVGSPDALIDGAIRGIDMFDCVLPTRIARNGTTMTSSGRLVVRNAQYARDFGPLDPKCDCYTCRNYSRAYLRHLIKADETFGLRLTTYHNLHFLLNLMRNVRQAIREDRLLDFREEFFTEYGLHDNDKGF

SEQ ID NO: 58547 - protein, 378 aa, Paenibacillus taichungensis; identical to SEQ ID NO: 58521
  REGION 1..378: note = tr|A0A2V3RJB4|A0A2V3RJB4_9BACL Queuine tRNA-ribosyltransferase OS=Paenibacillus taichungensis; OX = 484184 GN=tgt PE=3 SV=1

SEQ ID NO: 58548 - protein, 377 aa, unidentified
  source 1..377: note = Paenibacillus taihuensis
  REGION 1..377: note = tr|A0A3D9QVT4|A0A3D9QVT4_9BACL Queuine tRNA-ribosyltransferase OS=Paenibacillus taihuensis; OX = 1156355 GN=tgt PE=3 SV=1
MAITYELIKTCKQTGARLGRVHTPHGVIETPTFMPVGTQATVKTVSPEELKTLDAHIILSNTYHLFIRPGHEIVRQAGGLHKFMNWDRPILTDSGGFQVFSLSNMRKINEEGVEFRNHLNGDKLFISPEKAMEIQNALGSDIMMAFDECAPYPAEYDYVKKSLERTTRWAERCLAAHARPETQALFAIVQGGMYEDLRRQSALELTSMDFPGYAIGGLSVGEPKDLMYNVLDCTVPLLPTNKPRYLMGVGSPDALLDGAIRGVDMFDCVLPTRIARNGTTMTSQGRLVIRNAKFADDFGPLDPECSCYTCTNYSRAYIRHLIKADETFGIRLTTIHNLHFLLELMRNVRKAIMEDRLLDFRNEFFETYGLNENSKGF

SEQ ID NO: 58549 - protein, 379 aa, Paenibacillus terrae
  REGION 1..379: note = tr|G7VTC5|G7VTC5_PAETH Queuine tRNA-ribosyltransferase OS=Paenibacillus terrae (strain HPL-003) OX=985665 GN=tgt PE=3 SV=1
MAPAIRYEHIKTCKQSGARLGRVHTPHGVIETPTFMPVGTQATVKTMSPEELKEMDAQIILSNTYHLFLRPGHDIIREAGGLHKFMNWDRPILTDSGGFQVFSLSEMRKITEEGVHFRSHLNGDKKFLSPEVAMEIQNSLGSDIMMAFDECPPFPAEYEYVKKSLERTSRWAERCLEAHARPHDQGLFAIVQGGMHEDLRKQSAADLTSMDFPGYAIGGLSVGEPKHLMYEVLDYTLPLLPTNKPRYLMGVGSPDALIEGAIRGVDMFDCVLPTRIARNGTTMTSQGRLVVRNAQYARDFGPLDPACDCYTCRNYSRAYLRHLIKADETFGLRLTTYHNLHFLIQLMRNVRQAIMDDRLLDFRDEFFEQYGLHDNDKGF

SEQ ID NO: 58550 - protein, 379 aa, Paenibacillus terrae
  REGION 1..379: note = tr|A0A4U2PUR8|A0A4U2PUR8_9BACL Queuine tRNA-ribosyltransferase OS=Paenibacillus terrae OX=159743; GN = tgt PE=3 SV=1
MAPAIRYEHIKTCKQSGARLGRVHTPHGVIETPTFMPVGTQATVKTMSPEELKEMDAQIILSNTYHLFLRPGHDIIREAGGLHKFMNWDRPILTDSGGFQVFSLSEMRKITEEGVHFRSHLNGDKKFLSPEVAMEIQNSLGSDIMMAFDECPPFPAEYEYVKKSLERTSRWAERCLEAHARPHDQGLFAIIQGGMHEDLRKQSAADLTSMDFPGYAIGGLSVGEPKHLMYEVLDYTLPLLPTNKPRYLMGVGSPDALIEGAIRGVDMFDCVLPTRIARNGTTMTSQGRLVVRNAQYARDFGPLDPACDCYTCRNYSRAYLRHLIKADETFGLRLTTYHNLHFLIQLMRNVRQAIMDDRLLDFRDEFFEQYGLHDNDKGF

SEQ ID NO: 58551 - protein, 382 aa, unidentified
  source 1..382: note = Paenibacillus thermophilus
  REGION 1..382: note = tr|A0A388NBS2|A0A388NBS2_9BACL Queuine tRNA-ribosyltransferase OS=Paenibacillus thermophilus; OX = 1181891 GN=tgt PE=3 SV=1
MIRVAAAITYEHIKTCKQSGARLGRVHTPHGTFDTPTFMPVGTQATVKTMSPEELKEMDARIILSNTYHLFLRPGHEIIREAGGLHKFMNWDRAILTDSGGFQVFSLAEMRKITEEGVHFRSHLNGDKLFLSPEVAMEIQNALGSDIMMAFDECPPYPAEYDYVKSSTERTSRWAERCLKSHSRPHDQGLFAIVQGGMHEDLRKQSARDLTSLDFPGYAIGGLSVGEPKQLMYEVLEYTVPLLPADKPRYLMGVGSPDALIEGAIRGVDMFDCVLPTRIARNGTTMTSQGRLVVRNAQYANDFGPLDPECDCYTCRNYSRAYLRHLIKADETFGLRLTTYHNLHFLITLMKNVRQAIMEDRLLSFRDEFFEKYGLFGNDKGF

SEQ ID NO: 58552 - protein, 379 aa, Paenibacillus thiaminolyticus
  REGION 1..379: note = tr|A0A378X8X2|A0A378X8X2_PANTH Queuine tRNA-ribosyltransferase OS=Paenibacillus thiaminolyticus; OX = 49283 GN=tgt PE=3 SV=1
MAAAVTYELIKTCKQTGARLGIVHTPHGSFETPTFMPVGTQATVKTMSPEELKEMNAKIILSNTYHLFLRPGHEIVREAGGLHKFMNWDRAILTDSGGFQVFSLSEMRKIEEEGVHFRSHLNGDKLFISPEKAMEIQNALGSDIMMAFDECAPYPAEHSYVKHSLERTTRWAERCLNSHARPHDQALFAIIQGGMYEDLRIQSAKDLTSMDFPGYAIGGLSVGEPKPLMYEVLETTVPLLPDSKPRYLMGVGSPDALVEGSMRGIDMFDCVLPTRIARNGTTMTSQGRLVVRNAKFTRDFGPLDPNCDCYTCRNYSRAYLRHLIKADETFGLRLTTYHNLYFLLNLMRQVREAIREDRLRDFRDEFFEAYGMDRNESGF

SEQ ID NO: 58553 - protein, 379 aa, Paenibacillus thiaminolyticus
  REGION 1..379: note = tr|A0A515LYS4|A0A515LYS4_PANTH Queuine tRNA-ribosyltransferase OS=Paenibacillus thiaminolyticus; OX = 49283 GN=tgt PE=3 SV=1
MAAAVTYELIKTCKQTGARLGIVHTPHGSFETPTFMPVGTQATVKTMSPEELKEMNAKIILSNTYHLFLRPGHEIVREAGGLHKFMNWDRAILTDSGGFQVFSLSDMRKIEEEGVHFRSHLNGDKLFISPEKAMEIQNALGSDIMMAFDECAPYPAEHSYVKHSLERTTRWAERCLNSHARPHDQALFAIVQGGMYEDLRIQSAKDLTSMDFPGYAIGGLSVGEPKPLMYEVLETTVPLLPDSKPRYLMGVGSPDALVEGSMRGIDMFDCVLPTRIARNGTTMTSQGRLVVRNAKFTRDFGPLDPNCDCYTCRNYSRAYLRHLIKADETFGLRLTTYHNLYFLLNLMRQVREAIREDRLRDFRDEFFEAYGMDRNESGF

SEQ ID NO: 58554 - protein, 380 aa, Paenibacillus tianmuensis
  REGION 1..380: note = tr|A0A1G4QMS6|A0A1G4QMS6_9BACL Queuine tRNA-ribosyltransferase OS=Paenibacillus tianmuensis; OX = 624147 GN=tgt PE=3 SV=1
MIGLAVTYEHIKTCKQSGARLGRVHTPHGVIETPAFMPVGTQATVKTMSPEELKQMDAHIILSNTYHLFLRPGHEIVKKAGGLHRFMNWDRPILTDSGGFQVFSLSEMRKISEEGVQFRSHLNGDKLFISPEKAIEIQNALGSDIMMAFDECPPYPAEHSYVKQSLERTTRWAERCLKAHARPNEQAIFAIVQGGMFEDLRKQSALELTSMDFPGYAIGGLSVGEPKPLMYEVLDYTVPYLPAHKPRYLMGVGSPDALVEGSIRGIDMFDCVLPTRIARNGTVMTSEGRLVVRNAKFAEDFGPLDPECSCYTCRHYSRAYIRHLIKADESFGIRLTTYHNLHFLLELMRGVRQAIREDRLLDFRDEFFAKYGIDENSKGF

SEQ ID NO: 58555 - protein, 378 aa, unidentified
  source 1..378: note = Paenibacillus typhae
  REGION 1..378: note = tr|A0A1G8IC21|A0A1G8IC21_9BACL Queuine tRNA-ribosyltransferase OS=Paenibacillus typhae OX=1174501; GN = tgt PE=3 SV=1
MAAITYEHIKTCKQSGARLGRVHTPHGIIETPTFMPVGTQATVKTMAPEELKQMDAQIILSNTYHLFLRPGHDIVREAGGLHKFMNWDRPILTDSGGFQVFSLSDMRKITEEGVHFRSHLNGDKKFLSPEVAMEVQNALGSDIMMAFDECPPYPAEYDYVKKSLERTTRWAERCLKAHARPEDQGLFAIVQGGMYEDLRRQSAADLTSMDFPGYAIGGLSVGESKQIMYDVLDYTVPLLPQNKPRYLMGVGSPDALLEGAIRGVDMFDCVLPTRIARNGTTMTSQGRLVVRNAQYARDFGPLDPECNCYTCRNYSRAYLRHLIKADETFGLRLTTYHNLQFLLDLMRKVREAIREDRLLDFRDEFFAQYGLYDNLKGF

SEQ ID NO: 58556 - protein, 377 aa, unidentified
  source 1..377: note = Paenibacillus tyrfis
  REGION 1..377: note = tr|A0A081NWV4|A0A081NWV4_9BACL Queuine tRNA-ribosyltransferase OS=Paenibacillus tyrfis OX=1501230; GN = tgt PE=3 SV=1
MAVTYEHIKTCKQSGARLGRVHTPHGVIETPAFMPVGTQATVKTMSPEELKQMDAHIILSNTYHLFLRPGHEIVKKAGGLHRFMNWDRPILTDSGGFQVFSLSEMRKISEEGVQFRSHLNGDKLFISPEKSIEIQNALGSDIMMAFDECPPYPAEHSYAKQSLERTTRWAERCLKAHARPNDQALFAIVQGGMYEDLRKQSALELTSMDFPGYAIGGLSVGEPKPLMYEVLDYTVPYLPTHKPRYLMGVGSPDALVEGSIRGIDMFDCVLPTRIARNGTVMTSEGRLVVRNAKFAEDFGPLDPECSCYTCRNYSRAYIRHLIKADETFGIRLTTYHNLHFLLELMRGVRQAIREDRLLDFRDEFFAKYGIDENSKGF

SEQ ID NO: 58557 - protein, 379 aa, Paenibacillus uliginis
  REGION 1..379: note = tr|A0A1X7HNV5|A0A1X7HNV5_9BACL Queuine tRNA-ribosyltransferase OS=Paenibacillus uliginis N3/975; OX = 1313296 GN=tgt PE=3 SV=1
MAAAITYEHIKTCKQSGARLGRVHTPHGVIETPTFMPVGTLATVKTMSPEELKAMDAQIILSNTYHLFLRPGHDIIKEAGGLHKFMNWDRPILTDSGGFQVFSLAEMRKITEEGVNFRSHLNGDKLFISPEVAMEIQNALGSDIMMAFDECPPYPAEYDYVKKSTERTSRWAERCLKSHARPHDQGLFAIVQGGMYEDLRRQSARDLTSMDFPGYAIGGLSVGESKQLMYEVLDYTVPLLPDNKPRYLMGVGSPDALLEGSIRGVDMFDCVLPTRIARNGTTMTSQGRLVVRNAQYARDFGPLDPECDCYTCRHYSRAYLRHLIKSDETFGLRLTTYHNLHFLLNLMRNVRQSIMEDRLLDFRDEFFEKYGLHDNEKGF

SEQ ID NO: 58558 - protein, 379 aa, unidentified; identical to SEQ ID NO: 58494
  source 1..379: note = Paenibacillus vortex
  REGION 1..379: note = tr|A0A2R9SWW6|A0A2R9SWW6_9BACL Queuine tRNA-ribosyltransferase OS=Paenibacillus vortex V453; OX = 715225 GN=tgt PE=3 SV=1

SEQ ID NO: 58559 - protein, 379 aa, unidentified
  source 1..379: note = Paenibacillus whitsoniae
  REGION 1..379: note = tr|A0A430JBB7|A0A430JBB7_9BACL Queuine tRNA-ribosyltransferase OS=Paenibacillus whitsoniae; OX = 2496558 GN=tgt PE=3 SV=1
MTAAVTYEPIKTCKQSGARLGRVHTPHGVIETPAFMPVGTQATVKTMSPEELKTMDAQIILSNTYHLFIRPGHDIVKQAGGLHKFMNWDRPILTDSGGFQVFSLSNMRKITEEGVTFKSHLNGDKLFISPEVAMEIQNALGSDIMMAFDECPPYPADYEYVKKSLERTTRWAERCLQSHSRPQDQALFAIIQGGMYADLRKLSAEQLTSMDFPGYAIGGLSVGEPKHMMYEMLEQTTPLMPANKPRYLMGVGSPDALIEGSIRGIDMFDCVLPTRIARNGTCMTSEGRLVIRNAKYMTDFGPLDPKCSCYTCQNYSRAYIRHLIKADETFGIRLTTVHNLHFLLQLMRDVREAIMEDRLLDFRDSFFASYGLNDNERGF

SEQ ID NO: 58560 - protein, 378 aa, Paenibacillus wynnii
  REGION 1..378: note = tr|A0A098M6Q8|A0A098M6Q8_9BACL Queuine tRNA-ribosyltransferase OS=Paenibacillus wynnii OX=268407; GN = tgt PE=3 SV=1
MAAITYEHIKTCNQSGARLGRVHTPHGVIDTPTFMPVGTLATVKTMSPEELKEMDAHIILSNTYHLFLRPGHDIIRDAGGLHKFMNWDRPILTDSGGFQVFSLSDMRKITEEGVHFRSHLNGDKKFLSPEVAMEIQNALGSDIMMAFDECPPFPAEYDYIKKSLERTSRWAERCLKSHARPEDQGLFAIVQGGMHEDLRRQSAADLTSMDFPGYAIGGLSVGESKQLMYEVLDYTVPLLPQNKPRYLMGVGSPDALLEGSIRGVDMFDCVLPTRIARNGTTMTSQGRLVVRNAQYARDFGPLDPECNCYTCRNYSRAYLRHLIKADETFGLRLTTYHNLHFLLELMRKVREAIMEDRLLDFRDEFFAKYGLYDNLKGF

SEQ ID NO: 58561 - protein, 379 aa, unidentified
  source 1..379: note = Paenibacillus xerothermodurans
  REGION 1..379: note = tr|A0A2W1NJ27|A0A2W1NJ27_9BACL Queuine tRNA-ribosyltransferase OS=Paenibacillus xerothermodurans; OX = 1977292 GN=tgt PE=3 SV=1
MAAAVTYEHIKTCKQSGARLGRVYTPHGVIETPAFMPVGTQATVKTMSPEELKQMDAHIILSNTYHLFLRPGHDIVRRAGGLHKFMNWDRPILTDSGGFQVFSLSEMRKITEEGVAFHSHLNGDKLFISPEKSIEIQNALGADIIMAFDECPPFPAEHSYAKQSLERTSRWAERCLQSHARPAEQGLFGIIQGGMYEDLRKQSIAELTSLDFPGYAIGGLSVGEPKPLMYEVLDYTVPLMPANKPRYLMGVGSPDALVEGSIRGVDMFDCVLPTRIARNGTVMTSTGRLVVRNAKYAEDFGPLDPECSCYTCQNYSRAYIRHLIKADETFGIRLTTYHNLHFLLELMRLVRQAIQEDRLLDFRDEFFEKYGLSEAGKGF

SEQ ID NO: 58562 - protein, 378 aa, Paenibacillus xylanexedens
  REGION 1..378: note = tr|A0A1L5LVE6|A0A1L5LVE6_9BACL Queuine tRNA-ribosyltransferase OS=Paenibacillus xylanexedens; OX = 528191 GN=tgt PE=3 SV=1
MAAITYEHIKTCKQSGARLGRVHTPHGVIETPTFMPVGTQATVKTMSPEELKEMDAQIILSNTYHLFLRPGHEIIREAGGLHKFMNWDRPILTDSGGFQVFSLSEMRKITEEGVNFRSHLNGDKKFLSPEVAMEIQNALGSDIMMAFDECPPYPAEYEYVKKSLERTSRWAERCLESHARPHDQGLFAIVQGGMHEDLRRQSAADLTSMDFPGYAIGGLSVGEPKHLMYGVLDYTLPLLPSNKPRYLMGVGSPDALIEGSIRGVDMFDCVLPTRIARNGTTMTSQGRLVVRNAKFATDFGPLDPECDCYTCRNYSRAYLRHLIKADETFGLRLTTIHNLHFLQNLMRNVRKAIMEDRLLDFRDEFFDQYGLHDNDKGF

SEQ ID NO: 58563 - protein, 379 aa, unidentified
  source 1..379: note = Paenibacillus yonginensis
  REGION 1..379: note = tr|A0A1B1N246|A0A1B1N246_9BACL Queuine tRNA-ribosyltransferase OS=Paenibacillus yonginensis; OX = 1462996 GN=tgt PE=3 SV=1
MAAAITYEHIKTCKQSGARLGRVHTPHGVIETPIFMPVGTLATVKTMSPEELKEMNAQIILSNTYHLFLRPGHEIVREAGGLHKFMNWDRAILTDSGGFQVFSLSDMRKITEEGVHFRSHLNGDKLFLSPEKAMEIQNALGSDIMMAFDECAPYPAEHKYVKDSLERTTRWAERCLESHARPQDQGLFGIVQGGMFEDLRKQSARDLTSLDFPGYAIGGLSVGEPKHLMYEVLDYTVPLLPSNKPRYLMGVGSPDALIEGAIRGVDMFDCVLPTRIARNGTTMTSQGRLVVRNAQYARDFGPLDPECDCYTCRNYSRAYLRHLIKSDETFGLRLTTYHNLHFLLNLMKQVRQAIMEDRLLDFRDEFFEKYGLFGNEKGF

SEQ ID NO: 58564 - protein, 373 aa, unidentified
  source 1..373: note = Paeniclostridium sordellii
  REGION 1..373: note = tr|A0A0A8WHJ6|A0A0A8WHJ6_PAESO Queuine tRNA-ribosyltransferase OS=Paeniclostridium sordellii; OX = 1505 GN=tgt PE=3 SV=1
MSAVRYELIKTCKQSGARLGRLHTPHGVIETPIFMPVGTQATVKSMTPEELKEIGSQIILSNTYHLYMRPGHDLVKEAGGLHKFMNWDKPILTDSGGFQVFSLGPLRKITEEGVHFRSHIDGSKHFISPEKAMEIQNALGSDIMMAFDECAPYPADREYVKNSLERTTRWLKRCKEAHKNTENQALFGIIQGGMYKDLREQSAKEILELDLPGYAVGGLSVGEPKELMYEVLDYTVPLMPENKPRYLMGVGSPDDLIEGVIRGIDMFDCVLPTRIARNGTAMTSEGKVVVRNAKYARDFGPLDPNCDCYCCKNYTRAYIRHLVKANEILAARLITTHNLHFLLNLMKQVREAIMEDRLLDFRKEFFQKYGYEL

SEQ ID NO: 58565 - protein, 373 aa, unidentified
  source 1..373: note = Paeniclostridium sordellii
  REGION 1..373: note = tr|A0A446IEU4|A0A446IEU4_PAESO Queuine tRNA-ribosyltransferase OS=Paeniclostridium sordellii 8483; OX = 1172204 GN=tgt PE=3 SV=1
MSAVRYELIKTCKQSGARLGRLHTPHGVIETPIFMPVGTQATVKSMTPEELKEIGSQIILSNTYHLYMRPGHDLVKEAGGLHKFMNWDKPILTDSGGFQVFSLGPLRKITEEGVHFRSHIDGSKHFISPEKAMEIQNALGSDIMMAFDECAPYPADREYVKNSLERTTRWLKRCKEAHKNTENQALFGIIQGGMYKDLREQSAKEILELDLPGYAVGGLSVGEPKELMYEVLDYTVPLMPENKPRYLMGVGSPDDLIEGAIRGIDMFDCVLPTRIARNGTAMTSEGKVVVRNAKYARDFGPLDPNCDCYCCKNYTRAYIRHLVKANEILAARLITTHNLHFLLNLMKQVREAIMEDRLLDFRKEFFQKYGYEL

SEQ ID NO: 58566 - protein, 433 aa, unidentified
  source 1..433: note = Paeniglutamicibacter gangotriensis
  REGION 1..433: note = tr|M7MQQ9|M7MQQ9_9MICC Queuine tRNA-ribosyltransferase OS=Paeniglutamicibacter gangotriensis Lz1y OX=1276920 GN=tgt PE=3 SV=1
MPNNSFDATASHPRQSDFSFEVGTRLNNPDGSVSNGRTGVISTPHGQIKTPAFIAVGTKATVKAVLPESVAQLGAQAVLANAYHLYLQPGSDILDAAGGLGKFMNWQGPTFTDSGGFQVMSLGSGFKKVIDMKSVDQSGPDDAVAPGKERLANVDDDGVWFKSHIDGSKHRFSPEISMRVQHEIGADIMFAFDELTTLQNSRGYQVESLERTRLWAQRCVAEHFDLTDSRVGKEYQALFGVIQGAQYEDLRRQACKDLGAMAFDGFGIGGALEKENLGTIVGWCSQELPENKPRHLLGISEPDDIFTSIENGADTFDCVSPTRVARNSAFYTPHGRFNLSGQRYKRDFTPLAEGCDCYTCQHYTRAYIHHMFKAKELISHTLISIHNERFVVKMVDDARLAIEDGTFYEMKERVMREYYAGVPDPQGLVTATV

SEQ ID NO: 58567 - protein, 433 aa, unidentified; identical to SEQ ID NO: 58566
  source 1..433: note = Paeniglutamicibacter gangotriensis
  REGION 1..433: note = tr|A0A5B0EHU7|A0A5B0EHU7_9MICC Queuine tRNA-ribosyltransferase OS=Paeniglutamicibacter gangotriensis OX=254787 GN=tgt PE=3 SV=1

SEQ ID NO: 58568 - protein, 375 aa, unidentified
  source 1..375: note = Paenimaribius caenipelagi
  REGION 1..375: note = tr|A0A547PY46|A0A547PY46_9RHOB Queuine tRNA-ribosyltransferase OS=Paenimaribius caenipelagi; OX = 2489174 GN=tgt PE=3 SV=1
MTRFSFDLHATDGTARTGKITTPRGEIRTPAFMPVGTAATVKAMLPESVRATGADILLGNTYHLMLRPGAERIARLGGLHKFMNWERPILTDSGGFQVMSLADLRKLTEEGVTFRSHVDGSKHHLTPERSMEIQRLLGSDIVMAFDECPALPATDDEVARAMRLSMRWAERSREAFGDRPGHALFGIMQGGVTRELRKESAEALKAIGFEGYAIGGLAVGEGQEAMFGVLDYAPGFLPEDKPRYLMGVGKPDDIVGAVKRGVDMMDCVLPSRSGRTGQAWTRRGQVNIKNARHADDPRPLDEHCTCPACTGYSRAYLHHVFRAGEMISGMLLTWHNLHYFQEIMEGMRQAISEGRFAAWEAEFHAQRADGDIERL

SEQ ID NO: 58569 - protein, 376 aa, unidentified
  source 1..376: note = Paenirhodobacter enshiensis
  REGION 1..376: note = tr|A0A086XZQ3|A0A086XZQ3_9RHOB Queuine tRNA-ribosyltransferase OS=Paenirhodobacter enshiensis; OX = 1105367 GN=tgt PE=3 SV=1
MTETFSFTLNATDGAARTGVIHTPRGDIRTPAFMPVGTAATVKAMMPESVAATGADILLGNTYHLMLRPTAERIANLGGLHRFMNWNKPILTDSGGFQVMSLSDLRKMSEEGVTFASHVDGSRHFLSPERSMEIQRLLGSDIVMAFDECPALPATDEAVARSMRMSMRWAQRSRDAFGDRPGHALFGIMQGGTNRELREESAEALRQIGFDGYAVGGLAVGEGQELMFSTLDYAPGFLPEDKPRYLMGVGKPDDIVGAVERGIDMMDCVLPSRSGRTGQAWTRRGQVNIKNARHMDDPRPLDEHCSCPACRNYSRAYLHHVFKAQEILSAMLLTWHNLHYYQELMQGLRDAIAAGRLNEFVAQFHALRAEGDIEPL

SEQ ID NO: 58570 - protein, 379 aa, unidentified
  source 1..379: note = Paenisporosarcina antarctica
  REGION 1..379: note = tr|A0A4P6ZWQ2|A0A4P6ZWQ2_9BACL Queuine tRNA-ribosyltransferase OS=Paenisporosarcina antarctica; OX = 417367 GN=tgt PE=3 SV=1
MTAIRYELIKTCKQTGARLGIVHTPHGSFETPTFMPVGTQATVKTMAPEDLKAMDSGIILSNTYHLWLRPGNDIIKEAGGLHKFMNWDRAILTDSGGFQVFSLSEFRKIEEEGVHFRNHMNGDKMFLSPEKAMEIQNDLGSDIMMAFDECPPFPATREYMKSSVDRTSRWAERCLNAHARPADQGLFGIIQGGEFEDLRRQSAADLVSLGFPGYAIGGLSVGEPKDVMNRVLEFTTPFMPADKPRYLMGVGSPDSLIDGSIRGVDMFDCVLPTRIARNGTLMTSNGRLVIKGAQNARDFGPIDENCDCYVCKNYSRAYIRHLIKAEETFGIRLTSYHNLYFLMNLMKQVRQAIREDRLGDFREEFFEQYGYNKPNAKNF

SEQ ID NO: 58571 - protein, 379 aa, Paenisporosarcina quisquiliarum
  REGION 1..379: note = tr|A0A1H7YWU0|A0A1H7YWU0_9BACL Queuine tRNA-ribosyltransferase OS=Paenisporosarcina quisquiliarum; OX = 365346 GN=tgt PE=3 SV=1
MTAITYELIKKDKQTGARLGIVHTPHGSFETPAFMPVGTQATVKTMAPEEIKEMNAGIILSNTYHLWLRPGNEIIREAGGLHKFMNWDRAILTDSGGFQVFSLSDMRKIEEEGVHFRNHLNGDKLFLSPEKSMEIQNDLGSDIMMAFDECPPYPASFEYMKASVERTSRWAERCLNAHTNTDKQGLFGIIQGGEYEELRRQSAQDLVSLDFPGYAIGGLSVGEPKDVMNRVLDFTTPMMPDNKPRYLMGVGSPDSLIDGSIRGVDMFDCVLPTRIARNGTFFTHQGRLVIKGAKYARDFGPIDEKCDCYTCKNYSRAYIRHLFRADETFGLRLASYHNLHFLMKLMENVRQAIREDRLLDFKEEFFEEYGYNKPNAKNF

SEQ ID NO: 58572 - protein, 379 aa, Paenisporosarcina sp.
  REGION 1..379: note = tr|A0A2T6KBT0|A0A2T6KBT0_9BACL Queuine tRNA-ribosyltransferase OS=Paenisporosarcina sp. OV554; OX = 2135694 GN=tgt PE=3 SV=1
MTAIRYELIKTCKQTGARLGIVHTPHGSFETPTFMPVGTQATVKTMSPEELKTMEAGIILSNTYHLWLRPGNDIIKEAGGLHKFMNWDRAILTDSGGFQVFSLSEFRKIEEEGVHFRNHMNGDKMFLSPEKAMQIQNDLGSDIMMAFDECPPFPATREYMQSSVDRTSRWAERCLKAHARPNDQGLFGIIQGGEFEDLRRQSAADITSLDFPGYAIGGLSVGEPKDVMNRVLEFTTPFMPADKPRYLMGVGSPDSLIDGAIRGVDMFDCVLPTRIARNGTLMTSNGRLVIKGAQNARDFGPIDENCDCYACKNYSRAYIRHLIKAEETFGLRLTSTHNLHFLMNLMKQVRQAIREDRLGDFRAEFFEQYGYNKPDAKNF

SEQ ID NO: 58573 - protein, 379 aa, Paenisporosarcina sp.
  REGION 1..379: note = tr|A0A385YSF0|A0A385YSF0_9BACL Queuine tRNA-ribosyltransferase OS=Paenisporosarcina sp. K2R23-3; OX = 2320858 GN=tgt PE=3 SV=1
MTAIRYELIKTDKQTGARLGIVHTPHGSFETPTFMPVGTQATVKTMAPEDLKVMEAGIILSNTYHLWLRPGHEIIREAGGLHKFMNWDRAILTDSGGFQVFSLSEFRQIEEEGVHFRNHLNGDKLFLSPEKAIEVQNALGSDIMMSFDECPAYPATYDYMKASVERTSRWAERGLKAHARPQDQGLFGIVQGGEFEDLRKMSAQDLVSLDFPGYSIGGLSVGEPKDVMNRVIEFTTPHLPANKPRYLMGVGSPDSLIDGAIRGIDMFDCVLPTRIARNGTLMTSQGRLVVKGAKYERDFGPIDPKCDCYTCKNYSRAYVRHLIRTEETFGLRLTTYHNLYFLMNLMKQVRQAIREDRLLDFKHEFFEEYGYNKPNAKNF

SEQ ID NO: 58574 - protein, 394 aa, unidentified
  source 1..394: note = Pajaroellobacter abortibovis
  REGION 1..394: note = tr|A0A1L6MW90|A0A1L6MW90_9DELT Queuine tRNA-ribosyltransferase OS=Pajaroellobacter abortibovis; OX = 1882918 GN=tgt PE=3 SV=1
MVAPFTDGFAFHVLATDGHARRSILITPHGPIHLPTFMPVGTQGSIKTLTPEEVFATGAQIILGNTYHLSLRPGPQLIQQLGGLHHFMQWPSAILTDSGGFQVFSLGEQRSSRLRNTCKSAQPLVKITEEGVTFRSHLDGSLHHLSPEEAVRIQGALGSDIQMPLDLCPSGNAPRPVVEQAVLQTTAWAKRAIATPRSPRQALFGIVQGGCFADLRQQHAEELAALDPGFDGLALGGFSVGETMEQMVETLAQIAPILDAERPRYLMGVGTPLDLLEAIEHGMDMFDCVLPTRNARNGQVFTHSGKLSIKQKRFKQDPSPLDPRCACPACRSGFSRAYLRHLYLSREILVLRLLSLHNLHFYAQLMAEARQAISLKRYLPFKQEWKNRLEHDAQ

SEQ ID NO: 58575 - protein, 375 aa, unidentified
  source 1..375: note = Palleronia abyssalis
  REGION 1..375: note = tr|A0A2R8BRX5|A0A2R8BRX5_9RHOB Queuine tRNA-ribosyltransferase OS=Palleronia abyssalis OX=1501240; GN = tgt PE=3 SV=1
MDRFSFSLTACDGAARTGVINTPRGQIRTPAFMPVGTAATVKAMLPESVRETGADILLGNTYHLMLRPGAERIARLGGLHRFMNWDRPILTDSGGFQVMSLADLRKLTETGVTFRSHIDGSKHELTPERSMEIQRLLGSDIVMAFDECPALPADRDRIAHSMRLSMRWADRSRVAFGDRPGHALFGIMQGGLERDLREESAEALTAIGFEGYAVGGLAVGEGQEAMFGCLDYAPGFLPADKPRYLMGVGKPDDIVGAVKRGIDMMDCVLPSRSGRTGQAWTRRGQVNLKNARHADDPRPLDEACGCPACRSYSRAYLHHVFRANEMISGMLLTWHNLHYFQQIMSGMRSAIAEGRFDTWEAAFHADRAAGDIEPV

SEQ ID NO: 58576 - protein, 375 aa, Palleronia marisminoris
  REGION 1..375: note = tr|A0A1Y5RCV3|A0A1Y5RCV3_9RHOB Queuine tRNA-ribosyltransferase OS=Palleronia marisminoris; OX = 315423 GN=tgt PE=3 SV=1
MTEFHFTLHATDGAARTGRIDTPRGEIRTPAFMPVGTAATVKAMLPESVRETGADILLGNTYHLMLRPGAERVARLGGLHRFMNWDRPILTDSGGFQVMSLAELRKLDEDGVTFRSHIDGSKHRLSPETSMEIQRLLGSDIVMAFDECPALPADRERIASSMRLSMRWAARSRAAFGDRPGHALFGIQQGGLERDLRAESAEALREIGFEGYAIGGLAVGEGQEAMFGCLDYAPGMLPEDKPRYLMGVGKPDDIVGAVKRGVDMMDCVLPSRSGRTGQAWTRRGQVNIKNARHADDPRPLDEHCTCPACRSYSRAYLHHVFRAGEMISGMLLTWHNLHYFQEIMAGMRAAISEGRFAAWEADFHATRAEGDIEPL

SEQ ID NO: 58577 - protein, 376 aa, unidentified
  source 1..376: note = Paludibacter jiangxiensis
  REGION 1..376: note = tr|A0A171AJ50|A0A171AJ50_9BACT Queuine tRNA-ribosyltransferase OS=Paludibacter jiangxiensis; OX = 681398 GN=tgt PE=3 SV=1
MQFELQHTDPKSNARAGVITTDHGTIETPIFMPVGTAGSVKAVHQRELKEDIKAQIILGNTYHLYLRPGLNIIEKAGGLHKFNGWDRPILTDSGGYQVFSLSDNRKLKEDGAHFRSHIDGSKHLFTPENVVDIQRIIGADIIMAFDECTPGTADYDYAKQSMELTHRWLVRGLAHFDETEPKYGYSQAYFPIVQGCVYPELRKQSAEFIAAQNREGNAIGGLAVGEPTDKMYEMIEVVNEILPKDRPRYLMGVGTPANILEGIERGVDMFDCVMPTRNGRNGMLFTSQGIMNMKNKKWKDDFSPIDPAGTSYVDSFYSKAYLRHLFHSQEFLAMQIASIHNLAFYLWLAGEARKHIIAGDFSSWKPQMVRQVSQRL

SEQ ID NO: 58578 - protein, 376 aa, Paludibacter propionicigenes
  REGION 1..376: note = tr|E4T401|E4T401_PALPW Queuine tRNA-ribosyltransferase OS=Paludibacter propionicigenes (strain DSM 17365 / JCM 13257 / WB4) OX=694427 GN=tgt PE=3; SV = 1
MTFEIQHTDPNSNARAGKITTDHGVIETPIFMPVGTVASVKAVHFHELKEDIKAQIILGNTYHLYLRPGIDTLERAGGLHKFNGWDKPILTDSGGYQVFSLSGNRKLKEEGATFRSHIDGSKHLFTPENVVDIQRIIGADIIMAFDECTPGTADFAYAKKSMELTHRWLERGLNRFDQTEPKYGYSQTYFPIVQGCVYPELRRQSAEFIASQHREGYAIGGLAVGEPTEIMYEMIEVVNEILPKDKPRYLMGVGTPQNILEAIERGVDMFDCVMPTRNGRNGMLFTSQGIMNMKNEKWKNDFSPLDEFGTSYVDKAYSKAYLRHLFISKEYLALQIASIHNLAFYLWLVGEARSHIQAGDFSSWKRGMVEQLGRRL

SEQ ID NO: 58579 - protein, 376 aa, Paludibacter sp.
  REGION 1..376: note = tr|A0A1M3MCM1|A0A1M3MCM1_9BACT Queuine tRNA-ribosyltransferase OS=Paludibacter sp. 47-17; OX = 1895899 GN=tgt PE=3 SV=1
MKFELQHTDTGSWARAGLITTDHGTIETPIFMPVGTVASVKAVHFHELKDDIGAQIILGNTYHLYLRPGLEILEQAGGLHKFNGWDRPILTDSGGYQVFSLSANRKLKEEGAHFRSHIDGSKHLFTPENVVDIQRIIGADIMMAFDECTPGDAPYAYAKTSMELTHRWLERGLKRFDSTENKYGYSQTFFPIVQGCVYPDLRRQSAEFVASRNREGNAIGGLAVGEPAAKMYEMIEVVNEILPQDKPRYLMGVGTPENILEGIERGVDMFDCVMPTRNGRNGMLFTSEGILNMRNEKWKNDFSPLDPYGTSYVDRVYTRAYLRHLFISKELLAMQIASIHNLAFYLWLVKEARRHIIAGDFVSWKKEMLVRVTRRL

SEQ ID NO: 58580 - protein, 371 aa, unidentified
  source 1..371: note = Paludibacterium purpuratum
  REGION 1..371: note = tr|A0A4R7B5Y3|A0A4R7B5Y3_9NEIS Queuine tRNA-ribosyltransferase OS=Paludibacterium purpuratum; OX = 1144873 GN=tgt PE=3 SV=1
MLKFTVHKTSGGARRGTLELNHGTVETPVFQPVGTYGSVKAMSPLELNEIGAQIILGNTFHLWLRPGLEVIEQFGGLHSFIGWDKPILTDSGGFQVFSLGDLRKLTEDGCTFQSPVNGDRCFLSPEVSMKIQRVLNSDIVMIFDECTPFPADYDTAAASMRMSLRWAERSRRAFDDLKNPNALFGIVQGSMYNDLREESLTELMNIGFDGIAIGGLSVGEPKEEMERMLRVMQPMLPPDKPHYLMGVGTPEDLVYGVAHGVDMFDCVMPTRNARNGWLFTQWGDIKIKNASHKQDTRPLDETCECYTCRNFSRAYLHHLHRVGEILGARLNTIHNLHYYQQLMREIRASIEADRFEDFRAEFAAKRARGTK

SEQ ID NO: 58581 - protein, 379 aa, unidentified
  source 1..379: note = Paludifilum halophilum
  REGION 1..379: note = tr|A0A235BCX5|A0A235BCX5_9BACL Queuine tRNA-ribosyltransferase OS=Paludifilum halophilum; OX = 1642702 GN=tgt PE=3 SV=1
MAVRYELIKTCRQSGARLGRLHTPHGTIETPVFMPVGTLATVKTMSPEELREMGSGILLSNTYHLFLRPGHEIVREAGGLHRFMNWDGAVLTDSGGFQVFSLSNLRQITEEGVSFRSHLSGKPLFISPEKSVEIQNALGADIIMAFDECPPYPADRNYVRQSMDRTYRWLQRCVAAHQRPETQALFGIVQGGMDKDLRQESVRQVTELDLPGYAVGGLSVGEPKDLMYQVLEDAAPLLPTDKPRYLMGVGSPDALVEGVMRGIDMFDCVLPTRIARNGTTMTSRGRLVVRNARYARDFSPLDPDCDCYTCRHYTRAYLRHLIKADETFGLRLTTYHNLYFLFQLMEQVREAIRRDRLSDFRDSFFESYYGPGEERRRGF

SEQ ID NO: 58582 - protein, 387 aa, unidentified
  source 1..387: note = Paludisphaera borealis
  REGION 1..387: note = tr|A0A1U7CRM2|A0A1U7CRM2_9BACT Queuine tRNA-ribosyltransferase OS=Paludisphaera borealis; OX = 1387353 GN=tgt PE=3 SV=1
MPDTETAPERIPHGPTTDRPVRFSTLARDAGSAARAGRLETPHGAVETPAFMPVGTQGTVKGLTPDQLWAGGSRMILANTYHLALRPGEETVAALGGLHRFTGWDGPILTDSGGFQVFSLAQRAKITDHGASFRSHLDGRLLELTPERAVAIQEALGADVAMCLDHCPALPAGKDAIARAVDRTIAWAGRCKAAHARADQALFGIVQGGAHEDLRARCAEALVALDFDGYAVGGVSVGESREEVRRALAVSTHRLPEDRPRYLMGVGRPQDLLDAVATGIDLFDCVMPTRNGRNATCFTDQGLVKLRNAAHTRDASPLEAGCDCLTCAKFSRGYLRHLFMAKEMLGPILASIHNLAYLHRLTSRMREAIRAGRFVQLRMEVLEALGP

SEQ ID NO: 58583 - protein, 386 aa, Panacagrimonas perspica
  REGION 1..386: note = tr|A0A4S3K0C4|A0A4S3K0C4_9GAMM Queuine tRNA-ribosyltransferase OS=Panacagrimonas perspica; OX = 381431 GN=tgt PE=3 SV=1
MQFQLLSTDGPARRGRLVFARGAVETPAFMPVGTYGTVKGLSPAEVRATGAQILLGNTFHLMLRPGADAMRALGGLHKFMDWDGPILTDSGGFQVWSLSGLRKITEEGVKFASPINGDRVMLTPERAIEIQHALGSDIVMQFDECTPHPATEKQVRKSMEMSARWGARCRTAHDALSDAAPRSGAPAGDRAALFGIVQGGMLEDLRTESLQRLTEIGFDGYALGGLSVGETEAERLHVLDAIGTKLPADKPHYLMGVGTPRDLVQAVGRGIDMFDCVMPTRNARNGHLFTSQGVVKLRNAQHREDPGPLDPNCDCHTCTRYSRAYLHHLDRCNEMLGPRLNTIHNLHYYQGVMRRIREAVEQNRYAAFAADFLAGPEGSVRKASTA

SEQ ID NO: 58584 - protein, 379 aa, unidentified
  source 1..379: note = Panacibacter ginsenosidivorans
  REGION 1..379: note = tr|A0A5B8V7F0|A0A5B8V7F0_9BACT Queuine tRNA-ribosyltransferase OS=Panacibacter ginsenosidivorans; OX = 1813871 GN=tgt PE=3 SV=1
MAALTFQLEHTDNNSKARAGTITTDHGVIETPIFMPVGTIGSVKAVTQQQLKDEIKAQIILGNTYHLYLRPTTAIIEAAGGLHKFNGWPKPILTDSGGYQVFSLAENRKLTEEGALFQSHIDGSRHLFTAENVMDIQRSIGADIIMAFDECPPYPSEYAYAKKSMELTHRWLTRCFTRFNETEDKYGYSQNLFPIVQGSTFEDLRKESCAFVSSKEATGNAIGGLSVGEPEAMMYDLTALCAENLPYNKPRYLMGVGTPWNILECISLGIDMFDCVMPTRNGRNGMLFTTKGVINIRNKKWATDFSVIDDGIDCETSNYYSKAYLRHLFVADEILGLQIASIHNLAFYLWLVGEARKHIIAGDFKSWKTSTREIIKQRL

SEQ ID NO: 58585 - protein, 379 aa, unidentified
  source 1..379: note = Panacibacter sp.
  REGION 1..379: note = tr|A0A4U3KTP0|A0A4U3KTP0_9BACT Queuine tRNA-ribosyltransferase OS=Panacibacter sp. 17mud1-8; OX = 2575867 GN=tgt PE=3 SV=1
MAFLQFQLEATDAFSKARAGTITTDHGVIQTPIFMPVGTVGSVKAVTQQQLKNEVKAQIILGNTYHLYLRPGTEILEAAGGIHQFNGWDKPVLTDSGGYQVFSLAANRKLTEEGALFQSHIDGSRHLFTPEKVMDIQRSIGADIIMAFDECPPYPSEYSYAKKSMELTHRWLDRCFARLKETPDLYGYTQNLFPIVQGGTYKDLRTVSCEYVAAKEATGNAIGGLSVGEPEDMMYEFTALCTENLPYNKPRYLMGVGTPWNILECISLGVDMFDCVMPTRNGRNGMLFTTNGVINITNKKWATDFSCIDENLPCETSRFYSKAYLRHLFVAKEILGLQIASIHNLSFYLWLVGEARHHITAGDFMSWKKEMIPVLKQRL

SEQ ID NO: 58586 - protein, 376 aa, Pandoraea apista
  REGION 1..376: note = tr|A0A0B5F3Y2|A0A0B5F3Y2_9BURK Queuine tRNA-ribosyltransferase OS=Pandoraea apista OX=93218; GN = tgt PE=3 SV=1
MLKFELITTDGQARRGRVTLNHGVVETPIFMPVGTYGSVKAMSPAELVENNAQIILGNTFHLWLRPGLETIAAHGGLHRFMGWDRPILTDSGGFQVFSLGELRKISEDGVKFASPVNGDRLFLSPEISMQIQRVLNSDIVMQFDECTPYEIDGRPATEVEAGQSMRMSLRWAKRSIDEFNRLENPNALFGIVQGGMYEHLRDESLAGLSELDFHGYAIGGLSVGEPKEDMMRVLEHVAPRLPANKPHYLMGVGTPEDLVAGVAAGVDMFDCVMPTRNARNGWLFTRFGDLKIRNASHKSDTRPLDETCGCYTCRNFSRAYLHHLQRAGEILGARLNTIHNLHYYLTLMQEIRDAIEAHRFDAFVTQFRADRARGVQ

SEQ ID NO: 58587 - protein, 376 aa, Pandoraea faecigallinarum
  REGION 1..376: note = tr|A0A0H3WU53|A0A0H3WU53_9BURK Queuine tRNA-ribosyltransferase OS=Pandoraea faecigallinarum; OX = 656179 GN=tgt PE=3 SV=1
MLKFELITTDGQARRGRVTLNHGVVETPIFMPVGTYGSVKAMSPAELVENNAQIILGNTFHLWLRPGLETIAAHGGLHRFMGWDRPILTDSGGFQVFSLGDLRKISEDGVKFASPVNGDRLFLSPEISMQIQRVLNSDIVMQFDECTPYEIDGRPATEVEAGQSMRMSLRWARRSIDEFNRLENPNALFGIVQGGMYEHLRDESLAGLSELDFHGYAIGGLSVGEPKEDMMRVLEHVAPRLPANKPHYLMGVGTPEDLVAGVAAGVDMFDCVMPTRNARNGWLFTRFGDLKVRNASHKADTRPVDETCGCYTCRNFSRAYLHHLQRAGEILGARLNTIHNLHYYLTLMQEIRDAIEAHRFDAFVAGFKADRARGVH

SEQ ID NO: 58588 - protein, 376 aa, unidentified
  source 1..376: note = Pandoraea fibrosis
  REGION 1..376: note = tr|A0A0B3SYR0|A0A0B3SYR0_9BURK Queuine tRNA-ribosyltransferase OS=Pandoraea fibrosis OX=1891094; GN = tgt PE=3 SV=1
MLKFELITTDGQARRGRVTLNHGVVETPIFMPVGTYGSVKAMSPAELVENNAQIILGNTFHLWLRPGLETIAAHGGLHRFMGWDRPILTDSGGFQVFSLGELRKISEEGVKFASPVNGDRLFLSPEISMQIQHVLNSDIVMQFDECTPYEIDGRPATEVEAGQSMRMSLRWAKRSIDEFNRLENPNALFGIVQGGMYEHLRDESLAGLSELDFHGYAIGGLSVGEPKEDMMRVLEHVAPRLPANKPHYLMGVGTPEDLVAGVAAGVDMFDCVMPTRNARNGWLFTRFGDLKIRNASHKTDTRPLDETCGCYTCRNFSRAYLHHLQRAGEILGARLNTIHNLHYYLTLMQEIRDAIEAHRFDAFVAQFRADRARGVQ

SEQ ID NO: 58589 - protein, 376 aa, Pandoraea norimbergensis
  REGION 1..376: note = tr|A0A0U2WAI8|A0A0U2WAI8_9BURK Queuine tRNA-ribosyltransferase OS=Pandoraea norimbergensis; OX = 93219 GN=tgt PE=3 SV=1
MLKFELITTDGQARRGRVTLNHGVVETPIFMPVGTYGSVKAMSPVELVENNAQIILGNTFHLWLRPGLETIAAHGGLHKFMGWDKPILTDSGGFQVFSLGELRKISEEGVKFASPVNGDRLFLSPEISMQIQRVLNSDIVMQFDECTPYEIDGRPATETEAGQSMRMSMRWAKRSIDEFNKLENPNALFGIVQGGMYENLRDESLAGLSELPFHGYAIGGLSVGEPKEDMMRVLNHVAPRLPADKPHYLMGVGTPEDLVAGVAAGVDMFDCVMPTRNARNGWLFTRFGDLKIRNASHKTDTRPLDETCGCYACRNFSRAYLHHLQRAGEILGARLNTIHNLHYYLTLMQEIRDAIEAHRFDAFVAQFRADRARGVQ

SEQ ID NO: 58590 - protein, 376 aa, Pandoraea oxalativorans
  REGION 1..376: note = tr|A0A0E3YC94|A0A0E3YC94_9BURK Queuine tRNA-ribosyltransferase OS=Pandoraea oxalativorans; OX = 573737 GN=tgt PE=3 SV=1
MLKFELITTDGQARRGRVTLNHGVVETPIFMPVGTYGSVKAMSPAELVENNAQIILGNTFHLWLRPGLETIAAHGGLHRFMGWDRPILTDSGGFQVFSLGELRKISEEGVKFASPVNGDRLFLSPEISMQIQRVLNSDIVMQFDECTPYEIDARPATEVEAGQSMRMSLRWAKRSIDEFNRLENPNALFGIVQGGMYEHLRDESLAGLSELDFHGYAIGGLSVGEPKEDMMRVLEHVAPRLPANKPHYLMGVGTPEDLVAGVAAGVDMFDCVMPTRNARNGWLFTRFGDLKIRNASHKTDTRPLDETCGCYTCRNFSRAYLHHLQRAGEILGARLNTIHNLHYYLTLMQEIRDAIEAHRFDAFVAQFRADRARGVQ

SEQ ID NO: 58591 - protein, 376 aa, Pandoraea pnomenusa
  REGION 1..376: note = tr|A0A5E4ZGF2|A0A5E4ZGF2_9BURK Queuine tRNA-ribosyltransferase OS=Pandoraea pnomenusa OX=93220; GN = tgt PE=3 SV=1
MLKFELITTDGQARRGRVTLNHGVVETPIFMPVGTYGSVKAMSPAELVENNAQIILGNTFHLWLRPGLETIAAHGGLHRFMGWDRPILTDSGGFQVFSLGELRKISEEGVKFASPVNGDRLFLSPEISMQIQRVLNSDIVMQFDECTPYEIDGRPATESEAGQSMRMSLRWAKRSIDEFNRLENPNALFGIVQGGMYEHLRDESLAGLSELDFHGYAIGGLSVGEPKEDMMRVLEHVAPRLPANKPHYLMGVGTPEDLVAGVSAGVDMFDCVMPTRNARNGWLFTRFGDLKIRNASHKSDTRPLDETCGCYTCRNFSRAYLHHLQRAGEILGARLNTIHNLHYYLTLMQEMRDAIEAHRFDAFVTQFRADRARGVQ

SEQ ID NO: 58592 - protein, 376 aa, Pandoraea pnomenusa
  REGION 1..376: note = tr|A0A378YU79|A0A378YU79_9BURK Queuine tRNA-ribosyltransferase OS=Pandoraea pnomenusa OX=93220; GN = tgt PE=3 SV=1
MLKFELITTDGQARRGRVTLNHGVVETPIFMPVGTYGSVKAMSPAELVENNAQIILGNTFHLWLRPGLETIAAHGGLHRFMGWDRPILTDSGGFQVFSLGELRKISEEGVKFASPVNGDRLFLSPEISMQIQHVLNSDIVMQFDECTPYEIDGRPATESEAGQSMRMSLRWAKRSIDEFNRLENPNALFGIVQGGMYEHLRDESLAGLSELDFHGYAIGGLSVGEPKEDMMRVLEHVAPRLPANKPHYLMGVGTPEDLVAGVSAGVDMFDCVMPTRNARNGWLFTRFGDLKIRNASHKSDTRPLDETCGCYTCRNFSRAYLHHLQRAGEILGARLNTIHNLHYYLTLMQEMRDAIEAHRFDAFVTQFRADRARGVQ

SEQ ID NO: 58593 - protein, 376 aa, Pandoraea pulmonicola
  REGION 1..376: note = tr|A0A378Z2K1|A0A378Z2K1_9BURK Queuine tRNA-ribosyltransferase OS=Pandoraea pulmonicola OX=93221; GN = tgt PE=3 SV=1
MLKFELITTDGQARRGRVTLNHGVVETPIFMPVGTYGSVKAMSPAELVENNAQIILGNTFHLWLRPGLETIAAHGGLHRFMGWDRPILTDSGGFQVFSLGDLRKISEEGVKFASPVNGDRLFLSPEISMQIQRVLNSDIVMQFDECTPYEIDGRPATEVEAGQSMRMSLRWAKRSIDEFNRLENPNALFGIVQGGMYEHLRDESLAGLSELDFHGYAIGGLSVGEPKEDMMRVLEHVAPRLPANKPHYLMGVGTPEDLVAGVAAGVDMFDCVMPTRNARNGWLFTRFGDLKIRNASHKSDTRPLDETCGCYTCRNFSRAYLHHLQRAGEILGARLNTIHNLHYYLTLMQEIRDAIEAHRFDAFVAQFRAERARGVQ

SEQ ID NO: 58594 - protein, 376 aa, Pandoraea sp.
  REGION 1..376: note = tr|R7X2J6|R7X2J6_9BURK Queuine tRNA-ribosyltransferase OS=Pandoraea sp. SD6-2 OX=1286093; GN = tgt PE=3 SV=1
MLKFELITTDGQARRGRVTLNHGVVETPIFMPVGTYGSVKAMSPAELVENNAQIILGNTFHLWLRPGLETIAAHGGLHRFMGWDRPILTDSGGFQVFSLGELRKISEEGVKFASPVNGDRLFLSPEISMQIQRVLNSDIVMQFDECTPYEIDGRPATEAEAGQSMRMSLRWAKRSIDEFNRLENPNALFGIVQGGMYEHLRDESLAGLSELDFHGYAIGGLSVGEPKEDMMRVLEHVAPRLPANKPHYLMGVGTPEDLVAGVAAGVDMFDCVMPTRNARNGWLFTRFGDLKIRNASHKSDTRPLDETCGCYTCRNFSRAYLHHLQRAGEILGARLNTIHNLHYYLTLMQEIRDAIEAHAFDAFVARFRADRARGVQ

SEQ ID NO: 58595 - protein, 376 aa, Pandoraea sp.
  REGION 1..376: note = tr|A0A522EQ95|A0A522EQ95_9BURK Queuine tRNA-ribosyltransferase OS=Pandoraea sp. OX=1883445 GN=tgt; PE = 3 SV=1
MLNFELLCTDGQARRGRLTLNHGVIETPIFMPVGTYGSVKAMSPLELDENGAQIILGNTFHLWLRPGLDTIGAHGGLHRFMGWDKPILTDSGGFQVFSLGELRKISEEGVKFASPINGDRLFLSPEISMQIQHVLNSDIAMQFDECTPYEIDGRPATEAEAGASMRMSLRWARRSRDEFDRLANPNALFGIVQGGMYEHLRDESLAGLTELDFHGYAIGGLSVGEPKEDMMRVLAHVAPRLPANKPHYLMGVGTPEDLVAGVAAGVDMFDCVMPTRNARNGWLFTRLGDLKIRNAAHKSDTRPLDASCACYTCRNFSRAYLHHLQRAGEILGARLNTIHNLHYYLQLMRDMRTAIETRQFDNFVRQFHHERAQGVD

SEQ ID NO: 58596 - protein, 376 aa, Pandoraea sputorum
  REGION 1..376: note = tr|A0A239SAF6|A0A239SAF6_9BURK Queuine tRNA-ribosyltransferase OS=Pandoraea sputorum OX=93222; GN = tgt PE=3 SV=1
MLKFELITTDGQARRGRVTLNHGVVETPIFMPVGTYGSVKAMSPVELVENNAQIILGNTFHLWLRPGLETIAAHGGLHRFMGWDRPILTDSGGFQVFSLGDLRKISEEGVKFASPVNGDRLFLSPEISMQIQHVLNSDIVMQFDECTPYEIDGRPATEVEAGQSMRMSLRWAKRSIDEFNRLENPNALFGIVQGGMYEHLRDESLAGLSELDFHGYAIGGLSVGEPKEDMMRVLEHVAPRLPANKPHYLMGVGTPEDLVAGVAAGVDMFDCVMPTRNARNGWLFTRFGDLKIRNASHKTDTRPLDETCGCYACRNFSRAYLHHLQRAGEILGARLNTIHNLHYYLTLMQEIRDAIEAHQFDAFVAKFKADRARGVQ

SEQ ID NO: 58597 - protein, 376 aa, Pandoraea sputorum
  REGION 1..376: note = tr|A0A5E5BAE2|A0A5E5BAE2_9BURK Queuine tRNA-ribosyltransferase OS=Pandoraea sputorum OX=93222; GN = tgt PE=3 SV=1
MLKFELITTDGQARRGRVTLNHGVVETPIFMPVGTYGSVKAMSPVELVENNTQIILGNTFHLWLRPGLETIAAHGGLHRFMGWDRPILTDSGGFQVFSLGDLRKISEEGVKFASPVNGDRLFLSPEISMQIQHVLNSDIVMQFDECTPYEIDGRPATEVEAGQSMRMSLRWAKRSIDEFNRLENPNALFGIVQGGMYEHLRDESLAGLSELDFHGYAIGGLSVGEPKEDMMRVLEHVAPRLPANKPHYLMGVGTPEDLVAGVAAGVDMFDCVMPTRNARNGWLFTRFGDLKIRNASHKTDTRPLDETCGCYACRNFSRAYLHHLQRAGEILGARLNTIHNLHYYLTLMQEIRDAIEAHQFDAFVAKFKADRARGVQ

SEQ ID NO: 58598 - protein, 376 aa, unidentified
  source 1..376: note = Pandoraea terrae
  REGION 1..376: note = tr|A0A5E4ZCL8|A0A5E4ZCL8_9BURK Queuine tRNA-ribosyltransferase OS=Pandoraea terrae OX=1537710; GN = tgt PE=3 SV=1
MLKFELITTDGQARRGRVTLNHGVVETPIFMPVGTYGSVKAMSPAELVENNAQIILGNTFHLWLRPGLETIAAHGGLHRFMGWDRPILTDSGGFQVFSLGDLRKISEEGVKFASPVNGDRLFLSPEISMQIQHVLNSDIVMQFDECTPYEIDGRPATEDEAGKSMRMSMRWAQRSIDEFNRLQNPNALFGIVQGGMYEHLRDESLAGLSELDFHGYAIGGLSVGEPKEDMMRVLQHVAPRLPANKPHYLMGVGTPEDLVAGVAAGVDMFDCVMPTRNARNGWLFTRFGDVKIRNASHKTDTRPLDETCGCYTCRNFSRAYLHHLQRAGEILGARLNTIHNLHYYLTLMHEIRTAIEAHGFEAFVARFRADRARGVQ

SEQ ID NO: 58599 - protein, 376 aa, Pandoraea thiooxydans
  REGION 1..376: note = tr|A0A0G3EUS1|A0A0G3EUS1_9BURK Queuine tRNA-ribosyltransferase OS=Pandoraea thiooxydans OX=445709; GN = tgt PE=3 SV=1
MLNFELLCTDGQARRGRLTLNHGVVETPIFMPVGTYGSVKAMSPLELDENGAQIILGNTFHLWLRPGLDTIGAHGGLHRFMGWDKPILTDSGGFQVFSLGELRKISEEGVKFASPINGDRLFLSPEISMQIQHVLNSDIAMQFDECTPYEIDGRPATEAEAGASMRMSLRWARRSREEFNRLANPNALFGIVQGGMYEHLRDESLAGLAELDFHGYAIGGLSVGEPKEDMMRVLAHVAPRLPADKPHYLMGVGTPEDLVAGVAAGVDMFDCVMPTRNARNGWLFTRFGDLKIRNAAHKSDTRPLDQTCGCYTCRHFSRAYLHHLQRAGEILGARLNTIHNLHYYLQLMQQMRSAIETGQFDAFVRQFHHERSQGID

SEQ ID NO: 58600 - protein, 376 aa, Pandoraea vervacti
  REGION 1..376: note = tr|A0A0C5JXR0|A0A0C5JXR0_9BURK Queuine tRNA-ribosyltransferase OS=Pandoraea vervacti OX=656178; GN = tgt PE=3 SV=1
MLKFELITTDGQARRGRVTLNHGVVETPIFMPVGTYGSVKAMSPAELVENNAQIILGNTFHLWLRPGLETIAAHGGLHRFMGWDRPILTDSGGFQVFSLGDLRKISEEGVKFASPVNGDRLFLSPEISMQIQRVLNSDIVMQFDECTPYEIDGRPATEVEAGQSMRMSLRWAKRSIDEFNRLENPNALFGIVQGGMYEHLRDESLAGLSELDFHGYAIGGLSVGEPKEDMMRVLEHVAPRLPANKPHYLMGVGTPEDLVAGVAAGVDMFDCVMPTRNARNGWLFTRFGDLKIRNASHKSDTRPLDETCGCYTCRNFSRAYLHHLQRAGEILGARLNTIHNLHYYLTLMQEIRDAIEAHQFDAFVARFKADRARGVQ

SEQ ID NO: 58601 - protein, 383 aa, unidentified
  source 1..383: note = Pannonibacter indicus
  REGION 1..383: note = tr|A0A0K6HYB6|A0A0K6HYB6_9RHOB Queuine tRNA-ribosyltransferase OS=Pannonibacter indicus OX=466044; GN = tgt PE=3 SV=1
MTGDTQRFSFRLLATDGMARRGEITTPHGLVRTPAFMPVGTQATVKAMYTDQVRALGADVVLGNTYHLMLRPGAERVARLGGLHHFMKWPHTILTDSGGFQVMSLAQLRKLDETGVKFQSHIDGQRYHLTPERSVEIQGLLGSDIQMQLDECIGLPAPEKEVQRAMELSLRWAERSRAKFEAMGGVEKGQGLYGIVQGGDVPHLRIRSAESLAAMPFEGYSVGGLAVGEPQEVMLRMLEVTTPVMPVDKPRYLMGVGTPDDILESVARGIDQFDCVMPTRAGRHGLAFTRRGKINLKNARHADDPRPLDEESDCPAARDYSRAYLHHLVKAGEGLAAMLLTWNNLAYYQQLMQGMRDAIEAGRFEEHRLSVKEGWARGDLPPL

SEQ ID NO: 58602 - protein, 383 aa, Pannonibacter phragmitetus
  REGION 1..383: note = tr|A0A0U3NBS9|A0A0U3NBS9_9RHOB Queuine tRNA-ribosyltransferase OS=Pannonibacter phragmitetus; OX = 121719 GN=tgt PE=3 SV=1
MTGDTQRFSFRLLATDGMARRGEITTPHGLVRTPAFMPVGTQATVKAMYTDQVRALGADVVLGNTYHLMLRPGAERVARLGGLHHFMKWPHTILTDSGGFQVMSLAQLRKLDETGVKFQSHIDGQRYHLTPERSVEIQGLLGSDIQMQLDECIGLPAPEKEVQRAMELSLRWAERSRAKFEAMGGVEKGQGLYGIVQGGDVPHLRIRSAESLAAMPFEGYSVGGLAVGEPQEVMLRMLEVTTPVMPVDKPRYLMGVGTPDDILESVARGIDQFDCVMPTRAGRHGLAFTRRGKINLKNARHADDPRPLDEESDCPAARDYSRAYLHHLVKAGEGLAAMLLTWNNLAYYQQLMQGMRDAIEAGRFEDHRLIVKEGWARSDLPPL

SEQ ID NO: 58603 - protein, 383 aa, Pannonibacter phragmitetus
  REGION 1..383: note = tr|A0A378ZVZ3|A0A378ZVZ3_9RHOB Queuine tRNA-ribosyltransferase OS=Pannonibacter phragmitetus; OX = 121719 GN=tgt PE=3 SV=1
MTGDTQRFSFRLLANDGMARRGEITTPHGLVRTPAFMPVGTQATVKAMYTDQVRELGADVVLGNTYHLMLRPGAERVARLGGLHHFMKWPHTILTDSGGFQVMSLAQLRKLDETGVKFQSHIDGQRYHLTPERSVEIQGLLGSDIQMQLDECIGLPAPEKEVQRAMELSLRWAERSRAKFEAMGGVEKGQGLYGIVQGGDVPHLRIRSAESLAAMPFEGYSVGGLAVGEPQEVMLRMLEVTTPVMPVDKPRYLMGVGTPDDILESVARGIDQFDCVMPTRAGRHGLAFTRRGKINLKNARHADDPRPLDEESDCPAAREYSRAYLHHLVKAGEGLAAMLLTWNNLAYYQQLMQGMRDAIEAGRFEDHRLSVKEGWARGDLPPL

SEQ ID NO: 58604 - protein, 374 aa, unidentified
  source 1..374: note = Pantoea alhagi
  REGION 1..374: note = tr|A0A1W6B1D8|A0A1W6B1D8_9GAMM Queuine tRNA-ribosyltransferase OS=Pantoea alhagi OX=1891675; GN = tgt PE=3 SV=1
MKFELDKKDGRARRGRLVFDRGVVETPAFMPVGTYGTVKGMTPEEVKETGAQILLGNTFHLWLRPGQEIMKLHGDLHDFMQWQGPILTDSGGFQVFSLGDIRKITEAGVHFRNPINGDAIFLDPEKSMEIQYDLGSDIVMIFDECTPYPADWDYAKRSMEMSLRWAQRSRDHFDKLGNKNALFGIIQGSVYEDLRDVSVKGLVEIGFDGYAVGGLAVGEPKEDMHRILEHVCPQIPEDKPRYLMGVGKPEDLVEGVRRGVDMFDCVMPTRNARNGHLFVTDGVVKIRNAKHKDDTSPLDAECDCYTCRNYSRAYLHHLDRCNEILGARLNTIHNLRYYQRLMAGLRQAIEEGKLECFVSEFYTRTGKAVPPLNA

SEQ ID NO: 58605 - protein, 382 aa, Pantoea allii
  REGION 1..382: note = tr|A0A2V2BGR3|A0A2V2BGR3_9GAMM Queuine tRNA-ribosyltransferase OS=Pantoea allii OX=574096 GN=tgt; PE = 3 SV=1
MKFELDTTDGRARRGRLIFDRGVVETPAFMPVGTYGTVKGMTPEEVQETGAQIILGNTFHLWLRPGQEIMKLHGDLHDFMQWKGPILTDSGGFQVFSLGDIRKITEAGVHFRNPINGDAIFLDPEKSMEIQYDLGSDIVMIFDECTPYPADWDYAKRSMEMSLRWAQRSRDRFDSLGNKNALFGIIQGSVYEDLRDVSVKGLVEIGFDGYAVGGLAVGEPKEDMHRILEHVCPQIPEDKPRYLMGVGKPEDLVEGVRRGVDMFDCVMPTRNARNGHLFVTDGVVKIRNAKHKDDVSPLDAECDCYTCRNYSRAYLHHLDRCNEILGARLNTIHNLRYYQRLMAGLRQAIEEGKLERFVSEFYQRTGKAVPPLTSDNSSMREI

SEQ ID NO: 58606 - protein, 382 aa, Pantoea allii
  REGION 1..382: note = tr|A0A4S3BIZ1|A0A4S3BIZ1_9GAMM Queuine tRNA-ribosyltransferase OS=Pantoea allii OX=574096 GN=tgt; PE = 3 SV=1
MKFELDTTDGRARRGRLIFDRGVVETPAFMPVGTYGTVKGMTPEEVQETGAQIILGNTFHLWLRPGQEIMKLHGDLHDFMQWKGPILTDSGGFQVFSLGDIRKITEAGVHFRNPINGDPIFLDPEKSMEIQYDLGSDIVMIFDECTPYPADWDYAKRSMEMSLRWAQRSRDRFDSLGNKNALFGIIQGSVYEDLRDVSVKGLVEIGFDGYAVGGLAVGEPKQDMHRILEHVCPQLPQDKPRYLMGVGKPEDLVEGVRRGVDMFDCVMPTRNARNGHLFVTEGVVKIRNARYKDDTAPLDAECDCYTCRNYSRAYLYHLDRCNEILGARLNTIHNLRYYQRLMAGLRQAIEEGKLERFVTEFYQRTGKEVPPLTSDNSSMREI

SEQ ID NO: 58607 - protein, 382 aa, unidentified
  source 1..382: note = Pantoea ananas
  REGION 1..382: note = tr|A0A2S8A0C2|A0A2S8A0C2_PANAN Queuine tRNA-ribosyltransferase OS=Pantoea ananas OX=553 GN=tgt; PE = 3 SV=1
MKFELDTTDGRARRGRLIFDRGVVETPAFMPVGTYGTVKGMTPEEVQETGAQIILGNTFHLWLRPGQEIMKLHGDLHDFMQWKGPILTDSGGFQVFSLGDIRKITEAGVHFRNPINGDPIFLDPEKSMEIQYDLGSDIVMIFDECTPYPADWDYAKRSMEMSLRWARRSRDRFDSLGNKNALFGIIQGSVYEDLRDVSVKGLVEIGFDGYAVGGLAVGEPKQDMHRILEHVCPQLPQDKPRYLMGVGKPEDLVEGVRRGVDMFDCVMPTRNARNGHLFVTEGVVKIRNARYKDDTAPLDAECDCYTCRNYSRAYLYHLDRCNEILGARLNTIHNLRYYQRLMAGLRQAIEEGKLEHFVTEFYQRTGKEVPPLTSDNSSMREI

SEQ ID NO: 58608 - protein, 382 aa, unidentified
  source 1..382: note = Pantoea ananas
  REGION 1..382: note = tr|A0A2V2XV32|A0A2V2XV32_PANAN Queuine tRNA-ribosyltransferase OS=Pantoea ananas OX=553 GN=tgt; PE = 3 SV=1
MKFELDTTDGRARRGRLIFDRGVVETPAFMPVGTYGTVKGMTPEEVQETGAQIILGNTFHLWLRPGQEIMKLHGDLHDFMQWKGPILTDSGGFQVFSLGDIRKITEAGVHFRNPINGDSIFLDPEKSMEIQYDLGSDIVMIFDECTPYPADWDYAKRSMEMSLRWAQRSRDRFDSLGNKNALFGIIQGSVYEDLRDVSVKGLVEIGFDGYAVGGLAVGEPKEDMHRILEHVCPQIPADKPRYLMGVGKPEDLVEGVRRGVDMFDCVMPTRNARNGHLFVTDGVVKIRNAKHKDDVSPLDAECDCYTCRNYSRAYLHHLDRCNEILGARLNTIHNLRYYQRLMAGLRQAIEEGKLERFVSEFYQRTGKAVPPLTSDNSSMREI

SEQ ID NO: 58609 - protein, 353 aa, Pantoea ananatis
  REGION 1..353: note = tr|A0A0H3KTI9|A0A0H3KTI9_PANAA Queuine tRNA-ribosyltransferase OS=Pantoea ananatis (strain AJ13355) OX=932677 GN=tgt PE=3 SV=1
MPVGTYGTVKGMTPEEVQETGAQIILGNTFHLWLRPGQEIMKLHGDLHDFMQWKGPILTDSGGFQVFSLGDIRKITEAGVHFRNPINGDSIFLDPEKSMEIQYDLGSDIVMIFDECTPYPADWDYARRSMEMSLRWAQRSRDRFDSLGNKNALFGIIQGSVYEDLRDVSVKGLVEIGFDGYAVGGLAVGEPKEDMHRILEHVCPQIPADKPRYLMGVGKPEDLVEGVRRGVDMFDCVMPTRNARNGHLFVTDGVVKIRNAKHKDDVSPLDAECDCYTCRNYSRAYLHHLDRCNEILGARLNTIHNLRYYQRLMAGLRQAIEEGKLERFVSEFYQRTGKAVPPLTSDNSSMREI

SEQ ID NO: 58610 - protein, 382 aa, Pantoea ananatis; identical to SEQ ID NO: 58608
  REGION 1..382: note = tr|D4GL84|D4GL84_PANAM Queuine tRNA-ribosyltransferase OS=Pantoea ananatis (strain LMG 20103) OX=706191 GN=tgt PE=3 SV=1

SEQ ID NO: 58611 - protein, 382 aa, Pantoea anthophila
  REGION 1..382: note = tr|A0A506PB39|A0A506PB39_9GAMM Queuine tRNA-ribosyltransferase OS=Pantoea anthophila OX=470931; GN = tgt PE=3 SV=1
MKFELDTTDGRARRGRLIFDRGVVETPAFMPVGTYGTVKGMTPEEVEDTGAQIILGNTFHLWLRPGQEIMKLHGDLHDFMQWKGPILTDSGGFQVFSLGDIRKITEAGVHFRNPINGDPIFLDPEKSMEIQYDLGSDIVMIFDECTPYPADWDYAKRSMEMSLRWARRSRDRFDSLGNKNALFGIIQGSVYEDLRDVSVKGLVEIGFDGYAVGGLAVGEPKQDMHRILEHVCPQLPQDKPRYLMGVGKPEDLVEGVRRGVDMFDCVMPTRNARNGHLFVTEGVVKIRNARYKDDTAPLDAECDCYTCRNYSRAYLYHLDRCNEILGARLNTIHNLRYYQRLMAGLRQAIEEGRLERFVTEFYQRTGKEVPPLTSDNSSMREI

SEQ ID NO: 58612 - protein, 376 aa, unidentified
  source 1..376: note = Pantoea coffeiphila
  REGION 1..376: note = tr|A0A2S9IHA8|A0A2S9IHA8_9GAMM Queuine tRNA-ribosyltransferase OS=Pantoea coffeiphila OX=1465635; GN = tgt PE=3 SV=1
MKFELDTTDGRARRGRLVFDRGVVETPAFMPVGTYGTVKGMTPEEVEATGAQIILGNTFHLWLRPGQEIMKLHGDLHDFMQWKGPILTDSGGFQVFSLGDIRKITEKGVHFRNPINGDAIFLDPEKSMEIQYDLGSDIVMIFDECTPYPADWDYAKRSMEMSLRWAQRSRDRFDSLGNKNALFGIIQGSVYEDLRDVSVKGLVEIGFDGYAVGGLAVGEPKEDMHRILEHVCPQLPEDKPRYLMGVGKPQDLVEGVRRGIDMFDCVMPTRNARNGHLFVTDGVVKIRNAKYKDDTSPLDAECDCYTCRNYSRAYLYHLDRCNEILGARLNTIHNLRYYQRLMAGLRKAIEEGKLEHFVTEFYQRTGTAVPPLTSDN

SEQ ID NO: 58613 - protein, 382 aa, Pantoea conspicua
  REGION 1..382: note = tr|A0A1X1BY87|A0A1X1BY87_9GAMM Queuine tRNA-ribosyltransferase OS=Pantoea conspicua OX=472705; GN = tgt PE=3 SV=1
MKFELDTTDGRARRGRLIFDRGVVETPAFMPVGTYGTVKGMTPEEVQETGAQIILGNTFHLWLRPGQEIMKLHGDLHDFMQWKGPILTDSGGFQVFSLGDIRKITEAGVHFRNPINGDAIFLDPEKSMEIQYDLGSDIVMIFDECTPYPADWDYAKRSMEMSLRWAKRSRDRFDSLGNKNALFGIIQGSVYEDLRDVSVKGLVEIGFDGYAVGGLAVGEPKQDMHRILEHVCPQLPQDKPRYLMGVGKPEDLVEGVRRGVDMFDCVMPTRNARNGHLFVTDGVVKIRNAKYKDDTAPLDAECDCYTCRNYSRAYLYHLDRCNEILGARLNTIHNLRYYQRLMAGLRQAIEEGKLERFVNEFYQRTGKEVPPLTSDNSSMREI

SEQ ID NO: 58614 - protein, 374 aa, Pantoea cypripedii
  REGION 1..374: note = tr|A0A1X1ES22|A0A1X1ES22_PANCY Queuine tRNA-ribosyltransferase OS=Pantoea cypripedii OX=55209; GN = tgt PE=3 SV=1
MKFELDTTDGRARRGRLVFDRGVVETPAFMPVGTYGTVKGMTPEEVQDTGAQIILGNTFHLWLRPGQEIMKLHGDLHDFMQWKGPILTDSGGFQVFSLGDIRKITEAGVHFRNPINGDPIFLDPEKSMEIQFDLGSDIVMIFDECTPYPADWDYAKRSMEMSLRWAKRSRDRFDSLGNKNALFGIIQGSVYEDLRDVSVKGLVEIGFDGYAVGGLAVGEPKEDMHRILEHVCPQIPHDKPRYLMGVGKPEDLVEGVRRGIDMFDCVMPTRNARNGHLFVTDGVVKIRNAKHKDDTSPLDAECDCYTCRNYSRAYLHHLDRCNEILGARLNTIHNLRYYQRLMAGLRKAIEEGKLEHFVSEFYQRTGKAVPPLNV

SEQ ID NO: 58615 - protein, 382 aa, Pantoea deleyi
  REGION 1..382: note = tr|A0A506Q384|A0A506Q384_9GAMM Queuine tRNA-ribosyltransferase OS=Pantoea deleyi OX=470932 GN=tgt; PE = 3 SV=1
MKFELDTTDGRARRGRLIFDRGVVETPAFMPVGTYGTVKGMTPEEVQETGAQIILGNTFHLWLRPGQEIMKLHGDLHDFMQWKGPILTDSGGFQVFSLGDIRKITEAGVHFRNPINGDPIFLDPEKSMEIQYDLGSDIVMIFDECTPYPADWDYAKRSMEMSLRWAKRSRDRFDSLGNKNALFGIIQGSVYEDLRDVSVKGLVEIGFDGYAVGGLAVGEPKQDMHRILEHVCPQLPQDKPRYLMGVGKPEDLVEGVRRGVDMFDCVMPTRNARNGHLFVTEGVVKIRNARYKDDTAPLDAECDCYTCRNYSRAYLYHLDRCNEILGARLNTIHNLRYYQRLMAGLRQAIEEGKLERFVTEFYQRTGKEVPPLTSDNSSMREI

SEQ ID NO: 58616 - protein, 374 aa, Pantoea dispersa
  REGION 1..374: note = tr|A0A437T8I7|A0A437T8I7_9GAMM Queuine tRNA-ribosyltransferase OS=Pantoea dispersa OX=59814; GN = tgt PE=3 SV=1
MKFELDTTDGRARRGRLVFDRGVVETPAFMPVGTYGTVKGMTPEEVKETGAQILLGNTFHLWLRPGQEIMKLHGDLHDFMHWQGPILTDSGGFQVFSLGDIRKITEAGVHFRNPINGDPIFLDPEKSMEIQYDLGSDIVMIFDECTPYPADWDYAKRSMEMSLRWAQRSRDRFDALGNKNALFGIIQGGVYEDLRDVSVKGLVEIGFDGYAVGGLAVGEPKEDMHRILEHVCPQIPQDKPRYLMGVGKPEDLVEGVRRGIDMFDCVMPTRNARNGHLFVTDGVVKIRNAKYKDDTAPLDAECDCYTCRNYTRAYLHHLDRCNEILGARLNTIHNLRYYQRLMAGLRQAIEEGKLEHFVSEFYQRTGKAVPPLNV

SEQ ID NO: 58617 - protein, 374 aa, Pantoea dispersa
  REGION 1..374: note = tr|A0A518XAF9|A0A518XAF9_9GAMM Queuine tRNA-ribosyltransferase OS=Pantoea dispersa OX=59814; GN = tgt PE=3 SV=1
MKFELDTTDGRARRGRLVFERGVVETPAFMPVGTYGTVKGMTPEEVKETGAQILLGNTFHLWLRPGQEIMKLHGDLHDFMHWPGPILTDSGGFQVFSLGDIRKITEAGVHFRNPINGDAIFLDPEKSMEIQHDLGSDIVMIFDECTPYPADWDYAKRSMEMSLRWAQRSRDRFDALGNKNALFGIIQGGVYEDLRDVSVKGLVEIGFDGYAVGGLAVGEPKEDMHRILEHVCPQIPQDKPRYLMGVGKPEDLVEGVRRGIDMFDCVMPTRNARNGHLFVTDGVVKIRNAKYKDDTAPLDAECDCYTCRNYTRAYLHHLDRCNEILGARLNTIHNLRYYQRLMAGLRQAIEEGKLEHFVSEFYQRTGKAVPPLNV

SEQ ID NO: 58618 - protein, 382 aa, Pantoea eucalypti; identical to SEQ ID NO: 58607
  REGION 1..382: note = tr|A0A506PS24|A0A506PS24_9GAMM Queuine tRNA-ribosyltransferase OS=Pantoea eucalypti OX=470933; GN = tgt PE=3 SV=1

SEQ ID NO: 58619 - protein, 374 aa, unidentified
  source 1..374: note = Pantoea latae
  REGION 1..374: note = tr|A0A1V9DI93|A0A1V9DI93_9GAMM Queuine tRNA-ribosyltransferase OS=Pantoea latae OX=1964541 GN=tgt; PE = 3 SV=1
MKFELDTTDGRARRGRLIFDRGVVETPAFMPVGTYGTVKGMTPEEVQETGAQIILGNTFHLWLRPGQEIMKLHGDLHDFMQWKGPILTDSGGFQVFSLGDIRKITEAGVHFRNPINGDPIFLDPEKSMEIQFDLGSDIVMIFDECTPYPADWDYAKRSMEMSLRWAQRSRDRFDSLGNKNALFGIIQGSVYEDLRDVSVKGLVEIGFDGYAVGGLAVGEPKEDMHRILEHVCPQIPQDKPRYLMGVGKPEDLVEGVRRGVDMFDCVMPTRNARNGHLFVTDGVVKIRNAKHKDDTSPLDAECDCYTCRNYSRAYLHHLDRCNEILGARLNTIHNLRYYQRLMAGLRQAIEEGKLERFVSEFYQRTGKAVPPLNV

SEQ ID NO: 58620 - protein, 374 aa, unidentified
  source 1..374: note = Pantoea rodasii
  REGION 1..374: note = tr|A0A2M9WAK6|A0A2M9WAK6_9GAMM Queuine tRNA-ribosyltransferase OS=Pantoea rodasii OX=1076549; GN = tgt PE=3 SV=1
MKFELDTTDGRARRGRLVFDRGVVETPAFMPVGTYGTVKGMTPEEVKETGAQILLGNTFHLWLRPGQEIMKLHGDLHDFMNWQGPILTDSGGFQVFSLGDIRKITEAGVHFRNPINGDPIFLDPEKSMEIQYDLGSDVVMIFDECTPYPADWDYAKRSMEMSLRWAQRSRDRFDSLGNKNALFGIIQGGVYEDLRDVSVKGLVDIGFDGYAVGGLAVGEPKEDMHRILEHVCPQIPHDKPRYLMGVGKPEDLVEGVRRGIDMFDCVMPTRNARNGHLFVTDGVVKIRNAKYKDDTTTLDAECDCYTCRNYSRAYLYHLDRCNEILGARLNTIHNLRYYQRLMAGLRNAIEEGKLEHFVSEFYQRTGKAVPPLNV

SEQ ID NO: 58621 - protein, 374 aa, unidentified
  source 1..374: note = Pantoea rodasii
  REGION 1..374: note = tr|A0A0B1RBL6|A0A0B1RBL6_9GAMM Queuine tRNA-ribosyltransferase OS=Pantoea rodasii OX=1076549; GN = tgt PE=3 SV=1
MKFELDTTDGRARRGRLVFDRGVVETPAFMPVGTYGTVKGMTPEEVKDTGAQILLGNTFHLWLRPGQEIMKLHGDLHDFMNWQGPILTDSGGFQVFSLGDIRKITEAGVHFRNPINGDPIFLDPEKSMEIQYDLGSDVVMIFDECTPYPADWDYAKRSMEMSLRWAQRSRDRFDSLGNKNALFGIIQGGVYEDLRDVSVKGLVDIGFDGYAVGGLAVGEPKEDMHRILEHVCPQIPQDKPRYLMGVGKPEDLVEGVRRGIDMFDCVMPTRNARNGHLFVTDGVVKIRNAKYKDDTTTLDAECDCYTCRNYSRAYLYHLDRCNEILGARLNTIHNLRYYQRLMAGLRKAIEEGKLEHFVSEFYQRTGKAVPPLNV

SEQ ID NO: 58622 - protein, 374 aa, unidentified
  source 1..374: note = Pantoea rwandensis
  REGION 1..374: note = tr|A0A1X1CUD9|A0A1X1CUD9_9GAMM Queuine tRNA-ribosyltransferase OS=Pantoea rwandensis OX=1076550; GN = tgt PE=3 SV=1
MKFELDTTDGRARRGRLVFDRGVVETPAFMPVGTYGTVKGMTPEEVKETGAQILLGNTFHLWLRPGQEIMKLHGDLHDFMNWQGPILTDSGGFQVFSLGDIRKITEAGVHFRNPINGDPIFLDPEKSMEIQYDLGSDVVMIFDECTPYPADWDYAKRSMEMSLRWAQRSRDRFDSLGNKNALFGIIQGGVYEDLRDVSVKGLVDIGFDGYAVGGLAVGEPKEDMHRILEHVCPQIPQDKPRYLMGVGKPEDLVEGVRRGIDMFDCVMPTRNARNGHLFVTDGVVKIRNAKYKDDTTTLDAECDCYTCRNYSRAYLYHLDRCNEILGARLNTIHNLRYYQRLMAGLRKAIEEGKLEHFVSEFYQRTGKAVPPLNV

SEQ ID NO: 58623 - protein, 375 aa, unidentified; identical to SEQ ID NO: 54949
  source 1..375: note = Pantoea sesami
  REGION 1..375: note = tr|A0A1M5LSY3|A0A1M5LSY3_9GAMM Queuine tRNA-ribosyltransferase OS=Pantoea sesami OX=1881110; GN = tgt PE=3 SV=1

SEQ ID NO: 58624 - protein, 391 aa, Pantoea sp.; identical to SEQ ID NO: 54946
  REGION 1..391: note = tr|E0LTP8|E0LTP8_9GAMM Queuine tRNA-ribosyltransferase OS=Pantoea sp. aB OX=517433 GN=tgt; PE = 3 SV=1

SEQ ID NO: 58625 - protein, 374 aa, Pantoea sp.
  REGION 1..374: note = tr|A0A443I9D2|A0A443I9D2_9GAMM Queuine tRNA-ribosyltransferase OS=Pantoea sp. LMG 27579; OX = 1490476 GN=tgt PE=3 SV=1
MKFELDTTDGRARRGRLVFERGVVETPAFMPVGTYGTVKGMTPEEVQDTGAQIILGNTFHLWLRPGQEIMKLHGDLHDFMQWKGPILTDSGGFQVFSLGDIRKITEAGVHFRNPINGDPIFLDPEKSMEIQYDLGSDIVMIFDECTPYPADWDYAKRSMEMSLRWAQRSRDRFDSLGNKNALFGIIQGSVYEDLRDVSVKGLVEIGFDGYAVGGLAVGEPKEDMHRILEHVCPQIPEDKPRYLMGVGKPEDLVEGVRRGIDMFDCVMPTRNARNGHLFVTDGVVKIRNAKHKDDTSPLDAECDCYTCRNYSRAYLHHLDRCNEILGARLNTIHNLRYYQRLMAGLRQAIEEGKLERFVTEFYQRTGKAVPPLAV

SEQ ID NO: 58626 - protein, 382 aa, Pantoea stewartii
  REGION 1..382: note = tr|H3R9E4|H3R9E4_PANSE Queuine tRNA-ribosyltransferase OS=Pantoea stewartii subsp. stewartii DC283 OX=660596 GN=tgt PE=3 SV=1
MKFELDTTDGRARRGRLIFDRGVVETPAFMPVGTYGTVKGMTPEEVQDTGAQIILGNTFHLWLRPGQEIMKLHGDLHDFMQWKGPILTDSGGFQVFSLGDIRKITEAGVHFRNPINGDQIFLDPEKSMEIQYDLGSDIVMIFDECTPYPADWDYAKRSMEMSLRWAQRSRDRFDSLGNKNALFGIIQGSVYEDLRDVSVKGLVEIGFDGYAVGGLAVGEPKEDMHRILEHVCPQIPEDKPRYLMGVGKPEDLVEGVRRGVDMFDCVMPTRNARNGHLFVTDGVVKIRNAKHKDDVSPLDAECDCYTCRNYSRAYLHHLDRCNEILGARLNTIHNLRYYQRLMAGLRQAIEEGKLERFVTEFYQRTGKAVPPLTSDNSSMREI

SEQ ID NO: 58627 - protein, 382 aa, Pantoea vagans; identical to SEQ ID NO: 58606
  REGION 1..382: note = tr|E1SF65|E1SF65_PANVC Queuine tRNA-ribosyltransferase OS=Pantoea vagans (strain C9-1); OX = 712898 GN=tgt PE=3 SV=1

SEQ ID NO: 58628 - protein, 382 aa, Pantoea vagans; identical to SEQ ID NO: 58606
  REGION 1..382: note = tr|A0A2R4J5H6|A0A2R4J5H6_9GAMM Queuine tRNA-ribosyltransferase OS=Pantoea vagans OX=470934 GN=tgt; PE = 3 SV=1

SEQ ID NO: 58629 - protein, 374 aa, unidentified
  source 1..374: note = Pantoea wallisii
  REGION 1..374: note = tr|A0A1X1DCS5|A0A1X1DCS5_9GAMM Queuine tRNA-ribosyltransferase OS=Pantoea wallisii OX=1076551; GN = tgt PE=3 SV=1
MKFELDTTDGRARRGRLVFDRGVVETPAFMPVGTYGTVKGMTPEEVKETGAQILLGNTFHLWLRPGQAIMKLHGDLHDFMNWQGPILTDSGGFQVFSLGDIRKITEAGVHFRNPINGDPIFLDPEKSMEIQYDLGSDIVMIFDECTPYPADWDYAKRSMEMSLRWAQRSRDRFDSLGNKNALFGIIQGGVYEDLRDVSVKGLVEIGFDGYAVGGLAVGEPKEDMHRILEHVCPQIPQDKPRYLMGVGKPEDLVEGVRRGIDMFDCVMPTRNARNGHLFVTDGIVKIRNAKYKDDTAPLDAECDCYTCRNYTRAYLHHLDRCNEILGARLNTIHNLRYYQRLMAGLRQAIEEGKLEHFVSEFYQRTGKAVPPLNV

SEQ ID NO: 58630 - protein, 379 aa, Papillibacter cinnamivorans
  REGION 1..379: note = tr|A0A1W2CHM3|A0A1W2CHM3_9FIRM Queuine tRNA-ribosyltransferase OS=Papillibacter cinnamivorans DSM 12816 OX=1122930 GN=tgt PE=3 SV=1
MFTLKGKEGRARRGSLQTPHGKVETPVFMNVATQAAIKGGLDAHDLKKVGCRVALSNTYHLHLRPGDEVIRELGGLHRFMGWDGPSLTDSGGFQVFSLAGLRKISEEGVLFASHVDGRRIFMSPEDSMRIQANLGADIAMAFDECVENPSTYEYVQASCERTYRWLLRCRDEHLRQREIPGAVNPGQLLFGINQGGIHEDLRIDNMRKIAELGLDGYAIGGLAVGEPTETMYRVIDAVEPFMPEDRPRYLMGVGTPENILECVHLGIDFFDCVMPARNARHGKLYTWQGTINIKNEAYKTDSSPVDPECSCPLCRNYSRAYLRHLFKAEEILGLRLAVLHNLYFYNSFLERIRMALEAKAFEKFRAEHAGRWTRGDSRA

SEQ ID NO: 58631 - protein, 376 aa, unidentified
  source 1..376: note = Parabacteroides acidifaciens
  REGION 1..376: note = tr|A0A3D8HBB1|A0A3D8HBB1_9BACT Queuine tRNA-ribosyltransferase OS=Parabacteroides acidifaciens; OX = 2290935 GN=tgt PE=3 SV=1
MKFELQHNDTKSNARAGLITTDHGVIETPIFMPVGTQGTVKGVHMTELEEDINAQIILGNTYHLYLRPGLEILEQAGGLHKFNTWSRPILTDSGGFQVFSLSENRKLHEEGAMFRSHIDGSKHMFTPEKVMDIQRIIGADIIMAFDECCPGDADYDYAKKSLGLTERWLDRCFDRFNSTEPKYGYRQSLFPIVQGCVYPDLRREAAENVARKEADGNAIGGLAVGEPTEKMYEMIEVVNEILPKDKPRYLMGVGTPINILESIERGIDMFDCIMPTRNGRNGQLFTRFGTINMRNKKWENDFSPIDPDAHSAIDTRYSKAYLHHLIKVNEMLGLQLASIHNLAFYLWLVKEARKHIIAGDFTTWKSEMVRQLSNRL

SEQ ID NO: 58632 - protein, 376 aa, unidentified
  source 1..376: note = Parabacteroides chartae
  REGION 1..376: note = tr|A0A1T5BXF7|A0A1T5BXF7_9BACT Queuine tRNA-ribosyltransferase OS=Parabacteroides chartae; OX = 1037355 GN=tgt PE=3 SV=1
MKFELQYKDTKTNARAGLITTDHGVIETPIFMPVGTQGSVKAVHMTELKEDIKAQIILGNTYHLYLRPGIEILKQAGGLHKFNSWNGPILTDSGGFQVFSLAENRKLHEEGAEFRSHIDGSKHLFTPEKVMDIERTIGADIIMAFDECCPGDADYNYAKESLGLTERWLDRCFNRFNSTDPMYGYNQSLFPIVQGCVYPDLRIRAAENVASKGADGNAIGGLAVGEPTEKMYEMIEVVNDILPKDKPRYLMGVGTPVNLLEAIERGVDMFDCIMPTRNGRNGQLFTKYGTMNMRNQKWENDFSPLDTEGTSYVDSLYSKAYVRHLFKTNELLGLQIASIHNLAFYLWLVGEARKHIIAGDFSIWKSGMVTQLSNRL

SEQ ID NO: 58633 - protein, 376 aa, unidentified
  source 1..376: note = Parabacteroides chinchillae
  REGION 1..376: note = tr|A0A1H5SWD3|A0A1H5SWD3_9BACT Queuine tRNA-ribosyltransferase OS=Parabacteroides chinchillae; OX = 871327 GN=tgt PE=3 SV=1
MNFELQYNDTKSNARAGLITTDHGVIETPIFMPVGTQGTVKGVHMTELKEDVNAQIILGNTYHLYLRPGIHILEQAGGLHKFNSWDRPILTDSGGFQVFSLSDNRKLHEEGAEFRSHIDGSRHMFSPEKVMDIQRSIGADIIMAFDECCPGDANYEYARKSLELTERWLNRCFERFNSTDPKYGYSQCLFPIVQGCVYTDLRRRAAENIAQKGADGNAIGGLAVGEPTEKMYEMIEVVNEILPKDKPRYLMGVGTPVNILEAIERGVDMFDCIMPTRNGRNGQIFTRFGTLNMRNKKWENDFSPIDPDANSYVDTLYSRAYLHHLIKVNELLGLQIASIHNLAFYIWLVKEARKHIISGDFTTWKSGMVRQLSNRL

SEQ ID NO: 58634 - protein, 376 aa, Parabacteroides distasonis
  REGION 1..376: note = tr|A0A069SBW4|A0A069SBW4_9BACT Queuine tRNA-ribosyltransferase OS=Parabacteroides distasonis str. 3776 Po2 i OX=1339341 GN=tgt PE=3 SV=1
MTFELQYNDTKSNARAGLITTDHGVIETPIFMPVGTQGTVKGVHMTELKEDTKAQIILGNTYHLYLRPGIQILEQAGGLHKFNTWDRPILTDSGGFQVFSLSDNRKLHEEGAEFRSHLDGSKHMFTPEKVMDIERSIGADIIMAFDECCPGDADYNYAKQSLGLTERWLDRCFARFNSTEPKYGYRQSLFPIVQGCVYTDLRQRAAENVARKGADGNAIGGLAVGEPTDKMYEMIEVVNEILPKDKPRYLMGVGTPINLLEGIERGIDMFDCIMPTRNGRNGQLFTRFGTINMRNKKWENDFSPVDPDGHSYVDTLYSKAYLHHLIKAKEMLGLQIASIHNLAFYLWLVKEARAHIIAGDFTTWKSGMVRQLANRL

SEQ ID NO: 58635 - protein, 376 aa, Parabacteroides distasonis
  REGION 1..376: note = tr|A0A3L7ZRU6|A0A3L7ZRU6_9BACT Queuine tRNA-ribosyltransferase OS=Parabacteroides distasonis; OX = 823 GN=tgt PE=3 SV=1
MTFELQYNDTKSNARAGLITTDHGVIETPIFMPVGTQGTVKGVHMTELKEDTKAQIILGNTYHLYLRPGIHILEQAGGLHKFNTWDQPILTDSGGFQVFSLSDNRKLHEEGAEFRSHLDGSKHMFTPEKVMDIERSIGADIIMAFDECCPGDADYNYAKQSLGLTERWLDRCFARFNSTEPKYGYRQSLFPIVQGCVYTDLRQRAAENVARKGADGNAIGGLAVGEPTDKMYEMIEVVNDILPKDKPRYLMGVGTPINLLEGIERGIDMFDCIMPTRNGRNGQLFTRFGTINMRNKKWENDFSPVDPDGHSYVDTLYSKAYLHHLIKAKEMLGLQIASIHNLAFYLWLVKEARAHIIAGDFTTWKSGMVRQLANRL

SEQ ID NO: 58636 - protein, 376 aa, Parabacteroides goldsteinii
  REGION 1..376: note = tr|A0A0J6CNN1|A0A0J6CNN1_9BACT Queuine tRNA-ribosyltransferase OS=Parabacteroides goldsteinii; OX = 328812 GN=tgt PE=3 SV=1
MKFELQHNDTKTNARAGLITTDHGVIETPIFMPVGTQGTVKGVHMTELKEDIDAQIILGNTYHLYLRPGLEILEKAGGLHKFNTWDRPILTDSGGFQVFSLSDNRKLHEEGAEFRSHIDGSKHLFTPEKVMDIQRIIGADIIMAFDECCPGDADYDYAKKSLGLTERWLDRCFDRFNATEPKYGYQQCLFPIVQGCVYPDLRRHAAENVARKGADGNAIGGLAVGEPTEKMYEMIEVVNEILPKDKPRYLMGVGTPINLLEAIERGVDMFDCIMPTRNGRNGQLFTRFGTINIRNKKWEDDFSPIDSDGNSYVDTLYSKAYLHHLVKVNELLGLQIASIHNLAFYLWLVKEARRHIIAGDFATWKSGMVQQLDNRL

SEQ ID NO: 58637 - protein, 376 aa, Parabacteroides goldsteinii; identical to SEQ ID NO: 58636
  REGION 1..376: note = tr|A0A0F5IXX6|A0A0F5IXX6_9BACT Queuine tRNA-ribosyltransferase OS=Parabacteroides goldsteinii DSM 19448 = WAL 12034 OX=927665 GN=tgt PE=3 SV=1

SEQ ID NO: 58638 - protein, 376 aa, Parabacteroides gordonii
  REGION 1..376: note = tr|A0A0F5IVD1|A0A0F5IVD1_9BACT Queuine tRNA-ribosyltransferase OS=Parabacteroides gordonii MS-1 = DSM 23371 OX=1203610 GN=tgt PE=3 SV=1
MKFELQHNDTKTNARAGLITTDHGVIETPIFMPVGTQGTVKGVHMTELKEDIKAQIILGNTYHLYLRPGLEILKKAGGLHKFNTWDRPILTDSGGFQVFSLSDNRKLHEEGAEFRSHIDGSKHLFTPEKVMDIQRIIGADIIMAFDECCPGDADYDYAKKSLGLTERWLDRCFARFNSTDPKYGYQQCLFPIVQGCVYPDLRRRAAENIAEKGADGNAIGGLAVGEPTEKMYEMIEVVNDILPKDKPRYLMGVGTPINLLEAIERGVDMFDCIMPTRNGRNGQIFTQYGTINLRNKKWEDDFSPIDPAANSYVDTLYSKAYLHHLIKANEMLGLQIASVHNLAFYLWLVKEARKHIIAGDFATWKGMMVGQLGNRL

SEQ ID NO: 58639 - protein, 376 aa, Parabacteroides johnsonii
  REGION 1..376: note = tr|A0A1Y3ZFV7|A0A1Y3ZFV7_9BACT Queuine tRNA-ribosyltransferase OS=Parabacteroides johnsonii; OX = 387661 GN=tgt PE=3 SV=1
MKFELQHNDTKSNARAGLITTDHGVIETPIFMPVGTQGTVKGVHMTELEEDINAQIILGNTYHLYLRPGLEILEQAGGLHKFNTWNRPILTDSGGFQVFSLSENRKLHEEGAMFRSHIDGSKHLFTPEKVMDIQRIIGADIIMAFDECCPGDADYEYAKKSLGLTERWLDRCFERFNSTEPKYGYQQSLFPIVQGCVYPELRRKAAENVAKKGADGNAIGGLAVGEPTEKMYEMIEVVNEILPKDKPRYLMGVGTPINILEGIERGIDMFDCIMPTRNGRNGQIFTRFGTINMRNKKWENDFSPIDPDAHSAIDTRYSKAYLHHLIKVNEMLGLQLASIHNLAFYLWLVKEARKHIIAGDFTTWKSEMVRQLSNRL

SEQ ID NO: 58640 - protein, 345 aa, Parabacteroides johnsonii
  REGION 1..345: note = tr|K5ZT55|K5ZT55_9BACT Queuine tRNA-ribosyltransferase OS=Parabacteroides johnsonii CL02T12C29 OX=999419 GN=tgt PE=3 SV=1
MPVGTQGTVKGVHMTELEEDINAQIILGNTYHLYLRPGLEILEQAGGLHKFNTWNRPILTDSGGFQVFSLSENRKLHEEGAMFRSHIDGSKHLFTPEKVMDIQRIIGADIIMAFDECCPGDADYEYAKKSLGLTERWLDRCFERFNSTEPKYGYQQSLFPIVQGCVYPELRRKAAENVAKKGADGNAIGGLAVGEPTEKMYEMIEVVNEILPKDKPRYLMGVGTPINILEGIERGIDMFDCIMPTRNGRNGQIFTRFGTINMRNKKWENDFSPIDPDAHSAIDTRYSKAYLHHLIKVNEMLGLQLASIHNLAFYLWLVKEARKHIIAGDFTTWKSEMVRQLSNRL

SEQ ID NO: 58641 - protein, 345 aa, Parabacteroides merdae
  REGION 1..345: note = tr|R6Y1G0|R6Y1G0_9BACT Queuine tRNA-ribosyltransferase OS=Parabacteroides merdae CAG:48; OX = 1263094 GN=tgt PE=3 SV=1
MPVGTQGTVKGVHMTELEEDINAQIILGNTYHLYLRPGLEILEQAGGLHKFNTWNRPILTDSGGFQVFSLSENRKLHEEGAMFRSHIDGSKHLFTPEKVMDIQRIIGADIIMAFDECCPGDADYEYAKKSLGLTERWLDRCFERFNSTEPKYGYQQSLFPIVQGCVYPELRRKAAENVAEKGADGNAIGGLAVGEPTEKMYEMIEVVNEILPKDKPRYLMGVGTPINILEGIERGIDMFDCIMPTRNGRNGQIFTRFGTINMRNKKWENDFSPIDPDAHSAIDTRYSKAYLHHLIKVNEMLGLQLASIHNLAFYLWLVKEARKHIIAGDFTTWKSEMVRQLSNRL

SEQ ID NO: 58642 - protein, 376 aa, Parabacteroides merdae
  REGION 1..376: note = tr|A0A351DXN6|A0A351DXN6_9BACT Queuine tRNA-ribosyltransferase OS=Parabacteroides merdae OX=46503; GN = tgt PE=3 SV=1
MKFELQHNDTKSNARAGLITTDHGVIETPIFMPVGTQGTVKGVHMTELEEDINAQIILGNTYHLYLRPGLEILEQAGGLHKFNTWNRPILTDSGGFQVFSLSENRKLHEEGAMFRSHIDGSKHLFTPEKVMDIQRIIGADIIMAFDECCPGDADYEYAKKSLGLTERWLDRCFERFNSTEPKYGYQQSLFPIVQGCVYPELRRKAAENVAEKGADGNAIGGLAVGEPTEKMYEMIEVVNEILPKDKPRYLMGVGTPINILEGIERGIDMFDCIMPTRNGRNGQIFTRFGTINMRNKKWENDFSPIDPDAHSAIDTRYSKAYLHHLIKVNEMLGLQLASIHNLAFYLWLVKEARKHIIAGDFTTWKSEMVRQLSNRL

SEQ ID NO: 58643 - protein, 376 aa, Parabacteroides sp.
  REGION 1..376: note = tr|A0A3E4P906|A0A3E4P906_9BACT Queuine tRNA-ribosyltransferase OS=Parabacteroides sp. 20_3; OX = 469591 GN=tgt PE=3 SV=1
MTFELQYNDTKSNARAGLITTDHGVIETPIFMPVGTQGTVKGVHMTELKEDTKAQIILGNTYHLYLRPGIQILEQAGGLHKFNTWDRPILTDSGGFQVFSLSDNRKLHEEGAEFRSHLDGSKHMFTPEKVMDIERSIGADIIMAFDECCPGDADYNYAKQSLGLTERWLDRCFARFNSTEPKYGYRQSLFPIVQGCVYTDLRQKAAENVARKGADGNAIGGLAVGEPTDKMYEMIEVVNEILPKDKPRYLMGVGTPINLLEGIERGIDMFDCIMPTRNGRNGQLFTRFGTINMRNKKWENDFSPVDPDGHSYVDTLYSKAYLHHLIKAKEMLGLQIASIHNLAFYLWLVKEARAHIIAGDFTTWKSGMVRQLANRL

SEQ ID NO: 58644 - protein, 376 aa, Parabacteroides sp.
  REGION 1..376: note = tr|C7X769|C7X769_9BACT Queuine tRNA-ribosyltransferase OS=Parabacteroides sp. D13; OX = 563193 GN=tgt PE=3 SV=1
MTFELQYNDTKSNARAGLITTDHGVIETPIFMPVGTQGTVKGVHMTELKEDTKAQIILGNTYHLYLRPGIQILEQAGGLHKFNTWDRPILTDSGGFQVFSLSDNRKLHEEGAEFRSHLDGSKHMFTPEKVMDIERSIGADIIMAFDECCPGDADYNYAKQSLGLTERWLDRCFARFNSTEPKYGYRQSLFPIVQGCVYTDLRQRAAENVARKGADGNAIGGLAVGEPTDKMYEMIEVVNDILPKDKPRYLMGVGTPINLLEGIERGIDMFDCIMPTRNGRNGQLFTRFGTINMRNKKWENDFSPVDPDGHSYVDTLYSKAYLHHLIKAKEMLGLQIASIHNLAFYLWLVKEARAHIIAGDFTTWKSGMVRQLANRL

SEQ ID NO: 58645 - protein, 404 aa, unidentified
  source 1..404: note = Paraburkholderia aromaticivorans
  REGION 1..404: note = tr|A0A248VE54|A0A248VE54_9BURK Queuine tRNA-ribosyltransferase OS=Paraburkholderia aromaticivorans OX=2026199 GN=tgt PE=3 SV=1
MTDGHPVSTRADHGAYLGEHVRPENGLTFELLGVDGLARRGRVALNHGVVETPIFMPVGTYGTVKAVQPRELGEMHAQIILGNTFHLWLRPGLETIEAHGGLHGFMGWKKPILTDSGGFQVFSLGDLRKITEDGVTFASPINGDKLFLSPEVSMQIQKVLNSDIAMQFDECTPYATNNVPTSHKEAADSMRMSMRWAQRSIDEFNRLGNPNALFGIVQGGMFEDLRDESLAGLAEKDFHGLAIGGLSVGEPKEDMMRVLNHIGPKLPANKPHYLMGVGTPEDLVAGVAAGVDMFDCVMPTRNARNGWLFTRFGDIKIRNATHRNSLRPLDEQCGCYTCRNFTRGYLHHLHRVGEILGAQLNTIHNLHYYLELMQEIRDAIDAKMFEPFRKRFHENRARGTAEAP

SEQ ID NO: 58646 - protein, 401 aa, unidentified
  source 1..401: note = Paraburkholderia aspalathi
  REGION 1..401: note = tr|A0A1I7EMH0|A0A1I7EMH0_9BURK Queuine tRNA-ribosyltransferase OS=Paraburkholderia aspalathi; OX = 1324617 GN=tgt PE=3 SV=1
MTDGHTHDTSGTCSTCASHGERPDNGLKFELLGTDGQARRGRVTLNHGVVETPIFMPVGTYGTVKAVQPRELEEMHAQIILGNTFHLWLRPGLETIEAHGGLHGFMGWKKPILTDSGGFQVFSLGDLRKITEDGVTFASPINGDKLFLSPEVSMQIQKVLNSDIVMQFDECTPYATNNVPTSHQEAADSMRMSMRWAQRSINEFNRLGNPNALFGIVQGGMFEDLRDESLAGLAEMDFHGLAIGGLSVGEPKEDMMRVLNHIGPKLPADKPHYLMGVGTPEDLVAGVAAGVDMFDCVMPTRNARNGWLFTRFGDIKIRNAAHKNSLRPLDEQCGCYTCRNFTRGYLHHLHRVGEILGAQLNTIHNLHYYLELMQEMRDAIDAKLFEPFRKRFHEDRARGID

SEQ ID NO: 58647 - protein, 397 aa, unidentified
  source 1..397: note = Paraburkholderia azotifigens
  REGION 1..397: note = tr|A0A5C6VT53|A0A5C6VT53_9BURK Queuine tRNA-ribosyltransferase OS=Paraburkholderia azotifigens; OX = 2057004 GN=tgt PE=3 SV=1
MTDGHHQGAYLGDHVRPENGLKFELLKTDGLARRGRLTLNHGVVETPIFQPVGTYGTVKAIQPRELEEIRAQIILGNTFHLWLRPGLETIAAHGGLHGFMGWKRPILTDSGGFQVFSLGDLRKITEDGVTFASPINGDKLFLSPEVSMQIQKVLNSDIVMQFDECTPYATNGVPTSHKEAADSMRMSMRWAKRSIDEFNRLGNPNALFGIVQGGMFEDLRDESLAGLSEIGFHGLAIGGLSVGEPKEDMMRVLNHIGPKLPADKPHYLMGVGTPEDLVAGVAAGVDMFDCVMPTRNARNGWLFTRFGDIKIRNATHKNSLRPLDEQCGCYTCRNFTRGYLHHLHRVGEILGAQLNTIHNLHYYLELMQEMRDAIDAQMFDAFRKQFHENRARGTDQG

SEQ ID NO: 58648 - protein, 396 aa, unidentified
  source 1..396: note = Paraburkholderia bryophila
  REGION 1..396: note = tr|A0A329BV69|A0A329BV69_9BURK Queuine tRNA-ribosyltransferase OS=Paraburkholderia bryophila; OX = 420952 GN=tgt PE=3 SV=1
MTDGHQSHGATFERPENGLKFELLGTDGQARRGRVTLNHGVVETPIFMPVGTYGTVKAVQPRELEEMHAQIILGNTFHLWLRPGLETIEAHGGLHSFMGWKKPILTDSGGFQVFSLGDLRKITEDGVTFASPINGDKLFLSPEVSMQIQKVLNSDIVMQFDECTPYATHNVPTSHQEAADSMRMSMRWAQRSIDEFKRLGNPNALFGIVQGGMFEDLRDESLAGLAEKDFHGLAIGGLSVGEPKEDMMRVLNHIGPKLPADKPHYLMGVGTPEDLVAGVAAGVDMFDCVMPTRNARNGWLFTRFGDVKIRNAAHKNSLRPLDEQCGCYTCRNFTRGYLHHLHRVGEILGAQLNTIHNLHYYLELMQEIRDSIDAKMFEPFRKRFHENRARGVEQAP

SEQ ID NO: 58649 - protein, 399 aa, unidentified
  source 1..399: note = Paraburkholderia caballeronis
  REGION 1..399: note = tr|A0A1H7I9B5|A0A1H7I9B5_9BURK Queuine tRNA-ribosyltransferase OS=Paraburkholderia caballeronis; OX = 416943 GN=tgt PE=3 SV=1
MTDGHDATARAGDGACLGERPQNGLQFDLLATDGLARRGRLTLNHGVVETPIFMPVGTYGTVKAIQPRELEEIHAQIILGNTFHLWLRPGLDTIAAHGGLHRFMGWNRPILTDSGGFQVFSLGDLRKISEDGVRFASPVNGDKLFLSPEVSMQIQKVLNSDIVMQFDECTPYATNGVPTSHHDAAESMRMSMRWAKRSIDEFNALGNPNALFGIVQGGMFEDLRDESLAGLAQMPFHGYAIGGLSVGEPKEDMMRVLDYIAPKLPADKPHYLMGVGTPEDLVAGVAAGVDMFDCVMPTRNARNGWLFTRFGDIKIRNATHRDSLRPLDEQCGCYTCRHFTRGYLHHLHRVGEILGAQLNTIHNLHYYLELMGEMRAAIETKTFDAFRRRFHENRARGVD

SEQ ID NO: 58650 - protein, 396 aa, unidentified
  source 1..396: note = Paraburkholderia caledonica
  REGION 1..396: note = tr|A0A2Z5M871|A0A2Z5M871_9BURK Queuine tRNA-ribosyltransferase OS=Paraburkholderia caledonica; OX = 134536 GN=tgt PE=3 SV=1
MTSGHDLQQTTTERPANGLHFELLGTDGQARRGRVTLNHGVVETPIFMPVGTYGTVKAVQPRELEEMHAQIILGNTFHLWLRPGLETIGAHGGLHGFMGWKKPILTDSGGFQVFSLGDLRKITEDGVTFASPINGDKLFLSPEVSMQIQKVLNSDIVMQFDECTPYATNNVPTSHKEAADSMRMSMRWAQRSIDEFQRLGNPNALFGIVQGGMFEDLRDESLAGLAEKDFHGLAIGGLSVGEPKEDMMRVLNHIGPKLPADKPHYLMGVGTPEDLVAGVAAGVDMFDCVMPTRNARNGWLFTRFGDIKIRNATHKNSLRPLDQQCGCYTCRNFTRGYLHHLHRVGEILGAQLNTIHNLHYYLELMQEMRDAIDAKMFEPFRKRFHENRARGIDEAP

SEQ ID NO: 58651 - protein, 403 aa, unidentified
  source 1..403: note = Paraburkholderia caribensis
  REGION 1..403: note = tr|A0A0N7JTN9|A0A0N7JTN9_9BURK Queuine tRNA-ribosyltransferase OS=Paraburkholderia caribensis MBA4 OX=1323664 GN=tgt PE=3 SV=1
MTDGHNNAARANHGAYLGDHVRPDNGLKFELLKTDGQARRGRLTLNHGVVETPIFMPVGTYGTVKAIQPRELEEIRAQIILGNTFHLWLRPGLETIAAHGGLHGFMGWKRPILTDSGGFQVFSLGDLRKITEDGVTFASPINGDKLFLSPEVSMQIQKVLNSDIVMQFDECTPYATNGVPTSHQDAADSMRMSMRWAKRSIDEFNRLGNPNALFGIVQGGMFEDLRDESLAGLAEIGFHGLAIGGLSVGEPKEDMMRVLNHIGPKLPADKPHYLMGVGTPEDLVAGVSAGVDMFDCVMPTRNARNGWLFTRFGDIKIRNATHKNSLRPLDEQCGCYTCRNFTRGYLHHLHRVGEILGAQLNTIHNLHYYLELMQEMRDAIDAQMFDTFRKLFHENRARGTDQV

SEQ ID NO: 58652 - protein, 403 aa, unidentified
  source 1..403: note = Paraburkholderia caribensis
  REGION 1..403: note = tr|A0A142YWW5|A0A142YWW5_9BURK Queuine tRNA-ribosyltransferase OS=Paraburkholderia caribensis; OX = 75105 GN=tgt PE=3 SV=1
MTDGHNNAARADHGAYLGDHVRPDNGLKFELLKTDGQARRGRLTLNHGVIETPIFMPVGTYGTVKAIQPRELEEIRAQIILGNTFHLWLRPGLETIAAHGGLHGFMGWKRPILTDSGGFQVFSLGDLRKITEDGVTFASPINGDKLFLSPEVSMQIQKVLNSDVVMQFDECTPYATNGVPTSHQDAADSMRMSMRWAKRSIDEFNRLGNPNALFGIVQGGMFEDLRDESLAGLAEIGFHGLAIGGLSVGEPKEDMMRVLNHIGPKLPADKPHYLMGVGTPEDLVAGVSAGVDMFDCVMPTRNARNGWLFTRFGDIKIRNATHKNSLRPLDEQCGCYTCRNFTRGYLHHLHRVGEILGAQLNTIHNLHYYLELMQEMRDAIDAQMFDAFRKVFHENRARGTDQG

SEQ ID NO: 58653 - protein, 403 aa, unidentified
  source 1..403: note = Paraburkholderia diazotrophica
  REGION 1..403: note = tr|A0A1H7D2M4|A0A1H7D2M4_9BURK Queuine tRNA-ribosyltransferase OS=Paraburkholderia diazotrophica; OX = 667676 GN=tgt PE=3 SV=1
MTDGHNNAARADHGAYLGDHVRPDNGLKFELLKTDGQARRGRLTLNHGVIETPIFMPVGTYGTVKAIQPRELEEIRAQIILGNTFHLWLRPGLETIAAHGGLHGFMGWKRPILTDSGGFQVFSLGDLRKITEDGVTFASPINGDKLFLSPEVSMQIQKVLNSDIVMQFDECTPYATNGVPTSHQDAADSMRMSMRWAKRSIDEFNRLGNPNALFGIVQGGMFEDLRDESLAGLSEIGFHGFAIGGLSVGEPKEDMMRVLNHIGPKLPADKPHYLMGVGTPEDLVAGVAAGVDMFDCVMPTRNARNGWLFTRYGDIKIRNATHKNSLRPLDEQCGCYTCRNFTRGYLHHLHRVGEILGAQLNTIHNLHYYLELMQEMRDAIDGQMFDAFKKLFHENRARGTDQS

SEQ ID NO: 58654 - protein, 388 aa, unidentified
  source 1..388: note = Paraburkholderia dipogonis
  REGION 1..388: note = tr|A0A4Y8NC61|A0A4Y8NC61_9BURK Queuine tRNA-ribosyltransferase OS=Paraburkholderia dipogonis; OX = 1211383 GN=tgt PE=3 SV=1
MGDHVRPDNGLKFELLGTDGQARRGRVTLNHGVVETPIFMPVGTYGTVKAVQPRELEEMHAQIILGNTFHLWLRPGLETIEAHGGLHGFMGWKKPILTDSGGFQVFSLGDLRKITEDGVTFASPINGDKLFLSPEVSMQIQKVLNSDIVMQFDECTPYATNNVPTSHKEAADSMRMSMRWAQRSIDEFRRLGNPNALFGIVQGGMFEDLRDESLAGLAEKDFHGLAIGGLSVGEPKEDMMRVLNHIGPKLPANKPHYLMGVGTPEDLVAGVAAGVDMFDCVMPTRNARNGWLFTRFGDVKIRNAAHKNSLRPLDEQCGCYTCRNFTRGYLHHLHRVGEILGAQLNTIHNLHYYLELMQEIRDAIDARMFEAFRKRFHENRARGTAEAP

SEQ ID NO: 58655 - protein, 399 aa, unidentified
  source 1..399: note = Paraburkholderia eburnea
  REGION 1..399: note = tr|A0A2S4MMR2|A0A2S4MMR2_9BURK Queuine tRNA-ribosyltransferase OS=Paraburkholderia eburnea; OX = 1189126 GN=tgt PE=3 SV=1
MTDGQPNNACAEHGTYLGERPQNGLKFELLGTDGLARRGRVTLNHGVVETPIFMPVGTYGTVKATQPRELEEMKAQIILGNTFHLWLRPGLETIEAHGGLHRFMGWNRPILTDSGGFQVFSLGDLRKISEDGVRFASPVNGDKLFLSPEVSMQIQKVLNSDIVMQFDECTPYATNGVPTTHQEAADSMRMSMRWAQRSIDEFNRLGNPNALFGIVQGGMFEDLRDESLAGLSQMPFHGYAIGGLSVGEPKEDMMRVLQHIAPKLPADKPHYLMGVGTPEDLVAGVAAGVDMFDCVMPTRNARNGWIFTRFGDIKIRNATHKNSLRPLDEQCGCYTCRHFTRGYLHHLHRVGEILGAQLNTIHNLHYYLELMSDIRESIETKTFTAFRQRFAENRARGVD

SEQ ID NO: 58656 - protein, 376 aa, unidentified
  source 1..376: note = Paraburkholderia endofungorum
  REGION 1..376: note = tr|A0A2P5K9P1|A0A2P5K9P1_9BURK Queuine tRNA-ribosyltransferase OS=Paraburkholderia endofungorum; OX = 417203 GN=tgt PE=3 SV=1
MLKFDLLRTDGLARRGRLTLNHGTIDTPIFMPVGTYGTVKAMAPRELEDIRAQIILGNTFHLWLRPGLDTITAHGGLHRFMGWQRPILTDSGGFQVFSLGELRKITEDGVTFASPINGDRLFLSPEVSMQVQKVLNSDIVMQFDECTPYATDGVPTSHDAAARSMQMSLRWAKRSLDEFRRLANPNALFGIVQGGMYEALRDESLAGLSDIGFDGYAIGGLSVGEPKEDMLRVLQHIGPRLPVDKPHYLMGVGTPEDLVAGVAAGVDMFDCVMPTRNARNGWLFTRFGDLKIRNAMHRNDTRPLDESCACHTCRHFSRAYLHHLHRVGEILGAQLNTIHNLHYYLNLMQEIRDAIEAGTFNAFVTRFHADRARGVE

SEQ ID NO: 58657 - protein, 404 aa, unidentified
  source 1..404: note = Paraburkholderia fungorum
  REGION 1..404: note = tr|A0A1H0ZNC9|A0A1H0ZNC9_9BURK Queuine tRNA-ribosyltransferase OS=Paraburkholderia fungorum; OX = 134537 GN=tgt PE=3 SV=1
MTDGHISSTRADHGAYLGDHVRPENGLKFELLGTDGQARRGRVTLNHGVVETPIFMPVGTYGTVKAVQPRELHEMHAQIILGNTFHLWLRPGLETIEAHGGLHRFMGWNKPILTDSGGFQVFSLGDLRKITEDGVTFASPINGDKLFLSPEVSMQIQKVLNSDIVMQFDECTPYATNNVPTSHQEAADSMRMSMRWAQRSIDEFKRLGNPNALFGIVQGGMFEDLRDESLAGLAEKDFHGLAIGGLSVGEPKEDMMRVLNHIGPKLPADKPHYLMGVGTPEDLVAGVAAGVDMFDCVMPTRNARNGWLFTRFGDIKIRNAVHKNSLRPLDEQCGCYTCRNFTRGYLHHLHRVGEILGAQLNTIHNLHYYLELMQEMRDSIDAKMFEPFRKRFHENRARGVEQAP

SEQ ID NO: 58658 - protein, 401 aa, unidentified
  source 1..401: note = Paraburkholderia fungorum
  REGION 1..401: note = tr|A0A0D5VG08|A0A0D5VG08_9BURK Queuine tRNA-ribosyltransferase OS=Paraburkholderia fungorum; OX = 134537 GN=tgt PE=3 SV=1
MTDGHTHDTSGTCNTCASHGERPENGLKFELLGTDGQARRGRVTLNHGVVETPIFMPVGTYGTVKAVQPRELEEMHAQIILGNTFHLWLRPGLETIEAHGGLHGFMGWKKPILTDSGGFQVFSLGDLRKITEDGVTFASPINGDKLFLSPEVSMQIQKVLNSDIVMQFDECTPYATNNVPTSHQEAADSMRMSMRWAKRSINEFNRLGNPNALFGIVQGGMFEDLRDESLAGLAEMDFHGLAIGGLSVGEPKEDMMRVLNHIGPKLPADKPHYLMGVGTPEDLVAGVAAGVDMFDCVMPTRNARNGWLFTRFGDIKIRNAAHKNSLRPLDEQCGCYTCRNFTRGYLHHLHRVGEILGAQLNTIHNLHYYLELMQEMRDAIDAKLFGPFRQRFHENRARGID

SEQ ID NO: 58659 - protein, 404 aa, unidentified
  source 1..404: note = Paraburkholderia ginsengiterrae
  REGION 1..404: note = tr|A0A1A9N852|A0A1A9N852_9BURK Queuine tRNA-ribosyltransferase OS=Paraburkholderia ginsengiterrae; OX = 1462993 GN=tgt PE=3 SV=1
MTDGQTVSTRADHGAYLGDHVRPDNGLKFELLGTDGQARRGRVTLNHGVVETPIFMPVGTYGTVKAVQPRELEEMHAQIILGNTFHLWLRPGLETVEAHGGLHGFMGWKKPILTDSGGFQVFSLGDLRKITEDGVTFASPINGDKLFLSPEVSMQIQKVLNSDIVMQFDECTPYATNNVPTSHKEAAESMRMSMRWARRAIDEFRRLSNPNALFGIVQGGMFEDLRDESLAGLAEMDFHGLAIGGLSVGEPKEDMMRVLNHIGPKLPADKPHYLMGVGTPEDLVAGVAAGVDMFDCVMPTRNARNGWLFTRFGDVKIRNATHKNSLRPLDEQCGCYTCRNFTRGYLHHLHRVGEILGAQLNTIHNLHYYLELMQEMRDAIDAKMFEAFRKRFHEDRARGASEAP

SEQ ID NO: 58660 - protein, 391 aa, unidentified
  source 1..391: note = Paraburkholderia graminis
  REGION 1..391: note = tr|B1FWH3|B1FWH3_PARG4 Queuine tRNA-ribosyltransferase OS=Paraburkholderia graminis (strain ATCC 700544 / DSM 17151 / LMG 18924 / NCIMB 13744 / C4D1M) OX=396598 GN=t gt PE=3 SV=1
MTIGHQTQQPADGLKFELLGTDGQARRGRVTLNHGVVETPIFMPVGTYGTVKAVQPRELEEMHAQIILGNTFHLWLRPGLETIGAHGGLHGFMGWKKPILTDSGGFQVFSLGDLRKITEDGVTFASPINGDKLFLSPEVSMQIQKVLNSDIVMQFDECTPYATNNVPTSHKEAADSMRMSMRWAQRSIDEFRRLGNPNALFGIVQGGMFEDLRDESLAGLAEKDFHGLAIGGLSVGEPKEDMMRVLNHIGPKLPANKPHYLMGVGTPEDLVAGVAAGVDMFDCVMPTRNARNGWLFTRFGDIKIRNAAHKNSLRPLDEQCGCYTCRNFTRGYLHHLHRVGEILGAQLNTIHNLHYYLELMQEMRDAIDAKMFEPFRKRFHENRARGIDDAP

SEQ ID NO: 58661 - protein, 403 aa, unidentified
  source 1..403: note = Paraburkholderia hospita
  REGION 1..403: note = tr|A0A1H6P567|A0A1H6P567_9BURK Queuine tRNA-ribosyltransferase OS=Paraburkholderia hospita; OX = 169430 GN=tgt PE=3 SV=1
MTDGHNTTARADHGAYLGDHVRPDNGLKFELLKTDGQARRGRLTLNHGVVETPIFMPVGTYGTVKAIQPRELEEIHAQIILGNTFHLWLRPGLETIAAHGGLHGFMGWKRPILTDSGGFQVFSLGDLRKITEDGVTFASPINGDKLFLSPEVSMQIQKVLNSDIVMQFDECTPYATNGVPTSHQDAADSMRMSMRWATRSIDEFNRLGNPNALFGIVQGGMFEDLRDESLAGLSEIGFHGLAIGGLSVGEPKEDMMRVLNHIGPKLPADKPHYLMGVGTPEDLVAGVSAGVDMFDCVMPTRNARNGWLFTRFGDIKIRNATHKNSVRPLDEQCGCYTCRNFTRGYLHHLHRVGEILGAQLNTIHNLHYYLELMQEMRDAIDAQMFDAFRKLFHENRARGTEQS

SEQ ID NO: 58662 - protein, 403 aa, unidentified
  source 1..403: note = Paraburkholderia hospita
  REGION 1..403: note = tr|A0A244DVB8|A0A244DVB8_9BURK Queuine tRNA-ribosyltransferase OS=Paraburkholderia hospita; OX = 169430 GN=tgt PE=3 SV=1
MTDGHNTTARADHGAYLGDHVRPDNGLKFELLKTDGQARRGRLTLNHGVVETPIFMPVGTYGTVKAIQPRELEEIHAQIILGNTFHLWLRPGLETITAHGGLHGFMGWKRPILTDSGGFQVFSLGDLRKITEDGVTFASPINGDKLFLSPEVSMQIQKVLNSDIVMQFDECTPYATNGVPTSHQDAADSMRMSMRWAKRSIDEFNRLGNPNALFGIVQGGMFEDLRDESLAGLSEIGFHGLAIGGLSVGEPKEDMMRVLNHIGPKLPADKPHYLMGVGTPEDLVAGVSAGVDMFDCVMPTRNARNGWLFTRFGDIKIRNATHKNSVRPLDEQCGCYTCRNFTRGYLHHLHRVGEILGAQLNTIHNLHYYLELMQEMRDAIDAQMFDAFRKLFHENRARGTEQS

SEQ ID NO: 58663 - protein, 401 aa, unidentified; identical to SEQ ID NO: 58658
  source 1..401: note = Paraburkholderia insulsa
  REGION 1..401: note = tr|A0A2T1APU3|A0A2T1APU3_9BURK Queuine tRNA-ribosyltransferase OS=Paraburkholderia insulsa; OX = 1441714 GN=tgt PE=3 SV=1

SEQ ID NO: 58664 - protein, 411 aa, unidentified
  source 1..411: note = Paraburkholderia megapolitana
  REGION 1..411: note = tr|A0A1I3G9H0|A0A1I3G9H0_9BURK Queuine tRNA-ribosyltransferase OS=Paraburkholderia megapolitana; OX = 420953 GN=tgt PE=3 SV=1
MTDARPTPTAGDTHTPPQGGLAFELLTTDGAARRGRLTLNHGVVETPIFMPVGTYGTVKAIQPRELEEIRAQIILGNTFHLWLRPGLETIAAHGGLHGFMGWKRPILTDSGGFQVFSLGDLRKITEDGVTFASPINGDKLFLSPEVSMQVQKVLNSDVVMQFDECTPYATNGVPTSHQDAADSMRMSMRWAQRSIDEFRRLDNPNALFGIVQGGMFEDLRDESLAGLAEMDFHGLAIGGLSVGEPKEDMMRVLNHIGPKLPAHKPHYLMGVGTPEDLVAGVAAGVDMFDCVMPTRNARNGWLFTRFGDIKIRNATHRNSLRPLDEQCGCYTCRNFSRGYLHHLHRVGEILGAQLNTIHNLHYYLELMGEIRSAIETHTFDAFRIAFHENRARGVEEASAAAASSSARKTLQ

SEQ ID NO: 58665 - protein, 399 aa, unidentified
  source 1..399: note = Paraburkholderia monticola
  REGION 1..399: note = tr|A0A149Q0L5|A0A149Q0L5_9BURK Queuine tRNA-ribosyltransferase OS=Paraburkholderia monticola; OX = 1399968 GN=tgt PE=3 SV=1
MTLGHPSQQTAHERPQDDIGGLKFELLGTDGLARRGRVTLNHGVVETPIFMPVGTYGTVKAVQPRELEEMHAQIILGNTFHLWLRPGLETIEAHGGLHGFMGWNKPILTDSGGFQVFSLGDLRKITEDGVTFASPINGDRLFLSPEVSMQIQKVLNSDIVMQFDECTPYATNNIPTSHKDAAESMRMSMRWAQRSIDEFQRLGNPNALFGIVQGGMFEDLRDESLAGLAEKNFHGLAIGGLSVGEPKEDMMRILNHIGPKLPADKPHYLMGVGTPEDLVAGVAAGVDMFDCVMPTRNARNGWLFTRFGDVKIRNATHKNSLRPLDEQCGCYTCRNFTRGYLHHLHRVGEILGAQLNTIHNLHYYLELMQEMRDAIEAKLFDAFRKRFHEDRARGVEASS

SEQ ID NO: 58666 - protein, 411 aa, unidentified
  source 1..411: note = Paraburkholderia phenazinium
  REGION 1..411: note = tr|A0A1N6LI01|A0A1N6LI01_9BURK Queuine tRNA-ribosyltransferase OS=Paraburkholderia phenazinium; OX = 60549 GN=tgt PE=3 SV=1
MTDGHTHDTGAARAACPTCADHGGNPAERPANGLKFELLTTDGQARRGRLTLNHGVVETPIFMPVGTYGTVKAVQPRELEEMHAQIILGNTFHLWLRPGLETIGAHGGLHRFMGWNRPILTDSGGFQVFSLGDLRKITEDGVTFASPINGDKLFLSPEVSMQIQKVLNSDIVMQFDECTPYATNNVPTSHQDAADSMRMSMRWAQRSIDEFNGLGNPNALFGIVQGGMFEDLRDESLAGLAAMDFHGLAIGGLSVGEPKEDMMRVLNHIGPRLPADKPHYLMGVGTPEDLVAGVAAGVDMFDCVMPTRNARNGWLFTRFGDLKIRNATHKNSLRPLDETCGCYTCRHFTRGYLHHLHRVGEILGAQLNTIHNLHYYLELMGEIRVSIEAHEFEAFRKRFHENRARGVEQAA

SEQ ID NO: 58667 - protein, 411 aa, unidentified
  source 1..411: note = Paraburkholderia phenazinium
  REGION 1..411: note = tr|A0A1N6DZH9|A0A1N6DZH9_9BURK Queuine tRNA-ribosyltransferase OS=Paraburkholderia phenazinium; OX = 60549 GN=tgt PE=3 SV=1
MTEGHNHDTGASSANCPSCANHDGNSAERPDNGLKFELLNTDGQARRGRLTLNHGVVETPIFMPVGTYGTVKAVQPRELEEMHAQIILGNTFHLWLRPGLETIGAHGGLHRFMGWNRPILTDSGGFQVFSLGDLRKITEDGVTFASPINGDKLFLSPEVSMQIQKVLNSDIVMQFDECTPYATNNIPTSHKDAADSMRMSMRWAQRSINEFNGLGNPNALFGIVQGGMFEDLRDESLAGLGEMDFHGYAIGGLSVGEPKEDMMRVLNHIGPKLPAHKPHYLMGVGTPEDLVAGVAAGVDMFDCVMPTRNARNGWLFTRFGDVKIRNATHKNSLRPLDETCGCYTCRNFTRGYLHHLHRVGEILGAQLNTIHNLHYYLELMSEIRESIETQTFEAFRTRFHENRARGVEQAA

SEQ ID NO: 58668 - protein, 391 aa, unidentified
  source 1..391: note = Paraburkholderia phenoliruptrix
  REGION 1..391: note = tr|K0DID8|K0DID8_9BURK Queuine tRNA-ribosyltransferase OS=Paraburkholderia phenoliruptrix BR3459a OX=1229205 GN=tgt PE=3 SV=1
MTTGHPFQPPADGLHFELLGTDGAARRGRVTLNHGVVETPIFMPVGTYGTVKAVQPRELEEMHAQIILGNTFHLWLRPGLETIAAHGGLHGFMGWKKPILTDSGGFQVFSLGDLRKITEDGVTFASPINGDKLFLSPEVSMQIQKVLNSDIVMQFDECTPYATNNVPTSHKEAADSMRMSMRWAQRSIDEFRRLGNPNALFGIVQGGMFEDLRDESLAGLAEKDFHGLAIGGLSVGEPKEDMMRVLNHIGPKLPASKPHYLMGVGTPEDLVAGVAAGVDMFDCVMPTRNARNGWLFTRFGDIKIRNATHKNSLRPLDEQCGCYTCRNFTRGYLHHLHRVGEILGAQLNTIHNLHYYLELMQEMRDAIDAKMFEPFRKRFHENRARGVDEAP

SEQ ID NO: 58669 - protein, 400 aa, unidentified
  source 1..400: note = Paraburkholderia phymatum
  REGION 1..400: note = tr|B2JGG9|B2JGG9_PARP8 Queuine tRNA-ribosyltransferase OS=Paraburkholderia phymatum (strain DSM 17167 / CIP 108236 / LMG 21445 / STM815); OX = 391038 GN=tgt PE=3 SV=1
MTDGHRNAARADGAYLGDHVRPDNGLKFELLKTDGLARRGRLTLNHGVVETPIFQPVGTYGTVKAIQPRELEEIRAQIILGNTFHLWLRPGLETIAAHGGLHGFMGWKRPILTDSGGFQVFSLGDLRKITEDGVTFASPINGDKLFLSPEVSMQIQKVLNSDIVMQFDECTPYATNGVPTSHKDAADSMRMSMRWAKRSIDEFNRLGNPNALFGIVQGGMFEDLRDESLAGLSEIGFHGLAIGGLSVGEPKEDMMRVLNHIGPKLPADKPHYLMGVGTPEDLVAGVAAGVDMFDCVMPTRNARNGWLFTRFGDIKIRNATHKNSMRPLDEQCGCYTCRNFTRGYLHHLHRVGEILGAQLNTIHNLHYYLELMQEMRDAIDAQTFDVFRKLFHDNRARGTD

SEQ ID NO: 58670 - protein, 404 aa, unidentified
  source 1..404: note = Paraburkholderia phytofirmans
  REGION 1..404: note = tr|B2SX84|B2SX84_PARPJ Queuine tRNA-ribosyltransferase OS=Paraburkholderia phytofirmans (strain DSM 17436 / LMG 22146 / PsJN) OX=398527 GN=tgt; PE = 3 SV=1
MTDGQSVSPRADHGAYLGDHVRPDNGLNFELLGVDGLARRGRVTLNHGVVETPIFMPVGTYGTVKAVQPRELEEMHAQIILGNTFHLWLRPGLETIEAHGGLHGFMGWKKPILTDSGGFQVFSLGDLRKITEDGVTFASPINGDKLFLSPEVSMQIQKVLNSDIVMQFDECTPYATNNVPTSHQEAADSMRMSMRWAQRSIDEFRRLGNPNALFGIVQGGMFEDLRDESLAGLAEKDFHGLAIGGLSVGEPKEDMMRVLNHIGPKLPANKPHYLMGVGTPEDLVAGVAAGVDMFDCVMPTRNARNGWLFTRFGDVKIRNAAHKNSLRPLDEQCGCYTCRNFTRGYLHHLHRVGEILGAQLNTIHNLHYYLELMQEIRDAIDAKMFEAFRKRFHENRARGTAEAP

SEQ ID NO: 58671 - protein, 401 aa, unidentified
  source 1..401: note = Paraburkholderia piptadeniae
  REGION 1..401: note = tr|A0A1N7RMR8|A0A1N7RMR8_9BURK Queuine tRNA-ribosyltransferase OS=Paraburkholderia piptadeniae; OX = 1701573 GN=tgt PE=3 SV=1
MTDGHNNAARADHVAYLGDHVRPDNGLKFELLKTDGQARRGRLTLNHGVIETPIFMPVGTYGTVKAIQPRELEEIRAQIILGNTFHLWLRPGLETIAAHGGLHGFMGWKRPILTDSGGFQVFSLGDLRKITEDGVTFASPINGDKLFLSPEVSMQIQKVLNSDIVMQFDECTPYATNDVPTSHEDAADSMRMSMRWAKRSIDEFNRLGNPNALFGIVQGGMFEDLRDESLAGLSEIGFHGFAIGGLSVGEPKEDMMRVLNHIGPKLPADKPHYLMGVGTPEDLVAGVAAGVDMFDCVMPTRNARNGWLFTRYGDIKIRNATHKNSLRPLDEQCGCYTCRNFTRGYLHHLHRVGEILGAQLNTIHNLHYYLELMQEMRDAIGAQMFDTFKKLFHENRARGTD

SEQ ID NO: 58672 - protein, 398 aa, unidentified
  source 1..398: note = Paraburkholderia rhizosphaerae
  REGION 1..398: note = tr|A0A4R8LRY1|A0A4R8LRY1_9BURK Queuine tRNA-ribosyltransferase OS=Paraburkholderia rhizosphaerae; OX = 480658 GN=tgt PE=3 SV=1
MTDGHQHNHHADHLHDHTPPASGLKFELLKTDGQARRGRLTLNHGVVETPIFMPVGTYGTVKAIQPRELDEIRAQIILGNTFHLWLRPGLETIAAHGGLHAFMGWKRPILTDSGGFQVFSLGDLRKITEDGVTFASPINGDKLFLSPEVSMQIQKVLNSDIVMQFDECTPYATNGVPTTRDEAAASMRMSMRWAKRSVDEFQRLTNPNALFGIVQGGMFEDLRDESLAGLADMDFHGLAIGGLSVGEPKEDMMRVLEHVAPRLPAHKPHYLMGVGTPEDLVAGVAAGVDMFDCVMPTRNARNGWLFTRFGDIKIRNATHKNSLRPLDEQCGCYTCQHFTRGYLHHLHRVGEILGAQLNTIHNLHYYLELMQEIRDAIDAGLFDAFRKQFHENRARGVD

SEQ ID NO: 58673 - protein, 376 aa, unidentified
  source 1..376: note = Paraburkholderia rhizoxinica
  REGION 1..376: note = tr|E5AM66|E5AM66_PARRH Queuine tRNA-ribosyltransferase OS=Paraburkholderia rhizoxinica (strain DSM 19002 / CIP 109453 / HKI 454) OX=882378 GN=tgt; PE = 3 SV=1
MLKFDLLRTDGLARRGRLTLNHGTIDTPIFMPVGTYGTVKAMAPRELEDIRAQIILGNTFHLWLRPGLDTITAHGGLHRFMGWQRPILTDSGGFQVFSLGELRTITEDGVTFASPINGDRLFLSPEVSMQVQKVLNSDIVMQFDECTPYATDGVPTSHDATARSMQMSLRWAKRSLDEFRRLANPNALFGIVQGGMYEALRDESLAGLSDLGFDGYAIGGLSVGEPKEDMLRVLQHIGPRLPLDKPHYLMGVGTPEDLVAGVAAGIDMFDCVMPTRNARNGWLFTRFGDLKIRNAMHRNDTRPLDESCVCHTCRHFSRAYLHHLHRVGEILGAQLNTIHNLHYYLNLMQEIRDAIEAGTFNAFVTRFHADRARGVE

SEQ ID NO: 58674 - protein, 396 aa, unidentified
  source 1..396: note = Paraburkholderia rhynchosiae
  REGION 1..396: note = tr|A0A2N7WYE0|A0A2N7WYE0_9BURK Queuine tRNA-ribosyltransferase OS=Paraburkholderia rhynchosiae; OX = 487049 GN=tgt PE=3 SV=1
MTPGHQSPQATFERPANGLNFELLGTDGQARRSRVTLNHGVVETPIFMPVGTYGTVKAVQPRELEEMHAQIILGNTFHLWLRPGLETIEAHGGLHSFMGWDKPILTDSGGFQVFSLGDLRKITEDGVTFASPINGDKLFLSPEVSMQIQKVLNSDIVMQFDECTPYATNNVPTSHKEAADSMRMSMRWAQRSIDEFQRLGNPNALFGIVQGGMFEDLRDESLAGLAEKDFHGLAIGGLSVGEPKEDMMRVLNHIGPKLPANKPHYLMGVGTPEDLVAGVAAGIDMFDCVMPTRNARNGWLFTRFGDIKIRNAAHKNSLRPLDEQCGCYTCRNFTRGYLHHLHRVGEILGAQLNTIHNLHYYLELMQEMRDAIDVKMFEPFRKRFHENRARGIADAP

SEQ ID NO: 58675 - protein, 396 aa, unidentified
  source 1..396: note = Paraburkholderia ribeironis
  REGION 1..396: note = tr|A0A1N7S5J4|A0A1N7S5J4_9BURK Queuine tRNA-ribosyltransferase OS=Paraburkholderia ribeironis; OX = 1247936 GN=tgt PE=3 SV=1
MTDGHPSQQTATERPANGLKFELLGTDGQARRGRVTLNHGVVETPIFMPVGTYGTVKAVQPRELDEMHAQIILGNTFHLWLRPGLDTIEAHGGLHGFMGWKKPILTDSGGFQVFSLGDLRKITEDGVTFASPINGDKLFLSPEVSMQIQKVLNSDIVMQFDECTPYATNNVPTSHKDAAESMRMSMRWAQRSIDEFNRLGNPNALFGIVQGGMFEDLRDESLAGLAQMDFHGLAIGGLSVGEPKEDMMRVLNHIGPKLPADKPHYLMGVGTPEDLVAGVAAGVDMFDCVMPTRNARNGWLFTRFGDIKIRNATHKNSLRPLDEQCGCYTCRNFTRGYLHHLHRVGEILGAQLNTIHNLHYYLELMQEMRDAIDAKMFEPFRKRFHENRARGVEPAS

SEQ ID NO: 58676 - protein, 399 aa, unidentified
  source 1..399: note = Paraburkholderia sacchari
  REGION 1..399: note = tr|A0A0A6QDG8|A0A0A6QDG8_9BURK Queuine tRNA-ribosyltransferase OS=Paraburkholderia sacchari; OX = 159450 GN=tgt PE=3 SV=1
MTDGHQNSARAEHGAYLGERPQNGLKFELLGTDGLARRGRVTLNHGVVETPIFMPVGTYGTVKATQPRELEEMQARIILGNTFHLWLRPGLETIEAHGGLHRFMGWNRPILTDSGGFQVFSLGDLRKISEDGVRFASPVNGDKLFLSPEVSMQIQKVLNSDIVMQFDECTPYATNGVPTTHKEAADSMRMSMRWAKRSIDEFNRLGNPNALFGIVQGGMFEDLRDESLAGLSQMPFHGYAIGGLSVGEPKEDMMRVLEHIAPKLPADKPHYLMGVGTPEDLVAGVASGVDMFDCVMPTRNARNGWIFTRFGDIKIRNAVHRNSLRPLDEQCGCYTCRNFTRGYLHHLHRVGEILGAQLNTIHNLHYYLELMSEMRAAIETKTFEAFRKRFAENRARGVD

SEQ ID NO: 58677 - protein, 395 aa, unidentified
  source 1..395: note = Paraburkholderia sartisoli
  REGION 1..395: note = tr|A0A1H4DBF8|A0A1H4DBF8_9BURK Queuine tRNA-ribosyltransferase OS=Paraburkholderia sartisoli; OX = 83784 GN=tgt PE=3 SV=1
MTDGHQHATQTARPDNGLKFELLTTDGEARRGRVTLNHGVVETPIFMPVGTYGTVKAVQPRELEEMHAQIILGNTFHLWLRPGLETVAAHGGLHAFMGWKKPILTDSGGFQVFSLGDLRKITEDGVTFASPINGDKLFLSPEVSMQVQKVLNSDIVMQFDECTPYATNDVPTSHQEAADSMRMSMRWAKRSIDEFNRLGNPNALFGIVQGGMFEDLRDESLAGLSDIDFHGFAIGGLSVGEPKEDMMRVLNHIAPKLPANKPHYLMGVGTPEDLVAGVAAGVDMFDCVMPTRNARNGWLFTRFGDIKIRNATHRNSLRPLDERCGCYTCRNFTRGYLHHLHRVGEILGAQLNTIHNLHYYLELMQEMRDAIEAHMFDAFRKLFHENRARGVEGPA

SEQ ID NO: 58678 - protein, 401 aa, unidentified
  source 1..401: note = Paraburkholderia sediminicola
  REGION 1..401: note = tr|A0A3R7D447|A0A3R7D447_9BURK Queuine tRNA-ribosyltransferase OS=Paraburkholderia sediminicola; OX = 458836 GN=tgt PE=3 SV=1
MTDGHTHDTSGTCSTCESTHSRPENGLKFELLGTDGQARRGRVTLNHGVVETPIFMPVGTYGTVKAVQPRELKEMHAQIILGNTFHLWLRPGLETIEAHGGLHDFMGWKKPILTDSGGFQVFSLGDLRKITEDGVTFASPINGDKLFLSPEVSMQIQKVLNSDIVMQFDECTPYATNNVPTSHQDAADSMRMSMRWAQRSIDEFNRLGNPNALFGIVQGGMFEDLRDESLAGLAEMDFHGLAIGGLSVGEPKEDMMRVLNHIGPKLPADKPHYLMGVGTPEDLVAGVAAGVDMFDCVMPTRNARNGWLFTRFGDIKIRNAAHKNSLRPLDEQCGCYTCRNFTRGYLHHLHRVGEILGAQLNTIHNLHYYLELMQEMRDAIDAKLFEPFRKRFHENRARGID

SEQ ID NO: 58679 - protein, 401 aa, unidentified
  source 1..401: note = Paraburkholderia sediminicola
  REGION 1..401: note = tr|A0A495GDF1|A0A495GDF1_9BURK Queuine tRNA-ribosyltransferase OS=Paraburkholderia sediminicola; OX = 458836 GN=tgt PE=3 SV=1
MTDGHTHDTSGTCSTCESTHSRPENGLKFELLGTDGQARRGRVTLNHGVVETPIFMPVGTYGTVKAVQPRELEEMHAQIILGNTFHLWLRPGLETIEAHGGLHDFMGWKKPILTDSGGFQVFSLGDLRKITEDGVTFASPINGDKLFLSPEVSMQIQKVLNSDIVMQFDECTPYATNNVPTSHQEAADSMRMSMRWAQRSIDEFNRLGNPNALFGIVQGGMFEDLRDESLAGLAEMDFHGLAIGGLSVGEPKEDMMRVLNHIGPKLPADKPHYLMGVGTPEDLVAGVAAGVDMFDCVMPTRNARNGWLFTRFGDIKIRNAAHKNSLRPLDEQCGCYTCRNFTRGYLHHLHRVGEILGAQLNTIHNLHYYLELMQEMRDAIDAKLFEPFRKRFHENRARGID

SEQ ID NO: 58680 - protein, 399 aa, unidentified
  source 1..399: note = Paraburkholderia silvatlantica
  REGION 1..399: note = tr|A0A2V4T807|A0A2V4T807_9BURK Queuine tRNA-ribosyltransferase OS=Paraburkholderia silvatlantica; OX = 321895 GN=tgt PE=3 SV=1
MTDGQQSNARAEHGAYLGERPQNGLKFELLGTDGLARRGRVTLNHGVVETPIFMPVGTYGTVKATQPRELEEMKAQIILGNTFHLWLRPGLETIEAHGGLHRFMGWNRPILTDSGGFQVFSLGDLRKISEDGVRFASPVNGDKLFLSPEVSMQIQKVLNSDIVMQFDECTPYATNGVPTTHKEAADSMRMSMRWAQRSIDEFNRLGNPNALFGIVQGGMFEDLRDESLAGLSQMPFHGYAIGGLSVGEPKEDMMRVLEHVAPKLPADKPHYLMGVGTPEDLVAGVASGVDMFDCVMPTRNARNGWIFTRFGDIKIRNAVHRNSLRPLDEQCGCYTCRNFTRGYLHHLHRVGEILGAQLNTIHNLHYYLELMSEMRAAIETKTFAAFRQRFAAQRARGVD

SEQ ID NO: 58681 - protein, 386 aa, unidentified
  source 1..386: note = Paraburkholderia sp.
  REGION 1..386: note = tr|A0A4R1J1J3|A0A4R1J1J3_9BURK Queuine tRNA-ribosyltransferase OS=Paraburkholderia sp. BL8N3; OX = 1938808 GN=tgt PE=3 SV=1
MTDGHTPPANGLKFDLLATDGQARRGRLTLNHGVVETPIFMPVGTYGTVKAIQPRELEEIRAQIILGNTFHLWLRPGLETIGSHGGLHAFMNWKRPILTDSGGFQVFSLGELRKITEDGVTFASPINGDKLFLSPEISMQIQKVLNSDIVMQFDECTPYATSGVPTSHQDAADSMRMSMRWAKRSVDEFGRLGNPNALFGIVQGGMFEDLREESLAGLADIGFHGLAIGGLSVGEPKEDMMRVLNHIGPKLPADKPHYLMGVGTPEDLVAGVAAGVDMFDCVMPTRNARNGWLFTRFGDVKIRNASHKNSLKPLDESCGCYTCANFTRGYLHHLHRVGEILGAQLNTIHNLHYYLQLMSEIRESIENHTFDTFRKHFYENRARGID

SEQ ID NO: 58682 - protein, 373 aa, unidentified
  source 1..373: note = Paraburkholderia sp.
  REGION 1..373: note = tr|A0A372K3R0|A0A372K3R0_9BURK Queuine tRNA-ribosyltransferase OS=Paraburkholderia sp. DHOC27; OX = 2303330 GN=tgt PE=3 SV=1
MTTDGQARRGRLTLNHGVVETPIFMPVGTYGTVKAVQPRELEEMHAQIILGNTFHLWLRPGLETVAAHGGLHSFMGWKKPILTDSGGFQVFSLGDLRKITEDGVTFASPINGDKLFLSPEVSMQIQKVLNSDIVMQFDECTPYATNNIPTSHQEAADSMRMSMRWAKRSINEFNALGNPNALFGIVQGGMFEDLRDESLAGLAEMDFHGLAIGGLSVGEPKEDMMRVLNHIGPKLPANKPHYLMGVGTPEDLVAGVAAGVDMFDCVMPTRNARNGWLFTRFGDVKIRNATHKNSLRPLDESCGCYTCRNFTRGYLHHLHRVGEILGAQLNTIHNLHYYLELMSEIRASIDAHAFEAFRQRFHENRARGVEQTS

SEQ ID NO: 58683 - protein, 397 aa, unidentified
  source 1..397: note = Paraburkholderia sprentiae
  REGION 1..397: note = tr|A0A1I9YHJ4|A0A1I9YHJ4_9BURK Queuine tRNA-ribosyltransferase OS=Paraburkholderia sprentiae WSM5005 OX=754502 GN=tgt PE=3 SV=1
MTLGHPSSQRPAHERPENGLKFELLGTDGLARRGRVTLNHGVVETPIFMPVGTYGTVKAVQPRELDEMHAQIILGNTFHLWLRPGLETIDAHGGLHGFMGWKKPILTDSGGFQVFSLGDLRKITEDGVTFASPINGDRLFLSPEVSMQIQKVLNSDIVMQFDECTPYATNNIPTSHKEAAESMRMSMRWAQRSIDEFQRLGNPNALFGIVQGGMFEDLRDESLAGLAEKNFHGLAIGGLSVGEPKEDMMRVLNHIGPKLPADKPHYLMGVGTPEDLVAGVAAGVDMFDCVMPTRNARNGWLFTRFGDVKIRNATHKNSLRPLDEQCGCYTCRNFTRGYLHHLHRVGEILGAQLNTIHNLHYYLELMQEMRDAIEAKLFDAFRKRFHENRARGVEPSS

SEQ ID NO: 58684 - protein, 396 aa, unidentified
  source 1..396: note = Paraburkholderia susongensis
  REGION 1..396: note = tr|A0A1X7KMX9|A0A1X7KMX9_9BURK Queuine tRNA-ribosyltransferase OS=Paraburkholderia susongensis; OX = 1515439 GN=tgt PE=3 SV=1
MTLGHPSQQPAHERPENGLKFELLGTDGLARRGRVTLNHGVVETPIFMPVGTYGTVKAVQPRELDEMHAQIILGNTFHLWLRPGLETIEAHGGLHGFMGWKKPILTDSGGFQVFSLGDLRKITEDGVTFASPINGDRLFLSPEVSMQIQKVLNSDIVMQFDECTPYATDNIPTSHKEAAESMRMSMRWAQRSIDEFQRLGNPNALFGIVQGGMFEDLRDESLAGLAEKNFHGLAIGGLSVGEPKEDMMRVLNHIGPKLPANKPHYLMGVGTPEDLVAGVAAGVDMFDCVMPTRNARNGWLFTRFGDIKIRNATHRNSLRPLDEQCGCYTCRNFTRGYLHHLHRVGEILGAQLNTIHNLHYYLELMQEMRDAIDAKLFDAFRKGFHEDRARGVEPSS

SEQ ID NO: 58685 - protein, 403 aa, unidentified; identical to SEQ ID NO: 58661
  source 1..403: note = Paraburkholderia terrae
  REGION 1..403: note = tr|I5D1V3|I5D1V3_9BURK Queuine tRNA-ribosyltransferase OS=Paraburkholderia terrae BS001; OX = 1171375 GN=tgt PE=3 SV=1

SEQ ID NO: 58686 - protein, 403 aa, unidentified
  source 1..403: note = Paraburkholderia terrae
  REGION 1..403: note = tr|A0A2I8ELT8|A0A2I8ELT8_9BURK Queuine tRNA-ribosyltransferase OS=Paraburkholderia terrae; OX = 311230 GN=tgt PE=3 SV=1
MTDGHNNAARADHGAYLGDHVRPDNGLKFELLKTDGQARRGRLTLNHGVVETPIFMPVGTYGTVKAIQPRELEEIRAQIILGNTFHLWLRPGLETIAAHGGLHGFMGWKRPILTDSGGFQVFSLGDLRKITEDGVTFASPINGDKLFLSPEVSMQIQKVLNSDIVMQFDECTPYATNGVPTSHQDAADSMRMSMRWAKRSIDEFNRLANPNALFGIVQGGMFEDLRDESLAGLSEIGFHGLAIGGLSVGEPKEDMMRVLNHIGPKLPADKPHYLMGVGTPEDLVAGVSAGVDMFDCVMPTRNARNGWLFTRFGDIKIRNATHKNSVRPLDEQCGCYTCRNFTRGYLHHLHRVGEILGAQLNTIHNLHYYLELMQEMRDAIDAQMFDAFRKLFHENRARGTEQS

SEQ ID NO: 58687 - protein, 401 aa, unidentified
  source 1..401: note = Paraburkholderia terricola
  REGION 1..401: note = tr|A0A1M6MG48|A0A1M6MG48_9BURK Queuine tRNA-ribosyltransferase OS=Paraburkholderia terricola; OX = 169427 GN=tgt PE=3 SV=1
MTEGHTHDTRGSGNTGGNTAPRPDNGLAFELLGTDGQARRGRVTLNHGVVETPIFMPVGTYGTVKAVQPRELEEMHAQIILGNTFHLWLRPGLETIEAHGGLHGFMGWKKPILTDSGGFQVFSLGDLRKITEDGVTFASPINGDKLFLSPEVSMQIQKVLNSDIVMQFDECTPYATNNVPTSHQEAADSMRMSMRWAKRSIDEFNRLGNPNALFGIVQGGMFEDLRDESLAGLAEMDFHGLAIGGLSVGEPKEDMMRVLNHIGPKLPADKPHYLMGVGTPEDLVAGVAAGVDMFDCVMPTRNARNGWLFTRFGDIKIRNAAHKNSLRPLDEQCGCYTCRNFTRGYLHHLHRVGEILGAQLNTIHNLHYYLELMQEMRDAIDAKMFEPFRRRFQENRARGID

SEQ ID NO: 58688 - protein, 399 aa, unidentified
  source 1..399: note = Paraburkholderia tropica
  REGION 1..399: note = tr|A0A1A5X1B1|A0A1A5X1B1_9BURK Queuine tRNA-ribosyltransferase OS=Paraburkholderia tropica; OX = 92647 GN=tgt PE=3 SV=1
MTDGQQSNARAEHGAYLGERPQNGLKFELLGTDGLARRGRVTLNHGVVETPIFMPVGTYGTVKATQPRELEEMKAQIILGNTFHLWLRPGLETIEAHGGLHRFMGWNRPILTDSGGFQVFSLGDLRKISEDGVRFASPVNGDKLFLSPEVSMQIQKVLNSDIVMQFDECTPYATNGVPTTHKEAADSMRMSMRWAQRSIDEFNRLGNPNALFGIVQGGMFEDLRDESLAGLSQMPFHGYAIGGLSVGEPKEDMMRVLQHIAPKLPADKPHYLMGVGTPEDLVAGVAAGVDMFDCVMPTRNARNGWIFTRFGDIKIRNATHKNSLRPLDEQCGCYTCRHFTRGYLHHLHRVGEILGAQLNTIHNLHYYLELMSEMRAAIETKTFEAFRQRFAENRARGVD

SEQ ID NO: 58689 - protein, 396 aa, unidentified
  source 1..396: note = Paraburkholderia tuberum
  REGION 1..396: note = tr|A0A1H1EMH3|A0A1H1EMH3_9BURK Queuine tRNA-ribosyltransferase OS=Paraburkholderia tuberum; OX = 157910 GN=tgt PE=3 SV=1
MTLGHPLQQPAHERPQNGLRFELLGTDGLARRGRVTLNHGVVETPIFMPVGTYGTVKAVQPRELDEMHAQIILGNTFHLWLRPGLETIEAHGGLHRFMGWKKPILTDSGGFQVFSLGDLRKITEDGVTFASPINGDRLFLSPEVSMQIQKVLNSDIVMQFDECTPYATDNIPTSHKEAAESMRMSMRWAQRSIDEFERLGNPNALFGIVQGGMFEDLRDESLAGLAQKNFHGLAIGGLSVGEPKEDMMRILNHIGPKLPADKPHYLMGVGTPEDLVAGVAAGVDMFDCVMPTRNARNGWLFTRFGDIKIRNATHRNSLRPLDEQCGCYTCRNFTRGYLHHLHRVGEILGAQLNTIHNLHYYLELMQEMRDAIEAKLFETFRKRFHEDRARGVEPSS

SEQ ID NO: 58690 - protein, 399 aa, unidentified
  source 1..399: note = Paraburkholderia unamae
  REGION 1..399: note = tr|A0A328XSM8|A0A328XSM8_9BURK Queuine tRNA-ribosyltransferase OS=Paraburkholderia unamae; OX = 219649 GN=tgt PE=3 SV=1
MTDGHQNNARAEHGTYLGERPQNGLKFELLGTDGLARRGRVTLNHGVVETPIFMPVGTYGTVKATQPRELEEMKAQIVLGNTFHLWLRPGLETIEAHGGLHRFMGWNRPILTDSGGFQVFSLGDLRKISEDGVRFASPVNGDKLFLSPEVSMQIQKVLNSDIVMQFDECTPYATNGVPTTHKEAADSMRMSMRWAQRSIDEFNRLGNPNALFGIVQGGMFEDLRDESLAGLSQMPFHGYAIGGLSVGEPKEDMMRVLEHIAPKLPADKPHYLMGVGTPEDLVAGVASGVDMFDCVMPTRNARNGWIFTRFGDVKIRNATHKNSLRPLDEQCGCYTCRNFTRGYLHHLHRVGEILGAQLNTIHNLHYYLELMSEMRSAIETKTFAAFRQRFAEQRARGVD

SEQ ID NO: 58691 - protein, 396 aa, unidentified
  source 1..396: note = Paraburkholderia xenovorans
  REGION 1..396: note = tr|Q145I0|Q145I0_PARXL Queuine tRNA-ribosyltransferase OS=Paraburkholderia xenovorans (strain LB400) OX=266265 GN=tgt PE=3 SV=1
MTDGHLSQDATHERPENGLKFELLGVDGQARRGRVALNHGVVETPIFMPVGTYGTVKAVQPRELEEMHAQIILGNTFHLWLRPGLETIEAYGGLHGFMGWKKPILTDSGGFQVFSLGDLRKITEDGVTFASPINGDKLFLSPEVSMQIQKVLNSDIVMQFDECTPYATHNVPTSHQEAADSMRMSMRWAQRSIDEFNRLGNPNALFGIVQGGMFEDLRDESLAGLAEKDFHGLAIGGLSVGEPKEDMMRVLNHIGPKLPANKPHYLMGVGTPEDLVAGVAAGVDMFDCVMPTRNARNGWLFTRFGDIKIRNAAHRNSLRPLDEQCGCYTCRNFTRGYLHHLHRVGEILGAQLNTIHNLHYYLELMQEIRDAIDAKMFEPFRKRFHENRARGTAEAP

SEQ ID NO: 58692 - protein, 378 aa, unidentified
  source 1..378: note = Paracandidimonas soli
  REGION 1..378: note = tr|A0A4R3V537|A0A4R3V537_9BURK Queuine tRNA-ribosyltransferase OS=Paracandidimonas soli; OX = 1917182 GN=tgt PE=3 SV=1
MTGLDFSLLATDGAARRGRITLNHGVVETPIFMPVGTYGSVKAMLPHELDDIGAQIVLGNTFHLWLRPGTEIMEKHGGLHGFMQWNKPILTDSGGFQVFSLDGLRKITEEGVKFASPIDGSRLFLTPEESMRIQRALNSDIAMVFDECTPYLIDDRPATPEEAARSMRMSLRWARRSRDAFLQSENPNALFGIVQGGMFESLRDESLAGLTDIGFEGYAIGGLSVGEPKEDMMRILSHVAPRLPENAPRYLMGVGTPEDLVEGVARGIDMFDCVMPTRNARNGWLFTRYGDIKIRNARYRDDTRPLDPSCGCHTCGHFSRAYLHHLQKANEITGARLNTLHNLHFYLTLMTEMRQAIKEQRFQAWRARFLEDRARGIA

SEQ ID NO: 58693 - protein, 369 aa, Parachlamydia acanthamoebae
  REGION 1..369: note = tr|F8L2I3|F8L2I3_PARAV Queuine tRNA-ribosyltransferase OS=Parachlamydia acanthamoebae (strain UV7) OX=765952 GN=tgt PE=3 SV=1
MSSLKFTVHKSAANCQARTGLLKTAHGDIETPVFMPVGTRAAVKTLTNQQLIDIGAQIILGNTYHLMLRPNMDIMAKAGGLHRFMNWQRPILTDSGGFQVFSLASLNQVANEGVYFQSHIDGSQLFLGPTESMQIQKVLGADIVMTFDQCSPYPCERSKMEQALDRTHLWAKVCRDFELQSYQNLFGIVQGGVYPDLRHQSAEILSSLNCEGYAIGGLAVGEPSDIMNEIIEHTVPCLPNDKPRYLMGVGTPRNIIEAVMRGIDMFDCVMPTRNARNGTAFTWSGKVTIKAGRYADDFSPLDPELDCYTSQFSKAYIRHLLNVDEITGLTLVSMQNLAFYLDFMAKLRQAIQNDTLNEYYQKICAIYPN

SEQ ID NO: 58694 - protein, 388 aa, Parachlamydia acanthamoebae
  REGION 1..388: note = tr|A0A0C1C6R1|A0A0C1C6R1_9BACT Queuine tRNA-ribosyltransferase OS=Parachlamydia acanthamoebae; OX = 83552 GN=tgt PE=3 SV=1
MRYISFYEGSLSRELGKTIMSSLKFTVHKSAANCQARTGLLKTAHGDIETPVFMPVGTRAAVKTLTNQQLIDIGAQIILGNTYHLMLRPNMDIMAKAGGLHRFMNWQRPILTDSGGFQVFSLASLNQVANEGVYFQSHIDGSQLFLGPTESMQIQKVLGADIVMTFDQCSPYPCERSKMEQALDRTHLWAKVCRDFELQSYQNLFGIVQGGVYPDLRHQSAEILSSLNCEGYAIGGLAVGEPSDIMNEIIEHTVPCLPNDKPRYLMGVGTPRNIIEAVMRGIDMFDCVMPTRNARNGTAFTWSGKVTIKAGRYADDFSPLDPELDCYTSQFSKAYIRHLLNVDEITGLTLVSMQNLAFYLDFMAKLRQAIQNDTLNEYYQKICAIYPN

SEQ ID NO: 58695 - protein, 369 aa, Parachlamydia sp.
  REGION 1..369: note = tr|A0A2H9SSS3|A0A2H9SSS3_9BACT Queuine tRNA-ribosyltransferase OS=Parachlamydia sp. OX=2052048; GN = tgt PE=3 SV=1
MSSLNFTVHKTEASTQARLGTLKTTHGIIETPVFMPVGTRAAVKTLTNQQLLDIGAQIILGNTYHLMLRPNMDIMRKAGGLHKFMNWDHPILTDSGGFQVFSLASLNQVTNEGVYFQSHIDGTQLFLGPNESMDIQKVLGADIVMAFDQCSPYPCERAQMELALQRTHDWAKTCRNFELQAHQSLFGIVQGGVYPDLRVRSAQVLSDMNFDGYAIGGLAVGEPSETMNEMIEQTIPHLSALKPRYLMGVGTPRNIIEAVMRGIDMFDCVMPTRNARNGTAFTWGGKITIKAGRYAEDFSPLDPELDCYASKFSKAYIRHLLNVDEITGLTLVSMQNLAFYLDFMAQLRQAIKNDKLNDYYQKICAVYPI

SEQ ID NO: 58696 - protein, 381 aa, unidentified
  source 1..381: note = Parachlamydiales bacterium
  REGION 1..381: note = tr|A0A3D2Q8K5|A0A3D2Q8K5_9BACT Queuine tRNA-ribosyltransferase OS=Parachlamydiales bacterium; OX = 2052178 GN=tgt PE=3 SV=1
MSPCDSFPFCFEILHRSSRSRARVGKIRTPHGTIDTPNFVAVGTNGTIKALDHATLQDLKLQLLFCNTYHLMVQPGTETIGKAGGLHRFIQRSLPLITDSGGFQVFSLAYGGVANELKSRGTKKREGSVLKVTEEGVLFRSYRDGSKLLLTPESSIQAQKEMGADIIIPLDELPPYHISKENLILSLERTHRWEERSLKSHLQNPKNQAIYGVIHGGIDQGLRQKSCSFLSSLPFDGFAIGGSIGKNREEMTELLSFLTPRLPQEKPVHLLGIGDLASLTRLLPLGIDTFDSSYPTRAARHGYLFTMNGTLDITKGIYRSDFSPVDPECSCRTCAHSHRAYLHHLFKAKEITALTLCTLHNLHFMIEWMAKVRRAICADLL

SEQ ID NO: 58697 - protein, 381 aa, unidentified
  source 1..381: note = Parachlamydiales bacterium
  REGION 1..381: note = tr|A0A351IQD8|A0A351IQD8_9BACT Queuine tRNA-ribosyltransferase OS=Parachlamydiales bacterium; OX = 2052178 GN=tgt PE=3 SV=1
MSPCDSFPFCFEILHRSSRSRARVGKIRTPHGTIDTPNFVAVGTNGTIKALDHATLQDLKLQLLFCNTYHLMVQPGTETISKAGGLHRFIQRSLPLITDSGGFQVFSLAYGGVANELKSRGTKKREGSVLKVTEEGVLFRSYRDGSKLLLTPESSIQAQKEMGADIIIPLDELPPYHISKENLILSLERTHRWEERSLKSHLQNPKNQAIYGVIHGGIDQGLRQKSCSFLSSLPFDGFAIGGSIGKNREEMTELLSFLTPRLPQEKPVHLLGIGDLASLTRLLPLGIDTFDSSYPTRAARHGYLFTMNGTLDITKGIYRSDFSPVDPECSCRTCAHSHRAYLHHLFKAKEITALTLCTLHNLHFMIEWMAKVRRAICADLL

SEQ ID NO: 58698 - protein, 373 aa, unidentified
  source 1..373: note = Paraclostridium benzoelyticum
  REGION 1..373: note = tr|A0A0M3DHQ1|A0A0M3DHQ1_9FIRM Queuine tRNA-ribosyltransferase OS=Paraclostridium benzoelyticum; OX = 1629550 GN=tgt PE=3 SV=1
MSAVRYELIKTCKQSGARLGRLHTPHGVIETPIFMPVGTQATVKSMTPEELKEIGSQIILSNTYHLYMRPGHDLVKEAGGLHKFMNWDKPILTDSGGFQVFSLGPLRKITEEGVHFRSHIDGSKHFISPEKAMEIQNALGSDIMMAFDECAPYPADRDYVKNSLERTTRWLERCKEAHKNTENQALFGIIQGGMYKDLREQSAREVLALDLPGYAVGGLSVGEPKDLMYEVLDYTVPLMPEDKPRYLMGVGSPDDLIEGVIRGIDMFDCVLPTRIARNGTAMTSEGKVVVRNAKYARDFGPLDPNCDCYCCRNYTRAYIRHLVKANEILAARLITTHNLHFLLDLMKQVRQAIMEDRLLDFRKEFFQKYGYEL

SEQ ID NO: 58699 - protein, 373 aa, unidentified
  source 1..373: note = Paraclostridium bifermentans
  REGION 1..373: note = tr|A0A1X2JGB8|A0A1X2JGB8_PARBF Queuine tRNA-ribosyltransferase OS=Paraclostridium bifermentans; OX = 1490 GN=tgt PE=3 SV=1
MSAVRYELIKTCKQSGARLGRLHTPHGVIETPIFMPVGTQATVKSMTPEELKEIGSQIILSNTYHLYMRPGHDLVKEAGGLHKFMNWDKPILTDSGGFQVFSLGPLRKITEEGVNFRSHIDGSKHFISPEKAMEIQNALGSDIMMAFDECAPYPADREYVKNSLERTTRWLERCKEAHKNTENQALFGIIQGGMYKDLREQSAREVLALDLPGYAVGGLSVGEPKDLMYEVLDYTVPLMPEDKPRYLMGVGSPDDLIEGVIRGIDMFDCVLPTRIARNGTAMTSEGKVVVRNAKYARDFGPLDPNCDCYCCRNYTRAYIRHLVKANEILAARLITTHNLHFLLDLMKQVRQAIMEDRLLDFRKEFFQKYGYEL

SEQ ID NO: 58700 - protein, 373 aa, unidentified; identical to SEQ ID NO: 58699
  source 1..373: note = Paraclostridium bifermentans
  REGION 1..373: note = tr|T4VWP5|T4VWP5_PARBF Queuine tRNA-ribosyltransferase OS=Paraclostridium bifermentans ATCC 19299 OX=1233170 GN=tgt PE=3 SV=1

SEQ ID NO: 58701 - protein, 376 aa, Paracoccus aestuarii
  REGION 1..376: note = tr|A0A418ZVE8|A0A418ZVE8_9RHOB Queuine tRNA-ribosyltransferase OS=Paracoccus aestuarii OX=453842; GN = tgt PE=3 SV=1
MTTRFNFTLQATDGAARTGVIDTPRGAIRTPAFMPVGTAATVKAMLPESVAATGADILLGNTYHLMLRPTAERIARLGGLHRFMNWSKPILTDSGGFQVMSLAGLRKLTEEGVTFSSHVDGSKHHLTPERSMEIQRLLGSDIVMCFDECPALPATEAEVAASMRMSMRWAERSRDAFGDRPGHALFGIMQGGVTRDLREESAQALQAIGFDGYAVGGLAVGEGQEAMFGVLDYAPGFLPVDKPRYLMGVGKPDDIVGAVQRGIDMMDCVLPSRSGRTGQAWTPRGQVNIKNARHQDDPRPLDEDCTCPCCTGYSRAYLHHVFRAREMISGMLLTWHNLHYYQQLMAGLREAIAAGRLDDFVADFHARRAEGDIEPI

SEQ ID NO: 58702 - protein, 376 aa, Paracoccus alcaliphilus
  REGION 1..376: note = tr|A0A1H8E7V8|A0A1H8E7V8_9RHOB Queuine tRNA-ribosyltransferase OS=Paracoccus alcaliphilus; OX = 34002 GN=tgt PE=3 SV=1
MTDRFSFTLDATDGKARTGRIDTPRGTIRTPAFMPVGTAATVKAMLPESVRATGADILLGNTYHLMLRPGAERIARLGGLHRFMNWDRPILTDSGGFQVMSLAGLRKLTEEGVTFASHIDGSKHMLSPETSMEIQRLLGSDIVMCFDECPALPADKQTVAASMRMSMRWAQRSRDAFGDRPGHALFGIMQGGVTRELREESAEALKAIGFDGYAIGGLAVGEGQEAMFGVLDYAPGCLPADKPRYLMGVGKPDDIVGAVQRGVDMMDCVLPSRSGRTGQAWTRRGQLNIKNARHADDPRPLDADCSCPACTGYSRAYLHHVFRAQEMISGMLLTWHNLHYFQELMAGLRAAIAAGMLDDFVADFHAQRAGGDIPPL

SEQ ID NO: 58703 - protein, 375 aa, Paracoccus alkenifer
  REGION 1..375: note = tr|A0A1H6JRP6|A0A1H6JRP6_9RHOB Queuine tRNA-ribosyltransferase OS=Paracoccus alkenifer OX=65735; GN = tgt PE=3 SV=1
MSGFSFTLNASDGRARTGVIRTPRGEIRTPAFMPVGTAGTVKAMLPESVRATGADILLGNTYHLMLRPGAERIARLGGLHRFMNWSRPILTDSGGFQVMSLSELRKLTEDGVTFASHVDGSRHFLSPETSMEIQRLLGSDIVMAFDECPALPATHARQAEAMRLSMRWAQRSRDAFGDRPGHALFGIMQGGVERDLREESAEALRGIGFDGYAIGGLAVGEGQAAMLGVLDYATELLPAGQPRYLMGVGKPDDIVGAVQRGIDMMDCVLPSRSGRTGQAWTRRGQINIKNARHADDPRPLDEDCTCPACSGYSRAYLHHVFRAGEMISGMLLTWHNLHYYQQIMQQMREAIAAGTLDAWVAGFHAMRAQGDIAPL

SEQ ID NO: 58704 - protein, 381 aa, Paracoccus aminophilus
  REGION 1..381: note = tr|S5XLB0|S5XLB0_PARAH Queuine tRNA-ribosyltransferase OS=Paracoccus aminophilus JCM 7686; OX = 1367847 GN=tgt PE=3 SV=1
MSTKFSFSVSAVDGQARTGVISTPRGEIRTPAFMPVGTAATVKAMMPESVRATGADILLGNTYHLMLRPGADRIERLGGLHKFMNWPRPILTDSGGFQVMSLSGLRKLTEEGVTFSSHVDGSKHFLSPETSMEIQRKLGSDIVMCFDECPALPATEAEVATSMRMSMRWAQRSRDAFGDRPGHALFGIQQGGVTRELREESAEALRAIGFDGYAIGGLAVGEGQEAMFGVLDYAPGFLPEDKPRYLMGVGKPDDIVGAVVRGVDMMDCVLPSRSGRTGQAWTRRGQVNIKNARHADDPRPLDEHCSCPACSQYSRAYLHHVFRSGEMISGMLLTWHNLHYFQELMAGLRGAIAAGRLGAFVAEFESQRAEGDIEPLTVERG

SEQ ID NO: 58705 - protein, 380 aa, Paracoccus aminovorans
  REGION 1..380: note = tr|A0A1I2YWM1|A0A1I2YWM1_9RHOB Queuine tRNA-ribosyltransferase OS=Paracoccus aminovorans OX=34004; GN = tgt PE=3 SV=1
MSDRFSFSVHATDGRARTGAIRTPRGEIRTPAFMPVGTAATVKAMLPESVRATGADILLGNTYHLMLRPGAERIARLGGLHKFMNWERPILTDSGGFQVMSLAGLRKLTEEGVTFSSHIDGSKHHLSPETSMEIQRLLGSDIVMAFDECPALPASEEEVAQSMRMSMRWAQRSRDAFGDRPGHALFGIMQGGVTRALREESAEALKAIGFEGYAIGGLAVGEGQEAMFGVLDYAPGFLPADKPRYLMGVGKPDDIVGAVLRGVDMMDCVLPSRSGRTGQAWTRRGQVNIKNARHADDPRPLDESCTCPACTGYSRAYLHHVFRAGEMISGMLLTWHNLHYFQELMAGLRDAISRGELAGFVAQFEAMRAQGDIEPLSNAG

SEQ ID NO: 58706 - protein, 376 aa, Paracoccus bengalensis
  REGION 1..376: note = tr|A0A3D9XSY0|A0A3D9XSY0_9RHOB Queuine tRNA-ribosyltransferase OS=Paracoccus bengalensis; OX = 302403 GN=tgt PE=3 SV=1
MSDRFQFTVHATDGRARSGVIQTPRGEIRTPAFMPVGTAATVKAMLPESVRATGADILLGNTYHLMLRPGAERIARLGGLHKFMNWPRPILTDSGGFQVMSLAGLRKLTEEGVTFSSHVDGSKHHLSPETSMEIQRLLGSDIVMAFDECPALPATEEEVAKSMRMSMRWAERSRDAFGDRPGHALFGIMQGGVTRELREESAEALKAIGFDGYAIGGLAVGEGQEAMFGVLDYAPGFLPQDKPRYLMGVGKPDDIVGAVVRGVDMMDCVLPSRSGRTGQAWTRRGQVNIKNARHADDPRPLDADCSCPACTGYSRAYLHHVFRAGEMISGMLLTWHNLHYFQELMAGLRDAIAGGTLAEFVARFEAMRAQGDIEPR

SEQ ID NO: 58707 - protein, 375 aa, Paracoccus chinensis
  REGION 1..375: note = tr|A0A1G9ILI1|A0A1G9ILI1_9RHOB Queuine tRNA-ribosyltransferase OS=Paracoccus chinensis OX=525640; GN = tgt PE=3 SV=1
MTGFSFTLNATDGRARTGAIQTPRGEIRTPAFMPVGTAATVKAMLPESVRATGADILLGNTYHLMLRPGAERIARLGGLHRFMNWDRPILTDSGGFQVMSLAELRKLTEEGVTFASHVDGSRYFLSPETSMEIQRLLGSDIVMAFDECPALPATHERQAEAMRLSMRWAQRSRDAFGDRPGHALFGIMQGGVERDLREESAEALRRIGFDGYAIGGLAVGEGQEAMFGVLDYATDLLPADQPRYLMGVGKPDDIVGAVQRGVDMMDCVLPSRSGRTGQAWTRRGQVNIKNARHADDPRPLDEHCTCPACTGYSRAYLHHVFRAGEMISGMLLTWHNLHYYQEIMQGMRDAIAAGTLDAWVADFHATRAQGDIEPL

SEQ ID NO: 58708 - protein, 375 aa, unidentified
  source 1..375: note = Paracoccus contaminans
  REGION 1..375: note = tr|A0A1W6CTU0|A0A1W6CTU0_9RHOB Queuine tRNA-ribosyltransferase OS=Paracoccus contaminans; OX = 1945662 GN=tgt PE=3 SV=1
MSGFSFTLAATDGRARTGVIRTPRGEIRTPAFMPVGTAATVKAMLPESVRATGADILLGNTYHLMLRPGAERIARLGGLHRFMNWDRPILTDSGGFQVMSLADLRKLTEAGVTFASHVDGSRHVLSPETSMEIQRLLGSDIVMAFDECPALPATHERQAEAMRLSMRWAQRSRDAFGDRPGHALFGIMQGGVERDLREESAAALRAIGFDGYAIGGLAVGEGQAAMFGVLDYATDLLPAGQPRYLMGVGKPDDIVGAVQRGVDMMDCVLPSRSGRTGQAWTRRGQVNIKNARHADDPRPLDEACSCPACTGYSRAYLHHVFRAGEMISGMLLTWHNLHYYQQIMQGMRDAIAAGGLDAWVADFHALRAEGDIPPV

SEQ ID NO: 58709 - protein, 375 aa, Paracoccus denitrificans
  REGION 1..375: note = tr|A0A2W4ZTA6|A0A2W4ZTA6_PARDE Queuine tRNA-ribosyltransferase OS=Paracoccus denitrificans OX=266; GN = tgt PE=3 SV=1
MSGISFILNATDGAARTGIIQTPRGDIRTPAFMPVGTAATVKAMMPESVRATGADILLGNTYHLMLRPGAERVARLGGLHKFMNWSRPILTDSGGFQVMSLSDLRKLTEEGVTFRSHVDGSKHFLSPETSMEIQRLLGSDIVMAFDECPALPASEKRQAEAMRLSMRWAQRSRDAFGDRPGHALFGIMQGGVLRHLREESAAALRAIEFDGYAIGGLAVGEGQEVMFDVLNYATDLLPTDRPRYLMGVGKPDDIVGAVQRGVDMMDCVLPSRSGRTGQAWTRRGQVNIKNARHADDPRPLDEACSCPTCTGYSRGYLHHVMRSGEIIASMLLTWHNLHYFQEIMAGMRHAIAAESLDDWVADFHAVRAGGDIAPI

SEQ ID NO: 58710 - protein, 380 aa, Paracoccus denitrificans
  REGION 1..380: note = tr|A1B392|A1B392_PARDP Queuine tRNA-ribosyltransferase OS=Paracoccus denitrificans (strain Pd 1222) OX=318586 GN=tgt PE=3 SV=1
MCRRMSDKFSFSVSATDGRARSGVIHTPRGEIRTPAFMPVGTAATVKAMLPESVRATGADILLGNTYHLMLRPGAERIARLGGLHEFMNWPRPILTDSGGFQVMSLSSLRKLTEEGVTFSSHIDGSKHHLSPETSMEIQRLLGSDIVMAFDECPALPASEEEVAKSMRMSMRWAQRSRDAFGDRPGHALFGIMQGGVTRELREESAEALKAIGFEGYAIGGLAVGEGQEAMFGVLDYAPGFLPEDKPRYLMGVGKPDDIVGAVLRGVDMMDCVLPSRSGRTGQAWTRRGQVNIKNARHADDPRPLDADCTCPACTGYSRAYLHHVFRAGEMISGMLLTWHNLHYFQELMAGLRDAIGRGALAGFVAEFEAMRAQGDIDPL

SEQ ID NO: 58711 - protein, 376 aa, unidentified
  source 1..376: note = Paracoccus gahaiensis
  REGION 1..376: note = tr|A0A4U0R9K9|A0A4U0R9K9_9RHOB Queuine tRNA-ribosyltransferase OS=Paracoccus gahaiensis; OX = 1706839 GN=tgt PE=3 SV=1
MTTPFSFSLTATDGGARSGVIDTPRGQIRTPAFMPVGTAATVKAMLPESVAATGADILLGNTYHLMLRPGAERVARMGGLHRFMNWDRPILTDSGGFQVMSLAGLRKLTEKGVTFSSHVDGSKHFLSPETSMQIQALLGSDIVMAFDECPALPATDEAVAASMRLSMRWAQRSRDAFGDRPGHALFGIMQGGVTPDLRAESAEALTGIGFDGYAVGGLAVGEGQEAMFGVLDYAPGLLPVDKPRYLMGVGKPDDIVGAVQRGIDMMDCVLPSRSGRTGQAWTPRGQVNIKNARHQDDPRPLDEDCTCPCCTGYSRAYLHHVFRAKEMISGMLLTWHNLHYYQQLMAGLRDAIAAGRLDAFVAEFHATRAQGDIDPL

SEQ ID NO: 58712 - protein, 376 aa, Paracoccus haeundaensis
  REGION 1..376: note = tr|A0A5C4R5F9|A0A5C4R5F9_9RHOB Queuine tRNA-ribosyltransferase OS=Paracoccus haeundaensis; OX = 225362 GN=tgt PE=3 SV=1
MTTRFDFTLQATDGAARTGIIDTPRGQIRTPAFMPVGTAATVKAMLPDSVAATGADILLGNTYHLMLRPGAERVARMGGLHRFMNWQKPILTDSGGFQVMSLAGLRKLTEEGVTFSSHVDGSKHFLSPETSMQIQKLLGSDIVMCFDECPALPATEEAVAASMRLSMRWAQRSRDAFGDRPGHALFGIMQGGVTRELREESAEALQAIGFDGYAVGGLAVGEGQEAMFGVLDYAPGFLPVDRPRYLMGVGKPDDIVGAVQRGIDMMDCVLPSRSGRTGQAWTPRGQVNIKNARHQDDPRPLDEDCTCPCCRGYSRAYLHHVFRAKEMISGMLLTWHNLHYYQQLMAGLRDAIAAGRLDAFVAEFHARRAEGDIEPV

SEQ ID NO: 58713 - protein, 376 aa, Paracoccus halophilus
  REGION 1..376: note = tr|A0A099ETP6|A0A099ETP6_9RHOB Queuine tRNA-ribosyltransferase OS=Paracoccus halophilus OX=376733; GN = tgt PE=3 SV=1
MSDRFEFSVSATDGRARSGTIRTPRGDIRTPAFMPVGTAATVKAMLPESVRATGADILLGNTYHLMLRPGAERVARLGGLHRFMNWDRPILTDSGGFQVMSLSSLRKLTEEGVTFASHIDGSKHFLSPETSMEIQRQLGSDIVMAFDECPALPASEAEVAASMRMSMRWAQRSRDAFGDRPGHALFGIMQGGVTRELREESAEALRAIGFDGYAIGGLAVGEGQEAMFGVLDYAPGFLPEDKPRYLMGVGKPDDIVGAVLRGVDMMDCVLPSRSGRTGQAWTRRGQLNIKNARHADDPRPLDEACTCPACTGYSRAYLHHVFRAGEMISGMLLTWHNLHYFQELMQGMRDAIAAGRFQDFVAEFEAQRAGGDIAPL

SEQ ID NO: 58714 - protein, 376 aa, unidentified
  source 1..376: note = Paracoccus hibiscisoli
  REGION 1..376: note = tr|A0A4U0RD95|A0A4U0RD95_9RHOB Queuine tRNA-ribosyltransferase OS=Paracoccus hibiscisoli; OX = 2023261 GN=tgt PE=3 SV=1
MTTRFSYTLSATDGAARTGVIDTPRGQIRTPAFMPVGTAATVKAMLPESVAATGADILLGNTYHLMLRPGAERVARMGGLHRFMNWDRPILTDSGGFQVMSLAGLRKLTEDGVTFSSHVDGSKHFLSPETSMQIQKLLGSDIVMCFDECPALPATDEAVAASMRLSMRWAQRSRDAFGDRPGHALFGIMQGGVTRELREESAQALQSIGFDGYAVGGLAVGEGQEAMFGVLDYAPGFLPVDKPRYLMGVGKPDDIVGAVQRGIDMMDCVLPSRSGRTGQAWTPRGQVNIKNARHQDDPRPLDEDCTCPCCRGYSRAYLHHVFRAREMISGMLLTWHNLHYYQQLMAGLRDAIAAGRLDAFVADFHARRAEGDIEPV

SEQ ID NO: 58715 - protein, 377 aa, Paracoccus homiensis
  REGION 1..377: note = tr|A0A1I0CLB3|A0A1I0CLB3_9RHOB Queuine tRNA-ribosyltransferase OS=Paracoccus homiensis OX=364199; GN = tgt PE=3 SV=1
MTDRFQFTLNATDGAARTGVIDTPRGQIRTPAFMPVGTAATVKAMMPESVRETGADILLGNTYHLMLRPGAERVDRLGGLHRFMNWDRPILTDSGGFQVMSLASLRKLTEEGVTFASHIDGSKHVLTPERSMEIQRLLGSDIVMAFDECPALPASEEEVANSMRLSMRWAQRSRDAFGDRPGHALFGIMQGGVTRDLREESAKALTGIGFDGYAVGGLAVGEGQEAMFGVLDYAPGFLPQDKPRYLMGVGKPDDIVGAVQRGIDMMDCVLPSRSGRTGQAWTRRGQVNIKNARHQDDPRPLDENCTCPACRSYSRGYLHHVFRAGEMISGMLLTWHNLHYYQELMAGLRAAIAEGRLDGFVADFHAARAEGDIEPLA

SEQ ID NO: 58716 - protein, 375 aa, Paracoccus isoporae
  REGION 1..375: note = tr|A0A1G7BB93|A0A1G7BB93_9RHOB Queuine tRNA-ribosyltransferase OS=Paracoccus isoporae OX=591205; GN = tgt PE=3 SV=1
MSRFSFTLNATDGRARAGVIDTPRGQIRTPAFMPVGTAATVKAMLPDSVRATGADILLGNTYHLMLRPGADRIERLGGLHKFMNWDRPILTDSGGFQVMSLADLRKLDEDGVTFASHIDGSRHVLSPETSMEIQRQLGSDIVMAFDECPALPATEERQAEAMRLSMRWAQRSRDAFGDRPGHALFGIMQGGVIRHLREESAEALTSIGFDGYAIGGLAVGEGQEAMFGVLDYATDLLPQAQPRYLMGVGKPDDIVGAVQRGVDMMDCVLPSRSGRTGQAWTRRGQVNIKNARHADDPRPLDEECRCPACTGYSRAYLHHVFRAGEMISGMLLTWHNLHYYQDLMQGLRDAIAAGGLDGFAADFHATRAGGDIPPV

SEQ ID NO: 58717 - protein, 376 aa, unidentified
  source 1..376: note = Paracoccus laeviglucosivorans
  REGION 1..376: note = tr|A0A521CSW3|A0A521CSW3_9RHOB Queuine tRNA-ribosyltransferase OS=Paracoccus laeviglucosivorans; OX = 1197861 GN=tgt PE=3 SV=1
MTQRFAFSVSATDGRARTGAIQTPRGEIRTPAFMPVGTAATVKAMLPESVRATGADILLGNTYHLMLRPGAERVARLGGLHKFMNWERPILTDSGGFQVMSLAGLRKLTEEGVTFASHVDGSKHFLSPETSMEIQRLLGSDIVMAFDECPALPATDAEVAASMRMSMRWAQRSRDAFGDRPGHALFGIMQGGVTPELREESATALKAIGFEGYAIGGLAVGEGQDAMFGVLDYAPGFLPEDKPRYLMGVGKPDDIVGAVVRGVDMMDCVLPSRSGRTGQAWTRRGQVNIKNARHADDPRPLDADCTCPACTGYSRAYLHHVFRSGEMISGMLLTWHNLHYFQELMAGLRDAIANGRLAAFVTEFEAMRAQGDIDPL

SEQ ID NO: 58718 - protein, 376 aa, unidentified
  source 1..376: note = Paracoccus lutimaris
  REGION 1..376: note = tr|A0A368ZAC1|A0A368ZAC1_9RHOB Queuine tRNA-ribosyltransferase OS=Paracoccus lutimaris OX=1490030; GN = tgt PE=3 SV=1
MSDRFSFSVAATDGRARTGTIQTPRGDIRTPAFMPVGTAATVKAMLPESVAATGADILLGNTYHLMLRPGAERVSRLGGLHRFMNWQRPILTDSGGFQVMSLAGLRKLTEEGVTFASHVDGSKHFLSPETSMEIQRQLGSDIVMAFDECPALPATEEEVAKSMRMSMRWAQRSRDAFGDRPGHALFGIMQGGVTRELREESAEALKAIGFEGYAIGGLAVGEGQEAMFGVLDYAPGFLPQDKPRYLMGVGKPDDIVGAVQRGVDMMDCVLPSRSGRTGQAWTRRGQVNIKNARHADDPRPLDAECTCPACTGYSRAYLHHVFRSGEMISGMLLTWHNLHYFQELMQGMRDAIAGGRLDAFVADFHAQRAGGDIAPL

SEQ ID NO: 58719 - protein, 376 aa, unidentified
  source 1..376: note = Paracoccus mutanolyticus
  REGION 1..376: note = tr|A0A2Z4PFF7|A0A2Z4PFF7_9RHOB Queuine tRNA-ribosyltransferase OS=Paracoccus mutanolyticus; OX = 1499308 GN=tgt PE=3 SV=1
MSERFQFHVQATDGRARTGVIQTPRGEIRTPAFMPVGTAATVKAMLPESVRATGADILLGNTYHLMLRPGAERIARLGGLHRFMNWDRPILTDSGGFQVMSLSSLRKLTEEGVTFSSHVDGARHHLSPETSMEIQRLLGSDIVMAFDECPALPATDEAVAKSMRMSMRWAQRSRDAFGDRPGHALFGIMQGGVTRELRQESAEALKSIGFDGYAIGGLAVGEGQEAMFGVLDYAPGFLPEDKPRYLMGVGKPDDIVGAVLRGVDMMDCVLPSRSGRTGQAWTRRGQVNIKNARHADDPRPLDEHCTCPACTGYSRAYLHHVFRSGEMISGMLLTWHNLHYFQELMAGLRGAIAAGELAGFVAGFEAMRAQGDIEPL

SEQ ID NO: 58720 - protein, 376 aa, Paracoccus pantotrophus
  REGION 1..376: note = tr|A0A495P0D8|A0A495P0D8_PARPN Queuine tRNA-ribosyltransferase OS=Paracoccus pantotrophus; OX = 82367 GN=tgt PE=3 SV=1
MSDRFHFTVQATDGRARSGVIQTPRGEIRTPAFMPVGTAATVKAMLPESVRATGADILLGNTYHLMLRPGAERIARLGGLHRFMNWPRPILTDSGGFQVMSLSSLRKLTEEGVTFSSHVDGSKHHLSPETSMEIQRLLGSDIVMAFDECPALPASEEVVAKSMRMSMRWAQRSRDAFGDRPGHALFGIMQGGVTRELREESAEALKAIGFDGYAIGGLAVGEGQEAMFGVLDYAPGFLPQDRPRYLMGVGKPDDIVGAVLRGVDMMDCVLPSRSGRTGQAWTRRGQVNIKNARHADDPRPLDEHCTCPACAGYSRAYLHHVFRAGEMISGMLLTWHNLHYFQELMAGLRDAIASGTLAGFVARFEAMRAQGDIEPL

SEQ ID NO: 58721 - protein, 376 aa, Paracoccus pantotrophus
  REGION 1..376: note = tr|A0A1I5CCK9|A0A1I5CCK9_PARPN Queuine tRNA-ribosyltransferase OS=Paracoccus pantotrophus; OX = 82367 GN=tgt PE=3 SV=1
MSDRFHFTVQATDGRARSGVIQTPRGEIRTPAFMPVGTAATVKAMLPESVRATGADILLGNTYHLMLRPGAERIARLGGLHRFMNWPRPILTDSGGFQVMSLSSLRKLTEEGVTFSSHVDGSKHHLSPETSMEIQRLLGSDIVMAFDECPALPASEEVVAKSMRMSMRWAQRSRDAFGDRPGHALFGIMQGGVTRELREESAEALKAIGFDGYAIGGLAVGEGQEAMFGVLDYAPGFLPEDRPRYLMGVGKPDDIVGAVLRGVDMMDCVLPSRSGRTGQAWTRRGQVNIKNARHADDPRPLDEHCTCPACAGYSRAYLHHVFRAGEMISGMLLTWHNLHYFQELMAGLRDAIASGTLAGFVARFEAMRAQGDIEPL

SEQ ID NO: 58722 - protein, 375 aa, unidentified
  source 1..375: note = Paracoccus salipaludis
  REGION 1..375: note = tr|A0A2A2GLF5|A0A2A2GLF5_9RHOB Queuine tRNA-ribosyltransferase OS=Paracoccus salipaludis; OX = 2032623 GN=tgt PE=3 SV=1
MTGFSFTLNATDGRARTGVIQTPRGEIRTPAFMPVGTAATVKAMLPESVRATGADILLGNTYHLMLRPGAERIARLGGLHRFMNWDRPILTDSGGFQVMSLAELRKLTEEGVTFASHVDGSRHFLSPETSMEIQRLLGSDIVMAFDECPALPATHERQAEAMRLSMRWAQRSRDAFGDRPGHALFGIMQGGVERDLREESAEALRRIGFDGYAIGGLAVGEGQEAMFGVLDYATDLLPEDQPRYLMGVGKPDDIVGAVQRGVDMMDCVLPSRSGRTGQAWTRRGQVNIKNARHADDPRPLDEHCTCPACTGYSRAYLHHVFRAGEMISGMLLTWHNLHYYQEIMQGMRDAIAGGTLDAWVATFHAQRAEGDIPPL

SEQ ID NO: 58723 - protein, 376 aa, Paracoccus saliphilus
  REGION 1..376: note = tr|A0A1N7MDL0|A0A1N7MDL0_9RHOB Queuine tRNA-ribosyltransferase OS=Paracoccus saliphilus OX=405559; GN = tgt PE=3 SV=1
MPNRFSFSLNARDGEARQGVIRTPRGEIRTPAFMPVGTAATVKAMLPESVREAGADILLGNTYHLMLRPGAERVARLGGLHDFMNWQRPILTDSGGFQVMSLGPLRKLTEDGVTFSSHIDGSRHELTPERSMEIQKLLGSDIVMAFDECPALPATDEDVARSMRLSMRWAQRSRDAFGDRPGHALFGIMQGGVTRELREESARALTGIGFDGYAIGGLAVGEGQEAMFGVLDYAPDFLPEDKPRYLMGVGKPDDIVGAVQRGVDMMDCVLPSRSGRTGQAWTRRGQINIKNARHQDDPRPLDEDCSCPACRSYSRAYLHHVFRAGEMISGMLLTWHNLHYYQELMAGLRDAIAEGRLNDFVAEFHAMRAGGDIPPL

SEQ ID NO: 58724 - protein, 375 aa, unidentified
  source 1..375: note = Paracoccus sanguinis
  REGION 1..375: note = tr|A0A1H2REK6|A0A1H2REK6_9RHOB Queuine tRNA-ribosyltransferase OS=Paracoccus sanguinis OX=1545044; GN = tgt PE=3 SV=1
MSGFSFTLRATDGAARRGIITTPRGEIRTPAFMPVGTAGTVKAMLPESVRATGADILLGNTYHLMLRPGAERVARLGGLHRFMNWEGPILTDSGGFQVMSLADLRKLTEDGVTFASHIDGSRHMLSPETSMEIQRLLGSDIVMAFDECPALPASHERQAEAMRLSMRWAQRSRDAFGDRPGHALFGIMQGGVERDLREESAAALRGIGFDGYAIGGLAVGEGQEAMFGVLDYATALLPADQPRYLMGVGKPDDIVGAVQRGVDMMDCVLPSRSGRTGQAWTRHGVVNIKNARHADDPRPLDDACTCPACRSYSRAYLHHVFRAGEMISGMLLTWHNLHYYQQIMGEMRAAIDTGSLDAWVARFHAERAEGDIPPL

SEQ ID NO: 58725 - protein, 375 aa, unidentified
  source 1..375: note = Paracoccus sanguinis
  REGION 1..375: note = tr|A0A099GIE2|A0A099GIE2_9RHOB Queuine tRNA-ribosyltransferase OS=Paracoccus sanguinis OX=1545044; GN = tgt PE=3 SV=1
MSGFSFTLRATDGAARRGIITTPRGEIRTPAFMPVGTAGTVKAMLPESVRATGADILLGNTYHLMLRPGAERVARLGGLHRFMNWEGPILTDSGGFQVMSLAELRKLTEDGVTFASHIDGSRHMLSPETSMEIQRLLGSDIVMAFDECPALPASHERQAEAMRLSMRWAQRSRDAFGDRPGHALFGIMQGGVERDLREESAAALRGIGFDGYAIGGLAVGEGQEAMFGVLDYATALLPADQPRYLMGVGKPDDIVGAVQRGVDMMDCVLPSRSGRTGQAWTRHGVVNIKNARHADDPRPLDEACTCPACRSYSRAYLHHVFRAGEMISGMLLTWHNLHYYQQIMGEMRAAIDTGSLDAWVARFHAERAEGDIPPL

SEQ ID NO: 58726 - protein, 376 aa, unidentified
  source 1..376: note = Paracoccus sediminis
  REGION 1..376: note = tr|A0A238UWK5|A0A238UWK5_9RHOB Queuine tRNA-ribosyltransferase OS=Paracoccus sediminis OX=1214787; GN = tgt PE=3 SV=1
MSTRFRFTLGATDGRARTGTIHTPRGTIRTPAFMPVGTAATVKAMLPESVRATGADILLGNTYHLMLRPGAERIARLGGLHRFMNWDRPILTDSGGFQVMSLAALRKLTEDGVTFSSHIDGSKHMLSPETSMEIQRLLGSDIVMCFDECPALPATPDDVAKSMRLSMRWAQRSRDAFGDRPGHALFGIMQGGVTPELRQESASALTAIGFDGYAIGGLAVGEGQEAMFGVLDYAPGFLPADKPRYLMGVGKPDDIVGAVQRGIDMMDCVLPSRSGRTGQAWTRRGQVNVKNARHADDPRPLDEDCTCPACTGYSRAYLHHVFRAGEMISGMLLTWHNLHYFQELMAGLRGAITEGRLDDFVADFHASRAGGDIPPL

SEQ ID NO: 58727 - protein, 376 aa, Paracoccus seriniphilus
  REGION 1..376: note = tr|A0A239PMJ6|A0A239PMJ6_9RHOB Queuine tRNA-ribosyltransferase OS=Paracoccus seriniphilus; OX = 184748 GN=tgt PE=3 SV=1
MTDRFQFTLHATDGPARTGTIRTPRGEIRTPAFMPVGTAATVKAMMPESVRETGADILLGNTYHLMLRPGAERVARLGGLHKFMNWERPILTDSGGFQVMSLAGLRKLTEEGVTFASHIDGSKHVLTPERSMEIQRLLGSDIVMAFDECPALPATPEEVANSMRLSMRWAQRSRDAFGDRPGHALFGIMQGGVTRELREESAKALTGIGFDGYAIGGLAVGEGQEAMFGVLDYAPGFLPQDKPRYLMGVGKPDDIVGAVQRGVDMMDCVLPSRSGRTGQAWTRRGQVNIKNARHQDDPRPLDENCSCPACRNYSRAYLHHVFKSGEMISGMLLTWHNLQYYQDLMQGLRDAISSATLDDFVAGFHAARAQGDIAPL

SEQ ID NO: 58728 - protein, 376 aa, unidentified
  source 1..376: note = Paracoccus siganidrum
  REGION 1..376: note = tr|A0A419A3W7|A0A419A3W7_9RHOB Queuine tRNA-ribosyltransferase OS=Paracoccus siganidrum; OX = 1276757 GN=tgt PE=3 SV=1
MTDRFAFTLSATDGAARTGTIHTPRGEIRTPAFMPVGTAATVKAMLPESVRQTGADILLGNTYHLMLRPGAERIARLGGLHRFMNWDRPILTDSGGFQVMSLAGLRKLTEEGVTFASHIDGSRHLLSPETSMEIQRLLGSDIVMCFDECPALPADEATVAQSMRLSMRWAQRSRDAFGDRPGHALFGIMQGGVTRELREESAQALTSIGFDGYAIGGLAVGEGQEAMFGVLDYAPGFLPADKPRYLMGVGKPDDIVGAVVRGVDMMDCVLPSRSGRTGQAWTRRGQLNIKNARHADDPRPLDEHCTCPACRGYSRAYLHHVFRAQEMISGMLLTWHNLHYYQELMAGLRGAIAQGRLDDFVADFHAQRAGGDIPPL

SEQ ID NO: 58729 - protein, 375 aa, Paracoccus solventivorans
  REGION 1..375: note = tr|A0A1M7HCQ8|A0A1M7HCQ8_9RHOB Queuine tRNA-ribosyltransferase OS=Paracoccus solventivorans; OX = 53463 GN=tgt PE=3 SV=1
MSGFSFTLSATDGRARSGVIRTPRGEIRTPAFMPVGTAGTVKAMLPESVRATGADILLGNTYHLMLRPGAERIARLGGLHRFMNWSRPILTDSGGFQVMSLSELRKLTEEGVTFSSHVDGSRHFLSPETSMEIQRLLGSDIVMAFDECPALPATHERQAEAMRLSMRWAQRSRDAFGDRPGHALFGIMQGGVERDLREESAAALRRIGFDGYAIGGLAVGEGQEAMLSVLDYATHLLPAEQPRYLMGVGKPDDIVGAVQRGVDMMDCVLPSRSGRTGQAWTRRGQINIKNARHADDPRPLDETCTCPACTGYSRAYLHHVFRAGEMISGMLLTWHNLHYYQQIMQQMREAIAAGTLEDWVAGFHAERAGGDIEPL

SEQ ID NO: 58730 - protein, 376 aa, Paracoccus sp.
  REGION 1..376: note = tr|A0A553ANR5|A0A553ANR5_9RHOB Queuine tRNA-ribosyltransferase OS=Paracoccus sp. M683 OX=2594268; GN = tgt PE=3 SV=1
MIMSFAFSFNATDGLARSGVIQTPRGQIRTPAFMPVGTAATVKAMLPESVRQTGADILLGNTYHLMLRPGAERIDRLGGLHRFMNWDRPILTDSGGFQVMSLAGLRKLTEEGVTFASHIDGSRHVLTPERSMEIQRLLGSDIVMAFDECPALPAGEAEVAASMRLSMRWAQRSRDAFGDRPGHALFGIMQGGVTPELREESAEALKAIGFDGYAVGGLAVGEGQEAMFGVLDYAPGFLPKDKPRYLMGVGKPDDIVGAVQRGIDMMDCVLPSRSGRTGQAWTRRGQVNIKNARHADDPRPLDESCACPACRGYSRAYLHHVFRAGEMISGMLLTWHNLYYYQDLMAGLRDAIAAGRLDDFVADFHAERAEGDLPPL

SEQ ID NO: 58731 - protein, 376 aa, Paracoccus sp.
  REGION 1..376: note = tr|A0A2K9EH64|A0A2K9EH64_9RHOB Queuine tRNA-ribosyltransferase OS=Paracoccus sp. BM15 OX=1529068; GN = tgt PE=3 SV=1
MTGRFSFTLNATDGQARTGVIQTPRGDVRTPAFMPVGTAATVKAMLPGSVRETGADILLGNTYHLMLRPGAERIDRLGGLHKFMNWDRPILTDSGGFQVMSLASLRKLTEDGVTFSSHIDGSKHFLSPETSMEIQRLLGSDIVMAFDECPALPASEEDVAKSMQLSMRWAQRSRDAFGDRPGHALFGIMQGGVTPELREESAKALTAIGFEGYAVGGLAVGEGQEAMFGVLDYAPGFLPQDKPRYLMGVGKPDDIVGAVQRGIDMMDCVLPSRSGRTGQAWTRRGQVNIKNARHADDPRPVDEACTCPACRGYSRAYLHHVFRSGEMISGMLLTWHNLHYYQELMEGMRQAIAMGRLDSFVAEFHAERAQGDIEPV

SEQ ID NO: 58732 - protein, 375 aa, Paracoccus sphaerophysae
  REGION 1..375: note = tr|A0A099FE03|A0A099FE03_9RHOB Queuine tRNA-ribosyltransferase OS=Paracoccus sphaerophysae; OX = 690417 GN=tgt PE=3 SV=1
MTGFSFTLEATDGRARSGQIRTPRGDVRTPAFMPVGTAGTVKAMLPESVRATGADILLGNTYHLMLRPGAERIDRLGGLHRFMNWDGPILTDSGGFQVMSLAELRKLTEAGVTFSSHIDGSRHVLSPETSMEIQRLLGSDIVMAFDECPALPATHARQAEAMRLSMRWAQRSRDAFGDRPGHALFGIMQGGVERDLRAESAAALRAIGFDGYAIGGLAVGEGQEVMFGVLDYATDLLPADQPRYLMGVGKPDDIVGAVQRGVDMMDCVLPSRSGRTGQAWTRRGQVNIKNARHADDPRPLDEDCSCAACTGYSRAYLHHVFRAGEMISGMLLTWHNLHYYQQIMQGMRDAITGGTLDAWVAEFHAMRAQGDIPPV

SEQ ID NO: 58733 - protein, 376 aa, Paracoccus sulfuroxidans
  REGION 1..376: note = tr|A0A562NBB5|A0A562NBB5_9RHOB Queuine tRNA-ribosyltransferase OS=Paracoccus sulfuroxidans; OX = 384678 GN=tgt PE=3 SV=1
MTDRFSFQVSATDGRARTGVISTPRGDIRTPAFMPVGTAATVKAMMPESVRATGADILLGNTYHLMLRPGAERVERLGGLHRFMNWERPILTDSGGFQVMSLSSLRKLTEEGVTFSSHVDGSKHFLSPETSMQIQRQLGSDIVMCFDECPALPATEAEVAQSMRMSMRWAQRSRDAFGDRPGHALFGIMQGGVTPELREESAEALKAIGFEGYAIGGLAVGEGQEAMFGVLDYAPGYLPEDKPRYLMGVGKPDDIVGAVVRGVDMMDCVLPSRSGRTGQAWTRRGQVNIKNARHADDPRPLDEHCTCPACTGYSRAYLHHVFRAGEMISGMLLTWHNLHYFQELMAGLRAAIAEGHLDAFVAEFEAMRAQGDIEPL

SEQ ID NO: 58734 - protein, 376 aa, Paracoccus thiocyanatus
  REGION 1..376: note = tr|A0A1N6N949|A0A1N6N949_9RHOB Queuine tRNA-ribosyltransferase OS=Paracoccus thiocyanatus; OX = 34006 GN=tgt PE=3 SV=1
MSDRFHFTVHARDGRARSGVIHTPRGEIRTPAFMPVGTAATVKAMLPESVRATGADILLGNTYHLMLRPGAERIARLGGLHKFMNWPRPILTDSGGFQVMSLSSLRKLTEEGVIFSSHVDGSKHHLSPESSMEIQRLLGSDIVMAFDECPALPASDEAVAKSMRMSMRWAQRSRDAFGDRPGHALFGIMQGGVSRELREESAQALRAIGFDGYAIGGLAVGEGQEAMFGVLDYAPGFLPEDKPRYLMGVGKPDDIVGAVLRGVDMMDCVLPSRSGRTGQAWTRRGQVNIKNARHADDPRPLDADCTCPACTGYSRAYLHHVFRAGEMISGMLLTWHNLHYFQELMAGLRDAVARGTLAGFVAQFEAMRAQGDIDPP

SEQ ID NO: 58735 - protein, 376 aa, Paracoccus thiocyanatus
  REGION 1..376: note = tr|A0A3D8PGZ3|A0A3D8PGZ3_9RHOB Queuine tRNA-ribosyltransferase OS=Paracoccus thiocyanatus; OX = 34006 GN=tgt PE=3 SV=1
MSDRFHFTVHARDGRARSGVIHTPRGEIRTPAFMPVGTAATVKAMLPESVRATGADILLGNTYHLMLRPGAERIARLGGLHKFMNWPRPILTDSGGFQVMSLSSLRKLTEEGVTFSSHIDGSKHHLSPESSMEIQRLLGSDIVMAFDECPALPASDEAVAKSMRMSMRWAERSRDAFGDRPGHALFGIMQGGVSRDLREESAQALRAIGFDGYAIGGLAVGEGQEAMFGVLDYAPGFLPEDKPRYLMGVGKPDDIVGAVLRGVDMMDCVLPSRSGRTGQAWTRRGQVNIKNARHADDPRPLDADCTCPACTGYSRAYLHHVFRAGEMISGMLLTWHNLHYFQELMAGLRDAVARGTLAGFVAQFEAMRAQGDIDPP

SEQ ID NO: 58736 - protein, 376 aa, unidentified
  source 1..376: note = Paracoccus tibetensis
  REGION 1..376: note = tr|A0A1G5J6A5|A0A1G5J6A5_9RHOB Queuine tRNA-ribosyltransferase OS=Paracoccus tibetensis OX=336292; GN = tgt PE=3 SV=1
MTTRFSFTLAATDGRARTGTISTPRGEIRTPAFMPVGTAATVKAMLPESVRATGADILLGNTYHLMLRPGAERVDRMGGLHRFMNWDRPILTDSGGFQVMSLAGLRKLSEEGVTFSSHIDGSKHQLTPERSMEIQRLLGSDIVMCFDECPALPATEGEVAASMRLSMRWAQRSRDAFGDRPGHALFGIMQGGVTRELREESAAALQQIGFDGYAVGGLAVGEGQEAMFGVLDYATGFLPQDKPRYLMGVGKPDDIVGAVQRGIDMMDCVLPSRSGRTGQAWTRRGQVNIKNARHQDDPRPLDEHCTCPACTGYSRAYLHHVFRAGEMISGMLLTWHNLHYYQELMQGMRDAIAAGRLDAFVADFHAARAEGDIKPI

SEQ ID NO: 58737 - protein, 376 aa, Paracoccus versutus; identical to SEQ ID NO: 58706
  REGION 1..376: note = tr|A0A369U151|A0A369U151_PARVE Queuine tRNA-ribosyltransferase OS=Paracoccus versutus OX=34007; GN = tgt PE=3 SV=1

SEQ ID NO: 58738 - protein, 376 aa, Paracoccus versutus
  REGION 1..376: note = tr|A0A3E0CEB7|A0A3E0CEB7_PARVE Queuine tRNA-ribosyltransferase OS=Paracoccus versutus OX=34007; GN = tgt PE=3 SV=1
MSDRFQFTVHATDGRARSGVIQTPRGEIRTPAFMPVGTAATVKAMLPESVRATGADILLGNTYHLMLRPGAERIARLGGLHKFMNWPRPILTDSGGFQVMSLAGLRKLTEEGVTFSSHVDGSKHHLSPETSMEIQRLLGSDIVMAFDECPALPATEEEVAKSMRMSMRWAERSRDAFGDRPGHALFGIMQGGVTRELREESAEALKAIGFDGYAIGGLAVGEGQEAMFGVLDYAPGFLPQDKPRYLMGVGKPDDIVGAVVRGVDMMDCVLPSRSGRTGQAWTRRGQVNIKNARHADDPRPLDADCSCPACTGYSRAYLHHVFRAGEMISGMLLTWHNLHYFQELMAGLRDAIAGGTLAKFVARFEAMRAQGDIEPR

SEQ ID NO: 58739 - protein, 380 aa, Paracoccus yeei
  REGION 1..380: note = tr|A0A386UQ93|A0A386UQ93_9RHOB Queuine tRNA-ribosyltransferase OS=Paracoccus yeei OX=147645; GN = tgt PE=3 SV=1
MCGGMSERFQFHVQATDGRARTGVIQTPRGEIRTPAFMPVGTAATVKAMLPESVRATGADILLGNTYHLMLRPGAERIARLGGLHCFMNWDRPILTDSGGFQVMSLSSLRKLTEEGVTFSSHVDGSRHHLSPETSMEIQRLLGSDIVMAFDECPALPATDEAVAKSMRMSMRWAQRSRDAFGDRPGHALFGIMQGGVTRELRQESAEALKSIGFDGYAIGGLAVGEGQEAMFGVLDYAPGFLPEDKPRYLMGVGKPDDIVGAVLRGVDMMDCVLPSRSGRTGQAWTRRGQVNIKNARHADDPRPLDADCTCPACTGYSRAYLHHVFRSGEMISGMLLTWHNLHYFQELMAGLRGAIAAGELAGFVAGFEAMRAQGDIEPL

SEQ ID NO: 58740 - protein, 376 aa, Paracoccus yeei
  REGION 1..376: note = tr|A0A2P1BUK7|A0A2P1BUK7_9RHOB Queuine tRNA-ribosyltransferase OS=Paracoccus yeei OX=147645; GN = tgt PE=3 SV=1
MSERFQFHVQATDGRARTGVIQTPRGEIRTPAFMPVGTAATVKAMLPESVRATGADILLGNTYHLMLRPGAERIARLGGLHRFMNWDRPILTDSGGFQVMSLSSLRKLTEEGVTFSSHVDGSRHHLSPETSMEIQRLLGSDIVMAFDECPALPATDEAVAKSMRMSMRWAQRSRDAFGDRPGHALFGIMQGGVTRALRQESAEALKSIGFDGYAIGGLAVGEGQEAMLGVLDYAPGFLPEDKPRYLMGVGKPDDIVGAVLRGVDMMDCVLPSRSGRTGQAWTRRGQVNIKNARHADDPRPLDEHCSCPACTGYSRAYLHHVFRSGEMISGMLLTWHNLHYFQELMAGLRGAIAAGELAGFVAGFEAMRAQGDIEPL

SEQ ID NO: 58741 - protein, 376 aa, unidentified
  source 1..376: note = Paracoccus zhejiangensis
  REGION 1..376: note = tr|A0A2H5F3S9|A0A2H5F3S9_9RHOB Queuine tRNA-ribosyltransferase OS=Paracoccus zhejiangensis; OX = 1077935 GN=tgt PE=3 SV=1
MTDRFSFALNATDGRARTGAIQTPRGEVRTPAFMPVGTAATVKAMLPESVRQTGADILLGNTYHLMLRPGAERIARLGGLHQFMNWQRPILTDSGGFQVMSLAGLRKLTEEGVTFSSHVDGSKHFLSPETSMEIQRLLGSDIVMAFDECPALPAAEEDVAKSMRLSMRWAQRSRDAFGDRPGHALFGIMQGGVTRELREESAEALKAIGFEGYAIGGLAVGEGQEAMLGVLDYAPGLLPEDRPRYLMGVGKPDDIVGAVQRGIDMMDCVLPSRSGRTGQAWTRRGQVNIKNARHADDPRPLDEACSCPACTGYSRAYLHHVFRSGEMISGMLLTWHNLHYYQELMAGLREAIAAQRLDDFVAEFHAMREGGDIPPL

SEQ ID NO: 58742 - protein, 389 aa, Paracraurococcus sp.
  REGION 1..389: note = tr|A0A4V2WLM4|A0A4V2WLM4_9PROT Queuine tRNA-ribosyltransferase OS=Paracraurococcus sp. NE82; OX = 2527868 GN=tgt PE=3 SV=1
MTLHWTKLAQDGAARRGVLHTAHGEVETPVFMPVGTAGTVKAMTADAVRSTGARMVLGNTYHLMLRPGAERVGRLGGLHRLMDWHGPILTDSGGYQVMSLSELREMDEEGVTFRSHLDGSRHRLTPERSVEIQRLLDADVTMCLDECTPYPATEEQAAASMRLSMRWARRCREAFVPRQGYGLFGIVQGSTYPALRAESVQALTETGFEGYAVGGLAVGEGQAMMFSVLDCTLPLMPQDAPRYLMGVGTPSDIVGAVRRGIDMFDCVIPTRSGRTGRAYTSRGVLNLRNAKHAEDPRPIDPACGCPACARHSRAYLHHLIKAEEMLGPMLLTWHNIQYYQDLTRGLREAISAGRLDAHAAALDAAWAAGDTPAEDAAAAELAEDRESLR

SEQ ID NO: 58743 - protein, 381 aa, Paraeggerthella hongkongensis
  REGION 1..381: note = tr|A0A3N0B295|A0A3N0B295_9ACTN Queuine tRNA-ribosyltransferase OS=Paraeggerthella hongkongensis; OX = 230658 GN=tgt PE=3 SV=1
MSLFDCTCEATSGHARALTYETAHGSFQTPMFMPVGTSATVKGVTVGQLNDLKSQVVLANTYHLSLRPGADVVEEAGGVHGFSHYDGPMLTDSGGFQVFSLADTVKLDDDGLTFRSIYDGSKVRWTPETNMAIQEQLGADIAMQLDQCAPYPAEKAFVAKAVDLSAKWARRCLTAHQRADQTLFGIVQGGMHLDLRLDSIRLLREIEDESLAVGGRRFGGFGIGGYSVGEDHEVMFETLGDVARACPEDRPRYLMGVGNPTTLVRAVREGVDMFDCVLPTRTARMGTAFSSAGRMNMRNAKFTRDFGPLDPTCTCPTCQNHSRSYIRHLVKQNEMLGGILLSIHNLHYLLDLMRRAREAVLADSYEEFYGEWMASPAAKDY

SEQ ID NO: 58744 - protein, 381 aa, Paraeggerthella hongkongensis
  REGION 1..381: note = tr|A0A369LFD6|A0A369LFD6_9ACTN Queuine tRNA-ribosyltransferase OS=Paraeggerthella hongkongensis; OX = 230658 GN=tgt PE=3 SV=1
MSLFDCTCEATSGHARALTYETAHGSFQTPMFMPVGTSATVKGVTVGQLNDLKSQVVLANTYHLSLRPGADVVEEAGGVHGFSHYDGPMLTDSGGFQVFSLADTVKLDDDGLTFRSIYDGSKVRWTPETNMAIQEQLGADIAMQLDQCAPYPAEKAFVAKAVDLSAKWARRCLVAHQRADQTLFGIVQGGMHLDLRLDSIRLLREIEDESLAAGGRRFGGFGIGGYSVGEDHEVMFETLGDVARACPEDRPRYLMGVGNPTTLVRAVREGVDMFDCVLPTRTARMGTAFSSTGRMNMRNAKFTRDFGPLDPTCTCPTCQNHSRSYIRHLVKQNEMLGGILLSIHNLHYLLDLMRRAREAVLADSYEEFYGEWMASPAAKDY

SEQ ID NO: 58745 - protein, 378 aa, unidentified
  source 1..378: note = Parafilimonas terrae
  REGION 1..378: note = tr|A0A1I5WKW1|A0A1I5WKW1_9BACT Queuine tRNA-ribosyltransferase OS=Parafilimonas terrae OX=1465490; GN = tgt PE=3 SV=1
MALSFSLEHTDADSKARAGKITTAHGEISTPIFMPVGTAGSVKAVTQQQLYQEVKAQIILGNTYHLYLRPGIEILNKAGGLHGFMHWDKPILTDSGGYQVFSLAQSRKIKEEGVLFQSHIDGSRHLFSPEKVMDIQRNIGADIIMAFDECPPGQSEYNYAKNSLMLTQRWLDRCINHLNSTEPLYGYEQNLFPIVQGNQFHDLRKMSCEYVASKQAPGNAIGGLSVGEPEAVMYEITALCCEHLPADKPRYLMGVGTPWNILECISLGVDMFDCVMPTRNGRNGMLFTTNGVINIKNKKWADDFTPIDEGLPNEISHYYTKAYLRHLFVAGELLGLTIASLQNLCFYLWLVSEARKEIIKGTFTSWKNAMTEQLKQRL

SEQ ID NO: 58746 - protein, 380 aa, unidentified
  source 1..380: note = Parageobacillus caldoxylosilyticus
  REGION 1..380: note = tr|A0A023DAR0|A0A023DAR0_9BACI Queuine tRNA-ribosyltransferase OS=Parageobacillus caldoxylosilyticus NBRC 107762 OX=1220594 GN=tgt PE=3 SV=1
MTSPIRFELIKTCRQTGARLGILHTPHGSFETPMFMPVGTLATVKTLSPEELKEMGAGVILSNTYHLWLRPGPDIVQEAGGLHSFMNWDRGILTDSGGFQVFSLSEFRRIEEEGVYFRNHLNGDKLFLSPEKAIEIQNALGSDIMMAFDECPPYPSTHEYMKKSVERTSRWAERCLKAHRRPAEQGLFAIVQGGEFEDLRRQSAQDLVSLDFPGYAIGGLSVGEPKEVMNRVLEFTTPLLPANKPRYLMGVGSPDSLIDGAIRGIDMFDCVLPTRIGRNGTVMTSEGRVVIKNAQYARDFSPLDPNCDCYTCRNYTRAYIRHLIKCEETFGIRLTSYHNVYFLIKLMEQVRQAIREDRLGDFREEFFERYGFNKPNAKNF

SEQ ID NO: 58747 - protein, 380 aa, unidentified
  source 1..380: note = Parageobacillus caldoxylosilyticus
  REGION 1..380: note = tr|A0A150LSL8|A0A150LSL8_9BACI Queuine tRNA-ribosyltransferase OS=Parageobacillus caldoxylosilyticus OX=81408 GN=tgt PE=3 SV=1
MTSPIRFELIKTCRQTGARLGILHTPHGSFETPMFMPVGTLATVKTLSPEELKEMGAGVILSNTYHLWLRPGPDIVQEAGGLHSFMNWDRGILTDSGGFQVFSLSEFRRIEEEGVYFRNHLNGDKLFLSPEKAIEIQNALGSDIMMAFDECPPYPSTHEYMKKSVERTSRWAERCLKAHRRPAEQGLFAIVQGGEFEDLRRQSAQDLVSLDFPGYAIGGLSVGEPKEVMNRVLEFTTPLLPANKPRYLMGVGSPDSLIDGSIRGIDMFDCVLPTRIGRNGTVMTSEGRVVIKNAQYARDFSPLDPNCDCYTCRNYTRAYIRHLIKCEETFGIRLTSYHNVYFLIKLMEQVRQAIREDRLGDFREEFFERYGFNKPNAKNF

SEQ ID NO: 58748 - protein, 380 aa, unidentified
  source 1..380: note = Parageobacillus genomosp.
  REGION 1..380: note = tr|A0A023CLF7|A0A023CLF7_9BACI Queuine tRNA-ribosyltransferase OS=Parageobacillus genomosp. 1; OX = 1295642 GN=tgt PE=3 SV=1
MTSPIRFELIKTCRQTGARLGILHTPHGSFETPMFMPVGTLATVKTLSPEELKEMGAGVILSNTYHLWLRPGPDIVKEAGGLHSFMNWDRGILTDSGGFQVFSLSEFRRIEEEGVYFRNHLNGDKLFLSPEKAMEIQNALGSDIMMAFDECPPYPATHEYMKKSVARTSRWAERCLKAHQRPNEQGLFGIVQGGEFEDLRRQSAQDLVSLDFPGYAVGGLSVGEPKEVMNRVLEFTTPLLPANKPRYLMGVGSPDSLIDGAIRGIDMFDCVLPTRIGRNGTVMTSEGRVVIKNAQYARDFSPLDPNCDCYTCRNYTRAYIRHLIKCEETFGIRLTSYHNVYFLIKLMEQVRQAIREDRLGDFREEFFERYGFNKPNAKNF

SEQ ID NO: 58749 - protein, 380 aa, unidentified
  source 1..380: note = Parageobacillus thermantarcticus
  REGION 1..380: note = tr|A0A1I0SGU6|A0A1I0SGU6_9BACI Queuine tRNA-ribosyltransferase OS=Parageobacillus thermantarcticus OX=186116 GN=tgt PE=3 SV=1
MTSPIRFELIKTCKQTGARLGVLHTPHGSFETPMFMPVGTLATVKTLSPEELKEMGAGVILSNTYHLWLRPGHEIIKEAGGLHSFMNWDRGILTDSGGFQVFSLSDFRKIEEEGVYFRNHLNGDKLFLSPEKAIEIQNALGSDIIMAFDECPPYPATYEYMKQSVERTSRWAERCLKAHKRPDEQGLFGIVQGGEFEGLRRQSAQDLVSLDFPGYAIGGLSVGEPKEVMNRVLEFTTPLLPVNKPRYLMGVGSPDSLIDGAIRGIDMFDCVLPTRIGRNGTVMTSQGRVVIKNAQYARDFSPLDPNCDCYTCRNYTRAYIRHLIKCDETFGIRLTSYHNVYFLIKLMEQVRQAIREDRLRDFRDEFFERYGFNKPNAKNF

SEQ ID NO: 58750 - protein, 380 aa, unidentified
  source 1..380: note = Parageobacillus thermoglucosidasius
  REGION 1..380: note = tr|A0A178TYR7|A0A178TYR7_PARTM Queuine tRNA-ribosyltransferase OS=Parageobacillus thermoglucosidasius OX=1426 GN=tgt PE=3 SV=1
MTSPIRFELIKTCKQTGARLGVLHTPHGSFETPMFMPVGTLATVKTLSPEELKEMGAGIILSNTYHLWLRPGHEIVKEAGGLHSFMNWDRGILTDSGGFQVFSLSDFRKIEEEGVYFRNHLNGDKLFLSPEKAIEIQNALGSDIIMAFDECPPYPATYEYMKQSVERTSRWAERCLKAHKRPDVQGLFGIVQGGEFEDLRRQSAQDLVSLDFPGYAVGGLSVGEPKEVMNRVLEFTTPLLPADKPRYLMGVGSPDSLIDGAIRGIDMFDCVLPTRIGRNGTVMTSQGRVVIKNAQYARDFSPLDPNCDCYTCRNYTRAYIRHLIKCDETFGIRLTSYHNVYFLIKLMEQVRQAIREDRLRDFRDEFFERYGFNKPNAKNF

SEQ ID NO: 58751 - protein, 380 aa, unidentified
  source 1..380: note = Parageobacillus thermoglucosidasius
  REGION 1..380: note = tr|A0A1B7KWD3|A0A1B7KWD3_PARTM Queuine tRNA-ribosyltransferase OS=Parageobacillus thermoglucosidasius OX=1426 GN=tgt PE=3 SV=1
MTSPIRFELIKTCKQTGARLGVIHTPHGSFETPMFMPVGTLATVKTLSPEELKEMGAGIILSNTYHLWLRPGHEIVKEAGGLHSFMNWDRGILTDSGGFQVFSLSDFRKIEEEGVYFRNHLNGDKLFLSPEKAIEIQNALGSDIIMAFDECPPYPATYEYMKQSVERTSRWAERCLKAHKRPDAQGLFGIVQGGEFEDLRRQSAQDLVSLDFPGYAVGGLSVGEPKEVMNRVLEFTTPLLPANKPRYLMGVGSPDSLIDGAIRGIDMFDCVLPTRIGRNGTVMTSQGRVVIKNAQYARDFSPLDPNCDCYTCRNYTRAYIRHLIKCDETFGIRLTSYHNVYFLIKLMEQIRQAIREDRLRDFRDEFFERYGFNKPNAKNF

SEQ ID NO: 58752 - protein, 380 aa, unidentified; identical to SEQ ID NO: 55600
  source 1..380: note = Parageobacillus toebii
  REGION 1..380: note = tr|A0A3M0F590|A0A3M0F590_9BACI Queuine tRNA-ribosyltransferase OS=Parageobacillus toebii NBRC 107807 OX=1223503 GN=tgt PE=3 SV=1

SEQ ID NO: 58753 - protein, 380 aa, unidentified
  source 1..380: note = Parageobacillus toebii
  REGION 1..380: note = tr|A0A3D8LYY8|A0A3D8LYY8_9BACI Queuine tRNA-ribosyltransferase OS=Parageobacillus toebii; OX = 153151 GN=tgt PE=3 SV=1
MASPIRFELIKTCKQTGARLGILHTPHGSFETPMFMPVGTLATVKTLSPEELKEMGAGIILSNTYHLWLRPGHEIVKEAGGLHSFMNWDRGILTDSGGFQVFSLSEFRRIEEEGVYFRNHLNGDKLFLSPEKAIEIQNALGSDIMMAFDECPPYPATYEYMKQSVERTSRWAERCLKAHKRPNEQGLFGIVQGGEFEDLRRQSAQDLVSLDFPGYAVGGLSVGEPKEVMNRVLEFTTPLLPANKPRYLMGVGSPDSLIDGAIRGIDMFDCVLPTRIGRNGTVMTSQGRVVIKNAQYARDFSPLDPNCDCYTCRNYTRAYIRHLIKCDETFGIRLTSYHNVYFLIKLMEQVRQAIREDRLGDFRDEFFERYGFNKPNAKNF

SEQ ID NO: 58754 - protein, 370 aa, unidentified
  source 1..370: note = Paraglaciecola agarilytica
  REGION 1..370: note = tr|K6XC07|K6XC07_9ALTE Queuine tRNA-ribosyltransferase OS=Paraglaciecola agarilytica NO2; OX = 1125747 GN=tgt PE=3 SV=1
MQFELDNTDGKARRGRLKFDRGVVETPAFMPVGTYGTVKGMTPEELDDTGAHICLGNTFHLMLRPGTEIIKQHGDLHDFMHWQKPILTDSGGFQVFSLGDLRKITEEGVTFRSPINGEKILLTPEKSMQVQRDLGSDIVMIFDECTPHPATESEARQSMELSLRWAKRSKAEHGDNPSALFGIIQGGMYEGLRDVSLQGLEEIGFDGYAIGGLSVGEPKEDMIRILDHTTDKIPAHKPRYLMGVGKPEDLVEGVRRGVDMFDCVMPTRNARNGHLFVTSGIVKIRNAAHKTDTGPLDDKCDCYTCKNYSRSYLHHLDKCNEILGARLNTIHNLRYYQRVMQGLRDAIAEQKLDEFVADFYAQKDMPVPAL

SEQ ID NO: 58755 - protein, 372 aa, unidentified
  source 1..372: note = Paraglaciecola arctica
  REGION 1..372: note = tr|K6XMS6|K6XMS6_9ALTE Queuine tRNA-ribosyltransferase OS=Paraglaciecola arctica BSs20135; OX = 493475 GN=tgt PE=3 SV=1
MKFELDNTDGKARRGRLIFDRGVVETPAFMPVGTYGTVKGMTPEELDETGAHICLGNTFHLMLRPGTEIIKQHGDLHDFMHWDKPILTDSGGFQVFSLGDLRKITEQGVTFRSPINGEKILLTPEKSMQVQRDLGSDIVMIFDECTPYPATESEARVSMELSLRWAKRSKTEHGDNPSALFGIIQGGMYEELRDVSLAGLEDIGFDGYAIGGLSVGEPKDEMIKVLDHTTNQIPADKPRYLMGVGKPEDIVEAVRRGIDMFDCVMPTRNARNGHMFITSGVVKIRNAVHKTDTGPLDDKCDCYTCKNYSRSYLHHLDKCNEILGARLNTIHNLRYYQRIMQGLRDAIAANELDAFVTEFYALKDMPVPELKG

SEQ ID NO: 58756 - protein, 370 aa, unidentified
  source 1..370: note = Paraglaciecola hydrolytica
  REGION 1..370: note = tr|A0A136A004|A0A136A004_9ALTE Queuine tRNA-ribosyltransferase OS=Paraglaciecola hydrolytica; OX = 1799789 GN=tgt PE=3 SV=1
MKFELDNTDGKARRGRLVFERGIVETPAFMPVGTYGTVKGMTPEELDATGAHICLGNTFHLMLRPGTEIIKQHGDLHDFMHWDKPILTDSGGFQVFSLGELRKITEEGVTFRSPINGEKILLTPEKSMQVQRDLGSDIVMIFDECTPYPATESEARVSMELSLRWAKRSKDEHGDSPSALFGIIQGGMYEGLRDISLRGLEDIGFDGYAIGGLSVGEPKEDMIRVLDHVADKIPAHKPRYLMGVGKPEDLVEAVRRGIDMFDCVMPTRNARNGHLFVTDGVVKIRNAVHKTDTGPLDEKCDCYTCKNYSRSYLHHLDKCNEILGARLNTIHNLHYYQRVMKGLRDAIANKSLDAFVSEFYTQKQMAIPSL

SEQ ID NO: 58757 - protein, 370 aa, unidentified
  source 1..370: note = Paraglaciecola mesophila
  REGION 1..370: note = tr|K6Z4J8|K6Z4J8_9ALTE Queuine tRNA-ribosyltransferase OS=Paraglaciecola mesophila KMM 241 OX=1128912 GN=tgt PE=3 SV=1
MQFELDNTDGKARRGRLKFDRGVVETPAFMPVGTYGTVKGMTPEELDETGAHICLGNTFHLMLRPGTEIIKQHGDLHDFMHWQKPILTDSGGFQVFSLGDLRKITEEGVTFRSPINGEKILLTPEKSMQVQRDLGSDIVMIFDECTPHPATESEARQSMELSLRWAKRSKAEHGDNPSALFGIIQGGMYEGLRDVSLKGLEDIGFDGYAIGGLSVGEPKEDMIRILDHTTDKIPAHKPRYLMGVGKPEDLVEGVRRGVDMFDCVMPTRNARNGHLFVTSGIVKIRNAAHKTDTSPLDDKCDCYTCKNYSRSYLHHLDKCNEILGARLNTIHNLRYYQRVMQGLRDAIAEQKLDEFVADFYAQKDMPVPAL

SEQ ID NO: 58758 - protein, 380 aa, unidentified
  source 1..380: note = Paraglaciecola polaris
  REGION 1..380: note = tr|K6ZZW5|K6ZZW5_9ALTE Queuine tRNA-ribosyltransferase OS=Paraglaciecola polaris LMG 21857 OX=1129793 GN=tgt PE=3 SV=1
MGNAYQQEVFMQFELDNTDGKARRGRLKFARGVVETPAFMPVGTYGTVKGMTPEELDETGAHICLGNTFHLMLRPGTEIIKLHGDLHDFMHWHKPILTDSGGFQVFSLGDLRKITEEGVTFRSPINGEKILLTPEKSMQVQRDLGSDIVMIFDECTPHPATESEARLSMELSLRWAKRSKKEHGDNPSALFGIIQGGMYEGLRDVSLQGLEDIGFDGYAIGGLSVGEPKEDMIRILDHTTDKIPAHKPRYLMGVGKPEDLVEGVRRGIDMFDCVMPTRNARNGHLFVTSGIVKIRNAVHKTDTGPLDDKCDCYTCKNYSRSYLHHLDKCNEILGARLNTIHNLRYYQRVMQGLRDAIAEQKLDGFVADFYAQKDMPVPAL

SEQ ID NO: 58759 - protein, 372 aa, unidentified
  source 1..372: note = Paraglaciecola psychrophila
  REGION 1..372: note = tr|K7AVN8|K7AVN8_9ALTE Queuine tRNA-ribosyltransferase OS=Paraglaciecola psychrophila 170; OX = 1129794 GN=tgt PE=3 SV=1
MKFELDNTDGKARRGRLIFERGVVETPAFMPVGTYGTVKGMTPEELDETGAHICLGNTFHLMLRPGTDIIKQHGDLHDFMHWDKPILTDSGGFQVFSLGDLRKITEKGVTFRSPINGEKILLTPEKSMQVQRDLGSDIVMIFDECTPYPATESEAKVSMELSLRWAKRSKEEHGDNPSALFGIIQGGMYEDLRDVSLQGLEDIGFDGYAIGGLSVGEPKDEMIKVLDHTTNQIPADKPRYLMGVGKPEDIVEAVRRGIDMFDCVMPTRNARNGHMFITSGVVKIRNAVHKTDIGPLDEKCDCYTCKNYSRSYLHHLDKCNEILGARLNTIHNLRYYQRIMQGLRDAIAANELDAFVAEFYALKDMPVPQLKS

SEQ ID NO: 58760 - protein, 372 aa, unidentified
  source 1..372: note = Paraglaciecola sp.
  REGION 1..372: note = tr|A0A2N1D3E2|A0A2N1D3E2_9ALTE Queuine tRNA-ribosyltransferase OS=Paraglaciecola sp. MB-3u-78; OX = 2058332 GN=tgt PE=3 SV=1
MKFELDNTDGKARRGRLIFDRGVVETPAFMPVGTYGTVKGMTPEELDETGAHICLGNTFHLMLRPGTEIIKQHGDLHDFMHWDKPILTDSGGFQVFSLGDLRKITENGVTFRSPINGEKILLTPEKSMQVQRDLGSDIVMIFDECTPYPATESEARVSMELSLRWAKRSKDEHGDNPSALFGIIQGGMYEGLRDLSLAGLEDIGFDGYAIGGLSVGEPKDEMIKVLDHTTNQIPADKPRYLMGVGKPEDIVEAVRRGIDMFDCVMPTRNARNGHMFITSGVVKIRNAVHKTDIGPLDEKCDCYTCKNYSRSYLHHLDKCNEILGARLNTIHNLRYYQRIMQGLRDAIAANELDAFVTEFYAQKELTVPQLQD

SEQ ID NO: 58761 - protein, 373 aa, unidentified
  source 1..373: note = Parahaliea aestuarii
  REGION 1..373: note = tr|A0A5C9A8X4|A0A5C9A8X4_9GAMM Queuine tRNA-ribosyltransferase OS=Parahaliea aestuarii OX=1852021; GN = tgt PE=3 SV=1
MSRECHMQFEQFGSDGAARRGRLHFPRGVVETPAFMPVGTYGTVKGMLPRDIREIGAQIILGNTFHLWLRPGTDIIEQHGDLHDFMAWDGPILTDSGGFQVFSLGDMRKITEEGVKFQSPVDGSPVFLDPEKSMAIQRSLGSDIVMIFDECTPYPATEKEARDSMELSLRWAARSKAAHGESPAALFGIVQGGMYKQLREESLAGLSEIGFDGYAIGGLSVGEPKDEMMAVLEIMQSIMPADKPRYLMGVGTPADLLEGVRRGVDMFDCVMPTRNARNGNLFTSKGQLKLRNARHKTSTLPVDENCSCYTCQNFSRAYLHHLDKCNEILGSQLNTIHNLHFYQQHMAGIRAAIETESLDEFSRQFYAEQAEGV

SEQ ID NO: 58762 - protein, 367 aa, unidentified
  source 1..367: note = Parahaliea aestuarii
  REGION 1..367: note = tr|A0A5C8ZTK6|A0A5C8ZTK6_9GAMM Queuine tRNA-ribosyltransferase OS=Parahaliea aestuarii OX=1852021; GN = tgt PE=3 SV=1
MQFERLGDDGAARRGRLAFPRGAVETPAFMPVGTYGTVKGMLPRDIHEIGAQIILGNTFHLWLRPGTDIIEQHGDLHDFMGWSGPILTDSGGFQVFSLGDMRKITEDGVKFQSPVDGSPVFLDPEKSMAIQRSLGSDIVMIFDECTPYPATEKEARDSMELSLRWAARSKAAHGESPAALFGIVQGGMYAQLRGESLAGLTDIGFDGYAIGGLSVGEPKEEMMAVLDVMQPLLPADKPRYLMGVGTPADLLEGVRRGVDMFDCVMPTRNARNGNLFTSKGQLKLRNARHKTSTLPLDENCSCHTCQNFSRAYLHHLDKCNEILGSQLNTIHNLHFYQQHMAGIRAAIEAQQLDDYAAEFYAGQAEGV

SEQ ID NO: 58763 - protein, 378 aa, Paralcaligenes ureilyticus
  REGION 1..378: note = tr|A0A4R3MEQ7|A0A4R3MEQ7_9BURK Queuine tRNA-ribosyltransferase OS=Paralcaligenes ureilyticus; OX = 627131 GN=tgt PE=3 SV=1
MTGLQFELLATDGAARRGRMTLNHGIVETPIFMPVGTYGSVKAMLPHELTEVGAQIVLGNTFHLWLRPGTEVVDKHQGLHGFMQWNKPILTDSGGFQVFSLKGMRKITEEGVKFASPIDGARLFLTPEESMRIQAALDSDIVMVFDECTPYLIEERPATHDEAARSMRMSLRWARRSRQAFDQLQNPNALFGIVQGGMFEDLRDESLAGLVDTGFHGYAIGGLSVGEPKDEMMRVLAHIAPRLPAQAPRYLMGVGTPEDLVAGVALGVDMFDCVMPTRNARNGWLFTRYGDIKIRNARYRDDTRPLDPGCSCHTCGHFSRAYLHHLQRANEITGARLNTLHNLHFYLALMQEMRSAIAAGTFEAWSREFAKNRARGIE

SEQ ID NO: 58764 - protein, 379 aa, Paraliobacillus ryukyuensis
  REGION 1..379: note = tr|A0A366EFV8|A0A366EFV8_9BACI Queuine tRNA-ribosyltransferase OS=Paraliobacillus ryukyuensis; OX = 200904 GN=tgt PE=3 SV=1
MAAITYELIKTCKQTGARLGRVHTPHGSFDTPTFMPVGTLATVKTMSPEELTEMGAKIILSNTYHLWLRPGEDIVREAGGLHKFMNWDGAILTDSGGFQVFSLSDLREIEEKGVHFRNHISGEKLFLSPEKAMQIQNDLGADIMMAFDECTPYPAEHKYMKSSVERTSRWAERCLQAHQRPHDQGLFGIVQGGEYEDLRRQSAHDLTSLDFPGYAIGGLSVGEPKDVMNRVLEYTTPLLPDSKPRYLMGVGSPDSLIDGAIRGIDMFDCVLPTRIARNGTCMTSNGRLVVRNAKYARDFGPIDPNCDCHTCRNYSRAYIRHLVKSNETFGLRLTTYHNLYFLLNLMQQVREAITEDRLGDFREEFFEQYGFNKPNAKNF

SEQ ID NO: 58765 - protein, 379 aa, Paraliobacillus sp.
  REGION 1..379: note = tr|A0A0U1KLS6|A0A0U1KLS6_9BACI Queuine tRNA-ribosyltransferase OS=Paraliobacillus sp. PM-2; OX = 1462524 GN=tgt PE=3 SV=1
MEAIRYELIKTCKQTGARLGKVHTPHGSFETPMFMPVGTLATVKTMSPEELEEMGAKIILSNTYHLWLRPGEDIVKEAGGLHQFMNWDGAILTDSGGFQVFSLSDLREIEEKGVHFRNHISGEKLFLSPEKAMHIQNALGSDIMMAFDECPPYPAEHKYMKASVERTSRWAERCLQAHNRPSDQGLFGIVQGGEYEDLRRLSASDLTSMDFPGYAIGGLSVGEPKDVMNRVLEFTTPLLPNNKPRYLMGVGSPDSLIDGAVRGVDMFDCVLPTRIARNGTCMTSNGRLVVRNAKYARDFSPIDPNCNCHTCRNYSRAYIRHLVKANETFGLRLTTYHNLYFLLELMGQVRKAIKEDRLGDFRESFFEQYGFNKPDAKNF

SEQ ID NO: 58766 - protein, 372 aa, unidentified
  source 1..372: note = Paramaledivibacter caminithermalis
  REGION 1..372: note = tr|A0A1M6QV25|A0A1M6QV25_9CLOT Queuine tRNA-ribosyltransferase OS=Paramaledivibacter caminithermalis DSM 15212 OX=1121301 GN=tgt PE=3 SV=1
MAIKYELIKECKQTGARLGKIHTPHGTIETPIFMPVGTQATVKSMTPEELKEIESQIILSNTYHLYLRPGHDLVEKAGGLHKFMNWDRPILTDSGGFQVFSLGDLRKISEEGVEFRSHIDGSKHFISPEKAIEIQNSLGSDIIMAFDECAPYPADREYVKNSLERTTRWAKRCKKAHKNTDTQGLFGIIQGGIYKDMREQSAKEITELDFPGYAVGGLSVGEPKPLMYEVLEYTTPLMPKNKPRYLMGVGSPDCLIEGVIRGIDMFDCVLPTRIARNGTAMTSQGRVTIKQARFYDDFTPLDPECDCYTCRNYTKAYLRHLFKANEILSARLFSYHNLYFLLKLMKNIREAIKNDNLLDYRKEFFEKYGYEL

SEQ ID NO: 58767 - protein, 377 aa, unidentified
  source 1..377: note = Paramesorhizobium deserti
  REGION 1..377: note = tr|A0A135HWM6|A0A135HWM6_9RHIZ Queuine tRNA-ribosyltransferase OS=Paramesorhizobium deserti; OX = 1494590 GN=tgt PE=3 SV=1
MTSTNFQFKVLATDGAARRGEITMPRGTVRTPAFMPVGTGGTVKAMYMDQVRDLGSDIILGNTYHLMLRPGAERVAKLGGLHEFARWPGPILTDSGGFQVMSLAQLRKLNENGVTFQSHIDGRAYEMTPERSIEIQGLLDSDIQMQLDECVALPSEERDIERAMELSLRWAERCKAAFGDQPGKAMYGIVQGGDNARLRARSAEALKAMGLKGYSIGGLAVGEPQEIMLDMLEVVCPILPTEKPRYLMGVGTPDDILKSVARGVDMFDCVMPTRAGRHGLAFTRHGKINLRNARHAEDHRPLDEESNCPAARDYSRAYLHHLVKSGEFLGAMLLTWNNLAYYQSLMQGCRDAIEAGKFQDFAGVTQENWARGDLPVL

SEQ ID NO: 58768 - protein, 376 aa, unidentified
  source 1..376: note = Paramuribaculum intestinale
  REGION 1..376: note = tr|A0A2V1IXH2|A0A2V1IXH2_9BACT Queuine tRNA-ribosyltransferase OS=Paramuribaculum intestinale; OX = 2094151 GN=tgt PE=3 SV=1
MNFNLQHTCADSAARAGMISTAHGDILTPIFMPVGTVASVKAVHQRDLADDVKAQIILGNTYHLYLRPGTEILHQAGGLHRFMGWERPILTDSGGFQVFSLAANRKLKEEGAWFRSHIDGSKHLFTPEKVVDIQRIIGSDIMMALDECPPGTADYDYAYHSLQLTQRWLKRGWDRFKATEGLYGFSQTFFPIVQGCTYPELRRESAKFVADLGAEGNAIGGLAVGEPTEVMYDMIEVVNEILPADKPRYLMGVGTPANMLEAIDRGVDMMDCVMPTRNGRNGMLFTMNGILNMRNLKWANDFSPLDPDGTSFVDHAYSRAYVRHLFVSQELLALQIGAIHNLCFYLHLMDEARRHIIEGDFSQWKRAIIPQLTHRL

SEQ ID NO: 58769 - protein, 376 aa, Parapedobacter composti
  REGION 1..376: note = tr|A0A1I1I2F6|A0A1I1I2F6_9SPHI Queuine tRNA-ribosyltransferase OS=Parapedobacter composti; OX = 623281 GN=tgt PE=3 SV=1
MKFTLQATDKHTQARAGIMETAHGTIETPIFMPVGTAGTVKAVHQHELADDIKAQIILGNTYHLYLRPGLDVLQRAGGLHRFNGWQKPILTDSGGYQVYSLTEVRKIREEGVTFRSHIDGSKHLFTPENVMDTQRVIGADIVMAFDECTPYPCDYQYARRSLDMTHRWLKRCCERFDATEPLYGYEQTLFPIVQGSVYRDLREKSAETIAAFGREGNAIGGLSVGEPAEEMYAMTEVVCRILPAEKPRYLMGVGTPVNILENIALGIDMFDCVMPTRNARNGMLFTRQGIINIKNKKWETDFSPLDAESDLLADRVYSKAYLRHLIRSQEILGAQIASLHNLHFYLWLVGEARAHIVAGDFHEWKSKMVKQLDERL

SEQ ID NO: 58770 - protein, 376 aa, unidentified
  source 1..376: note = Parapedobacter indicus
  REGION 1..376: note = tr|A0A1I3CW04|A0A1I3CW04_9SPHI Queuine tRNA-ribosyltransferase OS=Parapedobacter indicus; OX = 1477437 GN=tgt PE=3 SV=1
MKFTLQAKDRQSKARAGAIETAHGTIETPIFMPVGTAGTVKAVHQHELVRDIGAQIILGNTYHLYLRPGLDILNRAGGLHRFNGWDKPILTDSGGYQVYSLTEVRKIKEEGVTFRSHIDGSKHLFTPENVVDTQRIIGADIVMAFDECTPYPCDYQYAKRSLDMTHRWLKRCCDRFDHTQPLYGYEQTLFPIVQGSVYRDLRERSAETIAAFGRDGNAIGGLSVGEPAEEMYAMTEVVCNILPAEKPRYLMGVGTPVNILENIALGIDLFDCVMPTRNARNGMLFTRQGIINIKNKKWEADFSPIDAESDLLADRVYSKAYLRHLIRSQEILGAQIATLHNLHFYLWLVGEARKHILAGDFREWKNKMVAQLDERL

SEQ ID NO: 58771 - protein, 376 aa, Parapedobacter koreensis
  REGION 1..376: note = tr|A0A1H7JDV9|A0A1H7JDV9_9SPHI Queuine tRNA-ribosyltransferase OS=Parapedobacter koreensis; OX = 332977 GN=tgt PE=3 SV=1
MKFTLQAKDTQSKARAGILETAHGPIETPIFMPVGTAGTVKAVHQHELVADIKAQIILGNTYHLYLRPGLDILQGAGGLHRFNGWEKPILTDSGGYQVYSLTEVRKIKEEGVTFRSHIDGSKHLFTPENVMDTQRIIGADIVMAFDECTPYPCDYQYAKRSLDMTHRWLGRCCDRFDTTEPLYGYEQALFPIVQGSVYRDLREQSAETIAAFEREGNAIGGLSVGEPAEEMYAMTEVVCDILPVEKPRYLMGVGTPVNILENIALGIDMFDCVMPTRNARNGMLFTRRGIINIKNKKWERDFSPIDAESDLLADRVYSKAYLRHLIRSQEILGAQIASLHNLHFYLWLVGEARAHIVAGDFRVWKNSMVKQLDERL

SEQ ID NO: 58772 - protein, 432 aa, Parapedobacter luteus
  REGION 1..432: note = tr|A0A1T5CF10|A0A1T5CF10_9SPHI Queuine tRNA-ribosyltransferase OS=Parapedobacter luteus OX=623280; GN = tgt PE=3 SV=1
MRSISISIRAVIGCSTCDASQQLAVRMPQPTSTGVKLKILCHYQRLCFVFPIFASTMKFTLQAADAQSKARAGILETAHGTIETPIFMPVGTAGTVKAVHQHELVNDIEAQIILGNTYHLYLRPGLDILHAAGGLHRFNGWEKPILTDSGGYQVYSLTEVRKIKEEGVTFRSHIDGSKHLFTPENVMDTQRIIGADIVMAFDECTPYPCDYQYARRSLDMTHRWLKRCCERFDATEPLYGYDQTLFPIVQGSVYRDLREKSAETVASFGRDGNAIGGLSVGEPAEEMYAMTEVVCNILPAEKPRYLMGVGTPVNILENIALGIDMFDCVMPTRNARNGMLFTRRGIINIKNKKWEQDFSPIDAESDLLADRVYTKAYLRHLIRSQEILGAQIASLHNLHFYLWLVGEARAHIMAGDFHAWKNSIVKQLDERL

SEQ ID NO: 58773 - protein, 304 aa, Parapedobacter sp.
  REGION 1..304: note = tr|A0A3N7HXN2|A0A3N7HXN2_9SPHI Queuine tRNA-ribosyltransferase (Fragment) OS=Parapedobacter sp.; OX = 1958893 GN=EAS52_21580 PE=3 SV=1
MKFTLQATDKQCRARAGLMETAHGTIETPIFMPVGTSGTVKAVHQHELVDDIGAQIILGNTYHLYLRPGLDVLNRAGGLHRFNGWDKPILTDSGGYQVYSLTEVRKIKEEGVTFRSHIDGSKHLFTPENVMDTQRIIGADIVMAFDECTPYPCDYSYAKRSLDMTHRWLKRCCERFDQTQPLYGYEQTLFPIVQGSVYPDLRARSAETIASFERDGNAIGGLSVGEPAEEMYAMTELVCNILPTEKPRYLMGVGTPVNILENIALGIDLFDCVMPTRNARNGMLFTKEGIINIKNKKWEADFSP

SEQ ID NO: 58774 - protein, 376 aa, Paraperlucidibaca baekdonensis
  REGION 1..376: note = tr|A0A3E0H5I0|A0A3E0H5I0_9GAMM Queuine tRNA-ribosyltransferase OS=Paraperlucidibaca baekdonensis; OX = 748120 GN=tgt PE=3 SV=1
MKFTLHATDGKARRGTLTFDRGTVETPAFMPVGTYGTVKGMLPRDIHAIGAEIILGNTFHLWLRPGTEIIKAHGDLHDFTQWQGPILTDSGGFQVFSLGKLRKITEEGVRFQSPVDGSKVFLSPEESMRIQRDLGSDVVMIFDECTPYPATHIEADKSLELSLRWAKRSKDAHGDNPNALFGIVQGGMYEDLRLKSLAGLEQIDFDGYAIGGLSVGEPKEDMIRILDFLPEHLPAHKPRYVMGVGKPEDLVEGVRRGIDMFDCVMPTRNARNGHYFVSNGIVRIRNSQYKTDTGPLDAECDCQACTGFSRAYLHHLDKCGEMLGAQLGTIHNLRYYQRLMAGLREAIEQGRLQAFVDDFYARRDLPTPPLTVDISE

SEQ ID NO: 58775 - protein, 375 aa, unidentified
  source 1..375: note = Paraphotobacterium marinum
  REGION 1..375: note = tr|A0A220VEK2|A0A220VEK2_9GAMM Queuine tRNA-ribosyltransferase OS=Paraphotobacterium marinum; OX = 1755811 GN=tgt PE=3 SV=1
MKFELKNESGGARRGQLEFKRGTVETPAFMPVGTYGTVKGMTTEEVESIGAEIILGNTFHLWLRPGQEVIKNHGDLHDFMNWKGPILTDSGGFQVFSLGDIRKITEDGVHFRNPVNGEKIFMDAEKSMEIQKDLGSDIVMIFDECTPYPATHEEAQKSMELSLRWAKRSKAHFKKLENKNALFGIVQGSVYPELRKLSAEQLIDIGFDGYAIGGLAVGEPKDEMRKVLEFTCPLLPKDKPRYLMGVGKPEDLVEGVRRGIDMFDCVMPTRNARNGHLFVRDGVIKIRNAKYKNDTLPLDEECDCYTCKNYSRAYLHHLDKCNEILGARLNTIHNLKYYQDLMQGIRSSIDENRFEEFVEEFYSRRNLNVPPLITK

SEQ ID NO: 58776 - protein, 376 aa, Paraprevotella clara
  REGION 1..376: note = tr|G5SWB9|G5SWB9_9BACT Queuine tRNA-ribosyltransferase OS=Paraprevotella clara YIT 11840; OX = 762968 GN=tgt PE=3 SV=1
MKFELQHTDTLTSARAGVLTTDHGPIETPVFMPVGTVGSVKAVHPWELKEDIKAQIILGNTYHLYLRPGIEILGKAGGLHKFNSFNGPILTDSGGFQVFSLTGIRKLREEGCEFRSHIDGSKHIFTPEKVMDIERAIGADIMMAFDECPPGTSDYAYAKKSLGLTHRWLDRCIRRFNETEPRYGYQQSLFPIVQGCTYKDLRIQSAEFVASKEADGNAIGGLAVGEPAEVMYEMIEIVNGILPKDKPRYLMGVGTPVNILEGIERGVDMFDCVMPTRNGRNAMLFTQNGIMNLRNKKWEDDFSPLDPDGTSYVDKAYSKAYLHHLFKAQELLALQIASIHNLAFYLWLTREARRHIITGDFASWKASMVKRVAARL

SEQ ID NO: 58777 - protein, 376 aa, Paraprevotella clara
  REGION 1..376: note = tr|A0A412U5X6|A0A412U5X6_9BACT Queuine tRNA-ribosyltransferase OS=Paraprevotella clara OX=454154; GN = tgt PE=3 SV=1
MKFELQHTDTLTSARAGVLTTDHGPIETPVFMPVGTVGSVKAVHPWELKEDIKAQIILGNTYHLYLRPGIEILGKAGGLHKFNSFNGPILTDSGGFQVFSLTGIRKLREEGCEFRSHIDGSKHIFTPEKVMDIERAIGADIMMAFDECPPGTSDYAYAKKSLGLTHRWLDRCIRRFNETEPRYGYRQSLFPIVQGCTYKDLRIQSAEFVASKEADGNAIGGLAVGEPAEVMYEMIEVVNGILPKDKPRYLMGVGTPVNILEGIERGVDMFDCVMPTRNGRNAMLFTQNGIMNLRNKKWEDDFSPLDPDGTSYVDKAYSKAYLHHLFKAQELLALQIASIHNLAFYLWLTREARRHIITGDFASWKASMVKRVAARL

SEQ ID NO: 58778 - protein, 376 aa, Paraprevotella xylaniphila
  REGION 1..376: note = tr|F3QX90|F3QX90_9BACT Queuine tRNA-ribosyltransferase OS=Paraprevotella xylaniphila YIT 11841 OX=762982 GN=tgt PE=3 SV=1
MKFELQHTDSLTSARAGVLTTDHGLIETPVFMPVGTVGSVKAVHPWELKEDIKAQIILGNTYHLYLRPGINVLEKAGGLHKFNGFDRPILTDSGGFQVFSLTGIRKLREEGCEFRSHIDGSKHIFTPEKVMDIERAIGADIMMAFDECPPGTSDYAYAKKSLGLTHRWLDRCIRRFNETEPRYGYQQSLFPIVQGCTYKDLRIQSAEFVASKEADGNAIGGLAVGEPAEVMYEMIEVVNGILPKDKPRYLMGVGTPVNILEGIERGVDMFDCVMPTRNGRNAMLFTQNGIMNLRNKKWEDDFSPLDPDGTSYVDKAYSKAYLHHLFKAQELLALQIASIHNLAFYLWLTREARRHIIVGDFSSWKALMVKRVAARL

SEQ ID NO: 58779 - protein, 377 aa, unidentified
  source 1..377: note = Pararheinheimera mesophila
  REGION 1..377: note = tr|A0A3P3QL49|A0A3P3QL49_9GAMM Queuine tRNA-ribosyltransferase OS=Pararheinheimera mesophila; OX = 1547515 GN=tgt PE=3 SV=1
MKFELLKTDGKARRGRLVFERGIVETPAFMPVGTYGTVKGMTPEELEATGAQICLGNTFHLMLRPGTEIIKKHGDLHDFMHWHKPILTDSGGFQVFSLGELRKIKEEGVTFRSPLNGEKIMLTPERSMQVQRDLGSDIVMIFDECTPYPATEQQAKKSMEMSLRWAKRSKEAHGDNPAALFGIIQGGMYPNLRDVSLQGLEEIGFDGYAIGGLSVGEPKEDMINILNHTTGQMPQHKPRYLMGVGKPEDIVEAVRRGIDMFDCVMPTRNARNGHLFVSTGVIKIRNAKHKDDTSTLDPECDCYTCKNYSRSYLHHLDRCNEILGARLNTIHNLHHYQKLMQGLRAAIAEQKLEDFVAEFYRKRGMDVPPLEVSLTEQ

SEQ ID NO: 58780 - protein, 377 aa, unidentified
  source 1..377: note = Pararheinheimera tangshanensis
  REGION 1..377: note = tr|A0A5C8LWR9|A0A5C8LWR9_9GAMM Queuine tRNA-ribosyltransferase OS=Pararheinheimera tangshanensis; OX = 400153 GN=tgt PE=3 SV=1
MKFELLKTDGKARRGRLVFERGIVETPAFMPVGTYGTVKGMTPEELEATGAQICLGNTFHLMLRPGTEIIKKHGDLHDFMHWHKPILTDSGGFQVFSLGELRKIKEEGVTFRSPLNGEKIMLTPERSMQVQRDLGSDIVMIFDECTPYPATEQQAKKSMEMSLRWAKRSKDEHGDNPAALFGIIQGGMYPNLRDISLQGLEEIGFDGYAIGGLSVGEPKEDMINILNHTTGQMPQHKPRYLMGVGKPEDIVEAVRRGIDMFDCVMPTRNARNGHLFVSTGVIKIRNAKHKDDTSTLDAECDCYTCKNYSRSYLHHLDRCNEILGARLNTIHNLHHYQKLMQGLRAAIAEQKLEDFVAEFYQKRGMDIPPLEDSLTEQ

SEQ ID NO: 58781 - protein, 376 aa, unidentified
  source 1..376: note = Pararhizobium polonicum
  REGION 1..376: note = tr|A0A1C7NYT8|A0A1C7NYT8_9RHIZ Queuine tRNA-ribosyltransferase OS=Pararhizobium polonicum; OX = 1612624 GN=tgt PE=3 SV=1
MTETFQFNIQATDGKARRGTVSMPRGEIRTPAFMPVGTVGTVKAMYLDQVRDLGADIILGNTYHLMLRPGPERVARLGGLHELIRWPYPILTDSGGFQVMSLAGLRKLDEKGVTFKSHVDGALHHMSPERSIEIQGMLDSDIQMQLDECVRLPAEATDIERAMEMSLRWADRCKTAFGDQPGKAMFGIVQGGDVPALRVRSAQALSSLDLKGYAIGGLAVGEPQAVMLDMLDITCPELPVEKPRYLMGVGTPDDILKSVARGIDMFDCVMPTRAGRHGLAFTRRGRVNLRNARHAEDTRPLDDQSSCPAARDYSRAYLHHLVRADESLGGMLLTWNNLAYYQDLMAGIRKAIEEGRYAAFMEETQEMWRQGDLAPL

SEQ ID NO: 58782 - protein, 379 aa, unidentified
  source 1..379: note = Pararhizobium sp.
  REGION 1..379: note = tr|A0A506UED2|A0A506UED2_9RHIZ Queuine tRNA-ribosyltransferase OS=Pararhizobium sp. BGMRC6574; OX = 2590452 GN=tgt PE=3 SV=1
MSEAFGFRLLARDGVARRGEVTMPRGTIRTPAFMPVGTAGTVKAMYLDQVRALGADVILGNTYHLMLRPGAERVARLGGLHTFAGWPHPILTDSGGFQVMSLAALRKLDETGVTFRSHVDGTPHVLTPERSIEIQGLLDSDIQMQLDECVRLPGERGDIERAMELSVRWAERCKHAFGDQPGKAMFAIVQGGDHADLRERSARALVDLDLKGYAVGGLAVGEPQAVMLDMLDATCAHLPADKPRYLMGVGTPEDILLSVGRGIDMFDCVMPTRAGRHGVAYTRRGRINLRNARHAEDTRPLDAESDCPAARDYSRAYLHHLVRSKEALGGMVLTWNNLAYYQNLMAGIRAAIEAGRYADHVEAVRAEWARGDLPPVDGR

SEQ ID NO: 58783 - protein, 376 aa, unidentified
  source 1..376: note = Pararhodobacter aggregans
  REGION 1..376: note = tr|A0A2T7UMW7|A0A2T7UMW7_9RHOB Queuine tRNA-ribosyltransferase OS=Pararhodobacter aggregans; OX = 404875 GN=tgt PE=3 SV=1
MVERFSFELSAVDGAARTGVIHTPRGEIRTPAFMPVGTAGTVKAMMPESVRATGADILLGNTYHLMLRPTAERIAALGGLHRFMNWERPILTDSGGFQVMSLASLRKLTEEGVRFASHIDGSKHMLTPERSMEIQRLLGSDIVMAFDECPALPAEDKVVAESMRMSMRWARRSREAFGDRPGHALFGIMQGGVTRDLREESAAALREIGFEGYAIGGLAVGEGQAAMFGVLDYAPGFLPEDKPRYLMGVGKPDDIVGAVERGVDMMDCVLPSRSGRTGQAWTRRGSVNLRNARHRDDPRPLDEACTCPACRSYSRAYLHHVVKADEIIGSMLLTWHNLQYYQDLMAGLRAAIAGGRLAAFVAEFHATRAEGDIEPL

SEQ ID NO: 58784 - protein, 376 aa, unidentified
  source 1..376: note = Pararhodobacter sp.
  REGION 1..376: note = tr|A0A2T8HYQ5|A0A2T8HYQ5_9RHOB Queuine tRNA-ribosyltransferase OS=Pararhodobacter sp. AM505; OX = 2172121 GN=tgt PE=3 SV=1
MSQRFSFELHSTDGAARSGVIQTPRGEVRTPAFMPVGTAATVKAMMPESVRATGADILLGNTYHLMLRPTAERIHALGGLHKFMNWERPILTDSGGFQVMSLASLRKLTEEGVKFSSHIDGSKHMVTPERSMEIQRLLGSDIVMCFDECPALPADDATVAKSMQLSMRWARRSREAFGDRPGHALFGIMQGGVTRDLREESAKALIDIGFEGYAVGGLAVGEGQEAMFGVLDYAPGFLPADKPRYLMGVGKPDDIVGAVKRGIDMMDCVLPSRSGRTGQGWTRHGSVNLRNARHKDDPRPLDAACGCPACRNYSRAYLHHVVRSDEIIGSMLLTWHNLHYYQDLMQGMREAIGAGRFAEFEAEFHAKRAEGDIAPL

SEQ ID NO: 58785 - protein, 376 aa, unidentified
  source 1..376: note = Pararhodobacter sp.
  REGION 1..376: note = tr|A0A2U2C585|A0A2U2C585_9RHOB Queuine tRNA-ribosyltransferase OS=Pararhodobacter sp. CIC4N-9; OX = 2184063 GN=tgt PE=3 SV=1
MSERFSFTLNATDGAARTGVIHTPRGEIRTPAFMPVGTAGTVKAMMPDSVRATGADILLGNTYHLMLRPTAERIAALGGLHRFMNWERPILTDSGGFQVMSLANLRKLTEEGVRFSSHIDGSKHMLSPERSMEIQRLLGSDIVMCFDECPALPAEDKVVAESMRLSMRWARRSREAFGDRPGHALFGIMQGGVTQDLREESAKALVEIGFEGYAIGGLAVGEGQEAMFGVLDYAPGFLPEDKPRYLMGVGKPDDIVGAVERGVDMMDCVLPSRSGRTGQGWTRRGAVNLRNARHRDDPRPLDEACGCPACRNYSRAYLHHVVRADEIIGSMLLTWHNLQYYQDLMQGLRDAIAAGSLAGFVAAFHENRARGDIEPL

SEQ ID NO: 58786 - protein, 378 aa, unidentified
  source 1..378: note = Pararhodospirillum oryzae
  REGION 1..378: note = tr|A0A512H3R4|A0A512H3R4_9PROT Queuine tRNA-ribosyltransferase OS=Pararhodospirillum oryzae; OX = 478448 GN=tgt PE=3 SV=1
MSGSCFSFTVTATDGAARLGHLETAHGPVETPVFMPVGTAGTVKAMMPESVAATGARIILGNTYHLMLRPGAERVAALGGLHRFMDWPGPILTDSGGFQVMSLAGLRTLTEDGVTFQSHIDGSRHLLTPERSMEIQDQLDATITMAFDECPPFPAEKQAVADSMRRSMRWARRSREAFRQRPGYALFGINQGGIHPDLRAESAEALTALGFEGYAVGGLAVGEPFEAMLETLEATVPLLPFDRPRYLMGVGRPEDIVAAVARGIDMFDCVMPTRSGRTAKAFTRTGDLNLRNARHRDDPGPLDPACSCPACRRFSRAYLHHLVRAEEILGPMLLTWHNLQYYQDLMADLRQAIGQGSLETFLATFHATRAQGNGPAPA

SEQ ID NO: 58787 - protein, 375 aa, unidentified
  source 1..375: note = Pararhodospirillum photometricum
  REGION 1..375: note = tr|H6SN68|H6SN68_PARPM Queuine tRNA-ribosyltransferase OS=Pararhodospirillum photometricum DSM 122 OX=1150469 GN=tgt PE=3 SV=1
MRMFSFTVAATDGAARLGRLETAHGPVETPVFMPVGTAGTVKAMTPEAVASTGARIVLGNTYHLMLRPTAERVARLGGLHRFMGWDGPILTDSGGYQVMSLAKLRTLTEEGVTFQSHIDGSRHLLTPERSMEIQDLLDATITMAFDECPPFPAEKADVAQSMRRSMRWAERSRRAFRERPGYALFGINQGGIHPDLREESAAALKEIGFEGYAVGGLAVGEPFEAMLAALDGTVPHLPADRPRYLMGVGRPEDIVAAVARGIDMFDCVMPTRSGRTGKAFTRRGDLNMRNARHRDDPRPLDEACGCPACRRFSRAYLHHLIHAEEILGAMLLTWHNIQVYQDLMADLRTAIGAGRLSACLDDFHATRALGDLEPV

SEQ ID NO: 58788 - protein, 382 aa, unidentified
  source 1..382: note = Parasaccharibacter apium
  REGION 1..382: note = tr|A0A2C6J2Z6|A0A2C6J2Z6_9PROT Queuine tRNA-ribosyltransferase OS=Parasaccharibacter apium; OX = 1510841 GN=tgt PE=3 SV=1
MHWQKEAQSGQARAGWLHTRHGSVPTPTFMPVGTVGTVKGITMDNVRATGAGIVLGNTYHLMLRPTAERVQRLGGLHRMMDWPGPILTDSGGFQVMSLGPLRKMDEDGVTFRSHIDGSAHRLTPESSTDIQYKLDATITMAFDECPALPATKEVLAASMQRSMRWAARSREAFIARPGYGQFGIVQGGTEPDLRADSARALRDIGFEGYAIGGLAVGEGQELMFSTLDYTTPLLPEDQPRYLMGVGTPDDLLGAVMRGCDMFDCVMPSRAGRTARAYTERGTLNLRNARFAEDTRPISPDDDSPMAGRYSRAYLHHLFRANEMLGPMLLTLHNLAYYQRLMRQIRAAIIAGTLEQTAAELRQNWAKGDWSEEEYPMPRYHQD

SEQ ID NO: 58789 - protein, 382 aa, unidentified
  source 1..382: note = Parasaccharibacter apium
  REGION 1..382: note = tr|A0A2S4PGE8|A0A2S4PGE8_9PROT Queuine tRNA-ribosyltransferase OS=Parasaccharibacter apium; OX = 1510841 GN=tgt PE=3 SV=1
MHWQKDAQCGRARAGWLHTRHGSVPTPTFMPVGTVGTVKGITMDNVRATGAGIVLGNTYHLMLRPTAERVQRLGGLHRMMDWPGPILTDSGGFQVMSLGPLRKMDEDGVTFRSHIDGSSHRLTPESSTDIQYKLDATITMAFDECPALPATKDVLEASMERSMRWAARSREAFIARPGYGQFGIVQGGTEQDLRERSALALREIGFEGYAIGGLAVGEGQELMFSTLDYTTPMLPEDQPRYLMGVGTPDDLLGAVMRGCDMFDCVMPSRAGRTARAYTERGTLNLRNARFAEDTRPISPEDDSPMAGRYSRAYLHHLFRANEMLGPMLLTLHNLAYYQRLMRQIRAAIVAGTLEQTATQLRQNWARGDWSEDEWPMPRYQQG

SEQ ID NO: 58790 - protein, 440 aa, Parascardovia denticolens
  REGION 1..440: note = tr|A0A380ZR96|A0A380ZR96_PARDN Queuine tRNA-ribosyltransferase OS=Parascardovia denticolens; OX = 78258 GN=tgt PE=3 SV=1
MNDSASSGTEQKTIIPQAQPKLPAPLGAAPGTPGDRSAFGFELKARIPGKHGRTGIIHTPHGTIATPAFVPVATQATMKAVLPEQMDSLGAQCLLANAFHLFERPGEDIIDAAGGLNEFMHWNKPTFTDSGGFQVLSLGAGFKKTLAMDVEGKKSDDVIASGKNRLAFVDDKGVTFKSPLNGASKRFSAEISMQIQHKIGADIMFAFDELTTLMNTRHYQERSVERTFRWAQRCLTEHQRLTAQRLGKPYQALYGVVQGANYEDLRRLAASQVASLDFDGFGIGGAIEKRIIGQICSWICDELPENKPRHVLGIAAVDDIFACVENGGDTFDCVAPARTARNGAVYTHDGRWNVKRSSMRTDFRPIEENCDCYTCRNYSRAYICHLLHAREMTGATLTTIHNERFFVRLLDEIRDSIDGGYFADFKEETLARFYKDGSKG

SEQ ID NO: 58791 - protein, 427 aa, Parascardovia denticolens
  REGION 1..427: note = tr|I8J8V4|I8J8V4_PARDN Queuine tRNA-ribosyltransferase OS=Parascardovia denticolens IPLA 20019 OX=1193128 GN=tgt PE=3 SV=1
MSNTATGHTLHPKGAVKGKPGDRSAFGFETGTRLEGKHGRTGVIHTPHGDIHTPAFVPVATQAAMKGVLPESMTDLGAQCTLANAFHLFERPGEDVLDAAGGLGEFMNWDKPTFTDSGGFQVMSLGAGFKKTLAMDLETAKSDKAVASGKERLAFVDEDGVTFKSPLNGEKKRFSAEISMGIQHKLGADIMFAFDELTTLMNTKRYQERSVERTFRWAKRCLAEHQRLTAERLGKPYQALFGVVQGANYEDLRHKAAAGIGSLDFDGFGIGGAMEKRIIGEICSWACDELPENKPRHILGIAAVDDIFACVENGGDTFDCVSPARTARNGAVFTHDGRWNVKRSAMKTDFRPIEEGCDCYTCQHYSRAYICHLLRSGEMVGATLATIHNERFFVRLLDEIRESMDGGYFHDFRDQTLARFYANGSRG

SEQ ID NO: 58792 - protein, 374 aa, unidentified
  source 1..374: note = Parashewanella curva
  REGION 1..374: note = tr|A0A3L8PWQ4|A0A3L8PWQ4_9GAMM Queuine tRNA-ribosyltransferase OS=Parashewanella curva OX=2338552; GN = tgt PE=3 SV=1
MKFELDKTVGRARRGRLKFERGTVETPAFMPVGTYGTVKGMTPEEVRATGADILLGNTFHLWLRPGEEIMRKHGDLHDFMNWQRPILTDSGGFQVFSLGDIRKITEEGVHFRSPIDGSKIFMDAEKSMQIQYSLGSDVVMIFDECTPYPATHDEARKSMQMSLRWAQRSRDEFDRLENPNNLFGIIQGSVYEDLRDESLKGLVDIGFDGYAIGGLAVGEPKPDMHRILEHVCPQIPEDKPRYLMGVGKPEDLVEGVRRGVDMFDCVMPTRNARNGHLFTSTGVIKIRNAKHREDTSPLDEKCDCYTCKNYSRAYLYHLDKCGEILGARLNTIHNLRYYQMLMEGLRDAIDAGTLDDFVHEFYTAQGKEVPELKD

SEQ ID NO: 58793 - protein, 374 aa, unidentified
  source 1..374: note = Parashewanella spongiae
  REGION 1..374: note = tr|A0A3A6UAV1|A0A3A6UAV1_9GAMM Queuine tRNA-ribosyltransferase OS=Parashewanella spongiae; OX = 342950 GN=tgt PE=3 SV=1
MKFELDKTQGRARRGRLVFDRGTVETPAFMPVGTYGTVKGMTPEEVRATGADILLGNTFHLWLRPGEEIMRKHGDLHDFMNWQRPILTDSGGFQVFSLGAMRKITEEGVMFRSPINGEKIFMDAEKSMQIQDSLGSDVVMIFDECTPYPATHDEARKSMQMSLRWAQRSRDEFDRLENPNSLFGIIQGGVYEDLRDESLEGLTNIGFDGYAIGGLAVGEPKPDMHRILEHVCPKIPEEKPRYLMGVGKPEDLVEGVRRGVDMFDCVMPTRNARNGHLFTSTGVIKIRNAKHRDDTATLDEKCDCYTCKNYSRSYLYHLDKCGEILGARLNTIHNLRYYQMLMEGLRGAIDAGTLDDFIHEFYSSQGREVPELND

SEQ ID NO: 58794 - protein, 379 aa, unidentified
  source 1..379: note = Parasphingopyxis lamellibrachiae
  REGION 1..379: note = tr|A0A3D9FE98|A0A3D9FE98_9SPHN Queuine tRNA-ribosyltransferase OS=Parasphingopyxis lamellibrachiae OX=680125 GN=tgt PE=3 SV=1
MSDRFSFSIAATDGAARTGTIAMQRGEIRTPAFMPVGTAATVKAMKPADVRATGADIILGNTYHLMLRPGAERVAKLGGLHDFMGWDRPILTDSGGFQVMSLSELAKMSEEGVSFKSHLDGSKHMLTPERSMEIQRLLGSDIVMAFDECTPFPATRDQAAASMDRSMRWAKRSREGFDAGGEHASRAALFGIQQGSMDETLRQRSSDALREIGFDGYAVGGLAVGEGQEEMFRVLDFAVPMLPDEAPHYLMGVGKPDDLVGAVARGIDMFDCVLPTRSGRTGQAFTADGPINIKNARFGEDTGPLDPECGCPVCGQWSRAYLHHLIRSGEILGAMLMTEHNLFFYQSLMAGMRDAIATGTFAAFAADFSTRYRKPRTEG

SEQ ID NO: 58795 - protein, 377 aa, Parasporobacterium paucivorans
  REGION 1..377: note = tr|A0A1M6C477|A0A1M6C477_9FIRM Queuine tRNA-ribosyltransferase OS=Parasporobacterium paucivorans DSM 15970 OX=1122934 GN=tgt PE=3 SV=1
MYKLIHKDGQAKRGELHTVHGVIQTPVFMNVATVAAIKGAVSTEDLLGLNTQVALSNTYHLHVRPGDEVIRKLGGLHKFMVWDRPILTDSGGFQVFSLAKLRKIREEGVEFQSHIDGHKIFMGPEESMRIQSNLGSTIAMAFDECPSSTAERAYVQDSVDRTTRWLERCRTEMKRLNGLEDTLNPKQMLFGITQGAIYEDIRMEHAKRIAEMDLDGYAIGGLAVGETHDEMYRIIEATVPYLPQDKPTYLMGVGTPANILEAVERGVDFFDCVYPSRNGRHGHVYTNKGKMNMFNAKYELDSDPIEEGCGCPTCRRYSRAYIRHLLKAKEMLGMRLCVLHNLYFYNTMMEEVRKAIEEDRFQEYKKMRLEGFEQSSR

SEQ ID NO: 58796 - protein, 377 aa, Parasutterella excrementihominis
  REGION 1..377: note = tr|F3QH24|F3QH24_9BURK Queuine tRNA-ribosyltransferase OS=Parasutterella excrementihominis YIT 11859 OX=762966 GN=tgt PE=3 SV=1
MSLTFKLHKTEGFARRAEIHLNHGVVQTPVFMPVGTYGTVKAMSPLELNEIGTQILLGNTFHLWLRPGLEVIAEHGGLHGFMGWEKPILTDSGGFQVFSLGKLRKITEEGVRFASPINGERLFLTPEVSMEIQKVLNSDIAMIFDECTPYEIDGRPATEKEAADSMRLSLRWARRSRDEFDRLQNPNALFGIVQGGMFEHLRDESLEGLKAIGFDGYAIGGLSVGEPKEEMMKILDHLKTRMPEDKPRYLMGVGTPEDLVEGVKRGIDMFDCVMPTRNARNGWLFTRYGDIKLRNAKHKHDLRPLDESCDCYCCRNFSRAYLHHLQKVNEILGARLNTIHNLHYYLNLMKEIREALDQGNFEAWCKKFAEDRARGTD

SEQ ID NO: 58797 - protein, 382 aa, unidentified
  source 1..382: note = Parcubacteria bacterium
  REGION 1..382: note = tr|A0A0S7WXH3|A0A0S7WXH3_9BACT Queuine tRNA-ribosyltransferase OS=Parcubacteria bacterium DG_72; OX = 1703764 GN=tgt PE=3 SV=1
MIMEFKVEKKSKKSRARLGFLKTSHGVLQTPCLVPVATQAVVKTLSSEETEQTKSQILICNTFHLHLKPKESIIKSSGGLHKFMNWKRPLMTDSGGFQIFSLGFGKDSGVGKILKYFPEQEFKKVKARQQPKQIKITQKGVYFKSPLDGSKLFLGPKESIKIQEKLGADIIFAFDECTSPLASKKYIEASLKRTHKWAEICLVSHQTKQALFGIVQGSRFKQLREKSSKFINSLDFDGFAIGGDLGKSKKTMKNILNWVIPNLQDSRPRHLLGIGYLEDIENIIKAGIDTFDCTVATHYARRGIAFTAKAKLNLNQSKFLKGKKSLDSKCSCFVCQNYKRNYISHLIRAKEITGMKLLTFHNLYFFNTFVENIRKKIKNNKI

SEQ ID NO: 58798 - protein, 402 aa, unidentified
  source 1..402: note = Parcubacteria bacterium
  REGION 1..402: note = tr|A0A0L0LCB3|A0A0L0LCB3_9BACT Queuine tRNA-ribosyltransferase OS=Parcubacteria bacterium C7867-006 OX=1659200 GN=tgt PE=3 SV=1
MSPLKFEIHKELENGLGRVGTIHTSHGDIQTPAFVAVGTKGTVKSLTPEQVRDSGVQTIIANTYHLYLEPGDENIKKMGGLHKAMNWQGPLMTDSGGFQVFSLGAAYGKNGVSKISHGKTEELILPEFNDAEVPKIAKIDPNGVMFRDHSKGDAHYFTPEKSIDIQHNLGADIIFAFDECTSPHESLHYQKEALERTHRWAKRSLEYHKSKPNAETQALFGIVQGGRDETLRKESAEFIGALDFDGFGIGGSFDKEDMDKAVQWCNEILPKEKPRHLLGIGEPEDLFMAVENGCDLFDCVAPTRIARNGGVYTKEGKINILNQKFREDQSPLDSECGCYACKNFSRSYIAHLFHAKEMLGSTLLSIHNIYFIAHMVDGMREAILNNNFDKYKKDFLSRYYNF

SEQ ID NO: 58799 - protein, 398 aa, unidentified
  source 1..398: note = Parcubacteria group
  REGION 1..398: note = tr|A0A0F9YF85|A0A0F9YF85_9BACT Queuine tRNA-ribosyltransferase OS=Parcubacteria group bacterium GW2011_GWA2_31_28 OX=1618806 GN=tgt PE=3 SV=1
MNSINFKIIKKLKNTLGRASILSTSHGDILTPAFVIVGTKGTIKSLSPEQVANLGAQVILANTYHLYLQPGYKIVKKAGGLHKFMNWKGPIMTDSGGFQVFSLGEAMGASVSKIACGEFSGTKFPKIQKQKKMAEIDENGVKFTSLIDGSSHYFTPEKSIEIQHNIGADIIFAFDECTSSQASYEYQVKAMERTHRWAKQCIDYHKKFKNSKTQSLFGIVQGGKFSDLRKKSAKIIASMSFEGFGIGGSFIKEDIDASVGLVNKILPEDKPRHLLGIGEPVDLFGGVEKGVDLFDCIAPTRIARNGTLYTKTGKINIFNAKFKQDFKPIEKDCKCYTCQNYTKAYIAHLFRAKEMFAATLASIHNLYFIIKLVSKIRESILNDDFYKFKKDFLKIYNK

SEQ ID NO: 58800 - protein, 405 aa, unidentified
  source 1..405: note = Parcubacteria group
  REGION 1..405: note = tr|A0A0G1VMX8|A0A0G1VMX8_9BACT Queuine tRNA-ribosyltransferase OS=Parcubacteria group bacterium GW2011_GWA2_49_16 OX=1618851 GN=tgt PE=3 SV=1
MKSTNFSVTKELSGKLGRMGVLETPHGMINTPAFVTVGTKATVKSLTPEQVASLGAQVVLANTYHLYLEPGEKILHDAGGLHKFMQWHGPTMTDSGGFQIFSLGAAFGKKTGKLADTEQLITGDEIEEGDTAGNLAKIDEDGVTFKSYKNGSKHRFTPERSIEIQHHIGADIIFAFDECTSPAAPYEYQKEAMDRTHRWARRSLEAHKRFSGKQNLHAQALFGIIQGGRHRDLREESAQVLAEMDFDGYGIGGSFDKKDMHTAVGWVNAILPKDKPRHLLGIGEPLDLFSAVENGCDLFDCVAPTRMGRNGSLYTTDGRINIFNTRFMNDFAPIDAGCDCYTCKSFTRAYIAHLFRSQEMLAATLASIHNLRFIISLVEKMRAAILDDSFESLKTSFTARYYKRI

SEQ ID NO: 58801 - protein, 378 aa, unidentified
  source 1..378: note = Parendozoicomonas haliclonae
  REGION 1..378: note = tr|A0A1X7AEC1|A0A1X7AEC1_9GAMM Queuine tRNA-ribosyltransferase OS=Parendozoicomonas haliclonae; OX = 1960125 GN=tgt PE=3 SV=1
MRPECFMSFEKLGEDGLARRGRVTFPRGTIETPCFMPVGTYGTVKGMLPRDIHEIGAEIILGNTFHLMLRPGTEVIKEHGTLHDFNGWNKPILTDSGGFQVFSLGAMRKITEEGVAFRSPVDGSKVFMTPESSMQVQRDLGSDIVMIFDECTPGDADHERARTSMEMSLRWADRSRKAHGDSQSSLFGIIQGGMFEDLRARSLDGLLEIGFDGYAIGGLSVGESKEDMYRILDHTPRRIPAEYPRYLMGVGTPEDIVEAVRRGVDMFDCVMPTRNARNGHLFTAQGVVKIRNAKHRHAEEPLEAGCDCYTCRNFTRAYLHHLDKCNEMLGSMLNTIHNLRYYQRLMAGLRQAIEQGKLDAFVTEFYAERGMVAKPLAG

SEQ ID NO: 58802 - protein, 396 aa, unidentified
  source 1..396: note = Parolsenella catena
  REGION 1..396: note = tr|A0A3G9JZ10|A0A3G9JZ10_9ACTN Queuine tRNA-ribosyltransferase OS=Parolsenella catena OX=2003188; GN = tgt PE=3 SV=1
MTLSDDSLRAAWPQPGELPDNLFHFDITAQDPKTHARCGVFHTAHGDVPTPIFMPVGTKATVKGLMPSQVADLGAKIILNNTYHLAMRPGADLVAEMGGVHKFMRWNGPILTDSGGFQVFSHNEFMKLTNEGVSFRAIEYDGARIRWTPEDNMAIAEKLGSDICMQLDQCPGYPATKAYVARAVELSSMWGERCWNAHTRPDQALFGIVQGGMHMDLRLRSLAHLEECGDFPGYGIGGYSVGEDHETMYETLEPLVAEHMPKNKPRYLMGVGNPTTLVRAVASGVDMFDCVLPTRTARMGTAFSSEGRLNLKNARFKHDQRVLDEHCDCPACAGGFTRAYIHHLVRQGEMLGGILLSQHNIRYLLALMERVRAAIAQGRYEQFYRDWMDSPAANDF

SEQ ID NO: 58803 - protein, 381 aa, unidentified
  source 1..381: note = Parvibacter caecicola
  REGION 1..381: note = tr|A0A3N0AAB9|A0A3N0AAB9_9ACTN Queuine tRNA-ribosyltransferase OS=Parvibacter caecicola OX=747645; GN = tgt PE=3 SV=1
MALFDCTVNATSGNARALTYETAHGPFQTPMFMPVGTSATVKGITVRQLEELGAQVVLANTYHLSQRPGPEIVAEAGGVHGFSGYQGPMLTDSGGFQIFSLEDTRKLDDDGVTFRSVYDGTYVRWTPEENMRIQQLLGADIAMQLDQCPPYPATREFVQRAVDLSSAWAKRCLAAHTRPDQTLFGIVQGGMHLDLRLESVRRLLAIEQESLAGGGRRFGGFGIGGYSVGEDHETMFETLGDVARALPEERPRYLMGVGNPTTLVRAVGEGVDMFDCVLPTRTARMGTAFSSTGRMNMRNAKYARDLGPLDAACNCPTCQNHSRAYLRHLVKQGEMLGAILLSVHNLHFLIDLMARAREAVLAGEYPQFQRAWMKSPAAKDY

SEQ ID NO: 58804 - protein, 379 aa, Parvibaculum lavamentivorans
  REGION 1..379: note = tr|A7HXM8|A7HXM8_PARL1 Queuine tRNA-ribosyltransferase OS=Parvibaculum lavamentivorans (strain DS-1 / DSM 13023 / NCIMB 13966) OX=402881 GN=tgt; PE = 3 SV=1
MSQFKFTLAATDGRARTGAIDTPRGTIRTPAFMPVGTAATVKALYPEQVRATGADIVLGNTYHLMLRPGAEEIAALGGLHSFMNWPHPILTDSGGFQVMSLSKLRKMTEEGVTFQSHLDGSRHLLSPERSIEIQCLLGSDIQMQLDECTPFPATEAEAKKSMELSLRWAARSKSAFEAQPHRTEGMALFGIVQGSTYEPLRKASAAGLQEIGFDGYSVGGLAVGEGQAEMLRVLDFTTPALPENKPRYLMGVGTPDDLVESVARGIDMFDCVMPTRNGRHGLAFTSRGKVNLKNARHAADKRPLDETSTCPAARDYSRAYLHHLIKSGEMLGSMLVSWINVHYYQSLMAGMRAAIAEQRFAAFVADFKAAQAGGDIEPL

SEQ ID NO: 58805 - protein, 373 aa, Parvibaculum sp.
  REGION 1..373: note = tr|A0A2D4VJK6|A0A2D4VJK6_9RHIZ Queuine tRNA-ribosyltransferase OS=Parvibaculum sp. OX=2024848; GN = tgt PE=3 SV=1
MSAFSFDLQGTDGKARTGVIHTPRGNIRTPAFMPVGTAGTVKAMYPEQVRETGADIILGNTYHLMLRPGAEEVAALGGLHTFANWPHPILTDSGGFQVMSLARLRKMTEEGVTFQSHIDGSRHMLSPERSIEIQCLLGSDIQMVLDECTPFPATEAEAEKSMELSLRWAARSKEAFAAQPLRKEGMALFGIVQGSTYEPLRRRSAEGLVDIGFDGYAVGGLAVGEGQEAMLRVLDYAPDMLPQDKPRYLMGVGTPDDLVEAVRRGIDMFDCVMPTRNGRHGLAFTRFGKINLKNARHATDTSPLDPESSCPAARDYSRAYLHHLVKSGEMLGSMLVSWNNIHYYQSLMAGMRAAISEGRFEAFVADFKAAQGA

SEQ ID NO: 58806 - protein, 379 aa, Parvibaculum sp.
  REGION 1..379: note = tr|A0A2E1EF75|A0A2E1EF75_9RHIZ Queuine tRNA-ribosyltransferase OS=Parvibaculum sp. OX=2024848; GN = tgt PE=3 SV=1
MSAFSFSLHATDGRARTGVISTPRGEIRTPAFMPVGTAATVKAMYPEQVREAGADIVLGNTYHLMLRPGAEQVAALGGLHTFMNWPHPILTDSGGFQVMSLSKLRKMTEEGVTFQSHIDGSRHMLSPERSIEIQCLLDSDIQMQLDECTPFPATEEEARVSMEMSLRWAQRSKDAFVGQPHRKEGMALFGIVQGSTYEPLRKLSAAGLRDIGFDGYAVGGLAVGEGQAEMLRVLDFTTPALPEDRPRYLMGVGTPDDLVESVALGIDMFDCVMPTRNGRHGLAFTRRGKVNLKNARHAADPRPLDEESSCPAARDYSRAYLHHLVKSEEMLGSMLVSWINIHYYQQLMAGMRAAIAEGRFEAFRRDFKAAQAAGDIDPL

SEQ ID NO: 58807 - protein, 378 aa, unidentified
  source 1..378: note = Parvibium lacunae
  REGION 1..378: note = tr|A0A368L1N7|A0A368L1N7_9BURK Queuine tRNA-ribosyltransferase OS=Parvibium lacunae OX=1888893; GN = tgt PE=3 SV=1
MTNPTFQLLATDGAARRGRLTLQHGTVETPIFMPVGTYGSVKGMRPADLDDIQTQIILGNTFHLWLRPGLQTIEAFGGLHRFIGWDKPILTDSGGFQVFSLGALRKITEEGVRFQSPINGDRLFLTAEESMRIQTVLNADVVMIFDECTPYKVGDQIATYQQAADSMRLSLRWAKRSRQAFAALENPNALFGIVQGGMYEPLREESLAGLLDIGFHGYAIGGLSVGEPKEDMVRILEHTTPRLPAQQARYLMGVGTPEDLVFAVSRGIDMFDCVMPTRNARNGWLFTRFGDIKIRNAKYKSDTRPLDDTCTCYTCQHFSRGYLHHLQKCNELLGAQLNTIHNLHYYLTLMATMRSAIETGTFRAFLAQFQAERQRGTD

SEQ ID NO: 58808 - protein, 372 aa, Parvimonas micra
  REGION 1..372: note = tr|A8SLR7|A8SLR7_9FIRM Queuine tRNA-ribosyltransferase OS=Parvimonas micra ATCC 33270; OX = 411465 GN=tgt PE=3 SV=1
MELKYELIKKSSDCNARLGKIYTNRGVIETPIFMPVGTRATVKAMNVDELKEIGSQIILGNTYHLYLKPGQEIIRMAGGLHKFMNWDKPILTDSGGFQVFSLGDIRKITEEGVEFRSHIDGSKHFISPEKSMEIQNDLGSDIMMAFDECAPYPASYDYVKNSMERTLRWLKRCKDYHKNTDNQALFGIIQGGMFKDLRRESALATIDMDLPGYAIGGLSVGEPKEIMVEYLNYTTQFMPENKPRYLMGVGTPDYLFEAVEAGIDMADCVLPTRIARNGTAMTSKGKLVIKNAKYAKDFAPLDDECDCYACRNHTRAYIRHLINVDEILGARLLSIHNLRFLLKTMENIRQAIREDRFLEYKKEFYKKYGYED

SEQ ID NO: 58809 - protein, 372 aa, Parvimonas micra
  REGION 1..372: note = tr|A0A3B7DI18|A0A3B7DI18_9FIRM Queuine tRNA-ribosyltransferase OS=Parvimonas micra OX=33033; GN = tgt PE=3 SV=1
MELKYELIKKSSDCNARLGKIYTNRGVIETPIFMPVGTRATVKAMNVDELKEIGSQIILGNTYHLYLKPGQEIIRMAGGLHKFMNWDKPILTDSGGFQVFSLGDIRKITEEGVEFRSHIDGSKHFISPEKSMEIQNDLGSDIMMAFDECAPYPASYDYVKNSMERTLRWLKRCKDYHKNTDNQALFGIIQGGMFKDLRRESALATIDMDLPGYAIGGLSVGEPKEIMVEYLNYTTQFMPENKPRYLMGVGTPDYLFEAVEAGIDMADCVLPTRIARNGTAMTSKGKLVIKNAKYAKDFAPLDDECDCYACRNHTRAYIRHLVNVDEILGARLLSIHNLRFLLKTMENIRQAIREDRFLEYKKEFYKKYGYED

SEQ ID NO: 58810 - protein, 372 aa, Parvimonas sp.
  REGION 1..372: note = tr|F5TC22|F5TC22_9FIRM Queuine tRNA-ribosyltransferase OS=Parvimonas sp. oral taxon 110 str. F0139 OX=767100 GN=tgt PE=3 SV=1
MELKYELIKKSSDCNARLGKIYTNRGVIETPIFMPVGTRATVKAMNVDELKEIGSQIILGNTYHLYLKPGQEIIRMAGGLHKFMNWDKPILTDSGGFQVFSLGDIRKITEEGVEFRSHIDGSKHFISPEKSMEIQNDLGSDIMMAFDECAPYPASYDYVKNSMERTLRWLKRCKDYHKNTDNQALFGIIQGGMFKDLRRESALATIDMDLPGYAIGGLSVGEPKEIMVEYLNYTTQFMPENKPRYLMGVGTPDYLFEAVEAGIDMADCVLPTRIARNGTAMTSKGKLVIKNAKYAKDFAPLDDECDCYACRNYTRAYIRHLINVDEILGARLLSIHNLRFLLKTMENIRQAIREDRFLEYKKEFYKKYGYED

SEQ ID NO: 58811 - protein, 372 aa, Parvimonas sp.
  REGION 1..372: note = tr|F9PQP5|F9PQP5_9FIRM Queuine tRNA-ribosyltransferase OS=Parvimonas sp. oral taxon 393 str. F0440 OX=944565 GN=tgt PE=3 SV=1
MELKYELIKKSSDCNARLGKIYTSRGVIETPIFMPVGTRATVKAMNVDELKEIGSQIILGNTYHLYLKPGQEIIRMAGGLHKFMNWDKPILTDSGGFQVFSLGDIRKITEEGVEFRSHIDGSKHFISPEKSMEIQNDLGSDIMMAFDECAPYPASYDYVKNSMERTLRWLKRCKDYHKNTDNQALFGIIQGGMFKDLRRESALATIDMDLPGYAIGGLSVGEPKEIMVEYLNYTTQFMPENKPRYLMGVGTPDYLFEAVEAGIDMADCVLPTRIARNGTAMTSKGKLVIKNAKYAKDFAPLDDECDCYACRNHTRAYIRHLINVDEILGARLLSIHNLRFLLKTMENIRQAIREDRFLEYKKEFYKKYGYED

SEQ ID NO: 58812 - protein, 373 aa, Parvularcula bermudensis
  REGION 1..373: note = tr|E0THV2|E0THV2_PARBH Queuine tRNA-ribosyltransferase OS=Parvularcula bermudensis (strain ATCC BAA-594 / HTCC2503 / KCTC 12087) OX=314260; GN = tgt PE=3 SV=1
MTTFGYTLHATSGAARRGTVTTPRGLIQTPAFMPVGTAATVKAMQVRDVAATGAEIILGNTYHLMLRPSAERIARLGGLHRFMGWEGPILTDSGGFQVMSLAKLRRLTEKAVTFQSHIDGSRHELSPERSIEIQNLLGSDIQMQLDECPPFPIAEDASLESLELSLRWAKRSKAAFDHLADDGRALFGIVQGSVYPDQRKRSAEGLMEIGFPGYSVGGLAVGEGQGAMFETLEVTTPLLPRDKPRYLMGVGKPDDLVGAVARGIDMFDCVLPTRSGRHGQAFTWDGPINIKNATYQDDPTPLDPESDCPASRDYAKAYLNHLFRAGEYLAATLLSWHNLAFYQALMQRMRTAIEDDRFEAFAADFLNRYRSSS

SEQ ID NO: 58813 - protein, 375 aa, Parvularcula sp.
  REGION 1..375: note = tr|A0A2E1XK72|A0A2E1XK72_9PROT Queuine tRNA-ribosyltransferase OS=Parvularcula sp. OX=1979207; GN = tgt PE=3 SV=1
MTAEFSFSLKATDGPARTGLISTPRGEIRTPAFMPVGTAGTVKAMLADHVRQTGADIVLGNTYHLMLRPSAERVSALGGLHKFMNWPHPILTDSGGFQVMSLSKLRKLTEEGVSFQSHIDGSKHMLTPERSIEIQCLLGSDIQMQLDECPAIPIEHDKARESMLLSVRWAKRSKRAFEEKSKPGQALFGIVQGANYEDLRRESLDKLMEIGFPGYSIGGLAVGEGREEMFRVLEFTTPHMDKAKPRYLMGVGKPADIVGAVARGVDMFDCVAPTRSGRHGQAWTKAGAINIKNAAFADDPAPLDPESACPASRDYSKAYLHHLFRAGEYLGPMLLTWHNLHYYQELMGGMRSAIAEGRFAEFVARFRAESGETVV

SEQ ID NO: 58814 - protein, 358 aa, Parvularcula sp.
  REGION 1..358: note = tr|A0A355C2F4|A0A355C2F4_9PROT Queuine tRNA-ribosyltransferase OS=Parvularcula sp. OX=1979207; GN = tgt PE=3 SV=1
MGVIHTPRGEIATPAFMPVGTAGAVKAMFPEDVAATGAHIILGNTYHLMLRPGAERVAALGGLHKFMNWPRPILTDSGGFQVMSLSSLRKLTEEGVSFQSHIDGSKHMLSPERSIEIQCLLGADIQMQLDECPAIPIAQDKAAESMRLSLRWAERSKRAFAEKSKPGQALFGIVQGANYEDLRRESLSRLMEIDFPGYSIGGLAVGEGREEMFRVLDFTTPVMDADKPRYLMGVGKPADIVGAVARGVDMFDCVLPTRAGRHGQAWTPDGPITLTNARFAGDETPLDPDSSCPASRDYSKAYLHHLFKAGEYLGPMLLSWHNLHYYQQLMDGLRAAIAERRLSDFVGEFRARTGETVL

SEQ ID NO: 58815 - protein, 383 aa, Pasteurella aerogenes
  REGION 1..383: note = tr|A0A448K1U3|A0A448K1U3_PASAE Queuine tRNA-ribosyltransferase OS=Pasteurella aerogenes OX=749; GN = tgt PE=3 SV=1
MKFKLHKTNGVARRGTMTFSRPQGEFTVETPAFMPVGTYGTVKGMTPEEVRATGAEILLGNTFHLWLRPGQEVMRKHGDLHDFMQWHRPILTDSGGFQVFSLGKLRKITEEGVKFQNPINGERIFLSPEKSMEIQYDLGSDIVMIFDECAPYPSTFDYTKKSMEMSLRWAQRSRQRFDELGNTNALFGIVQGGVFEELRQISLEGLVKIGFDGYAVGGLAVGEPKEDMHRILEYVCPQLPTDKPRYLMGVGKPEDLVEGVRRGIDMFDCVMPTRNARNGHLFVSDGIVKIRNAKYRDDTSPLDPECDCYTCKHYTKSYLYHLDKCGEILGARLNTIHNLRYYQRLMAQIRQAIEDDRFEQFVVDFYAKIGKPVPPLQSETTKS

SEQ ID NO: 58816 - protein, 379 aa, Pasteurella bettyae
  REGION 1..379: note = tr|I3DCE3|I3DCE3_9PAST Queuine tRNA-ribosyltransferase OS=Pasteurella bettyae CCUG 2042; OX = 1095749 GN=tgt PE=3 SV=1
MKFKLKTTSGSARRGQLTFNRPKGEFTVQTPAFMPVGTYGTVKGMTPEEVRATGAEILLGNTFHLWLRPGQEVMRKHGDLHDFMQWHRPILTDSGGFQVFSLGKLRKITEEGVKFQNPINGERIFLSPEKSMEIQYDLGSDIVMIFDECTPYPATFDYAKKSMEMSLRWAKRSRVRFDQLENKNALFGIIQGGTFEELRKISIEGLVNIGFDGYAVGGLAVGEPKEEMHRILEFITPLIPTNKPRYLMGVGKPEDLVEGVRRGIDMFDCVMPTRNARNGHLFVTDGIVKIRNAKYKDDTSPLDPECDCYTCKNYTKSYLYHLDKCGEILGARLNTIHNLRYYQRLMEQIRKAIEEDRFDEFVVEFYARQGREVPPLQKS

SEQ ID NO: 58817 - protein, 387 aa, unidentified
  source 1..387: note = Pasteurella caecimuris
  REGION 1..387: note = tr|A0A4S2DZB3|A0A4S2DZB3_9PAST Queuine tRNA-ribosyltransferase OS=Pasteurella caecimuris; OX = 1796644 GN=tgt PE=3 SV=1
MKYELDKTSGNARRGRLVFERPQGTFKVETPAFMPVGTYGTVKGMTPEEVRATGAEILLGNTFHLWLRPGQEVMRKHGDLHDFMQWHRPILTDSGGFQVFSLGKLRKITEEGVKFQNPINGERIFLSPEKSMEIQYDLGSDIVMIFDECTPYPATFDYAKKSMEMSLRWAKRSRDRFDELGNKNALFGIIQGGVFEELRKISLEGLVNIGFDGYAVGGLAVGEPKEDMHRILEYICPQIPADKPRYLMGVGKPEDLVEGVRRGIDMFDCVMPTRNARNGHLFVTDGIVKIRNAKYRDDTTPLDPHCDCYTCKNYTKAYLYHLDKCGEILGARLNTIHNLRYYQRLMAEIRQAIEEDRFDDFVTEFYTRMGKPIPPLQLDTTPSPQSE

SEQ ID NO: 58818 - protein, 383 aa, Pasteurella canis
  REGION 1..383: note = tr|A0A379ESQ7|A0A379ESQ7_9PAST Queuine tRNA-ribosyltransferase OS=Pasteurella canis OX=753 GN=tgt; PE = 3 SV=1
MKYELDKTSGNARRGRLVFERPQGTFTVETPAFMPVGTYGTVKGMTPEEVRATGAEILLGNTFHLWLRPGQDVMRKHGDLHDFMQWYRPILTDSGGFQVFSLGKLRKITEEGVKFQNPINGERIFLSPEKSMEIQYDLGSDIVMIFDECTPYPATFDYAKKSMEMSLRWAKRSRDRFDELGNKNALFGIIQGGVYEELRKVSVEGLIDIGFDGYAVGGLAVGEPKEDMHRILEYVCPQIPTNKPRYLMGVGKPEDLVEGVRRGIDMFDCVMPTRNARNGHLFVSNGIVKIRNAKYRDDTTPLDSECDCYTCKNYTKAYLYHLDKCNEILGARLNTIHNLRYYQRLMAQIREAIEQDRFDDFVHEFYAKIGKPVPPMQLDTENA

SEQ ID NO: 58819 - protein, 383 aa, Pasteurella dagmatis
  REGION 1..383: note = tr|C9PPT8|C9PPT8_9PAST Queuine tRNA-ribosyltransferase OS=Pasteurella dagmatis ATCC 43325; OX = 667128 GN=tgt PE=3 SV=1
MKYELDKTDGNARRGRLVFERPQGTFTVETPAFMPVGTYGTVKGMTPEEVRATGAEILLGNTFHLWLRPGQEVMRKHGDLHDFMQWHRPILTDSGGFQVFSLGKLRKITEEGVKFQNPINGERIFLSPEKSMEIQYDLGSDIVMIFDECTPYPATFDYAKKSMEMSLRWAKRSRDRFDELGNKNALFGIIQGGVYEELRKISVEALVNIGFDGYAVGGLAVGEPKEDMHRILEYVCPQIPADKPRYLMGVGKPEDLVEGVRRGIDMFDCVMPTRNARNGHLFVTHGIVKIRNAKYRDDTTPLDAECDCYTCKNYTKAYLYHLDKCNEILGARLNTIHNLRYYQRLMAEIRQAIEQDRFDDFVNEFYAKIGKLVPPLQLGTKND

SEQ ID NO: 58820 - protein, 386 aa, Pasteurella langaaensis
  REGION 1..386: note = tr|A0A2U0SNS2|A0A2U0SNS2_9PAST Queuine tRNA-ribosyltransferase OS=Pasteurella langaaensis DSM 22999 OX=1122935 GN=tgt PE=3 SV=1
MKFKLKTTSGTARRGEMIFERPNKEGEITEFKVQTPAFMPVGTYGTVKGMTPEEVRATGAEILLGNTFHLWLRPGQEVMRKHGDLHDFMQWHRPILTDSGGFQVFSLGKLRKIKEEGVTFQNPINGERIFLSPEKSMEIQYDLGSDIVMIFDECTPYPATFDYAKNSMEMSLRWAKRSRDRFDELENPRALFGIVQGGTYEELRKISAEGLVNIGFDGYAVGGLAVGEPKEEMHRILEFTTPLLPADKPRYLMGVGKPEDLVEGVRRGIDMFDCVMPTRNARNGHLFVSNGIVKIRNAKYREDTTALDPECDCYTCKNYTKAYLYHLDKCGEILGARLNTIHNLRYYQRLMDQIRTAIEEDRFDDFVQEFYAKIGKDVPPLQQNLK

SEQ ID NO: 58821 - protein, 387 aa, unidentified
  source 1..387: note = [Pasteurella] mairii
  REGION 1..387: note = tr|A0A379B5W7|A0A379B5W7_9PAST Queuine tRNA-ribosyltransferase OS=[Pasteurella] mairii OX=757; GN = tgt PE=3 SV=1
MKFKLHKTNGVARRGTMTFSRPQGEFTVETPAFMPVGTYGTVKGMTPEEVRATGAEILLGNTFHLWLRPGQEVMRKHGDLHDFMQWHRPILTDSGGFQVFSLGKLRKITEEGVKFQNPINGEHIFLSPEKSMEIQYDLGSDIVMIFDECAPYPSTFDYTKKSMEMSLRWAQRSRQRFDELGNKNALFGIVQGGVFEELRQVSLEGLVNIGFDGYAVGGLAVGEPKEDMHRILEYVCPQLPTDKPRYLMGVGKPEDLVEGVRRGIDMFDCVMPTRNARNGHLFVSDGIVKIRNAKYRDDTSPLDPECDCYTCKHYTKSYLYHLDKCGEILGARLNTIHNLRYYQRLMAQIRQAIEEDRFEQFVVDFYAKIGKPVPPLQSETTKAEFQE

SEQ ID NO: 58822 - protein, 385 aa, Pasteurella multocida
  REGION 1..385: note = sp|P57831|TGT_PASMU Queuine tRNA-ribosyltransferase; OS = Pasteurella multocida (strain Pm70) OX=272843 GN=tgt; PE = 3 SV=1
MKYELDKTDGNARRGRLVFERPQGTFTVETPAFMPVGTYGTVKGMTPEEVRATGAEILLGNTFHLWLRPGQEVMRKHGDLHDFMQWHRPILTDSGGFQVFSLGKLRKITEEGVKFQNPINGERIFLSPEKSMEIQYDLGSDIVMIFDECTPYPATFDYAKKSMEMSLRWAKRSRDRFDELGNKNALFGIIQGGVYEELRKVSVEGLVNIGFDGYAVGGLAVGEPKEDMHRILEYVCPQIPADKPRYLMGVGKPEDLVEGVRRGIDMFDCVMPTRNARNGHLFVSDGIVKIRNAKYREDTSPLDPECDCYTCKHYTKAYLYHLDKCGEILGARLNTIHNLRYYQRLMAQIRQAIEEDRFEAFVQEFYAKMGKPVPPMQSEIKSDEG

SEQ ID NO: 58823 - protein, 385 aa, Pasteurella multocida
  REGION 1..385: note = tr|J4SPG0|J4SPG0_PASMD Queuine tRNA-ribosyltransferase OS=Pasteurella multocida subsp. multocida str. Anand1_buffalo OX=1032868 GN=tgt PE=3 SV=1
MKYELDKTDGNARRGRLVFERPQGTFTVETPAFMPVGTYGTVKGMTPEEVRATGADILLGNTFHLWLRPGQEVMRKHGDLHDFMQWHRPILTDSGGFQVFSLGKLRKITEEGVKFQNPINGERIFLSPEKSMEIQYDLGSDIVMIFDECTPYPATFDYAKKSMEMSLRWAKRSRDRFDELGNKNALFGIIQGGVYEELRKVSVEGLVNIGFDGYAVGGLAVGEPKEDMHRILEYVCPQIPADKPRYLMGVGKPEDLVEGVRRGIDMFDCVMPTRNARNGHLFVSDGIVKIRNAKYREDTSPLDPECDCYTCKHYTKAYLYHLDKCGEILGARLNTIHNLRYYQRLMAQIRQAIEEDRFEAFVQEFYAKMGKPVPPMQSEIKSDEG

SEQ ID NO: 58824 - protein, 382 aa, Pasteurella skyensis
  REGION 1..382: note = tr|A0A1H7Y5B4|A0A1H7Y5B4_9PAST Queuine tRNA-ribosyltransferase OS=Pasteurella skyensis OX=97481; GN = tgt PE=3 SV=1
MKYQLKKTSGNARRGCMTFSRPKGEFHVETPAFMPVGTYGTVKGMTPEEVKATGAQILLGNTFHLWLRPGQDVMRKHGDLHDFMQWHAPILTDSGGFQVFSLAKMRKITEEGVSFRHPINGSKIFLSPEKSMEIQYDLGSDIVMIFDECAPYPSTFNYTKQSMEMSVRWAQRSRQRFDELGNKNALFGIVQGGVFEELRKVSIDELVKIGFDGYAVGGLAVGEPKEDMHRILEYVCPQLPKDKPRYLMGVGKPEDLVEGVRRGIDMFDCVMPTRNARNGHLFVTDGVVKIRNAKYREDTSTLDPHCDCYTCKNYTKAYLYHLDKCGEILGSRLNTIHNLRYYQRLMAEIRQSIDEDRFDDFVVEFYQRMGREVPPLQSECKA

SEQ ID NO: 58825 - protein, 379 aa, Pasteurella sp.
  REGION 1..379: note = tr|A0A4Y9H269|A0A4Y9H269_9PAST Queuine tRNA-ribosyltransferase OS=Pasteurella sp. WM03 OX=2558280; GN = tgt PE=3 SV=1
MKYELDKTSGNARRGRLVFERPQGTFKVETPAFMPVGTYGTVKGMTPEEVRATGAEILLGNTFHLWLRPGQEVMRKHGDLHDFMQWHRPILTDSGGFQVFSLGKLRKITEEGVKFQNPINGERIFLSPEKSMEIQYDLGSDIVMIFDECTPYPATFDYAKKSMEMSLRWAKRSRDRFDELGNKNALFGIIQGGVFEELRKISLEGLVNIGFDGYAVGGLAVGEPKEDMHRILEYICPQIPTDKPRYLMGVGKPEDLVEGVRRGIDMFDCVMPTRNARNGHLFVTDGIVKIRNAKYRDDTTPLDPHCDCYTCKNYTKAYLYHLDKCGEILGARLNTIHNLRYYQRLMAEIRQAIEEDRFDDFVAEFYARIGKPVPPLQKG

SEQ ID NO: 58826 - protein, 386 aa, Pasteurella testudinis
  REGION 1..386: note = tr|A0A1W1VA39|A0A1W1VA39_9PAST Queuine tRNA-ribosyltransferase OS=Pasteurella testudinis DSM 23072 OX=1122938 GN=tgt PE=3 SV=1
MKYELHKTDGRARRGKLTFQRPHGEFSVETPAFMPVGTYGTVKGMTPEEVKATGAQILLGNTFHLWLRPGQEVMKMHGDLHDFMQWYGPILTDSGGFQVFSLGDIRKIKEEGVHFRNPINGEKIFLSPEKSMEIQYDLGSDIVMIFDECTPYPADFDYAKKSMEMSLRWAKRSRDRFDELGNKNALFGIIQGSVFEELRKVSVEGLVDIGFDGYAVGGLAVGEPKEDMHRILEYVCPQIPQDKPRYLMGVGKPEDLVEGVRRGIDMFDCVMPTRNARNGHLFTADGVVKIRNAKYRDDTSPLEAECDCYTCKNYTKAYLYHLDKCGEILGARLNTIHNLRYYQRLMAQLREAIEKGELEQFVEQFYARIGKPVPPLNEYHAFDEGK

SEQ ID NO: 58827 - protein, 386 aa, unidentified
  source 1..386: note = Pasteurellaceae bacterium
  REGION 1..386: note = tr|A0A5C4PXA5|A0A5C4PXA5_9PAST Queuine tRNA-ribosyltransferase OS=Pasteurellaceae bacterium Phil31 OX=2585022 GN=tgt PE=3 SV=1
MKYELHQTDGRARRGRLTFQRPQGEFSVETPAFMPVGTYGTVKGMTPEEVKATGAQILLGNTFHLWLRPGQEVMKLHGDLHDFMQWHGPILTDSGGFQVFSLGDIRKIKEEGVHFRNPINGERIFLSPEKSMEIQYDLGSDIVMIFDECTPYPADFDYAKNSMEMSLRWAKRSRDRFDELGNKNALFGIIQGGVYEELRKVSVEGLVDIGFDGYAVGGLAVGEPKEDMHRILEYVCPQIPQDKPRYLMGVGKPEDLVEGVRRGIDMFDCVMPTRNARNGHLFTADGVIKIRNAKYRDDTSPLEAECDCYTCKHYSKAYLYHLDKCGEILGARLNTIHNLRYYQRLMAQLREAIEKGELEQFVEQFYARIGKPVPPLNQYHAFSEVK

SEQ ID NO: 58828 - protein, 384 aa, unidentified
  source 1..384: note = Pasteurellaceae bacterium
  REGION 1..384: note = tr|A0A3S7N3K4|A0A3S7N3K4_9PAST Queuine tRNA-ribosyltransferase OS=Pasteurellaceae bacterium 12565; OX = 2093222 GN=tgt PE=3 SV=1
MKYELKTTSGNARRGRLTFNRPKGEFHVETPAFMPVGTYGTVKGMTPEEVKATGAQILLGNTFHLWLRPGQEVMKMHGDLHDFMQWHGPILTDSGGFQVFSLGKLRKIKEEGVTFQNPISGEKIFLSPEKSMEIQYDLGSDIVMIFDECTPYPATFDYAKKSMEMSLRWAKRSRDRFDELENPNALFGIIQGGIYEELRKVSVEKLVEIGFDGYAVGGLAVGEPKEDMHRILEYVCPQIPADKPRYLMGVGKPEDLVEGVRRGIDMFDCVMPTRNARNGHLFVTNGIVKIRNAKYRADTTPLDPECDCYTCKNYTKAYLYHLDKCGEILGARLNTIHNLRYYQRLMAEIRQAIEEDRFDDFVVEFYARIGKEVPPLQSEVKEQK

SEQ ID NO: 58829 - protein, 388 aa, unidentified
  source 1..388: note = Patescibacteria group
  REGION 1..388: note = tr|A0A3B9U528|A0A3B9U528_9BACT Queuine tRNA-ribosyltransferase OS=Patescibacteria group bacterium; OX = 2052139 GN=tgt PE=3 SV=1
MLTPYFEITKKVENSRARTGVIHTAHGDVLTPQFLPIGTKGTIKTVTSEEIKFWGATMVLANTYHLWQRPGDALVYKAGGLHKFMNWKGPIFTDSGGFQVYSLAKMRKVMEAGVLFSFDMDGKQEILSPEKSIQIQANLGSDICLILDDFPGFPFEYERSKESIELTTRWAERAVKEHKRIVEDGDPVNPGQKLWGIVQGASFEDLRKLSAESMVNLGFEGYAIGGVAVGEPHEEMMKAVSYAVPHLPETAPKHLLGVGTPYDIVQAVSLGCDTFDCVIPTREARHGRLYINARDEDGGECYETIDVRLEKYKEDFTPIDNTCNCYACLNHTRAYVRHLLASNEMLGTRLATMHNLRFYLNLMEKIRIAIDNDYFEDMLKTFRDLTQK

SEQ ID NO: 58830 - protein, 345 aa, unidentified
  source 1..345: note = Patescibacteria group
  REGION 1..345: note = tr|A0A3C1EWE3|A0A3C1EWE3_9BACT Queuine tRNA-ribosyltransferase OS=Patescibacteria group bacterium; OX = 2052139 GN=tgt PE=3 SV=1
MDIQDFGKKYVFMPDATRGAVRFLTTEQLKDTKTEAIVTNTLHLLMNPGAERMKELGGIKKLMNWDGIVLTDSGGFQVFSLIHSGKWKGKVHEDGATFYSPWTGERYDLTPESSIDIQISINSDILVTLDDCRGTDLTREEAEISVDRTIKWAKRCKDHFENVYGGTKETGKLLSCVVQGANFIDLRKKCAEELTKIGFDGYNFGGFVVDKDGELVIDEMKAVIDNTPKDKFKYAMGVGKPEDIRRAAKIGYTVFDTVLVTRNARHGTLYSSDIEDEVLRITNQDYVIDERPIDSKCDCYTCKNHSRAYVHQMLKVGEATGMTLATIHNLRYYQRLVDDLNAGNE

SEQ ID NO: 58831 - protein, 430 aa, unidentified
  source 1..430: note = Patulibacter medicamentivorans
  REGION 1..430: note = tr|H0E681|H0E681_9ACTN Queuine tRNA-ribosyltransferase OS=Patulibacter medicamentivorans; OX = 1097667 GN=tgt PE=3 SV=1
MDPSSAAPSLDAPPRPAAERPREVFRIEARDGGSLARAGVIATAHGEVRTPGFVPLATKATVRGLLPSEVRELGFDIVLGNTFHLMLSPGHELIRGHGGLHRFMGWDGPIITDSGGFQVFSMGHGAVADEIKGRTGSGGKGGTATAGGGIRSHGRIDEIGEQGVAFRSHLDGSKQFLSPERSMEVQAALGTDLAVVFDECTPFHVDRDYTARSTERTHRWLERCLTWHEQHAPGWQLVYGIVQGGVHEDLRIEAAETVASSRADAIAIGGSLGSHKDQMYEVVGWTTARLGGVHERKPRHLLGIGEIDDLVRGVEQGIDTFDCAMPTRLGRHGMALVPDPDRRWRVDLTQARWKDSDEPLCEGCPCPACAQGFSRGYLRYLAHQRELLGMRLLTQHNLAFVARVLARLRQAIVDGRLAEEAAAIRGGRLP

SEQ ID NO: 58832 - protein, 378 aa, unidentified
  source 1..378: note = Paucibacter aquatile
  REGION 1..378: note = tr|A0A2N8L074|A0A2N8L074_9BURK Queuine tRNA-ribosyltransferase OS=Paucibacter aquatile OX=2070761; GN = tgt PE=3 SV=1
MLKFELLKTEGHARRGQMTLNHGVVQTPIFMPVGTYGTVKGVMPRSLEEMGAQIILGNTFHLWMRPGLDIMKQFGGLHQFESWNKPILTDSGGFQVWSLGEMRKISEEGVKFASPVNGDKLFLTPEISMQIQTVLNSDIVMQFDECTPYETKGHITTELEARKSMEMSLRWAKRCQDEFARLENPNALFGIVQGGMFENLRDHSLAGLAELDLPGYAIGGLSVGEPKADMQRVLAHIGHQLPAQKPRYLMGVGTPEDLIEGVSRGIDMFDCVMPTRNARNGHLFTRFGDLRLRNARYKTDERPVDETCTCYTCKTFSRAYLHHLDRCGEMLGPMLTSIHNLHYYLNLMQEARDALDLPGEGGFAAFQAKFAADRARGV

SEQ ID NO: 58833 - protein, 378 aa, Paucibacter sp.
  REGION 1..378: note = tr|A0A3N7C4M8|A0A3N7C4M8_9BURK Queuine tRNA-ribosyltransferase OS=Paucibacter sp. KBW04; OX = 2153361 GN=tgt PE=3 SV=1
MLKFDLLKTEGHARRGQMTLNHGVVQTPIFMPVGTYGTVKGVMPRSLDEAGAQIILGNTFHLWLRPGLDILRQFGGLHKFESWNKPILTDSGGFQVWSLGEMRKISEEGVRFASPVNGDKLFLTPEISMQIQTVLNSDIVMQFDECTPYETKGQLTTEKEARASMEMSLRWAKRCKDEFARLENPNALFGIVQGGMFEGLRDHSLAGLAELDLPGYAIGGLSVGEPKEDMQRVLAHIGHQLPDNKPRYLMGVGTPEDLIEGVSRGIDMFDCVMPTRNARNGHLFTRFGDLRLRNARYKTDERPVDETCSCYCCGNFSRAYLHHLDRCGEMLGPMLASIHNIHYYLNLMQEARDALDQPGTGGFEAFKLKFAADRARGV

SEQ ID NO: 58834 - protein, 378 aa, Paucibacter sp.
  REGION 1..378: note = tr|A0A0U2W0Q6|A0A0U2W0Q6_9BURK Queuine tRNA-ribosyltransferase OS=Paucibacter sp. KCTC 42545; OX = 1768242 GN=tgt PE=3 SV=1
MLKFDLLKTEGRARRGQMTLNHGVVQTPIFMPVGTYGTVKGVMPRSLEEADAQIILGNTFHLWLRPGLDILKQFGGLHRFESWNKPILTDSGGFQVWSLGEMRKITEEGVRFASPVNGDKLFLTPEISMQIQTVLNSDIVMQFDECTPYESKGVLTTEKEARVSMEMSLRWAKRCQDEFARLENPNALFGIVQGGMFESLRDHSLAGLAELDLPGYAIGGLSVGEPKEDMQRVLSHIGHQLPPHKPRYLMGVGTPEDLVEGVSQGIDMFDCVMPTRNARNGHLFTRFGDLRLRNARYKTDERPVDETCSCYCCKNFSRAYLHHLDRCGEMLGPMLASIHNIHYYLNLMKEVRDSLEQPGTDGFASFKLKFAADRARGV

SEQ ID NO: 58835 - protein, 376 aa, Paucibacter toxinivorans
  REGION 1..376: note = tr|A0A4R6QQH8|A0A4R6QQH8_9BURK Queuine tRNA-ribosyltransferase OS=Paucibacter toxinivorans; OX = 270368 GN=tgt PE=3 SV=1
MLKFDLLKTEGRARRGTLTLNHGVVQTPIFMPVGTYGTVKGVMPRSLEEMGAQIILGNTFHLWLRPGLDILQQFGGLHKFEAWNKPILTDSGGFQVWSLGEMRKISEEGVKFASPVNGDKLFLTPEISMQIQTVLNSDIVMQFDECTPYDTKGHITTEKEARLSMELSLRWAKRCQDEFEKLENPNALFGIVQGGMFENLRDESLAGLAALDLPGYAIGGLSVGEPKADMMRVLAHIGHQLPANKPRYLMGVGTPEDLVEGVSQGIDMFDCVMPTRNARNGHLFTRFGDLRLRNARYKTDDKPIDMTCSCHACESFSRAYLHHLDRCGEMLGPMLTSIHNLHYFLNLMREMREALDAGRFEAWRVQFHADRARGIE

SEQ ID NO: 58836 - protein, 374 aa, Paucimonas lemoignei
  REGION 1..374: note = tr|A0A4R3I125|A0A4R3I125_PAULE Queuine tRNA-ribosyltransferase OS=Paucimonas lemoignei OX=29443; GN = tgt PE=3 SV=1
MKYTLLKTDGKARRGRLTLNHGTVETPIFMPVGTYGSVKAMSPLELHEIGAEIILGNTFHLWLRPGTEVLDKFGGLHGFMGWDKPILTDSGGFQVFSLGEMRKITEEGVKFASPVNGDKLFLSPEVSMQIQRSLNSDIVMQFDECTPYEIDGRPATEKEAADSMRMSLRWAKRSRNEFDRGENPNALFGIVQGGMFEHLRDESLAGLEEIGFHGLAIGGLSVGEPKEDMLRILAHVGPRLPADKPHYLMGVGTPEDLVDGVANGIDMFDCVMPTRNARNGWLFTRFGDIKIKNARYKDDPAPLDETCGCYACRNFSRAYLHHLHRAGEILGARLNTIHNLYYYLQLMREMREAIEAGEFSAFVARFNAERVRGV

SEQ ID NO: 58837 - protein, 377 aa, Paucimonas lemoignei
  REGION 1..377: note = tr|A0A2X4AQ31|A0A2X4AQ31_PAULE Queuine tRNA-ribosyltransferase OS=Paucimonas lemoignei OX=29443; GN = tgt PE=3 SV=1
MSRTSRMSFELLATDGKARRGRLTFPRGVVETPAFMPVGTYGTVKGMLPRDIEATGAQIILGNTFHLWLRPGTEVIKAHGDLHDFMKWNGPILTDSGGFQVFSLGAMRKIKEEGVTFASPVDGAKVFMGPEESMQVQRDLGSDIVMIFDECTPYPADEDVARVSMELSLRWAKRSKIAHGESTAALFGIVQGGMHESLRMRSLEGLDQIGFDGLAIGGLSVGEPKHEMIKVLDYLPGQMPPEKPRYLMGVGKPEDLVEGVRRGIDMFDCVMPTRNARNGHLFIDTGVLKIRNAFHRHDDSPLDPTCDCYTCQNFSRAYLHHLDKCGEMLGSMLNTIHNLRHYQVLMAGLREAIQQGTLAAFVDAFYVKRGIPTPPLA

SEQ ID NO: 58838 - protein, 371 aa, Pectinatus cerevisiiphilus
  REGION 1..371: note = tr|A0A4V2US82|A0A4V2US82_9FIRM Queuine tRNA-ribosyltransferase OS=Pectinatus cerevisiiphilus; OX = 86956 GN=tgt PE=3 SV=1
MSAITYELIKRCPETGARAGIIHTPHGSFETPIFMPVGTQATVKLLAPEELKEMGAGIILSNTYHLFLRPGSELIREAGGLHKFMNWDRAILTDSGGFQVFSLGALRKITEEGVAFRSHIDGSKKFLSPEIATKIQMNLGADIIMAFDECIPYPADHDYAEKSTARTLRWAKRCQETLTADNQSMFGIVQGGMYKDLRKSCVDELVDMDFPGYAIGGLSVGEPHQLMYEVLDYTAAALPANKPRYLMGVGTPDCLVESVKRGIDMFDCVFPTRVARNGTAMTWNGRFIIKNAEFEHDFHPIDENCGCYACRNYSRAYIRHLVRVNEVFGLRLLTIHNLYFLIDFMRKMRQSIIDGKFVDFYNEFAPKYVLK

SEQ ID NO: 58839 - protein, 381 aa, unidentified
  source 1..381: note = Pectobacterium actinidiae
  REGION 1..381: note = tr|A0A1V2R798|A0A1V2R798_9GAMM Queuine tRNA-ribosyltransferase OS=Pectobacterium actinidiae; OX = 1507808 GN=tgt PE=3 SV=1
MKYELQTTDGRARRGRLIFERGVVETPAFMPVGTYGTVKGMTPEEVKDTGAQILLGNTFHLWLRPGQEIMKLHGDLHDFMQWHGPILTDSGGFQVFSLGDIRKITEQGVHFRNPINGDSIFLSPEKSMEIQHDLGSDIVMIFDECTPYPADWDYAKRSMEMSLRWAKRSRQRFDELENKNALFGIIQGSVYEDLRDVSVKGLVDIGFDGYAVGGLAVGEPKEDMHRILEHVCPQIPEDKPRYLMGVGKPEDLVEGVRRGVDMFDCVMPTRNARNGHLFVTDGVVKIRNAKHKDDVSSLDEHCDCYTCRNYSRAYLHHLDRCNEILGARLNTIHNLRYYQRLMAGLRQAIEEGKLEHFVVDFYQRIGKPVPPLAEKNVAASS

SEQ ID NO: 58840 - protein, 381 aa, unidentified
  source 1..381: note = Pectobacterium aquaticum
  REGION 1..381: note = tr|A0A3R8NIC2|A0A3R8NIC2_9GAMM Queuine tRNA-ribosyltransferase OS=Pectobacterium aquaticum; OX = 2204145 GN=tgt PE=3 SV=1
MKYELQTTDGRARRGRLIFERGVVETPAFMPVGTYGTVKGMTPEEVKETGAQILLGNTFHLWLRPGQEIMKLHGDLHDFMNWHGPILTDSGGFQVFSLGDIRKITEQGVHFRNPINGDSIFLSPEKSMEIQHDLGSDIVMIFDECTPYPADWDYAKRSMEMSLRWAKRSRQRFDELENKNALFGIIQGSVYEDLRDVSVKGLVDIGFDGYAVGGLAVGEPKEDMHRILEHVCPQIPEDKPRYLMGVGKPEDLVEGVRRGVDMFDCVMPTRNARNGHLFVTDGVVKIRNAKHKDDVSSLDEHCDCYTCRNYSRAYLHHLDRCNEILGARLNTIHNLRYYQRLMAGLRQAIEEGKLEHFVVDFYQRIGKPIPPLAEKDVATSN

SEQ ID NO: 58841 - protein, 381 aa, Pectobacterium atrosepticum
  REGION 1..381: note = sp|Q6D855|TGT_PECAS Queuine tRNA-ribosyltransferase; OS = Pectobacterium atrosepticum (strain SCRI 1043 / ATCC BAA-672) OX=218491 GN=tgt PE=3 SV=1
MKYELQTTDGRARRGRLIFERGVVETPAFMPVGTYGTVKGMTPEEVKETGAQILLGNTFHLWLRPGQEIMKLHGDLHDFMNWHGPILTDSGGFQVFSLGDIRKITEQGVHFRNPINGDSIFLSPEKSMEIQNDLGSDIVMIFDECTPYPADWDYAKRSMEMSLRWAKRSRQRFDELENKNALFGIIQGSVYEDLRDVSVKGLVDIGFDGYAVGGLAVGEPKEDMHRILEHVCPQIPEDKPRYLMGVGKPEDLVEGVRRGVDMFDCVMPTRNARNGHLFVTDGVVKIRNAKHKDDVSSLDEHCDCYTCRNYSRAYLHHLDRCNEILGARLNTIHNLRYYQRLMAGLRQAIEEGKLELFVVDFYQRIGKPIPPLAEKDVAASN

SEQ ID NO: 58842 - protein, 381 aa, Pectobacterium betavasculorum
  REGION 1..381: note = tr|A0A093S177|A0A093S177_9GAMM Queuine tRNA-ribosyltransferase OS=Pectobacterium betavasculorum; OX = 55207 GN=tgt PE=3 SV=1
MKYELQTTDGRARRGRLIFERGVVETPAFMPVGTYGTVKGMTPEEVKETGAQILLGNTFHLWLRPGQEIMKLHGDLHDFMNWHGPILTDSGGFQVFSLGDIRKITEQGVHFRNPINGDSIFLSPEKSMEIQHDLGSDIVMIFDECTPYPADWDYAKRSMEMSLRWAKRSRQRFDELENKNALFGIIQGSVYEDLRDVSVKGLVDIGFDGYAVGGLAVGEPKEDMHRILEHVCPQIPEDKPRYLMGVGKPEDLVEGVRRGVDMFDCVMPTRNARNGHLFVTDGVVKIRNAKHKDDVSPLDEHCDCYTCRNYSRAYLHHLDRCNEILGARLNTIHNLRYYQRLMAGLRQAIEEGKLEHFVVDFYQRIGKPIPPLAEKDVAASN

SEQ ID NO: 58843 - protein, 381 aa, unidentified
  source 1..381: note = Pectobacterium brasiliense
  REGION 1..381: note = tr|A0A0M2F6G0|A0A0M2F6G0_9GAMM Queuine tRNA-ribosyltransferase OS=Pectobacterium brasiliense; OX = 180957 GN=tgt PE=3 SV=1
MKYELQTTDGRARRGRLIFERGVVETPAFMPVGTYGTVKGMTPEEVKETGAQILLGNTFHLWLRPGQEIMKLHGDLHDFMNWHGPILTDSGGFQVFSLGDIRKITEQGVHFRNPINGDSIFLSPEKSMEIQHDLGSDIVMIFDECTPYPADWDYAKRSMEMSLRWAKRSRQRFDELENKNALFGIIQGSVYEDLRDVSVKGLVDIGFDGYAVGGLAVGEPKEDMHRILEHVCPQIPEDKPRYLMGVGKPEDLVEGVRRGVDMFDCVMPTRNARNGHLFVTDGVVKIRNAKHKDDVSSLDEHCDCYTCRNYSRAYLHHLDRCNEILGARLNTIHNLRYYQRLMAGLRQAIEEGKLEHFVVDFYQRIGKPVPPLAEKDVAASS

SEQ ID NO: 58844 - protein, 381 aa, unidentified
  source 1..381: note = Pectobacterium brasiliense
  REGION 1..381: note = tr|A0A086F081|A0A086F081_9GAMM Queuine tRNA-ribosyltransferase OS=Pectobacterium brasiliense; OX = 180957 GN=tgt PE=3 SV=1
MKYELQTTDGRARRGRLIFERGVVETPAFMPVGTYGTVKGMTPEEVKETGAQILLGNTFHLWLRPGQEIMKLHGDLHDFMNWHGPILTDSGGFQVFSLGDIRKITEQGVHFRNPINGDSIFLSPEKSMEIQHDLGSDIVMIFDECTPYPADWDYAKRSMEMSLRWAKRSRQRFDELENKNALFGIIQGSVYEDLRDVSVKGLVDIGFDGYAVGGLAVGEPKEDMHRILEHVCPQIPEDKPRYLMGVGKPEDLVEGVRRGVDMFDCVMPTRNARNGHLFVTDGVVKIRNAKHKDDVSSLDEHCDCYTCRNYSRAYLHHLDRCNEILGARLNTIHNLRYYQRLMAGLRQAIEEGKLEHFVVDFYQRIGKPVPPLAEKDVAASN

SEQ ID NO: 58845 - protein, 381 aa, Pectobacterium carotovorum
  REGION 1..381: note = sp|C6DB26|TGT_PECCP Queuine tRNA-ribosyltransferase; OS = Pectobacterium carotovorum subsp. carotovorum (strain PC1) OX=561230 GN=tgt PE=3 SV=1
MKYELQTTDGRARRGRLIFERGVVETPAFMPVGTYGTVKGMTPEEVKDTGAQILLGNTFHLWLRPGQEIMKLHGDLHDFMQWHGPILTDSGGFQVFSLGDIRKITEQGVHFRNPINGDSIFLSPEKSMEIQHDLGSDIVMIFDECTPYPADWDYAKRSMEMSLRWAKRSRQRFDELENKNALFGIIQGSVYEDLRDVSVKGLVDIGFDGYAVGGLAVGEPKEDMHRILEHVCPQIPEDKPRYLMGVGKPEDLVEGVRRGVDMFDCVMPTRNARNGHLFVTDGVVKIRNAKYKDDVSPLDEHCDCYTCRNYSRAYLHHLDRCNEILGARLNTIHNLRYYQRLMAGLRQAIEEGKLEHFVVDFYQRIGKPIPPLAEKDVAAGN

SEQ ID NO: 58846 - protein, 381 aa, Pectobacterium carotovorum
  REGION 1..381: note = tr|A0A518VMX2|A0A518VMX2_PECCC Queuine tRNA-ribosyltransferase OS=Pectobacterium carotovorum subsp. carotovorum OX=555 GN=tgt PE=3 SV=1
MKYELQTTDGRARRGRLIFERGVVETPAFMPVGTYGTVKGMTPEEVKETGAQILLGNTFHLWLRPGQEIMKLHGDLHDFMQWHGPILTDSGGFQVFSLGDIRKITEQGVHFRNPINGDSIFLSPEKSMEIQHDLGSDIVMIFDECTPYPADWDYAKRSMEMSLRWAKRSRQRFDELENKNALFGIIQGSVYEDLRDVSVKGLVDIGFDGYAVGGLAVGEPKEDMHRILEHVCPQIPEDKPRYLMGVGKPEDLVEGVRRGVDMFDCVMPTRNARNGHLFVTDGVVKIRNAKHKDDVSSLDEHCDCYTCRNYSRAYLHHLDRCNEILGARLNTIHNLRYYQRLMAGLRQAIEEGKLEHFVVDFYQRIGKPIPPLAEKDVAASS

SEQ ID NO: 58847 - protein, 381 aa, unidentified
  source 1..381: note = Pectobacterium odoriferum
  REGION 1..381: note = tr|A0A094U2J7|A0A094U2J7_9GAMM Queuine tRNA-ribosyltransferase OS=Pectobacterium odoriferum; OX = 78398 GN=tgt PE=3 SV=1
MKYELQTTDGRARRGRLIFERGVVETPAFMPVGTYGTVKGMTPEEVKETGAQILLGNTFHLWLRPGQEIMKLHGDLHDFMNWHGPILTDSGGFQVFSLGDIRKITEQGVHFRNPINGDSIFLSPEKSMEIQHDLGSDIVMIFDECTPYPADWDYAKRSMEMSLRWAKRSRQRFDELENKNALFGIIQGSVYEDLRDVSVKGLVDIGFDGYAVGGLAVGEPKEDMHRILEHVCPQIPEDKPRYLMGVGKPEDLVEGVRRGVDMFDCVMPTRNARNGHLFVTDGVVKIRNAKHKDDVSSLDEHCDCYTCRNYSRAYLHHLDRCNEILGARLNTIHNLRYYQRLMAGLRQAIEEGKLEHFVVDFYQRIGKPIPPLAEKGVAASS

SEQ ID NO: 58848 - protein, 381 aa, unidentified
  source 1..381: note = Pectobacterium parmentieri
  REGION 1..381: note = tr|A0A0H3I770|A0A0H3I770_PECPM Queuine tRNA-ribosyltransferase OS=Pectobacterium parmentieri; OX = 1905730 GN=tgt PE=3 SV=1
MKYELQTTDGRARRGRLIFERGVVETPAFMPVGTYGTVKGMTPEEVKETGAQILLGNTFHLWLRPGQEIMKLHGDLHDFMQWHGPILTDSGGFQVFSLGDIRKITEQGVHFRNPINGDSIFLSPEKSMEIQHDLGSDIVMIFDECTPYPADWDYAKRSMEMSLRWAKRSRQRFDELENKNALFGIIQGSVYEDLRDVSVKGLVDIGFDGYAVGGLAVGEPKEDMHRILEHVCPQIPEDKPRYLMGVGKPEDLVEGVRRGVDMFDCVMPTRNARNGHLFVTDGVVKIRNAKHKDDVSSLDEHCDCYTCRNYSRAYLHHLDRCNEILGARLNTIHNLRYYQRLMAGLRQAIEEGKLEHFVVDFYQRIGKSIPPLAENDVAASN

SEQ ID NO: 58849 - protein, 381 aa, unidentified
  source 1..381: note = Pectobacterium peruviense
  REGION 1..381: note = tr|A0A0J5XYC8|A0A0J5XYC8_9GAMM Queuine tRNA-ribosyltransferase OS=Pectobacterium peruviense; OX = 2066479 GN=tgt PE=3 SV=1
MKYELQTTDGRARRGRLIFDRGVVETPAFMPVGTYGTVKGMTPEEVKETGAQILLGNTFHLWLRPGQEIMKLHGDLHDFMNWHGPILTDSGGFQVFSLGDIRKITEQGVHFRNPINGDSIFLSPEKSMEIQHDLGSDIVMIFDECTPYPADWDYAKRSMEMSLRWAKRSRERFDELENKNALFGIIQGSVYEDLRDVSVKGLVDIGFDGYAVGGLAVGEPKEDMHRILEHVCPQIPEDKPRYLMGVGKPEDLVEGVRRGVDMFDCVMPTRNARNGHLFVTDGVVKIRNAKHKDDVSSLDEHCDCYTCRNYSRAYLHHLDRCNEILGARLNTIHNLRYYQRLMAGLRQAIEEGKLEHFVVDFYQRIGKAIPPLAEKDVAASN

SEQ ID NO: 58850 - protein, 381 aa, unidentified; identical to SEQ ID NO: 58840
  source 1..381: note = Pectobacterium polaris
  REGION 1..381: note = tr|A0A093SBG8|A0A093SBG8_9GAMM Queuine tRNA-ribosyltransferase OS=Pectobacterium polaris; OX = 2042057 GN=tgt PE=3 SV=1

SEQ ID NO: 58851 - protein, 381 aa, unidentified
  source 1..381: note = Pectobacterium polonicum
  REGION 1..381: note = tr|A0A4U7KK22|A0A4U7KK22_9GAMM Queuine tRNA-ribosyltransferase OS=Pectobacterium polonicum; OX = 2485124 GN=tgt PE=3 SV=1
MKYELQTTDGRARRGRLIFERGVVETPAFMPVGTYGTVKGMTPEEVKETGAQILLGNTFHLWLRPGQEIMKLHGDLHDFMNWHGPILTDSGGFQVFSLGDIRKITEQGVHFRNPINGDSIFLSPEKSMEIQHDLGSDIVMIFDECTPYPADWDYAKRSMEMSLRWAKRSRQRFDELENKNALFGIIQGSVYEDLRDVSVKGLVDIGFDGYAVGGLAVGEPKEDMHRILEHVCPQIPEDKPRYLMGVGKPEDLVEGVRRGVDMFDCVMPTRNARNGHLFVTDGVVKIRNAKHKDDVSSLDEHCDCYTCRNYSRAYLHHLDRCNEILGARLNTIHNLRYYQRLMAGLRQAIEEGKLEHFVVDFYQRIGKPIPPLAEKDVAASN

SEQ ID NO: 58852 - protein, 381 aa, unidentified
  source 1..381: note = Pectobacterium punjabense
  REGION 1..381: note = tr|A0A2T3VYW9|A0A2T3VYW9_9GAMM Queuine tRNA-ribosyltransferase OS=Pectobacterium punjabense; OX = 2108399 GN=tgt PE=3 SV=1
MKYELQTTDGRARRGRLIFERGVVETPAFMPVGTYGTVKGMTPEEVKETGAQILLGNTFHLWLRPGQEIMKLHGDLHDFMQWHGPILTDSGGFQVFSLGDIRKITEQGVHFRNPINGDSIFLSPEKSMEIQHDLGSDIVMIFDECTPYPADWDYAKRSMEMSLRWAKRSRQRFDELENKNALFGIIQGSVYEDLRDVSVKGLVDIGFDGYAVGGLAVGEPKEDMHRILEHVCPQIPEDKPRYLMGVGKPEDLVEGVRRGVDMFDCVMPTRNARNGHLFVTDGVVKIRNAKHKDDVSSLDEHCDCYTCRNYSRAYLHHLDRCNEILGARLNTIHNLRYYQRLMAGLRQAIEEGKLEHFVVDFYQRIGKPIPPLAEKDVAASN

SEQ ID NO: 58853 - protein, 381 aa, Pectobacterium wasabiae
  REGION 1..381: note = tr|A0A1D7Z3F9|A0A1D7Z3F9_9GAMM Queuine tRNA-ribosyltransferase OS=Pectobacterium wasabiae CFBP 3304 OX=1175631 GN=tgt PE=3 SV=1
MKYELQTTDGRARRGRLIFERGVVETPAFMPVGTYGTVKGMTPEEVKDTGAQILLGNTFHLWLRPGQEIMKLHGDLHDFMQWHGPILTDSGGFQVFSLGDIRKITEQGVHFRNPINGDSIFLSPEKSMEIQHDLGSDIVMIFDECTPYPADWDYAKRSMEMSLRWAKRSRQRFDELENKNALFGIIQGSVYEDLRDVSVKGLVDIGFDGYAVGGLAVGEPKEDMHRILEHVCPQIPEDKPRYLMGVGKPEDLVEGVRRGVDMFDCVMPTRNARNGHLFVTDGVVKIRNAKHKDDVSSLDEHCDCYTCRNYSRAYLHHLDRCNEILGARLNTIHNLRYYQRLMAGLRQAIEEGKLEHFVVDFYQRIGKPIPPLAENDVAASN

SEQ ID NO: 58854 - protein, 380 aa, Pediococcus acidilactici
  REGION 1..380: note = tr|D2EK45|D2EK45_PEDAC Queuine tRNA-ribosyltransferase OS=Pediococcus acidilactici 7_4; OX = 563194 GN=tgt PE=3 SV=1
MEPAIKYRLIKKDKHTGARLGEIITPHGTFPTPIFMPVGTQATVKAMSPEELEDLGADIILSNTYHLWVRPGEDIVKEAGGLHQFMNWHKGILTDSGGFQVFSLAKLRDITEEGVHFRNEINGAKMFLSPEKAIQIENDLGPDIMMSLDECPPFFESYDYVKHSVARTSRWAERGLKAHRNPGTQGLFGIIQGAGFEDLRRQSAHDLVSMDFPGYSIGGLSVGESKAEMNRVLEFTTPLIPENKPRYLMGVGSPDALIDGVIRGVDMFDCVLPTRIARNGTCMTSHGRLVVKNAKYARDFTPIDDQCHCYTCRNFTRAYVRHLLKTDETFGLRLTSIHNVYFLVHLMKDVRQAIMDDNLLEFRQNFFDEYGYGKENSKNF

SEQ ID NO: 58855 - protein, 380 aa, Pediococcus acidilactici
  REGION 1..380: note = tr|A0A1A5VD17|A0A1A5VD17_PEDAC Queuine tRNA-ribosyltransferase OS=Pediococcus acidilactici; OX = 1254 GN=tgt PE=3 SV=1
MEPAIKYRLIKKDKHTGARLGEIITPHGTFPTPIFMPVGTQATVKAMSPEELEDLGADIILSNTYHLWVRPGEDIVKEAGGLHQFMNWHKGILTDSGGFQVFSLAKLRDITEEGVHFRNEINGAKMFLSPEKAIQIENDLGPDIMMSLDECPPFFESYDYVKHSVARTSRWAERGLKAHRNPDTQGLFGIIQGAGFEDLRRQSAHDLVSMDFPGYSIGGLSVGESKAEMNRVLEFTTPLIPENKPRYLMGVGSPDALIDGVIRGVDMFDCVLPTRIARNGTCMTSHGRLVVKNAKYARDFTPIDEQCHCYTCRNFTRAYVRHLLKTDETFGLRLTSIHNVYFLVHLMKDVRQAIMDDNLLEFRQNFFDEYGYGKENSKNF

SEQ ID NO: 58856 - protein, 380 aa, Pediococcus argentinicus
  REGION 1..380: note = tr|A0A0R2NHK5|A0A0R2NHK5_9LACO Queuine tRNA-ribosyltransferase OS=Pediococcus argentinicus; OX = 480391 GN=tgt PE=3 SV=1
MEPAIKYRLIKTEKHTGARLGEVITPHGTFPTPIFMPVGTQATVKAMSPEELDDLGADIILANTYHLWERPGEDIVKEAGGLHKFMNWNKGILTDSGGFQVFSLAKLRDISEEGVRFRNEMNGSKMFLSPEKAMQIENDLGPDIMMSFDECPPYFESYDYVKHSVERTSRWAERGLKAHRNPDTQGLFGIVQGAGFEDLRRQSAADLVSMDFPGYSIGGLSVGESKAEMNRVLDFTTPLIPENKPRYLMGVGSPDSLIDGVIRGIDMFDCVLPTRIARNGTCMTSHGRLVVKNAKYARDFTPLDDNCTCYACRNYTRAYIRHLLKTDETFGLRLTSIHNVHFLVHLMKDVRQAIMDDNLLEFRQNFFDEYGYTENPTKNF

SEQ ID NO: 58857 - protein, 380 aa, Pediococcus cellicola
  REGION 1..380: note = tr|A0A0R2IJF8|A0A0R2IJF8_9LACO Queuine tRNA-ribosyltransferase OS=Pediococcus cellicola OX=319652; GN = tgt PE=3 SV=1
MEPAIKYHLIKKDKHTGARLGEIETPHGTFKTPIFMPVGTQATVKAMSPEELEDIGADIILSNTYHLWVRPGEDIVKEAGGLHKFMNWKKGILTDSGGFQVFSLAKLRDITEEGVHFRNEISGAKMFLSPEKAIQIENDLGPDIMMSFDECPPFFESYDYVKHSVERTSRWAERGLKAHRNPDWQALFGIVQGAGFKALREQSAKDLVSLDFPGYSIGGLSVGESKDEMNRVLEFTTPMLPEHKPRYLMGVGSPDSLIDGVIRGVDMFDCVLPTRIARNGTCMTSHGRLVVKNAKYARDFTPIDDNCDCYTCRNFTRAYVRHLMKTDETFGLRLTSIHNTYFLVHLMKQIRQAIEDDNLLEFREAFFEEYGYNKPHAKNF

SEQ ID NO: 58858 - protein, 380 aa, Pediococcus claussenii
  REGION 1..380: note = tr|G8PCM3|G8PCM3_PEDCP Queuine tRNA-ribosyltransferase OS=Pediococcus claussenii (strain ATCC BAA-344 / DSM 14800 / JCM 18046 / KCTC 3811 / P06); OX = 701521 GN=tgt PE= 3 SV=1
MEPAIKYRLIKTEKHTGARLGEIITPHGTFPTPIFMPVGTQATVKAMSPEELNDLGADIILANTYHLWERPGEDIVKEAGGLHKFMNWNKGILTDSGGFQVFSLAKLRDITEEGVHFRNELNGAKMFLSPEKAIQIENDLGPDIMMSFDECPPYFESYEYVKHSVERTSRWAERGLKAHQNPDTQGLFGIVQGAGFEDLRRQSASDLVSLDFPGYSIGGLSVGESKDEMNRVLEFTTPMLPENKPRYLMGVGSPDSLIDGVIRGVDMFDCVLPTRIARNGTCMTSHGRLVVKNAKYARDFTPLDDNCTCYTCRNYTRAYVRHLLKTDETFGLRLTSIHNVHFLVHLMQDVRQAILDDSLLEFRQSFFDEYGYTENPTKNF

SEQ ID NO: 58859 - protein, 380 aa, Pediococcus damnosus
  REGION 1..380: note = tr|A0A2G9VE97|A0A2G9VE97_9LACO Queuine tRNA-ribosyltransferase OS=Pediococcus damnosus OX=51663; GN = tgt PE=3 SV=1
MEPAIKYHLIKTEKHTGARLGEIETPHGTFPTPIFMPVGTQATVKSMSPEELEDIGADIILSNTYHLWVRPGEDIIKEAGGLHKFMNWKKEILTDSGGFQVFSLANLRDISEEGVHFRNEISGAKMFLSPEKAIQIENDLGPDIMMSFDECPPFFESYEYVKHSVERTSRWAERGLKAHQNPDWQALFGIVQGAGFKALREQSAKDLVSMDFPGYSIGGLSVGESKDEMNRVLSFTTPMLPENKPRYLMGVGSPDALIDGVMRGIDMFDCVLPTRIARNGTCMTSHGRLVVKNAKYARDFTPLDDNCQCYTCRNYTRAYVRHLIKTNESFGIRLTSIHNIYFLVHLMKQVHQAIIEDNLLEFRENFFEEYGYNKEDAKNF

SEQ ID NO: 58860 - protein, 380 aa, Pediococcus damnosus
  REGION 1..380: note = tr|A0A0R2HLB0|A0A0R2HLB0_9LACO Queuine tRNA-ribosyltransferase OS=Pediococcus damnosus OX=51663; GN = tgt PE=3 SV=1
MEPAIKYHLIKTEKHTGARLGEIETPHGTFPTPIFMPVGTQATVKSMSPEELEDIGADIILSNTYHLWVRPGEDIIKEAGGLHKFMNWKKGILTDSGGFQVFSLANLRDISEEGVHFRNEISGAKMFLSPEKAIQIENDLGPDIMMSFDECPPFFESYEYVKHSVERTSRWAERGLKAHQNPDWQALFGIVQGAGFKALREQSAKDLVSMDFPGYSIGGLSVGESKDEMNRVLSFTTPMLPENKPRYLMGVGSPDALIDGVMRGIDMFDCVLPTRIARNGTCMTSHGRLVVKNAKYARDFTPLDDNCQCYTCRNYTRAYVRHLIKTNESFGIRLTSIHNIYFLVHLMKQVHQAIIEDNLLEFRENFFEEYGYNKEDAKNF

SEQ ID NO: 58861 - protein, 380 aa, Pediococcus ethanolidurans
  REGION 1..380: note = tr|A0A0R2K427|A0A0R2K427_9LACO Queuine tRNA-ribosyltransferase OS=Pediococcus ethanolidurans; OX = 319653 GN=tgt PE=3 SV=1
MEPAIKYHLIKTEKHTGARLGEIETPHGTFPTPIFMPVGTQATVKAMSPEELEDIGADIILSNTYHLWVRPGEDIVKEAGGLHKFMNWKRGILTDSGGFQVFSLAKLRDISEEGVHFRNEISGAKMFLSPEKAIQIENDLGPDIMMSFDECPPFFESYEYVKNSVERTSRWAERGLKAHQNPDWQALFGIVQGAGFKALREQSAKDLVSLDFPGYSIGGLSVGESKDEMNRVLEFTTPLLPENKPRYLMGVGSPDSLIDGVIRGVDMFDCVLPTRIARNGTCMTSHGRLVVKNAKYARDFTPIDDNCHCYTCRNFTRAYVRHLMKTDETFGLRLTSIHNTYFLVHLMKQVRQAIKDDNLLEFREAFFEEYGYNQAHPKNF

SEQ ID NO: 58862 - protein, 380 aa, Pediococcus inopinatus
  REGION 1..380: note = tr|A0A0R2I6S3|A0A0R2I6S3_9LACO Queuine tRNA-ribosyltransferase OS=Pediococcus inopinatus; OX = 114090 GN=tgt PE=3 SV=1
MEPAIKYHLIKKEKHTGARLGEIETPHGTFPTPIFMPVGTQATVKSMSPEELEDIGADIILSNTYHLWVRPGEDIVKEAGGLHKFMNWKRGILTDSGGFQVFSLANLRDISEEGVHFRNEISGAKMFLSPEKAIQIENDLGPDIMMSFDECPPFFESYEYVKHSVERTSRWAERGLKAHQNPDWQALFGIVQGAGFKALREQSAKDLVSMDFPGYSIGGLSVGESKDEMNRVLNFTTPMLPENKPRYLMGVGSPDALIDGVMRGIDMFDCVLPTRIARNGTCMTSHGRLVVKNAIYARDFTPLDDNCQCYTCKNYTRAYVRHLIKTNESFGIRLTSIHNTYFLVHLMKQVRQAIMDDNLLEFRENFFEEYGYNKEDAKNF

SEQ ID NO: 58863 - protein, 380 aa, Pediococcus parvulus
  REGION 1..380: note = tr|A0A176THR3|A0A176THR3_9LACO Queuine tRNA-ribosyltransferase OS=Pediococcus parvulus OX=54062; GN = tgt PE=3 SV=1
MEPAIKYHLIKTEKHTGARLGEIETPHGTFPTPIFMPVGTQATVKAMSPEELEDIGADIILSNTYHLWVRPGEDIVKEAGGLHKFMNWKKGILTDSGGFQVFSLAKLRDISEEGVHFRNEISGAKMFLSPEKAIQIENDLGPDIMMSFDECPPFFESYEYVKHSVERTSRWAERGLKAHQNPDWQALFGIVQGAGFKALREQSAKDLVSLDFPGYSIGGLSVGESKDEMNRVLEFTTPMLPENKPRYLMGVGSPDSLIDGVMRGIDMFDCVLPTRIARNGTCMTSHGRLVVKNAKYARDFTPIDDNCQCYTCRNFTRAYVRHLMKTEETFGLRLTSIHNTYFLVHLMKQVRQAIQDDNLLEFKEAFFEEYGYNQAHPKNF

SEQ ID NO: 58864 - protein, 380 aa, Pediococcus pentosaceus
  REGION 1..380: note = sp|Q03ER2|TGT_PEDPA Queuine tRNA-ribosyltransferase; OS = Pediococcus pentosaceus (strain ATCC 25745 / CCUG 21536 / LMG 10740 / 183-1w) OX=278197 GN=tgt PE=3 SV=1
MEPAIKYRLIKTDKHTGARLGEIITPHGTFPTPIFMPVGTQATVKAMSPEELEDLGADIILSNTYHLWVRPGEDIVKEGGGLHQFMNWKKGILTDSGGFQVFSLAKLRDITEEGVHFKNELNGANMFLSPEKAIQIENDLGPDIMMSFDECPPYFESYDYVKHSVERTSRWAERGLKAHRNPETQGLFGIIQGAGFEDLRRQSAKDLVSMDFPGYSIGGLSVGESKEEMNRVLDFTTQLIPENKPRYLMGVGSPDALIDGVLRGVDMFDCVLPTRIARNGTCMTSHGRLVVKNAKYARDFTPIDDNCQCYTCRNYTRAYIRHLIKTDETFGLRLTSIHNVYFLVHLMKDVRQAIMDDNLLEFRQNFFEEYGYNKENSKNF

SEQ ID NO: 58865 - protein, 380 aa, Pediococcus pentosaceus
  REGION 1..380: note = tr|A0A512K6M7|A0A512K6M7_PEDPE Queuine tRNA-ribosyltransferase OS=Pediococcus pentosaceus OX=1255; GN = tgt PE=3 SV=1
MEPAIKYRLIKTDKHTGARLGEIITPHGTFPTPIFMPVGTQATVKAMSPEELEDLGADIILSNTYHLWVRPGEDIVKEGGGLHQFMNWKKGILTDSGGFQVFSLAKLRDITEEGVHFKNELNGANMFLSPEKAIQIENDLGPDIMMSFDECPPYFESYDYVKHSVERTSRWAERGLKAHRNPETQGLFGIIQGAGFEDLRRQSAKDLVSMDFPGYSIGGLSVGESKEEMNRVLDFTTQLIPENKPRYLMGVGSPDALIDGVLRGVDMFDCVLPTRIARNGTCMTSHGRLVVKNAKYARDFTPIDDNCQCYTCRNYTRAYIRHLIKTDETFGLRLTSIHNVYFLVHLMKDVRQAIMDDNLLEFRQTFFEEYGYNKENSKNF

SEQ ID NO: 58866 - protein, 380 aa, Pediococcus stilesii
  REGION 1..380: note = tr|A0A0R2KXY4|A0A0R2KXY4_9LACO Queuine tRNA-ribosyltransferase OS=Pediococcus stilesii OX=331679; GN = tgt PE=3 SV=1
MEPAIKYRLIKKDKHTGARLGEIITPHGTFPTPIFMPVGTQATVKAMSPEELEDLGADIILSNTYHLWVRPGEEIVKEAGGLHQFMNWKKGILTDSGGFQVFSLAKLRDITEEGVHFRNELNGAKMFLSPEKAIQIENDLGPDIMMSFDECPPYFESYDYVKHSVERTSRWAERGLKAHRNPETQGLFGIIQGAGFEDLRRQSAKDLVSMDFPGYSIGGLSVGESKDEMNRVLDFTTPLIPENKPRYLMGVGSPDSLIDGVIRGVDMFDCVLPTRIARNGTCMTSHGRLVVKNAKYARDFTPIDDNCNCYTCRNYTRAYVRHLIKTDETFGLRLTSIHNVYFLVHLMKDVRQAIMDDNLLEFRQNFFEEYGYGKENSKNF

SEQ ID NO: 58867 - protein, 376 aa, Pedobacter africanus
  REGION 1..376: note = tr|A0A1W2E0M1|A0A1W2E0M1_9SPHI Queuine tRNA-ribosyltransferase OS=Pedobacter africanus OX=151894; GN = tgt PE=3 SV=1
MKFNLEAADQHSKARAGTITTDHGEIQTPIFMPVGTAGTVKSINQQQLKNDVDAKIILGNTYHLYLRPGLDILERAGGLHQFIGWDRPILTDSGGYQVYSLSKVRKIKEEGVTFRSHIDGSKHLFTPEYAMDIQRTIGADIIMAFDECTPYPCDYKYAANSINMTHRWLKRCCTRFDTTEPKYGFSQTLFPIVQGSVYKDLRIKSAEFIAAMDREGNAIGGLSVGEPAEEMYAMTEVVCDILPYEKPRYLMGVGTPINILENIALGVDMFDCVMPTRNARNGMLFTKNGIINISNKKWADDFSPIEADSDLLADQVYTKAYLRHLMHSKEMLGAQIATLHNLHFYLWLVKTAREKIINGEFSAWKNKMVTILGNKL

SEQ ID NO: 58868 - protein, 376 aa, Pedobacter alluvionis
  REGION 1..376: note = tr|A0A497XW48|A0A497XW48_9SPHI Queuine tRNA-ribosyltransferase OS=Pedobacter alluvionis OX=475253; GN = tgt PE=3 SV=1
MKFSLQANDPLSKARAGTVTTAHGEIQTPIFMPVGTAGTVKAVHQRELKDDIDAKIILGNTYHLYLRPGLDILEKAGGLHKFIGWDRPILTDSGGYQVYSLSKVRKIKEEGVTFHSHIDGSKHLFTPEYAMDIQRTIGADIIMAFDECTPYPCDYTYAAQSIKMTHRWLKRCCERFDTTEPKYGFDQTLFPIVQGSVYKDLRIKSAEFIASMNREGNAIGGLSVGEPAEEMYAMTEVVCNILPEEKPRYLMGVGTPINILENIALGIDMFDCVMPTRNARNGMLFTRNGIINIRNKKWENDFSPLDAESDLHADLVTSKAYLRHLVHSKEMLGAQIATLHNLHFYLWLVKQAREKIIAGEFYEWKNKMVKVLGNKL

SEQ ID NO: 58869 - protein, 376 aa, unidentified
  source 1..376: note = Pedobacter antarcticus
  REGION 1..376: note = tr|A0A081PEF6|A0A081PEF6_9SPHI Queuine tRNA-ribosyltransferase OS=Pedobacter antarcticus 4BY; OX = 1358423 GN=tgt PE=3 SV=1
MKFTLQANDIHSKARAGTVTTAHGEIQTPIFMPVGTAGTVKAVHQRELENDINAQIILGNTYHLYLRPGLDVLERAGGLHKFIGWDRPILTDSGGYQVYSLSKVNKIKEEGVTFRSHIDGSKHLFTPENAMDIQRTIGADIIMAFDECTPYPCDYKYAANSINMTHRWLRRCCKRFDETTPKYGFEQTLFPIVQGSVYKDLRVKSAEFIASMGREGNAIGGLSVGEPAEEMYGMTEVVCNVLPEDKPRYLMGVGTPINILENIALGIDMFDCVMPTRNARNGMLFTRNGIINIGNKKWADDFSPIDADSDLYADQVYSKAYLRHLMHSKEMLGAQIATLHNLHFYLWLVKEAREKIISGEFYAWKNKMVTILGNKL

SEQ ID NO: 58870 - protein, 376 aa, unidentified; identical to SEQ ID NO: 58869
  source 1..376: note = Pedobacter antarcticus
  REGION 1..376: note = tr|A0A1I2EE10|A0A1I2EE10_9SPHI Queuine tRNA-ribosyltransferase OS=Pedobacter antarcticus OX=34086; GN = tgt PE=3 SV=1

SEQ ID NO: 58871 - protein, 376 aa, Pedobacter bauzanensis
  REGION 1..376: note = tr|A0A4R1M123|A0A4R1M123_9SPHI Queuine tRNA-ribosyltransferase OS=Pedobacter bauzanensis; OX = 653929 GN=tgt PE=3 SV=1
MKFTLKAKDPNSKARLGEIETAHGNIQTPVFMPVGTAGSVKAVHQSELLNDVKAQIILGNTYHLYLRPGLDIIQKAGGLHKFNSWDKPLLTDSGGFQVYSLTEVRKIKEEGVTFQSHIDGSRHLFTPERVMDIQRIIGADIIMAFDECTPYPCDYSYARKSMDMTHRWLKRCCERFDETEPLYGYSQSLFPIVQGSVYKDLRERSAEKIASYNREGNAIGGLSVGEPAEEMYAMTEIVCNILPESKPRYLMGVGTPVNLLENIALGIDMFDCVMPTRNARNGMLFTKEGIINIKNKKWEDDFSPIDESSDLFSDRLYSKAYLRHLIRSKEILGAQIASLHNLHFYLWLMEEARNHIADGTFYNWKNKMTKVLDQKI

SEQ ID NO: 58872 - protein, 376 aa, Pedobacter borealis
  REGION 1..376: note = tr|A0A4R8P0G8|A0A4R8P0G8_9SPHI Queuine tRNA-ribosyltransferase OS=Pedobacter borealis OX=475254; GN = tgt PE=3 SV=1
MKFSLQANDPLSKARAGTVTTAHGEIQTPIFMPVGTAGTVKAVHQRELKNDIDAKIILGNTYHLYLRPGLDILEKAGGLHKFIGWDRPILTDSGGYQVYSLSQVRKIKEEGVTFRSHIDGSKHLFTPEYAMDIQRTIGADIIMAFDECTPYPCDYTYAAKSIKMTHRWLERCCTHFDNTQPKYGFDQTLFPIVQGSVYKDLRIKSAEFIAGMNREGNAIGGLSVGEPAEEMYAMTEVVCDILPAEKPRYLMGVGTPINILENIALGIDMFDCVMPTRNARNGMLFTRNGIINIRNKKWENDFSALDAESDLHADQVTTKAYLRHLVHSNEMLGAQIATLHNLHFYLWLVKQAREKIIAGEFYEWKNKMVKVLGNKL

SEQ ID NO: 58873 - protein, 405 aa, Pedobacter caeni
  REGION 1..405: note = tr|A0A1M5H7F2|A0A1M5H7F2_9SPHI Queuine tRNA-ribosyltransferase OS=Pedobacter caeni OX=288992; GN = tgt PE=3 SV=1
MFLFVDKKFSPFIALFLLLLADFSGAYRYMKFTLQANDTHSKARAGTVTTDHGDIQTPIFMPVGTAGTVKAVHQRELKDDIDAKIILGNTYHLYLRPGLDIIEGAGGLHKFIGWDRPILTDSGGYQVYSLSKVRKIKEEGVTFRSHIDGSKHLFTPEYAMDIQRTIGADIIMAFDECTPYPCDYKYAANSINMTHRWLKRCCNRFDTTEPKYGFNQTLFPIVQGSVYKDLRVKSAEFIAGMGREGNAIGGLSVGEPAEEMYAMTEVVCDILPYDKPRYLMGVGTPINILENIALGVDMFDCVMPTRNARNGMLFTRNGIINIGNKKWENDFSPIDAESDLHADQVYSKAYLRHLMHSKEMLGAQIATLHNLHFYLWLVKTAREKIISGEFYAWKNKMVTILGNKL

SEQ ID NO: 58874 - protein, 376 aa, unidentified
  source 1..376: note = Pedobacter chitinilyticus
  REGION 1..376: note = tr|A0A3S3PXR5|A0A3S3PXR5_9SPHI Queuine tRNA-ribosyltransferase OS=Pedobacter chitinilyticus; OX = 2233776 GN=tgt PE=3 SV=1
MKFNLQAKDPNSKARAGVISTAHGDIQTPIFMPVGTAGTVKAVHQKELKEDIKAQIILGNTYHLYLRPGLDILEPAGGLHKFIGWDKPILTDSGGYQVYSLSQVRKIKEEGVTFRSHIDGSKHLFTPEYAMDIQRTIGADIIMAFDECTPYPCDYKYAANSINMTHRWLKRCCERFDTTEPKYGYNQTLFPIVQGSVYKDLRVKSAEFIASMGREGNAIGGLSVGEPAEEMYAMTEVVCDILPYEKPRYLMGVGTPINILENIALGVDMFDCVMPTRNARNGMLFTRNGMINITNKKWASDFSPIDVESDLLADQVYSKAYLRHLMQSKEILGSQIATLHNLHFYLWLVNQAREKIISGEFYEWKNKMVTILGTKL

SEQ ID NO: 58875 - protein, 376 aa, Pedobacter cryoconitis
  REGION 1..376: note = tr|A0A127VF38|A0A127VF38_9SPHI Queuine tRNA-ribosyltransferase OS=Pedobacter cryoconitis; OX = 188932 GN=tgt PE=3 SV=1
MKFTLQANDPQSKARAGTVTTAHGDIQTPIFMPVGTAGTVKAVHQRELKNDIDAQIILGNTYHLYLRPGLDVLEGAGGLHKFIGWDRPILTDSGGYQVYSLSKVNKIKEEGVTFRSHIDGSKHLFTPEYAMDIQRTIGADIIMAFDECTPYPCDYKYAANSINMTHRWLKRCCARFDTTEPKYGFDQTLFPIVQGSVYKDLRKKSAEFIASMGREGNAIGGLSVGEPAEEMYGMTEVVCDILPADKPRYLMGVGTPINILENIALGVDMFDCVMPTRNARNGMLFTRNGIINIGNKKWADDFSPIDAESDLYADQVYSKAYLRHLMHSKEMLGAQIATLHNLHFYLWLVKEAREKIISGEFYAWKNKMVTILGNKL

SEQ ID NO: 58876 - protein, 376 aa, Pedobacter cryoconitis
  REGION 1..376: note = tr|A0A327T939|A0A327T939_9SPHI Queuine tRNA-ribosyltransferase OS=Pedobacter cryoconitis; OX = 188932 GN=tgt PE=3 SV=1
MKFTLQANDPQSKARAGTVTTAHGDIQTPIFMPVGTAGTVKAVHQRELKNDIDAQIILGNTYHLYLRPGLDVLEGAGGLHKFIGWDRPILTDSGGYQVYSLSKVNKIKEEGVTFRSHIDGSKHLFTPEYAMDIQRTIGADIIMAFDECTPYPCDYKYAANSINMTHRWLKRCCTRFDTTEPKYGFDQTLFPIVQGSVYKDLRKKSAEFIASMGREGNAIGGLSVGEPAEEMYGMTEVVCDILPADKPRYLMGVGTPINILENIALGVDMFDCVMPTRNARNGMLFTRNGIINIGNKKWADDFSPIDAESDLYADQVYSKAYLRHLMHSKEMLGAQIATLHNLHFYLWLVKEAREKIISGEFYAWKNKMVTILGNKL

SEQ ID NO: 58877 - protein, 376 aa, Pedobacter duraquae
  REGION 1..376: note = tr|A0A4R6IQY5|A0A4R6IQY5_9SPHI Queuine tRNA-ribosyltransferase OS=Pedobacter duraquae OX=425511; GN = tgt PE=3 SV=1
MKFSLQAQDPHSKARAGTVTTAHGDIQTPIFMPVGTAGTVKAVHQRELKDDINAQIILGNTYHLYLRPGLGILENAGGLHKFIGWDRPILTDSGGYQVYSLSKVRKIKEEGVTFRSHIDGSKHLFTPEYAMDIQRTIGADIIMAFDECTPYPCDYKYAAASINMTHRWLKRCCARVDSTSPKYGFEQTLFPIVQGSVYKDLRVKSAEFIASMNREGNAIGGLSVGEPAEEMYGMTEVVCDILPEDKPRYLMGVGTPINILENIALGVDMFDCVMPTRNARNGMLFTRNGIINIGNKKWEDDHSPLDAESDLFADQVYSKAYLRHLMHSKEILGAQIATLHNLNFYLWLVNQAREKIIDGTFYDWKNKMVKVLGQKL

SEQ ID NO: 58878 - protein, 376 aa, Pedobacter ginsengisoli
  REGION 1..376: note = tr|A0A2D1U0T1|A0A2D1U0T1_9SPHI Queuine tRNA-ribosyltransferase OS=Pedobacter ginsengisoli; OX = 363852 GN=tgt PE=3 SV=1
MKFSLEAKDTHSKARAGTITTDHGEIQTPIFMPVGTAGTVKAVHQRELKNDIDAKIILGNTYHLYLRPGLDVLEQAGGLHKFIGWDRPILTDSGGYQVYSLSQVRKIKEEGVTFNSHIDGSKHLFTPEYAMDIQRTIGADIIMAFDECTPYPCDYKYAASSINMTHRWLKRCCARFDSTEPKYGFNQTLFPIVQGSVYKDLRKKSAEFIASMDREGNAIGGLSVGEPAEEMYGMTEVVCDILPYEKPRYLMGVGTPINILENIALGVDMFDCVMPTRNARNGMLFTKNGIINIGNKKWANDFSPIEADSDLYADQVYSKAYLRHLMHSKEILGAQIATLHNLHFYLWLVKQAREKIITGEFYAWKNKMVTILGNKL

SEQ ID NO: 58879 - protein, 376 aa, unidentified
  source 1..376: note = Pedobacter ginsenosidimutans
  REGION 1..376: note = tr|A0A0T5VME2|A0A0T5VME2_9SPHI Queuine tRNA-ribosyltransferase OS=Pedobacter ginsenosidimutans; OX = 687842 GN=tgt PE=3 SV=1
MKFSLQANDPLSKARAGTVTTAHGEIQTPIFMPVGTAGTVKAVHQRELKDDIDAKIILGNTYHLYLRPGLDILEKAGGLHKFIGWDRPILTDSGGYQVYSLSKVRKIKEEGVTFHSHIDGSKHLFTPEYAMDIQRTIGADIIMAFDECTPYPCDYTYAAQSIKMTHRWLKRCCARFDSTEPKYGFDQTLFPIVQGSVYKDLRIKSAEFIASMNREGNAIGGLSVGEPAEEMYAMTEVVCNILPEEKPRYLMGVGTPINILENIALGIDMFDCVMPTRNARNGMLFTRNGIINIRNKKWENDFSPLDAESDLHVDLVTSKAYLRHLVHSKEMLGAQIATLHNLHFYLWLVKQAREKIIAGEFYEWKNKMVKVLGNKL

SEQ ID NO: 58880 - protein, 376 aa, Pedobacter glucosidilyticus
  REGION 1..376: note = tr|A0A0B8XT80|A0A0B8XT80_9SPHI Queuine tRNA-ribosyltransferase OS=Pedobacter glucosidilyticus; OX = 1122941 GN=tgt PE=3 SV=1
MKFKLAAQDPLSKARAGEITTDHGTIQTPIFMPVGTAGTVKAVHQRELKDDIKAQIILGNTYHLYLRPGLDVIEKAGGIHKFNGWDLPILTDSGGYQVYSLTEVRKIREEGVTFKSHIDGSKHLFTPENVMDIQRTIGADIIMAFDECTPYPCDYTYARKSVDMTHRWLKRCIDRFDTTKPKYGYSQTLFPIVQGSVYKDLRRKSAEFIAEQNREGNAIGGLSVGEPAEEMYGMTEVVCEILPQDKPRYLMGVGTPINILENIALGIDMFDCVMPTRNARNGMLFTRHGFINIKNEKWKDDFSPIDPDSDLFSDQFYTKAYLRHLIHSKEILGAQIATLHNLHFYLWLVKEAREKIIAGEFYDWKNKMVKALAQRL

SEQ ID NO: 58881 - protein, 376 aa, Pedobacter hartonius
  REGION 1..376: note = tr|A0A1H3WXI5|A0A1H3WXI5_9SPHI Queuine tRNA-ribosyltransferase OS=Pedobacter hartonius OX=425514; GN = tgt PE=3 SV=1
MKFTLQASDTQSKARAGVVTTAHGDIQTPIFMPVGTAGTVKAVHQRELKNDIDAKIILGNTYHLYLRPGLDIIEGAGGLHQFIGWDRPILTDSGGYQVYSLSKVNKIKEEGVTFRSHIDGSKHLFSPEYAMDIQRTIGADIIMAFDECTPYPCDYKYAANSINMTHRWLKRCCNRFDTTEPKYGFDQTLFPIVQGSVYKDLRIKSAEFIASMDREGNAIGGLSVGEPAEEMYAMTEVVCNVLPVEKPRYLMGVGTPINILENIALGIDMFDCVMPTRNARNGMLFTRNGIINIGNKKWADDFSPIDAESDLYADQVYSKAYLRHLMHSKEMLGAQIATLHNLHFYLWLVKEAREKIISGEFYAWKNKMVTILGNKL

SEQ ID NO: 58882 - protein, 376 aa, Pedobacter heparinus
  REGION 1..376: note = tr|C6XT83|C6XT83_PEDHD Queuine tRNA-ribosyltransferase OS=Pedobacter heparinus (strain ATCC 13125 / DSM 2366 / CIP 104194 / JCM 7457 / NBRC 12017 / NCIMB 9290 / NRRLB-14731 / HIM 762-3) OX=485917 GN=tgt; PE = 3 SV=1
MKFNLAAKDIHSKARAGTITTDHGEIQTPIFMPVGTAGTVKSINQQQLKNDIDAKIILGNTYHLYLRPGLDILERAGGLHQFIGWDRPILTDSGGYQVYSLSKVRKIKEEGVTFRSHIDGSKHLFTPEYAMDIQRTIGADIIMAFDECTPYPCDYKYAANSINMTHRWLKRCCTRFDTTTPKYGFDQTLFPIVQGSVYKDLRVKSAEFIAAMGREGNAIGGLSVGEPAEEMYAMTEVVCDILPYEKPRYLMGVGTPINILENIALGVDMFDCVMPTRNARNGMLFTKNGVINISNKKWADDFSPIEAESDLVADQVYSKAYLRHLMHSKEMLGAQIATLHNLHFYLWLVKTAREKIMSGEFYAWKNKMVTILGNKL

SEQ ID NO: 58883 - protein, 376 aa, Pedobacter insulae
  REGION 1..376: note = tr|A0A1I2UGA0|A0A1I2UGA0_9SPHI Queuine tRNA-ribosyltransferase OS=Pedobacter insulae OX=414048; GN = tgt PE=3 SV=1
MKFNLQANDPQSKARAGTITTAHGDIKTPIFMPVGTAGTVKAVHQRELKEDIKAQIILGNTYHLYLRPGLDIIEPAGGLHKFIGWDKPILTDSGGYQVYSLSKVRKIKEEGVTFRSHIDGSKHLFTPEYAMDIQRTIGADIIMAFDECTPYPCDYKYAANSINMTHRWLKRCCHRFDTTNPKYGFEQTLFPIVQGSVYKDLRIKSAEFIASMDREGNAIGGLSVGEPAEEMYAMTEVVCNVLPAEKPRYLMGVGTPVNILENIALGIDMFDCVMPTRNARNGMLFTKNGIINITNKKWENDFSPIDADSGLYADQVYSKAYLRHLMHSKEILGAQIATLHNLHFYLWLVNEAREKIIAGEFYAWKNKMVGILGNKL

SEQ ID NO: 58884 - protein, 376 aa, unidentified
  source 1..376: note = Pedobacter jejuensis
  REGION 1..376: note = tr|A0A3N0BZ78|A0A3N0BZ78_9SPHI Queuine tRNA-ribosyltransferase OS=Pedobacter jejuensis OX=1268550; GN = tgt PE=3 SV=1
MKFTLQAKDPLSKARAGTVTTAHGEIQTPIFMPVGTAGTVKAVHQRELEQDINAQIILGNTYHLYLRPGLDTLEKAGGLHKFIGWDRPILTDSGGYQVYSLSKVRKIKEEGVTFNSHIDGSKHLFTPEYAMDIQRTIGADIIMAFDECTPYPCDYKYAAESIKMTHRWLKRCCTRFDTTQPKYGFDQTLFPIVQGSVYKDLRVKSAEFIASMDREGNAIGGLSVGEPAEEMYAMTEVVCDILPYEKPRYLMGVGTPINILENIALGIDMFDCVMPTRNARNGMLFTKNGIINIRNKKWENDFSPIEPDSDLHVDLVTSKAYLRHLVHSKEMLGAQIATLHNLHFYLWLVKQAREKIISGEFYEWKNQMVKVLGNKL

SEQ ID NO: 58885 - protein, 376 aa, unidentified
  source 1..376: note = Pedobacter kyonggii
  REGION 1..376: note = tr|A0A4Q9H8N0|A0A4Q9H8N0_9SPHI Queuine tRNA-ribosyltransferase OS=Pedobacter kyonggii OX=1926871; GN = tgt PE=3 SV=1
MKFSLQANDPLSKARAGTVTTAHGEIQTPIFMPVGTAGTVKAVHQRELKEDIDAKIILGNTYHLYLRPGLDILEKAGGLHQFIGWDRPILTDSGGYQVYSLSKVRKIKEEGVTFHSHIDGSKHLFTPEYAMDIQRTIGADIIMAFDECTPYPCDYTYAAQSIKMTHRWLKRCCTRFDSTEPKYGFDQTLFPIVQGSVYKDLRIKSAEFIASMNREGNAIGGLSVGEPAEEMYAMTEVVCNILPEEKPRYLMGVGTPINILENIALGIDMFDCVMPTRNARNGMLFTRNGIINIRNKKWENDFSPLDAESDLHADLVTSKAYLRHLVHSKEMLGAQIATLHNLHFYLWLVKQAREKIIAGEFYEWKNKMVRILGNKL

SEQ ID NO: 58886 - protein, 376 aa, unidentified
  source 1..376: note = Pedobacter kyungheensis
  REGION 1..376: note = tr|A0A0C1FEP0|A0A0C1FEP0_9SPHI Queuine tRNA-ribosyltransferase OS=Pedobacter kyungheensis; OX = 1069985 GN=tgt PE=3 SV=1
MKFSLQANDPLSKARAGTVTTAHGEIQTPIFMPVGTAGTVKAVHQRELKDDIDAKIILGNTYHLYLRPGLDILEKAGGLHKFIGWDRPILTDSGGYQVYSLSKVRKIKEEGVTFRSHIDGSKHLFTPEYAMDIQRTIGADIIMAFDECTPYPCDYTYAANSIKMTHRWLERCCTHFDNTQPKYGFDQTLFPIVQGSVYKDLRIKSAEFIASMNREGNAIGGLSVGEPAEEMYAMTEVVCNILPADKPRYLMGVGTPINILENIALGIDMFDCVMPTRNARNGMLFTRNGIINIRNKKWENDFSPLDAESDLHADQVTTKAYLRHLVHSNEMLGAQIATLHNLHFYLWLVKQAREKIIAGEFYEWKNKMVKVLGNKL

SEQ ID NO: 58887 - protein, 376 aa, unidentified
  source 1..376: note = Pedobacter lusitanus
  REGION 1..376: note = tr|A0A0D0GL57|A0A0D0GL57_9SPHI Queuine tRNA-ribosyltransferase OS=Pedobacter lusitanus OX=1503925; GN = tgt PE=3 SV=1
MKFTLQANDPLSKARAGTVTTAHGDIQTPIFMPVGTAGTVKAVHQRELKEDIEAQIILGNTYHLYLRPGLDVLEGAGGLHKFIGWDRPILTDSGGYQVYSLSKVNKIKEEGVTFRSHIDGSKHLFSPEYAMDIQRTIGADIIMAFDECTPYPCDYKYAANSINMTHRWLRRCCARFDSTEPKYGFDQTLFPIVQGSVYKDLRMKSAEFIASMDREGNAIGGLSVGEPAEEMYGMTEVVCDILPADKPRYLMGVGTPINILENIALGVDMFDCVMPTRNARNGMLFTRNGIINIGNKKWADDFSPIDAESDLYADQVYSKAYLRHLMHSKEMLGAQIATLHNLHFYLWLVKEAREKIISGEFYAWKNKMVTILGNKL

SEQ ID NO: 58888 - protein, 376 aa, unidentified
  source 1..376: note = Pedobacter luteus
  REGION 1..376: note = tr|A0A1T5AVY9|A0A1T5AVY9_9SPHI Queuine tRNA-ribosyltransferase OS=Pedobacter luteus OX=572036; GN = tgt PE=3 SV=1
MKFKLEVTDSHTKARAGEITTDHGVIQTPIFMPVGTAGSVKAVHQRELENDIKAQIILGNTYHLYLRPGLSTLEMAGGLHKFNGWEKPILTDSGGYQVYSLSGVRKIKEEGVTFRSHIDGSKHLFTPEGVMDTQRIIGADIIMAFDECTPYPCEYGYARRSMEMTHRWLKRCCDHFDQTQPKYGYSQTLFPIVQGSVYKDLRKQSAEMIASFEREGNAIGGLSVGEPAEDMYEMTEIVCDILPSDKPRYLMGVGTPVNILENIALGIDMFDCVMPTRNARNGMLFTKNGIINIKNERWKNDFSPIEEDSDLFADRNYSKAYLRHLAHSNEILGSQIATLHNLHFYIWLVSEARAKIIEGTFNEWKNKMVKQVAQRL

SEQ ID NO: 58889 - protein, 376 aa, Pedobacter metabolipauper
  REGION 1..376: note = tr|A0A4R6SRN5|A0A4R6SRN5_9SPHI Queuine tRNA-ribosyltransferase OS=Pedobacter metabolipauper; OX = 425513 GN=tgt PE=3 SV=1
MKFSLQAKDTHSKARAGTVTTDHGEIQTPIFMPVGTAGTVKAVHQRELKNDIDAKIILGNTYHLYLRPGLDIIEKAGGLHQFIGWDRPILTDSGGYQVYSLSKVRKIKEEGVTFRSHIDGSKHLFTPEYAMDIQRTIGADIIMAFDECTPYPCDYKYAASSINMTHRWLKRCCNRFDTTEPKYGFNQTLFPIVQGSVYKDLRVKSAEFIASMDREGNAIGGLSVGEPAEEMYGMTEVVCDILPYEKPRYLMGVGTPINILENIALGVDMFDCVMPTRNARNGMLFTKNGIINIGNKKWENDFSPIEPDSDLYADQVYSKAYLRHLMHSKEMLGAQIATLHNLHFYIWLVKQAREKIISGEFYAWKNKMVTILGNKL

SEQ ID NO: 58890 - protein, 376 aa, unidentified
  source 1..376: note = Pedobacter nutrimenti
  REGION 1..376: note = tr|A0A318U7W5|A0A318U7W5_9SPHI Queuine tRNA-ribosyltransferase OS=Pedobacter nutrimenti; OX = 1241337 GN=tgt PE=3 SV=1
MKFTLEAKDTQSKARAGTVTTAHGEIQTPIFMPVGTAGTVKAVHQRELKNDIDAKIILGNTYHLYLRPGLDTLERAGGLHQFIGWDRPILTDSGGYQVYSLSKVRKIKEEGVTFRSHIDGSKHLFTPEYAMDIQRTIGADIIMAFDECTPYPCDYKYAAASINMTHRWLKRCCTRFDTTEPKYGFDQTLFPIVQGSVYKDLRIKSAEFIASMEREGNAIGGLSVGEPAEEMYAMTEVVCDILPSDKPRYLMGVGTPVNILENIALGVDMFDCVMPTRNARNGMLFTKNGIINIGNKKWANDFSPIEADSDLFADKVYTKAYLRHLMHSKEILGAQIATLHNLHFYLWLVKQAREKIVSGEFTAWKNKMVTILGNKL

SEQ ID NO: 58891 - protein, 376 aa, Pedobacter nyackensis
  REGION 1..376: note = tr|A0A1W2AEH6|A0A1W2AEH6_9SPHI Queuine tRNA-ribosyltransferase OS=Pedobacter nyackensis OX=475255; GN = tgt PE=3 SV=1
MKFNLQAKDIHSKARAGTITTDHGDIQTPIFMPVGTAGTVKSINQQQLKNDIDAKIILGNTYHLYLRPGLDIIEGGGGLHKFIGWDRPILTDSGGFQVYSLSKVRKIKEEGVTFHSHIDGSKHLFTPEYAMDIQRTIGADIIMAFDECTPYPCDYKYAANSINMTHRWLKRCCTRFDTTEPKYGFNQTLFPIVQGSVYKDLRKKSAEFIAAMDREGNAIGGLSVGEPAEEMYGMTEVVCDILPEEKPRYLMGVGTPINILENIALGIDMFDCVMPTRNARNGMLFTKNGIINIGNKKWADDFSPIEADSDLLADQVYSKAYLRHLMHSKEMLGAQIATLHNLHFYLWLVNTAREKIISGEFYAWKNKMVTILGNKL

SEQ ID NO: 58892 - protein, 376 aa, unidentified
  source 1..376: note = Pedobacter psychrophilus
  REGION 1..376: note = tr|A0A179DMG8|A0A179DMG8_9SPHI Queuine tRNA-ribosyltransferase OS=Pedobacter psychrophilus; OX = 1826909 GN=tgt PE=3 SV=1
MEFKLAKKDPHSKARAGEITTDHGKIQTPIFMPVGTAATVKAVHQRELAEDIKAQIILGNTYHLYLRPGLETIKLAGGLHKFNGWDKPILTDSGGYQVYSLTEVRKIKEEGVTFKSHIDGSKHLFTPENVMDIQRVIGADIIMAFDECTPYPCDYHYARRSIDMTHRWLKRCIKRFDETVPHYGYSQTLFPIVQGSVYKDLRIKSAEFIAAQNQQGNAIGGLSVGEPAEEMYAMTEVVCNILPEEKPRYLMGVGTPINLLENIALGIDMFDCVMPTRNGRNGMLFTRNGIINIKNEKWKNDFSPIDAESDLFSDLNYSKAYLRHLIHSKEILGAQIASLHNLHFYVWLVGQAREKIINGDFYDWKNKMVQVLGVKL

SEQ ID NO: 58893 - protein, 376 aa, unidentified
  source 1..376: note = Pedobacter psychrotolerans
  REGION 1..376: note = tr|A0A4R2H4X3|A0A4R2H4X3_9SPHI Queuine tRNA-ribosyltransferase OS=Pedobacter psychrotolerans; OX = 1843235 GN=tgt PE=3 SV=1
MKFTLQANDPLSKARAGTVTTAHGEIQTPIFMPVGTAGTVKAVHQRELKDDIDAKIILGNTYHLYLRPGLDILETAGGLHKFIGWDRPILTDSGGYQVYSLSKVRKIKEEGVTFHSHIDGSKHLFTPEYAMDIQRTIGADIIMAFDECTPYPCDYTYASQSIKMTHRWLKRCCTHFDNTEPKYGFDQTLFPIVQGSVYKDLRIKSAEFIASMNREGNAIGGLSVGEPAEEMYAMTEVVCDILPYEKPRYLMGVGTPINILENIALGVDMFDCVMPTRNARNGMLFTRNGIINIRNKKWENDFSPLDAESDLHADLVTSKAYLRHLVHSKEMLGAQIATLHNLHFYLWLVKQAREKIISGEFYDWKNKMVKVLGQKL

SEQ ID NO: 58894 - protein, 376 aa, Pedobacter rhizosphaerae
  REGION 1..376: note = tr|A0A1H9JTY3|A0A1H9JTY3_9SPHI Queuine tRNA-ribosyltransferase OS=Pedobacter rhizosphaerae; OX = 390241 GN=tgt PE=3 SV=1
MKFNLQANDPLSKARAGTITTAHGEIQTPIFMPVGTAGTVKAVHQRELKQDIDAQIILGNTYHLYLRPGLETLEQAGGLHQFIGWDRPILTDSGGYQVYSLSKVRKIKEEGVTFNSHIDGSKHLFTPEYAMDIQRTIGADIIMAFDECTPYPCDYTYAAESVKMTHRWLKRCCTHFDNTEPKYGFDQTLFPIVQGSVYKDLRIKSAEFIASMGREGNAIGGLSVGEPAEEMYAMTEVVCDILPSDKPRYLMGVGTPVNILENIALGVDMFDCVMPTRNARNGMLFTRNGIINIRNKKWENDFSALDAESDLHADQVTSKAYLRHLVHSKEMLGAQIATLHNLHFYLWLVKQAREKILTGEFYEWKNKMVKILGNKL

SEQ ID NO: 58895 - protein, 376 aa, unidentified
  source 1..376: note = Pedobacter ruber
  REGION 1..376: note = tr|A0A1G9QK02|A0A1G9QK02_9SPHI Queuine tRNA-ribosyltransferase OS=Pedobacter ruber OX=990371; GN = tgt PE=3 SV=1
MKFKLEAEDKNSKARAGEITTDHGVIKTPIFMPVGTAGSVKAVHQHELSNDIKAQIILGNTYHLYLRPGLETLQLAGGLHKFNGWNGPLLTDSGGYQVYSLSGVRKIKEEGVTFRSHIDGSKHLFTPESVMDTQRIIGADIIMAFDECTPYPCEYGYARRSMEMTHRWLKRCCERFDTTEPIYGFDQTLFPIIQGSVYKDLRKQSAEMIASFEREGNAIGGLSVGEPAEEMYEMTEIVCDILPKDKPRYLMGVGTPINLLENIALGIDMFDCVMPTRNARNGMLFTKNGIINIRNERWKNDFSPIEEDSDLFADRNYTKAYLRHLAHSKEILGAQIATLHNLNFYLWLVNEAREKIISGEFTEWKNKMVIQLAQRL

SEQ ID NO: 58896 - protein, 376 aa, Pedobacter soli
  REGION 1..376: note = tr|A0A1G6YYB2|A0A1G6YYB2_9SPHI Queuine tRNA-ribosyltransferase OS=Pedobacter soli OX=390242; GN = tgt PE=3 SV=1
MKFSLQANDPLSKARAGTVTTAHGEIQTPIFMPVGTAGTVKAVHQRELKDDIDAKIILGNTYHLYLRPGLDILEKAGGLHKFIGWDRPILTDSGGYQVYSLSQVRKIKEEGVTFRSHIDGSKHLFTPEYAMDIQRTIGADIIMAFDECTPYPCDYTYAANSIKMTHRWLERCCTHFDNTQPKYGFDQTLFPIVQGSVYKDLRIKSAEFIASMNREGNAIGGLSVGEPAEEMYAMTEVVCNILPADKPRYLMGVGTPINILENIALGIDMFDCVMPTRNARNGMLFTRNGIINIRNKKWENDFSPLDAESDLHADQVTTKAYLRHLVHSNEMLGAQIATLHNLHFYLWLVKQAREKIIAGEFYEWKNKMVKVLGNKL

SEQ ID NO: 58897 - protein, 376 aa, Pedobacter sp.; identical to SEQ ID NO: 58868
  REGION 1..376: note = tr|A0A4R2YNJ1|A0A4R2YNJ1_9SPHI Queuine tRNA-ribosyltransferase OS=Pedobacter sp. CF074 OX=2135714; GN = tgt PE=3 SV=1

SEQ ID NO: 58898 - protein, 376 aa, Pedobacter sp.
  REGION 1..376: note = tr|A6EGW3|A6EGW3_9SPHI Queuine tRNA-ribosyltransferase OS=Pedobacter sp. BAL39 OX=391596; GN = tgt PE=3 SV=1
MKFTLAAKDTHSKARAGVVTTDHGDIQTPIFMPVGTAGTVKAVHQRELKEDIDAKIILGNTYHLYLRPGLDIIEQGGGLHKFIGWDRPILTDSGGYQVYSLSKVRKIKEEGVTFRSHIDGSKHLFTPEYVMDIQRTIGADIIMAFDECTPYPCDYKYAANSINMTHRWLKRCCARFDSTTPKYGFDQTLFPIVQGSVYKDLRMKSAEFIASMDREGNAIGGLSVGEPAEEMYAMTEVVCNILPDEKPRYLMGVGTPINILENIALGIDMFDCVMPTRNARNGMLFTRNGIINIGNKKWENDFSPIDADSDLHADQVYSKAYLRHLMHSKEMLGAQIATLHNLHFYLWLVKTAREKIISGEFYAWKNKMVTILGNKL

SEQ ID NO: 58899 - protein, 376 aa, Pedobacter steynii
  REGION 1..376: note = tr|A0A1D7QPH0|A0A1D7QPH0_9SPHI Queuine tRNA-ribosyltransferase OS=Pedobacter steynii OX=430522; GN = tgt PE=3 SV=1
MKFTLQANDTHSKARAGTVTTDHGEIQTPIFMPVGTAGTVKAVHQRELKDDIDAKIILGNTYHLYLRPGLDIIEQGGGLHKFIGWDRPILTDSGGYQVYSLSKVRKIKEEGVTFRSHIDGSKHLFTPEYAMDIQRTIGADIIMAFDECTPYPCDYKYAANSINMTHRWLKRCCTRFDTTEPKYGFNQTLFPIVQGSVYKDLRVKSAEFIAGMGREGNAIGGLSVGEPAEEMYAMTEVVCDILPYDKPRYLMGVGTPINILENIALGVDMFDCVMPTRNARNGMLFTRNGIINIGNKKWENDFSPIDAESDLHADQVYSKAYLRHLMHSKEMLGAQIATLHNLHFYLWLVRTAREKIISGEFYAWKNKMVTILGNKL

SEQ ID NO: 58900 - protein, 405 aa, Pedobacter steynii
  REGION 1..405: note = tr|A0A1G9S196|A0A1G9S196_9SPHI Queuine tRNA-ribosyltransferase OS=Pedobacter steynii OX=430522; GN = tgt PE=3 SV=1
MFLFVDKKFNPFIALFLLLLADFSGAYRFMKFTLQANDTHSKARAGTVTTDHGDIQTPIFMPVGTAGTVKAVHQRELKNDIDAKIILGNTYHLYLRPGLDIIEGAGGLHKFIGWDRPILTDSGGYQVYSLSKVRKIKEEGVTFRSHIDGSKHLFTPEYAMDIQRTIGADIIMAFDECTPYPCDYKYAANSINMTHRWLKRCCNRFDTTEPKYGFNQTLFPIVQGSVYKDLRKKSAEFIAGMNREGNAIGGLSVGEPAEEMYGMTEVVCDILPYDKPRYLMGVGTPINILENIALGVDMFDCVMPTRNARNGMLFTRNGIINIGNKKWADDFSPIDAESDLHADQVYSKAYLRHLMHSKEMLGAQIATLHNLHFYLWLVKTAREKIISGEFYAWKNKMVTILGNKL

SEQ ID NO: 58901 - protein, 376 aa, Pedobacter suwonensis
  REGION 1..376: note = tr|A0A1I0U7C9|A0A1I0U7C9_9SPHI Queuine tRNA-ribosyltransferase OS=Pedobacter suwonensis OX=332999; GN = tgt PE=3 SV=1
MKFSLQANDPLSKARAGTVTTAHGEIQTPIFMPVGTAGTVKAVHQRELKNDIDAKIILGNTYHLYLRPGLDILEKAGGLHKFIGWDRPILTDSGGYQVYSLSQVRKIKEEGVTFRSHIDGSKHLFTPEYAMDIQRTIGADIIMAFDECTPYPCDYTYAAKSIKMTHRWLERCCTHFDNTQPKYGFDQTLFPIVQGSVYKDLRIKSAEFIAGMNREGNAIGGLSVGEPAEEMYAMTEVVCDILPAEKPRYLMGVGTPINILENIALGIDMFDCVMPTRNARNGMLFTRNGIINIRNKKWENDFSPLDAESDLHADQVTTKAYLRHLVHSNEMLGAQIATLHNLHFYLWLVKHAREKIIAGEFYEWKNKMVKVLGNKL

SEQ ID NO: 58902 - protein, 376 aa, Pedobacter terrae
  REGION 1..376: note = tr|A0A561GCV5|A0A561GCV5_9SPHI Queuine tRNA-ribosyltransferase OS=Pedobacter terrae OX=405671; GN = tgt PE=3 SV=1
MKFSLQANDPLSKARAGTVTTAHGEIQTPIFMPVGTAGTVKAVHQRELKDDIDAKIILGNTYHLYLRPGLETLEQAGGLHKFIGWDRPILTDSGGYQVYSLSKVRKIKEEGVTFHSHIDGSKHLFTPEYAMDIQRTIGADIIMAFDECTPYPCDYTYAAQSIKMTHRWLKRCCERFDTTEPKYGFDQTLFPIVQGSVYKDLRIKSAEFIASMGREGNAIGGLSVGEPAEEMYAMTEVVCDILPVEKPRYLMGVGTPINILENIALGVDMFDCVMPTRNARNGMLFTRNGIINIRNKKWENDFSPLDAESDLHADLVTSKAYLRHLVHSKEMLGAQIATLHNLHFYLWLVKQAREKIIAGEFYEWKNKMVKVLGNKL

SEQ ID NO: 58903 - protein, 376 aa, Pedobacter terrae
  REGION 1..376: note = tr|A0A1G8DY97|A0A1G8DY97_9SPHI Queuine tRNA-ribosyltransferase OS=Pedobacter terrae OX=405671; GN = tgt PE=3 SV=1
MKFSLQANDPLSKARAGTVTTAHGEIQTPIFMPVGTAGTVKAVHQRELKDDIDAKIILGNTYHLYLRPGLDILEKAGGLHKFIGWDRPILTDSGGYQVYSLSKVRKIKEEGVTFRSHIDGSKHLFTPEYAMDIQRTIGADIIMAFDECTPYPCDYTYAAKSIKMTHRWLERCCTHFDNTQPKYGFDQTLFPIVQGSVYKDLRIKSAEFIASMGREGNAIGGLSVGEPAEEMYAMTEVVCNILPAEKPRYLMGVGTPINILENIALGIDMFDCVMPTRNARNGMLFTRNGIINIRNKKWENDFSALDAESDLHADQVTTKAYLRHLVHSNEMLGAQIATLHNLHFYLWLVKQAREKIIAGEFYEWKNKMVKVLGNKL

SEQ ID NO: 58904 - protein, 376 aa, unidentified
  source 1..376: note = Pedobacter tournemirensis
  REGION 1..376: note = tr|A0A543H1G3|A0A543H1G3_9SPHI Queuine tRNA-ribosyltransferase OS=Pedobacter tournemirensis; OX = 699437 GN=tgt PE=3 SV=1
MKFRLEVTDKLSKARAGEISTDHGTIKTPIFMPVGTAGSVKAVHQRELKEDIEAQIILGNTYHLYLRPGLNTLEQAGGLHKFNGWDKPILTDSGGYQVYSLTEVRKIKEEGVTFRSHIDGSKHLFTPEAVMDIQRTIGADIIMAFDECTPYPCEYNYASKSVDMTHRWLKRCCERFDSTEPKYGYSQTLFPIVQGSVYKDLRVKSAEVIASFEREGNAIGGLSVGEPAEEMYEMTDLVCNILPKDKPRYLMGVGTPVNILENIALGVDMFDCVMPTRNGRNGMLFTSEGVINIRNEKWKNDFSPIGPGSDLFADITYSKAYLRHLITSKEILGAQIATLHNLHFYLWLVTQAREKIISGEFYEWKNKMIKKLSQRL

SEQ ID NO: 58905 - protein, 376 aa, unidentified
  source 1..376: note = Pedobacter tournemirensis
  REGION 1..376: note = tr|A0A4V1KIL3|A0A4V1KIL3_9SPHI Queuine tRNA-ribosyltransferase OS=Pedobacter tournemirensis; OX = 699437 GN=tgt PE=3 SV=1
MKFRLEVTDKLSKARAGEISTDHGTIKTPIFMPVGTAGSVKAVHQRELKEDIEAQIILGNTYHLYLRPGLDTLEQAGGLHKFNGWDKPILTDSGGYQVYSLTEVRKIKEEGVTFRSHIDGSKHLFTPEAVMDIQRTIGADIIMAFDECTPYPCEYNYASKSVDMTHRWLKRCCERFDSTEPKYGYSQTLFPIVQGSVYKDLRVKSAEVIASFEREGNAIGGLSVGEPAEEMYEMTDLVCNILPKDKPRYLMGVGTPVNILENIALGVDMFDCVMPTRNGRNGMLFTSEGVINIRNEKWKNDFSPIDPGSDLFADITYTKAYLRHLITSKEILGAQIATLHNLHFYLWLVTQAREKIISGEFYEWKNKMIKKLSQRL

SEQ ID NO: 58906 - protein, 376 aa, Pedobacter westerhofensis
  REGION 1..376: note = tr|A0A521EX57|A0A521EX57_9SPHI Queuine tRNA-ribosyltransferase OS=Pedobacter westerhofensis; OX = 425512 GN=tgt PE=3 SV=1
MKFTLQASDTQSKARAGVVTTAHGDIQTPIFMPVGTAGTVKAVHQRELKEDIDAKIILGNTYHLYLRPGLGVIEGAGGLHKFIGWDRPILTDSGGYQVYSLSKVNKIKEEGVTFRSHIDGSKHLFSPEYAMDIQRTIGADIIMAFDECTPYPCDYKYAANSINMTHRWLKRCCKRFDTTEPKYGFDQTLFPIVQGSVYKDLRMKSAEFIASMDREGNAIGGLSVGEPAEEMYAMTEVVCNILPVEKPRYLMGVGTPINILENIALGIDMFDCVMPTRNARNGMLFTRNGIINIGNKKWADDFSPIDEESDLYADQVYSKAYLRHLMHSKEMLGAQIATLHNLHFYLWLVKEAREKIISGEFYAWKNKMVTILGNKL

SEQ ID NO: 58907 - protein, 376 aa, unidentified
  source 1..376: note = Pedobacter xixiisoli
  REGION 1..376: note = tr|A0A285ZZ61|A0A285ZZ61_9SPHI Queuine tRNA-ribosyltransferase OS=Pedobacter xixiisoli OX=1476464; GN = tgt PE=3 SV=1
MKFDLQAKDPNSKARAGVISTAHGDIQTPIFMPVGTAGTVKAVHQKELKEDIKAQIILGNTYHLYLRPGLDILEPAGGLHKFIGWDRPILTDSGGYQVYSLSKVRKIKEEGVTFRSHIDGSKHLFTPEYAMDIQRTIGADIIMAFDECTPYPCDYKYAANSINMTHRWLKRCCERFDTTEPKYGYDQTLFPIVQGSVYKDLRVKSAEFIASMGREGNAIGGLSVGEPAEEMYAMTEVVCDILPYEKPRYLMGVGTPVNILENIALGVDMFDCVMPTRNARNGMLFTRNGMINITNKKWANDFSPIDADSDLLADQVYSKAYLRHLMHSKEILGSQIATLHNLHFYLWLVNEAREKIIAGEFYEWKNKMVTILGTKL

SEQ ID NO: 58908 - protein, 376 aa, unidentified
  source 1..376: note = Pedobacter yonginense
  REGION 1..376: note = tr|A0A317EHC2|A0A317EHC2_9SPHI Queuine tRNA-ribosyltransferase OS=Pedobacter yonginense OX=651869; GN = tgt PE=3 SV=1
MKFSLQANDPLSKARAGTITTAHGEIQTPIFMPVGTAGTVKAVHQRELKEDIDAKIILGNTYHLYLRPGLDILERAGGLHKFIGWDRPILTDSGGYQVYSLSKVRKIKEEGVTFHSHIDGSKHLFTPEYAMDIQRTIGADIIMAFDECTPYPCDYTYAAQSIKMTHRWLKRCCTRFDTTEPKYGFDQTLFPIVQGSVYKDLRMKSAEFIASMNREGNAIGGLSVGEPAEEMYAMTEVVCDILPYEKPRYLMGVGTPINILENIALGIDMFDCVMPTRNARNGMLFTRNGIINIRNKKWEDDFSPLDAESDLHVDLVTSKAYLRHLVHSNEMLGAQIATLHNLHFYLWLVKQAREKILAGEFYEWKNKMVKVLGNKL

SEQ ID NO: 58909 - protein, 376 aa, unidentified
  source 1..376: note = Pedobacter yulinensis
  REGION 1..376: note = tr|A0A2T3HIF6|A0A2T3HIF6_9SPHI Queuine tRNA-ribosyltransferase OS=Pedobacter yulinensis; OX = 2126353 GN=tgt PE=3 SV=1
MKFDLQAKDPLSKARAGVVTTDHGAIQTPIFMPVGTAGTVKAVHQRELKEDISAQIILGNTYHLYLRPGIDTLEQAGGLHQFIGWDRPILTDSGGYQVYSLSNVRKIKEEGVTFNSHIDGSRHLFTPEYAMDIQRSIGADIIMAFDECTPYPCDYKYAANSLEMTHRWLRRCCTHFDNTEPKYGFNQTLFPIVQGSVYKDLRVRSAEFIAGMEREGNAIGGLSVGEPAEEMYAMTEVVCDILPADRPRYLMGVGTPVNILENIALGVDMFDCVMPTRNARNGMLFTRHGIINIRNKKWENDFSPIDADSDLLVDRMHSKAYLRHLIHSKEMLGAQIATLHNLHFYLWLVTEARQQIVAGTFYDWKNKMVQILGNKL

SEQ ID NO: 58910 - protein, 381 aa, unidentified
  source 1..381: note = Pedosphaera parvula
  REGION 1..381: note = tr|B9XDJ1|B9XDJ1_PEDPL Queuine tRNA-ribosyltransferase OS=Pedosphaera parvula (strain Ellin514) OX=320771 GN=tgt PE=3 SV=1
MYELLKTDPHSRARLGRLITTRGTINTPTFMPVGTQGSVKALDPRELLDMGTQIILGNTYHLNIRPGLDIITAAGDLHKFINWPYPILTDSGGFQVFSLAKIRKVKPHGVEFRSHLDGSLLFLGPKEAMHIQKVLASDIAMVFDECPPHDSPIREMRAAVERTIRWAKECREQPRAHGQMVFGIVQGGSNAAMREECAKALVPMEFDGYAIGGVSVGEPEPEMMKAVEYTEPFLPATKARYAMGLGTPAQMVELVARGVDMFDCVLPTRVARNGTAFTRKGTISIKAGFNKSDFGPIEEGCDCYACKNFTRAYLRHLLNVNEILGLRMLSVHNSHMYLKVMEDIRASLAAGTFAEFRREFIATYVPSRKVLSAREETRGDK

SEQ ID NO: 58911 - protein, 383 aa, unidentified
  source 1..383: note = Pedosphaera sp.
  REGION 1..383: note = tr|A0A2A2RG76|A0A2A2RG76_9BACT Queuine tRNA-ribosyltransferase OS=Pedosphaera sp. Tous-C6FEB; OX = 1982324 GN=tgt PE=3 SV=1
MFELLKTDSSSKARLGRLTTPHGVIETPVFMPVGTQASVKALDPRELVEMGTQIILGNTYHLSIRPGMDIIRAAGGLHGFMNWQLPILTDSGGFQVFSLAKIRKVREHGVEFRSHLDGSKLFLGPKEAMEIQRYLGSDIAMIFDECPPHDAPAKEQQLAVERTIRWAKECREQPRAAGQQVFGIVQGGSNPELREQCAKAITALDFDGYAIGGVSVGEPEPEMMKAVELAEPFLPANKARYAMGLGTPAQLVELVARGVDMFDCVLPTRVARGGTAFTRKGSFAIKGGAVKADFGPIEAGCDCFACQRFSRAYIRHLLNVNEILGLRLVSIHNSHLFLAVMADMRRHLAAGTFAEFRREFIANYVPSRKVLAGRSGDTLVSKE

SEQ ID NO: 58912 - protein, 377 aa, unidentified
  source 1..377: note = Pedosphaera sp.
  REGION 1..377: note = tr|A0A2G4I898|A0A2G4I898_9BACT Queuine tRNA-ribosyltransferase OS=Pedosphaera sp. OX=2024890; GN = tgt PE=3 SV=1
MFELLKTDTSSKARLGRLTTAHGVIDTPVFMPVGTQGSVKALDPRELVEMGTQIILGNTYHLSIRPGMDIIRAAGGLHGFMNWPLPILTDSGGFQVFSLAKIRKVRENGVEFRSHLDGSKLFLGPKEAMEIQRYLGSDIAMIFDECPPHDAPAKDQLLAVERTIRWAKECRDQPRAQGQKVFGIVQGGSNPELRAHCAKAITALDFDGYAIGGVSVGEPEPEMMKAVELAEPFLPADKARYAMGLGTPAQLVELVARGVDMFDCVLPTRVARGGTAYTRKGSYAIKGGAVKADFGPIEDGCDCFACKRFSRAYIRHLLNVNEILGLRMVSVHNSHLFLAVMADIRRHLAAGTFAEFRREFIAGYVPSRKVLAARAGA

SEQ ID NO: 58913 - protein, 375 aa, unidentified
  source 1..375: note = Pelagibaca abyssi
  REGION 1..375: note = tr|A0A1P8UYI6|A0A1P8UYI6_9RHOB Queuine tRNA-ribosyltransferase OS=Pelagibaca abyssi OX=1250539; GN = tgt PE=3 SV=1
MSTASFSLTATDGAARTGVISTPRGEIRTPAFMPVGTAATVKAMLPENVRATGADILLGNTYHLMLRPTAERIARLGGLHRFMNWERPILTDSGGFQVMSLAGLRKLTEEGVSFKSHIDGSKHMLSPERSMEIQRLLGSDIVMAFDECPALPADRKRIEESMRLSMRWAQRSRDAFGDRPGHMLFGIMQGGLERDMREESAKALTAIGFDGYAVGGLAVGEGQEAMFSCLDYAPGFLPQDKPRYLMGVGKPDDIVGAVKRGIDMMDCVLPTRSGRTGQVFTRHGVVNIKNARHADDPRPLDENCSCPACTSYSRAYLHHVFRAQEMISGMLLSWHNLQYFQDIMAGMREAIAGGRFAEWEADFHAGRAEGDIPPL

SEQ ID NO: 58914 - protein, 375 aa, Pelagibaca sp.
  REGION 1..375: note = tr|A0A2D6B393|A0A2D6B393_9RHOB Queuine tRNA-ribosyltransferase OS=Pelagibaca sp. OX=1979400; GN = tgt PE=3 SV=1
MSTTSFTLHATDGKARTGVISTPRGEIRTPAFMPVGTAATVKAMLPEQVRSTGADILLGNTYHLMLRPTAERIARLGGLHQFMNWDRPILTDSGGFQVMSLADLRKLTEEGVSFRSHIDGSKHMLTPERSMEIQRLLGSDIVMCFDECPALPADRKRLEESMRLSMRWAQRSRDAFGDRPGHMLFGIQQGGLEPDLREESAKALTEIGFDGYAVGGLAVGEGQEAMFGCLDHAPDTLPVDKPRYLMGVGKPDDIVGAVKRGIDMMDCVLPTRSGRTGQAFTRRGVVNIKNARHADDPRPLDEHCSCPACTGYSRAYLHHVFRSHEMISGMLLTWHNLQYFQDIMDGMRGAIAEGRFEAWEAAFHAGRAEGDIEPL

SEQ ID NO: 58915 - protein, 368 aa, unidentified
  source 1..368: note = Pelagibacter sp.
  REGION 1..368: note = tr|F2I198|F2I198_PELSM Queuine tRNA-ribosyltransferase OS=Pelagibacter sp. (strain IMCC9063) OX=1002672 GN=tgt PE=3 SV=1
MPCSFKLLNENSGARLGKIITSRGEIDTPAFMPVGTAATVKALLIDQVKGTGAQIILGNTYHLMLRPGIERISRVGGLHQFMNCDLPILTDSGGFQVMSLSKISKVVEDGVYFNSHVDGKKIFLSPEVSIQIQKGLNSDIVMIFDECPEYTSDKNRVKKSVDLSIEWAKRSKKEFGINPEKMLFGIVQGGVFNDLRKDSLKRLEEIGFDGYALGGLAVGEKQQEMFDVLDNIKEDLPRDKPHYLMGVGTPADILGAVKRGIDMFDCVLPTRSGRTGLAYTWEGKKNLKNAKYANDDSPLDPLVNCPASQKYSRSYLNHLVNSKEILASTLLSWHNIAFYQDLTRKIRESVANNDFQNFYNKHFDILNS

SEQ ID NO: 58916 - protein, 370 aa, unidentified
  source 1..370: note = Pelagibacter ubique
  REGION 1..370: note = tr|Q4FLZ2|Q4FLZ2_PELUB Queuine tRNA-ribosyltransferase OS=Pelagibacter ubique (strain HTCC1062) OX=335992 GN=tgt PE=3 SV=1
MALKNFKFNVIESNKFARVGVIETHRGNIQTPAFMPVGTQATVKACLIDDVIKTGSEIILSNTYHLMIRPGVDRIISAGGLHKFMNCKLPILTDSGGFQVMSLSKLNKVDREKGAIFNSHVDGKKFILSPEESIRVQKGLDSDIVMIMDECPKKTTDYKVINKSMELSIYWAERSKIAFGLNPHKALFGIIQGGLFKDLRTKSLNNLIKIGFDGYAIGGLAVGESQNEMFSVLDDLKNIMPDDKPRYLMGVGTPADILGAVKRGVDMFDCVMPTRSGRTGLAFTWNGRVNIKNNKYKNDNEPLDPNCSNLNLNKYSKNYINHLFNTNEILGSTLLTLHNINFYQELMSSIRENIKKGTFDKFHDEYIDKL

SEQ ID NO: 58917 - protein, 370 aa, unidentified
  source 1..370: note = Pelagibacteraceae bacterium
  REGION 1..370: note = tr|A0A0R2RIW1|A0A0R2RIW1_9PROT Queuine tRNA-ribosyltransferase OS=Pelagibacteraceae bacterium BACL5 MAG-120705-bin12 OX=1655603 GN=tgt PE=3 SV=1
MALKDFAFKLLKKDKSARLGIIETHRGNILTPAFMPVGTQATVKACTIDDIKKTGSQIILSNTYHLMIRPGVERIISAGGLHQFMNCDLPILTDSGGFQVMSLSKLNKIDREKGAIFNSHVDGKKFYLSPEESIRIQLGLNSDIVMIMDECPKKTTDYDVIKKSMDLSLYWAERSKKAFGINPQKALFGIIQGGLFKDLRISSLKGLENIGFDGYALGGLAVGETQQEMFDVLDNIKDYLPINKPHYLMGVGTPSDILGAVKRGIDMFDCVLPTRSGRTGLAFTWEGRINIKNNKYQTDNSPLDPNCNNLNLNKYSKNYLNHLFNTNEILASMLLTLHNINFYQELMSSIRDHIKNGTFNEFHDKYVAIL

SEQ ID NO: 58918 - protein, 373 aa, unidentified
  source 1..373: note = Pelagibacteraceae bacterium
  REGION 1..373: note = tr|A0A1Z9PWA4|A0A1Z9PWA4_9PROT Queuine tRNA-ribosyltransferase OS=Pelagibacteraceae bacterium TMED237 OX=1986815 GN=tgt PE=3 SV=1
MKFKITAECKKSAARTGELYTDHGILKTPFFMPVGTYATVKSQSSEEISSLPSSILLSNTYHLYLRPGIDILKNAQGLHNFMKWKGVILTDSGGYQIYSLENHRKINSEGVTFKSHYDGSIHEFTPEKIIDIQRIIGSDFMMVLDVCPSGEGTVKEWEKAVNLTTKWAYQSYEHYQSTKPIYSHSQSIIPIIQGGTNIELRQKSARELLDLNMNNYAIGGLAVGEPKKDMLSITSLMNNLIPQDKSRYLMGVGTPSDLIECVKRGVDMFDCVIPTRNARNAQLFTDTGKLNIRNACYKDDHSAIDINSKSVFSQKYTKAYLHHLFRMNEILGIRIATAHNLHFYINLMKTIREKIRENLFDDWSKKYLDVINS

SEQ ID NO: 58919 - protein, 358 aa, unidentified
  source 1..358: note = Pelagibacterales bacterium
  REGION 1..358: note = tr|A0A2F0AI75|A0A2F0AI75_9PROT Queuine tRNA-ribosyltransferase OS=Pelagibacterales bacterium; OX = 2026776 GN=tgt PE=3 SV=1
MKFIIKSTFKKARAGILSTKYGEIETPVFMPVGTLGTVKGISKEILHKYNFDIILANTYHLMLRPGMDIIKKFGGLNKFMSWNKSILTDSGGFQIMSLGKNVKVDDEGVTFRSHLDGTSIRLNAEKSVEVQKYLDATITMTFDECVPHPYSYSDTEISLNRSSKWTKRSLNAYKKKRGYGIFAIVQGGMHKELRRKSTEELSTMDFDGYAVGGLAVGEGQELMSDITNYCTSNLPFDKPRYLMGVGYPSDILRAVKNGIDMFDCVLPTRSGRTGLAFTTNGMVKIKNAKYSKDNSPLDYDCSCNICTNYSKAYLHHLVKSSEILGSVFLTQHNLFYYKKIMKKIRKGIIEGNLDNLKL

SEQ ID NO: 58920 - protein, 376 aa, unidentified
  source 1..376: note = Pelagibacterales bacterium
  REGION 1..376: note = tr|A0A2E5MS98|A0A2E5MS98_9PROT Queuine tRNA-ribosyltransferase OS=Pelagibacterales bacterium; OX = 2026776 GN=tgt PE=3 SV=1
MTISFNVKNTDGFARSGLLETAHGKIKTPVFMPVGTYGAVKGIQPDDLKYIGAEIILSNTYHLMERPGKDIIRDIGGLRKFMNWDGPILTDSGGFQVMSLQNMAKIDNDGVTFKSHIDGSLIRLTPKDSIEMQNALDSTITMVFDECTSYPVKKDLALYSMNLSMKWAKLCRDNFIDKNGYGLFGIVQGSTFNDLRQISSENLINIGFDGYAIGGLAVGEGHEVMINTLKSSINYLPINKPRYLMGVGYPKDIIEAVNLGVDMFDCVIPTRSGRTGKVFTKNGTLNIKNSRHKNDPRSIEEGCSCKICSNNISRAYLYHLFNTKEMLGATYLTIHNINHYIQLMSTLRKAINNNNFNEASKFLLNEYKKGDIEIYN

SEQ ID NO: 58921 - protein, 377 aa, Pelagibacterium halotolerans
  REGION 1..377: note = tr|G4R9Q6|G4R9Q6_PELHB Queuine tRNA-ribosyltransferase OS=Pelagibacterium halotolerans (strain DSM 22347 / JCM 15775 / CGMCC 1.7692 / B2); OX = 1082931 GN=tgt PE=3 SV=1
MTENFQFTLSATDGMARRGQIDTPRGEIRTPAFMPVGTAGTVKAMYPEQVRETGADIVLGNTYHLMLRPGAERVARLGGLHEFMDWQRPILTDSGGFQVMSLAKLRKLDENGVTFKSHIDGSSHSLTPERSIEIQKLLDSDIIMQLDECVSLPAEHNELERAMELSIRWAERSKKAFDNAKGRALFGIVQGGDNAVLRARSASGLTDIGFDGYAVGGLAVGEPQEVMFRVLDETTPQLPSDKPRYLMGVGKPDDLLGAVGRGIDMFDCVHPTRAGRHGHAYTRFGVVNLKNARHKDDHRPLDEASPNPTARRFSRAYLHHLVRCEEMLGAMILSQINLSYYQELMAGMRNAIENATFVQYCAAVREGWTKGDLPALD

SEQ ID NO: 58922 - protein, 377 aa, Pelagibacterium luteolum
  REGION 1..377: note = tr|A0A1G7W054|A0A1G7W054_9RHIZ Queuine tRNA-ribosyltransferase OS=Pelagibacterium luteolum; OX = 440168 GN=tgt PE=3 SV=1
MTQDFKFTLQATDGMARRGQIDTPRGEIRTPAFMPVGTAGTVKAMYPEQVRETGADIVLGNTYHLMLRPGAERVDRLGGLHEFMDWQRPILTDSGGFQVMSLAKLRKLDENGVTFKSHIDGSSHSLTPERSIEIQKLLDSDIIMQLDECVSLPAERDELNRAMELSIRWAERSKKAFDNAKGRALFGIVQGGDNPGLRARSAAGLIDIGFHGYAVGGLAVGEPQEVMFTVLNDITPQLPTEKPRYLMGVGKPDDLLGAVARGIDMFDCVHPTRAGRHGHAYTRFGVVNLKNARHKDDHRPLDEESPNPTARRFSRAYLHHLVRCEEMLGAMILSQINLSYYQELMAGMRNAIENTTFDQYSASVREAWAKGDLPALE

SEQ ID NO: 58923 - protein, 375 aa, Pelagibacterium sp.
  REGION 1..375: note = tr|A0A1E4E2M2|A0A1E4E2M2_9RHIZ Queuine tRNA-ribosyltransferase OS=Pelagibacterium sp. SCN 63-126; OX = 1660123 GN=tgt PE=3 SV=1
MKLVNFSLLATDGMARRGRIDTPRGEINTPAFMPVGTAGTVKAMYPEQVRETGADILLGNTYHLMLRPGAERVASLGGLHDFMDWQRPILTDSGGFQVMSLAKLRKLTEKGVTFKSHIDGSSYELTPERSIEIQTLLDSDIIMQLDECISLPAERKEMERAMELSIRWADRSKTAFNNQLNRALFGIVQGGDDAELRARSAAGLKSIGFDGYAVGGLAVGEPQEVMFRVLSEVTPELPQDRPRYLMGVGKPDDILGGIERGIDMFDCVHPTRAGRHGHAYTRFGVINLKNARHRDDHRPLDEASPNPNCRRWSRAYLHHLVKAEEILGAMVLSQINLAYYQELTSGARAAIEAGRMTDFAAETRAAWAAGDIAAL

SEQ ID NO: 58924 - protein, 379 aa, Pelagibacterium sp.
  REGION 1..379: note = tr|A0A2E7FU64|A0A2E7FU64_9RHIZ Queuine tRNA-ribosyltransferase OS=Pelagibacterium sp. OX=1967288; GN = tgt PE=3 SV=1
MTENFQFTLSTTDGMARRGKMDTPRGEIRTPAFMPVGTAGTVKAMYPEQVRETGADIVLGNTYHLMLRPGAERVARLGGLHQFMDWQRPILTDSGGFQVMSLAKLRKLDENGVTFKSHIDGSSHSLTPERSIEIQKLLDSDIIMQLDECVSLPAEYAELERAVELSIRWAERSKKAFDNAKGRALFGIVQGGDNAELRARSAAGLIDIGFDGYAVGGLAVGEPQEVMFRVLDETTPQLPADKPRYLMGVGKPDDLLGAVGRGIDMFDCVHPTRAGRHGHAYTRFGVVNLKNARHKDDHRPLDEASPNPTARRFSRAYLHHLVRCEEMLGAMILSQINLSYYQELMAGMRNAIENATFVQYCAEVREGWAKGDLPALDQG

SEQ ID NO: 58925 - protein, 374 aa, unidentified
  source 1..374: note = Pelagibaculum spongiae
  REGION 1..374: note = tr|A0A2V1H1H0|A0A2V1H1H0_9GAMM Queuine tRNA-ribosyltransferase OS=Pelagibaculum spongiae; OX = 2080658 GN=tgt PE=3 SV=1
MKFELLKTDQGARRGRLTFDRGVVETPVFMPVGTYGTVKGLVKEELEEAGAKIILGNTFHLWLRPGTDIIKQHGGLHEFMNWPGPILTDSGGFQVFSLGKMRKITEEGVSFQSPVNGSKVFLNPEISMQVQKDLNSDVVMCFDECTPYPATWEEAKKSMELSLRWAKRSKDAFVEQQNPNALFGIVQGSMDKDLRQISADGLREIGFDGYAIGGLSVGEPKDEMMSTLSFTAPMLPEDKPRYLMGVGKPEDLVEGVRRGVDMFDCVMPTRNARNGHLFTSTGVVKLRNAVNKTDIGPLDETCTCYTCKNYSRAYLHHLDKCNEIAGARLNTIHNTHYYQTLMAGLRKAIEEGKLSDFVADFYEARGETVPPLDQ

SEQ ID NO: 58926 - protein, 376 aa, Pelagicola litoralis
  REGION 1..376: note = tr|A0A4U7MY18|A0A4U7MY18_9RHOB Queuine tRNA-ribosyltransferase OS=Pelagicola litoralis OX=420403; GN = tgt PE=3 SV=1
MTSRFSFDLQATDGKARKGVISTPRGDIRTPAFMPVGTAATVKAMMPESVRATGADILLGNTYHLMLRPTAERIDRLGGLHKFMNWDRPILTDSGGFQVMSLAGLRKLTEKGVTFKSHIDGSRHELTPERSMEIQRLLGSDIVMCFDECPALPATDAEVSKSMQMSMRWAARSKDAFGDRPGHALFGIQQGGVTKDLRAESAALLRDIEFDGYAVGGLAVGEGQEAMFGVLDYAPDMLPEHKPRYLMGVGKPDDIVGAVARGIDMMDCVLPSRSGRTGQVFTRHGVVNIKNARHADDPRPLDENCTCPACSNYSRAYLHHVFRSNEMISGMLLTWHNLHYFQDLMQGMRDAIEIGAFDKFVTDFHEGRAQGDIEPL

SEQ ID NO: 58927 - protein, 376 aa, unidentified
  source 1..376: note = Pelagicola litorisediminis
  REGION 1..376: note = tr|A0A1Y5TDQ8|A0A1Y5TDQ8_9RHOB Queuine tRNA-ribosyltransferase OS=Pelagicola litorisediminis; OX = 1312363 GN=tgt PE=3 SV=1
MTRRITFEKLGTDGKARTGVIRTTRGDIRTPAFMPVGTAATVKAMMPESVAETGADILLGNTYHLMLRPGAERIAQLGGLHRFMNWERPILTDSGGFQVMSLADLRKLTEKGVTFKSHIDGSRHELTPERSMEIQRLLGSDIVMCFDECPALPATDQAVAESMRLSMRWAERSKDAFGDRPGHALFGIMQGGVTPDLREESAEALVDIGFDGYAVGGLAVGEGQEAMFGVLDYAPGFLPQDKPRYLMGVGKPDDIVGAVARGIDMMDCVLPSRSGRTGQAWTRRGQVNIKNARHADDPRPLDEACTCPACRNYSRAYLHHVFRAQEMISGMLLTWHNLHYYQELMQSMREAIAAGTFGAFQSDFHAQRSEGDIEPL

SEQ ID NO: 58928 - protein, 376 aa, Pelagicola sp.
  REGION 1..376: note = tr|A0A2U2CT89|A0A2U2CT89_9RHOB Queuine tRNA-ribosyltransferase OS=Pelagicola sp. LXJ1103; OX = 2175247 GN=tgt PE=3 SV=1
MVQKFSFTLEGQDGRARTGVIDTPRGAIRTPAFMPVGTAATVKAMLPSSVAETGADILLGNTYHLMLRPTAERIAQLGGLHKFMNWDKPILTDSGGFQVMSLAGLRKLTEAGVTFKSHIDGSKHELSPERSMEIQKLLGSDIVMCFDECPALPADRARITESMELSMRWAARSRDAFGDRPGYALFGIQQGGLEEDLRARSAEALRAIEFDGYAVGGLAVGEGQEAMFGCLDYAPEQLPEDKPRYLMGVGKPDDLVGAVARGIDMFDCVLPSRSGRTGQVFTRRGVLNIKNARHADDPRPLDEDCTCPACRGYSRAYLHHVFRSQEMISGMLLTWHNLHYYQELMAGMRMAIAAGTFDAFQANFHALRAQGDIEPL

SEQ ID NO: 58929 - protein, 375 aa, unidentified
  source 1..375: note = Pelagimonas varians
  REGION 1..375: note = tr|A0A238JQW0|A0A238JQW0_9RHOB Queuine tRNA-ribosyltransferase OS=Pelagimonas varians OX=696760; GN = tgt PE=3 SV=1
MAQTSFELKAQDGQARTGVISTPRGDIRTPAFMPVGTAATVKGMMPESVRATGADILLGNTYHLMLRPGAERIDRLGGLHKFMNWDRPILTDSGGFQVMSLSDLRKLTEEGVTFKSHYDGSKHHLTPERSMEVQKLLGSDIVMAFDECPALPADRDRIAQSMRLSMRWAQRSRDAFGDRPGHMLFGIMQGGLESDLREESAKALTDIGFDGYAVGGLAVGEGQDAMFGCLDYAPGFLPEDKPRYLMGVGKPDDIVGAVKRGIDMMDCVLPSRSGRTGQAWTRRGQINIKNARHADDPRPIDEHCTCPACSSYSRAYLHHVFRSHEMISGMLLTWHNLHYFQEIMQGMRDAISEGRFDAWEADFHALRAEGDIEKL

SEQ ID NO: 58930 - protein, 379 aa, unidentified
  source 1..379: note = Pelagirhabdus alkalitolerans
  REGION 1..379: note = tr|A0A1G6HQD7|A0A1G6HQD7_9BACI Queuine tRNA-ribosyltransferase OS=Pelagirhabdus alkalitolerans; OX = 1612202 GN=tgt PE=3 SV=1
MASVTYELIKTCKQTGARLGRVHTPHGSFETPVFMPVGTLATVKTMSPEELKEIGADIILSNTYHLWLRPGEDIVKEAGGLHKFMNWDGSILTDSGGFQVFSLSDLRDIEEEGVHFRNHISGEKLFLSPEKAMQIQNDLGPDIMMAFDECPPYPAEHKYMKDSVERTSRWAERCLNGHKRPNDQGLFGIVQGGEYEDLRKQSAKDLTSLDFPGYAIGGLSVGEPKDVMNRVLEFTTPLLPTQKPRYLMGVGSPDSLIDGAIRGVDMFDCVLPTRIARNGTCMTSQGRLVVRNAKFARDFSPLDPNCECHTCRNYSRAYIRHLIKTDETFGLRLTTYHNLYFLVNLMKQVREAIKADRLGDFREAFFEQYGFNKPNAKNF

SEQ ID NO: 58931 - protein, 376 aa, unidentified
  source 1..376: note = Pelagivirga sediminicola
  REGION 1..376: note = tr|A0A2T7GCE5|A0A2T7GCE5_9RHOB Queuine tRNA-ribosyltransferase OS=Pelagivirga sediminicola; OX = 2170575 GN=tgt PE=3 SV=1
MTARFEFKLAATDGRARTGAISTPRGQIRTPAFMPVGTAATVKAMLPESVAATGADILLGNTYHLMLRPTAERIAALGGLHKFMNWPGPILTDSGGFQVMSLADLRKLTEEGVAFRSHIDGSRHMLTPERSIEIQALLGSDIVMCFDECPALPATDKAVAESMELSMRWARRSKEAFGERPGHALFGIQQGGVTRELRGASADKLVEIGFDGYAIGGLAVGEGQEAMFGVLDYAPDMLPEGKPRYLMGVGKPDDIVGAVARGVDMMDCVLPSRSGRTGQAWTRRGQVNIKNARHADDPRPLDEDCTCPACRSYSRAYLHHVFRAQEMISGMLLTWHNLHYYQQLMAEMRAAIARGDFGAWQAQFHAQRAEGDIEPL

SEQ ID NO: 58932 - protein, 369 aa, Pelobacter acetylenicus
  REGION 1..369: note = tr|A0A1L3GCK1|A0A1L3GCK1_PELAE Queuine tRNA-ribosyltransferase OS=Pelobacter acetylenicus; OX = 29542 GN=tgt PE=3 SV=1
MFEFSLLARDSGTAARRGRLSTPHGTIETPIFMPVGTHGAMKAMTPAQVEETGAQIILSNTYHLHLAPGEGLIEKAGGLHRFMHWNRPILTDSGGFQVFSLPKKRITETGVFFRHEITGEEIFLGPSEAMAIQNALGADIIMAFDECIPYPSTHAYAATSIRKTLRWAEACLKSHGRADQALFGIVQGSIYEDLRQECARQMTGMDFPGYAIGGVSVGEGLDLLKKVVDYTAHRLPENKPRYLMGVGLPEDILESVERGMDMFDCVIPTRYARSATLFTRRGRIRLTHRRYRRDFFPVDASCNCYCCANFSRAYLHHLFKSNEILSATLAAIHNVHFYLNMMSEVRQAIENNDFAAFKKNFLEEYGAES

SEQ ID NO: 58933 - protein, 376 aa, Pelobacter acetylenicus
  REGION 1..376: note = tr|A0A1L3GJB3|A0A1L3GJB3_PELAE Queuine tRNA-ribosyltransferase OS=Pelobacter acetylenicus; OX = 29542 GN=tgt PE=3 SV=1
MKGFRFELLTQDSGSQARRGRMTTRRGVVETPVFMPVGTQGTVKAILPEDLKAEGAQIILANTYHLFLRPGHERIQRLGGLHSFMHWTGPILTDSGGFQVFSLGKLCKISEDGVRFQSHLDGSRQVLTPEVSIAVQEALGADIIMVFDECIPYPSSREYVADSTALSQRWALRSKNARSRRDGAALFGIVQGGMYPDLRRQSAEALVEIGFDGYALGGLSVGEEAERMYEMMDIALPLLPQQCPRYVMGVGTPENLIEGIARGVDMFDCVMPTRNARNGTLFTSFGKISIKQARYADDNGPVDPACGCYVCRNYSRAYLRHLYQSNEILASMLNTRHNLHYYLDLMRQARLAIEQGRFGAFRADFHRRRHDDGSQD

SEQ ID NO: 58934 - protein, 369 aa, Pelobacter carbinolicus
  REGION 1..369: note = tr|Q3A580|Q3A580_PELCD Queuine tRNA-ribosyltransferase OS=Pelobacter carbinolicus (strain DSM 2380 / NBRC 103641 / GraBd1) OX=338963 GN=tgt PE=3 SV=1
MFEFSLLATDSQTAARRGRLTTPHGTIETPIFMPVGTHGALKAMTPAQVEETGAQIILSNTYHLHLAPGEGLVQKAGGLHSFMNWPHPILTDSGGFQVFSLPKKRITETGVFFRHEMTGEEIFLGPAEAMAIQNTLGADIIMAFDECIPYPATHDYAAKSIRKTLRWAEACLQNHNRSDQALFGIVQGGIYEDLRQECARQMTTMNFPGYAIGGVSVGEGLDLLKKVVDYTAPMLPENKPRYLMGVGLPEDILESVERGMDMFDCVIPTRYARSATLFTRRGRIRLTNRRYRRDFYPVDASCDCYCCRNFSRAYLHHLFKSNEILSATLAAIHNVHFYLNMMKEARQAIEAGDFAAFKKNFLEEYGANK

SEQ ID NO: 58935 - protein, 376 aa, Pelobacter carbinolicus
  REGION 1..376: note = tr|Q3A3C2|Q3A3C2_PELCD Queuine tRNA-ribosyltransferase OS=Pelobacter carbinolicus (strain DSM 2380 / NBRC 103641 / GraBd1) OX=338963 GN=tgt PE=3 SV=2
MTDFRFELLKQDTTSRARRGRMITRRGVVETPVFMPVGTQGTVKAILPEQLKEEGAQIILANTYHLFLRPGHERVRRLGGLHRFMHWDGPILTDSGGFQVFSLGKLRKISEEGVRFQSHLDGSHQILTPELSIAVQEALGSDIIMVFDECIPYPSSREYVAESTALSTRWAERSKKARSAQDGSALFGIVQGGMHADLRRQSAEQLMEIGFDGYALGGLSVGEEAERMYEMMDVALPLLPDNRPRYVMGVGTPENLIEGIARGVDMFDCVMPTRNARNGTLFTSFGKISIKQARYADDDGPIDPDCGCYVCRHYSRAYLRHLFQSNEILASMLNTRHNLHYYLDLMAQARVAIEEDRFEAFRADFYRRRNDGGLSV

SEQ ID NO: 58936 - protein, 373 aa, Pelobacter propionicus
  REGION 1..373: note = tr|A1ARW9|A1ARW9_PELPD Queuine tRNA-ribosyltransferase OS=Pelobacter propionicus (strain DSM 2379 / NBRC 103807 / OttBd1) OX=338966 GN=tgt PE=3 SV=1
MEFKLIKKDKQSSARLGVVTTGRGEIQTPIFMPVATHGAMKPLTPAQITETGAQIILSNTYHLHLQPGEGLVKKAGGLHKFMAWDKPILTDSGGFQVFSLPNKRITDEGVFFRHEVTGDEIYLDPASATRIQQDLGADIIMAFDECIPYPCERQYAEQSTKKTIRWLKECQRAMTDNGQALFGIVQGSVFEDLRAYCAREMRALDLPGYAIGGVSVGEGLELLKKVVAWTAPHLPEDKPRYLMGVGLPEDILESVERGIDMFDCVIPTRYARSATLFTRRGKIRLTNKNYKRDFFPVDPSCTCYTCGNFTRAYLHHLFVSNEVLSAVLSAIHNVHFYLNMMAEIRTAIADNRFMEYKSRFLAEYLEGNRRTKQ

SEQ ID NO: 58937 - protein, 374 aa, Pelobacter propionicus
  REGION 1..374: note = tr|A1APZ2|A1APZ2_PELPD Queuine tRNA-ribosyltransferase OS=Pelobacter propionicus (strain DSM 2379 / NBRC 103807 / OttBd1) OX=338966 GN=tgt PE=3 SV=1
MSTSLFTLLHRDASCGARLGSLNTLHGAIETPIFMPVGTNATVKAMTPDDLLAVNAQIILSNTYHLYLRPGHRLVEQLGGLHSFMNWHRPILTDSGGFQVFSLGELRKISEEGVRFQSHLDGSYHFLTPELSIGIQEALGADIIMCFDECPPATAEYDYVSRSLEMTTRWARRCKQAHRREGQQLFGIIQGGMHYDLRARSLEQIFEIGFDGYALGGLSVGEEKEQMYGVMEACAPLMPQDHPRYIMGIGAPQDLVEAVWHGYDMFDCVMPTRNARNGMLFTSQGRINIKAKIFEEDSGPLDPECGCHVCRNYSRAYLRHLYRAGEILASNLNTYHNLYYFLDLMRQMREAIKNDNLAGFRREFYAKQQIHHKI

SEQ ID NO: 58938 - protein, 369 aa, Pelobacter sp.
  REGION 1..369: note = tr|A0A1L3GMV8|A0A1L3GMV8_9DELT Queuine tRNA-ribosyltransferase OS=Pelobacter sp. SFB93 OX=1842532; GN = tgt PE=3 SV=1
MFKFDLLNTDNSCAARRGRLTTPHGVIETPIFMPVGTHGALKAMTPAQVEETGAQIILSNTYHLHLSPGEGLVEKAGGLHRFMNWQGPILTDSGGFQVFSLPKKRITETGVFFRHENTGEEIFLGPQEAMQIQNTLGADIIMAFDECIPFPATHDYASKSIRKTLRWAEECIKHQARKDQALFGIVQGGIYEDLRQECARIMSDMDFPGYAVGGVSVGEGLELLKKVVDYTAPMLPVHKPRYLMGVGLPEDILESVERGMDMFDCVIPTRYARSATLFTKRGKIRLTNRRYRRDFFPVDPSCDCYCCRNFSRAYLHHLFRSNEILSATLAAIHNVHFYLNMMSQARQAIEQNDFKAFKTEFLGEYLSGN

SEQ ID NO: 58939 - protein, 375 aa, Pelobacter sp.
  REGION 1..375: note = tr|A0A1L3GNG7|A0A1L3GNG7_9DELT Queuine tRNA-ribosyltransferase OS=Pelobacter sp. SFB93 OX=1842532; GN = tgt PE=3 SV=1
MSQFGFTLLHTDPHSQARRGQIQTRRGTIETPVFMPVGTLGTVKGMLPETLKEEGAEIILGNTYHLFLRPGHELVARLGGLHQFMNWDRPILTDSGGFQVFSLGKLRKITEEGVRFQSHIDGSSHMLTPELSIAVQETLGADIIMAFDECIPYPSTRDYVASSTALSGRWARRCKEARRSDDGAALFGIVQGGMYADLRKQSAEELQEIGFDGYALGGLSVGEEAAAMYDMMEAALPLLPADQPRYVMGVGTPENLIEGVARGVDMFDCVMPTRNARNGVLFTNFGKVVIKQARYAEDPLPIDPDCDCYVCRHYSRAYLRHLYQNNEILAAMLHTRHNLHYYLGLMAGARDAIAAGRFTEYRQEFYRRRQPESAA

SEQ ID NO: 58940 - protein, 376 aa, unidentified
  source 1..376: note = Pelobium manganitolerans
  REGION 1..376: note = tr|A0A419S5A8|A0A419S5A8_9SPHI Queuine tRNA-ribosyltransferase OS=Pelobium manganitolerans; OX = 1842495 GN=tgt PE=3 SV=1
MKFKLAVQDKNCKARAGEITTDHGTIKTPIFMPVGTAGTVKAVHQRELAEDINAQIILGNTYHLYLRPGLETLKLAGGLHKFNGWDKPILTDSGGYQVYSLTEVRKIKEEGVTFRSHIDGSKHLFTPENVMDTQRIIGADIIMAFDECTPYPCNYHYARRSIDMTHRWLKRCINRFDSTAPLYGYSQTLFPIVQGSVYKDLRIKSAEFIAEQNREGNAIGGLSVGEPAEEMYAMTEVVCNVLPTDKPRYLMGVGTPINILENIALGIDMFDCVMPTRNARNGMLFTRKGIINIKNEKWKNDFSPIDADSDLFYDLNYSKAYLRHLIHSKEILGAQIATLHNLHFYLWLVAEAREKIISGDFYDWKNQMVKVLGQKL

SEQ ID NO: 58941 - protein, 376 aa, unidentified
  source 1..376: note = Pelodictyon luteolum
  REGION 1..376: note = tr|Q3B318|Q3B318_PELLD Queuine tRNA-ribosyltransferase OS=Pelodictyon luteolum (strain DSM 273 / 2530) OX=319225 GN=tgt PE=3 SV=1
MNFRLQSTDPRSAARTGILSTGHGDIPTPVFMPVGTRASVKSVEPHELLEQEAHIILTNTYHLYLKPGNHIIRKAGGVHPFMDWHGPLLTDSGGYQVYSLSELRRISEEGVTFKSHLDGSMLQFTPENVVDTQRIIGSDIMMPLDECPSSKADREYIRKSGELTIRWAERARRHFSATAPLYHHPQMLFGITQGGTHSDLRALSAKALVDLDFDGYATGGMAVGEPAEEMYRILELSHTLLPEHKPRYLMGVGTPENILNAIERGIDMFDCVIPTREGRNGRVYTRKGKMNLRSAKYAEDFSPVDEGFGNHVCKHYSRAYIRHLLNVGEILGLKLCTLQNISFFMWLTRTARQRIEEGSFLEWKAGFLEEFNRGEA

SEQ ID NO: 58942 - protein, 376 aa, unidentified; identical to SEQ ID NO: 58941
  source 1..376: note = Pelodictyon luteolum
  REGION 1..376: note = tr|A0A165LEN3|A0A165LEN3_PELLU Queuine tRNA-ribosyltransferase OS=Pelodictyon luteolum OX=1100; GN = tgt PE=3 SV=1

SEQ ID NO: 58943 - protein, 377 aa, unidentified
  source 1..377: note = Pelodictyon phaeoclathratiforme
  REGION 1..377: note = tr|B4SBD4|B4SBD4_PELPB Queuine tRNA-ribosyltransferase OS=Pelodictyon phaeoclathratiforme (strain DSM 5477 / BU-1) OX=324925 GN=tgt PE=3 SV=1
MKFSLITTDPHSSARCGVLETSHGTIPTPVFMPVGTRASVKSVEPHELRELNVHIILANTYHLYLKPGNEILQKAGGVHRFMNWDGPLLTDSGGYQVYSLSDLRKISEEGVLFKSHLDGSKQHFTPENVIETERIIGSDIMMPLDECPPSTAEKEYVRISGELTIRWAERARKHFTLTSPLYGHEQYLFGITQGGIHTDLRTSSTNALVDLDFDGYAIGGMAVGEPAEEMYRILELSHPLLPEKKPRYLMGVGTPENILNAIERGIDMFDCVIPTREGRNGRVYTRQGKMNLRSAKYSTDFSSIDEGFDNEVCRNYSRAYLRHLLNVGEILGLKLCTLQNISFFMWLTATARTEIQKGSFMEWKQDFLERFNYNDNA

SEQ ID NO: 58944 - protein, 374 aa, unidentified
  source 1..374: note = Pelolinea submarina
  REGION 1..374: note = tr|A0A347ZSE9|A0A347ZSE9_9CHLR Queuine tRNA-ribosyltransferase OS=Pelolinea submarina OX=913107; GN = tgt PE=3 SV=1
MEDTKTNITPFSFELVAQDGSARAGILHTPHGDIHTPIFMPVGTQATVKALTPAQLQELEVQILLSNTYHLYLRPGPDVVADMGGLHKFMDWPKPILTDSGGFQVFSMGTLRAIDEEGVTFKSHIDGSTHRFTPEFSISIQEKLGADIIMAFDECPDPQDKEYNMRAMERTHRWAERCLKAKTRADQALFGIVQGGIFPDLRRQSAEFLASLDFPGYGIGGLSVGESKADMLATIEVVTALLPENKPRYLMGVGTPYDLVESIYRGVDMFDCVLPTRLARHHAAQTLQGRMNLANAAYIRDEHPIDPLCTCYTCTHFSRAYLRHLVSTKEILGATLLSIHNIHTLLELSQRIRESIINHKYSELRQELLRNLEQ

SEQ ID NO: 58945 - protein, 375 aa, Pelomonas puraquae
  REGION 1..375: note = tr|A0A254N8P4|A0A254N8P4_9BURK Queuine tRNA-ribosyltransferase OS=Pelomonas puraquae OX=431059; GN = tgt PE=3 SV=1
MLKFELLKTEGRARRGTLTLNHGVVQTPIFMPVGTYGTVKGVTPRSLNEMGAQIILGNTFHLWMRPGLDVVKQFGGLHRFESWGKPILTDSGGFQVWSLGAMRKISEEGVKFASPVNGDKLLLTPEVSMQIQTVLNSDIVMQFDECTPYETKGVLTTEREAKASMELSLRWAKRCITEFQRLENPNALFGIVQGGMYTNLRDASLAGLAELDLPGYAIGGLSVGEPKAEMQRILDHTGHQLPANKPRYLMGVGTPEDLVEGVSQGIDMFDCVMPTRNARNGHLFTRFGDLRLRNARYKADESPVDPTCSCECCTGFSRAYLHHLDRCGEMLGPMLTSVHNLHYYLNLMQEIRDALDAGRFEAWRAQFHADRARGV

SEQ ID NO: 58946 - protein, 375 aa, Pelomonas saccharophila
  REGION 1..375: note = tr|A0A4R3VBW7|A0A4R3VBW7_PELSC Queuine tRNA-ribosyltransferase OS=Pelomonas saccharophila OX=304; GN = tgt PE=3 SV=1
MLKFDLLKTEGRARRGALTLNHGVVQTPIFMPVGTYGTVKGVTPRSLEEMGAQIILGNTFHLWMRPGLDVITQFGGLHRFESWNKPILTDSGGFQVWSLGDMRKISEEGVKFASPVNGDKLFLTPEISMQIQTTLNSDVVMQFDECTPYESKGQLTTEREARQSMEMSLRWARRCVAEFDRLQNPNALFGIVQGGMYTGLRDASLAGLAELDLPGYAIGGLSVGEPKAEMQRILEHTGHQLPAHKPRYLMGVGTPEDLVEGVSQGIDMFDCVMPTRNARNGHLFTRFGDLRLRNARYKSDEKPVDETCGCECCQGFSRAYLHHLDRCGEMLGPMLTSIHNLHYYLNLMQEMRDALDAGRFAAWRTQFAADRARGV

SEQ ID NO: 58947 - protein, 375 aa, Pelomonas sp.
  REGION 1..375: note = tr|A0A0Q7SMQ2|A0A0Q7SMQ2_9BURK Queuine tRNA-ribosyltransferase OS=Pelomonas sp. Root1444; OX = 1736464 GN=tgt PE=3 SV=1
MLKFELLKTEGRARRGTLTLNHGVVQTPIFMPVGTYGTVKGVTPRSLEEMGAQIILGNTFHLWMRPGLDVVTQFGGLHRFESWSKPILTDSGGFQVWSLGAMRKISEEGVKFASPVNGDKLLLTPEVSMQIQTVLNSDIVMQFDECTPYESKGVLTTEREARSSMELSLRWAKRCITEFDRLQNPNALFGIVQGGMFTNLRDASLAGLAELNLPGYAIGGLSVGEPKAEMQRILEHTGHQLPANKPRYLMGVGTPEDLVEGVSQGIDMFDCVMPTRNARNGHLFTRFGDLRLRNARYKNDEKPVDETCGCECCSGFSRAYLHHLDRCGEMLGPMLTSVHNLHYYLNLMGEIRAALDAGRFGAWRAQFAADRARGV

SEQ ID NO: 58948 - protein, 375 aa, Pelomonas sp.
  REGION 1..375: note = tr|A0A2R7TC61|A0A2R7TC61_9BURK Queuine tRNA-ribosyltransferase OS=Pelomonas sp. HMWF004; OX = 2056841 GN=tgt PE=3 SV=1
MLKFDLLKTEGRARRGTLTLNHGVVQTPIFMPVGTYGTVKGVTPRSLHEMGAQIILGNTFHLWMRPGLDVVTQFGGLHRFESWTKPILTDSGGFQVWSLGAMRKISEEGVKFASPVNGDKLFLTPEVSMQIQTVLNSDIVMQFDECTPYETKGVLTTEREARQSMELSLRWAKRCITEFGRLENPNALFGIVQGGMFTHLRDASLAGLAELDLPGYAIGGLSVGEPKAEMQRILGHIGHQLPANKPRYLMGVGTPEDLVEGVSQGIDMFDCVMPTRNARNGHLFTRFGDLRVRNARYKADETPVDATCRCECCTGFSRAYLHHLDRCGEMLGPMLTSVHNLHYYLNLMQEMRDALDAGRFEAWRAQFHADRARGV

SEQ ID NO: 58949 - protein, 369 aa, Pelosinus fermentans
  REGION 1..369: note = tr|I9NXG1|I9NXG1_9FIRM Queuine tRNA-ribosyltransferase OS=Pelosinus fermentans JBW45; OX = 1192197 GN=tgt PE=3 SV=1
MSVTYELVKKCSKTGARAGRLHTPHGSFDTPIFMPVGTQATVKAMSPDELKDMGAGIILSNTYHLYLRPGHELVAEAGGLHKFMNWDRGILTDSGGFQVFSLGALRKITEEGVAFRSHIDGSKHFLSPEKATQVQMALGSDIIMAFDECVPFPAEHDYARESTERTTRWAERCRQTHTRADQALFGIVQGGMYKDLRSMSAKDLVSLDFPGYAVGGLSVGEPKPLMYEMLEHTVPLLPERKPRYLMGVGTPDCLVEGVMHGIDMFDCVFPTRVARNGTVMTNWGRLVVKNAEYARDFRPLDDKCSCYACRNFSRAYIRHLFKTDEIFGLRLTTIHNLHFLLNFMREMRTAILEDRFLDFRQGFLAQYNR

SEQ ID NO: 58950 - protein, 369 aa, Pelosinus fermentans
  REGION 1..369: note = tr|I8RFR9|I8RFR9_9FIRM Queuine tRNA-ribosyltransferase OS=Pelosinus fermentans B4; OX = 1149862 GN=tgt PE=3 SV=1
MSVTYELVKKCSKTGARAGRLHTPHGTFDTPIFMPVGTQATVKAMSPDELKDMGAGIILSNTYHLYLRPGHELVAEAGGLHKFMNWDRGILTDSGGFQVFSLGALRKITEEGVTFRSHIDGSKHFLSPEKATKVQMALGSDIIMAFDECVPFPAEHDYARKSTERTTRWAERCRQTHTRADQALFGIVQGGMYKDLRTMSANDLVSLDFPGYAVGGLSVGEPKTLMYEMLEHTVPLLPERKPRYLMGVGTPDCLVEGVMHGIDMFDCVFPTRVARNGTVMTNWGRLVVKNAEYARDFRPLDDKCSCYACRNFSRAYIRHLFKTDEIFGLRLTTIHNLHFLLNFMSKMRTAIIEERFLDFRQEFLAQYNR

SEQ ID NO: 58951 - protein, 369 aa, Pelosinus propionicus
  REGION 1..369: note = tr|A0A1I4KTH5|A0A1I4KTH5_9FIRM Queuine tRNA-ribosyltransferase OS=Pelosinus propionicus DSM 13327; OX = 1123291 GN=tgt PE=3 SV=1
MSVTYELVKQCQKTGARAGRLHTPHGTFDTPIFMPVGTQATVKAMSPDELKDMGAGIILSNTYHLYLRPGHELVAEAGGLHKFMNWDRGILTDSGGFQVFSLGALRKITEEGVTFRSHIDGSKHFLSPEKATEVQMALGSDIIMAFDECVPFPAEHDYARKSTERTTRWAERCKKTHTRVDQALFGIIQGGMYKDLRTMSVNDLVSLDFPGYAVGGLSVGEPKTLMYEMLEHTVPLLPEKKPRYLMGVGTPDCLVEGVMHGIDMFDCVFPTRVARNGTVMTNWGRLVVKNAEYARDFRPLDEKCSCYTCRNFSRAYIRHLFKTDEIFGLRLTTIHNLHFLLNFMREMRTAILEDRFPDFRQEFLAGYNR

SEQ ID NO: 58952 - protein, 370 aa, Pelosinus sp.
  REGION 1..370: note = tr|A0A075KBF5|A0A075KBF5_9FIRM Queuine tRNA-ribosyltransferase OS=Pelosinus sp. UFO1 OX=484770; GN = tgt PE=3 SV=1
MSVTYELVKKCSKTGARAGRLHTPHGTFDTPIFMPVGTQATVKAISPEELKDMGAGIILSNTYHLYLRPGHELVKEAGGLHKFMNWDRGILTDSGGFQVFSLGDLRKITEEGVTFRSHIDGSKHFLSPEKATEIQMALGSDIIMAFDECVPYPADHDYARKSTERTTRWAERCKEAHKRTDQALFGIVQGGMYKDLRTMSAKDLVSLDFPGYAVGGLSVGEPKPLMYEMLEHTVPLLPEGKPRYLMGVGTPDCLVEGVMHGIDMFDCVFPTRVARNGTVMTSWGRLVVKNAEYAKDFRPLDEKCGCYTCQNFSRAYIRHLFKTDEIFGLRLTTIHNLHFLLQFMKEMRKAIIEDNFVEFREEFLAQYNLR

SEQ ID NO: 58953 - protein, 370 aa, Pelotomaculum propionicicum
  REGION 1..370: note = tr|A0A4Y7RKD7|A0A4Y7RKD7_9FIRM Queuine tRNA-ribosyltransferase OS=Pelotomaculum propionicicum; OX = 258475 GN=tgt PE=3 SV=1
MPVSFTLVRKDSACSARLGLLHTPHGTVETPIFMPVGTQATVKTMTPEEVRDVGGRLILSNTYHLYLRPGHELVREAGGLHRFMNWSGPILTDSGGFQVFSLGPLRRVSEEGVTFRSHIDGSEHFFSPEKAMEVQLALGSDIAMAFDECAPYPCSREYALEALERTTRWARRSAAAHQSETQGLFGIVQGGTFPDLREKSARELVELDFPGYAIGGLSVGEPKQIMYEMLDHTVEFLPEDKPRYLMGVGSPDCLVEGVVRGIDMFDCVLPTRIARNGSVFTRQGKLVVRNAEYARDFSPLDPTCDCYTCRNYSRAYIRHLIKAGEVLGIRLTTIHNLRFVLNLMEEIKEALRQGEIMEFRDRFLSTYQAV

SEQ ID NO: 58954 - protein, 370 aa, Pelotomaculum schinkii
  REGION 1..370: note = tr|A0A4Y7RCI5|A0A4Y7RCI5_9FIRM Queuine tRNA-ribosyltransferase OS=Pelotomaculum schinkii OX=78350; GN = tgt PE=3 SV=1
MVLNYSVIQQDKSCGARLGLLHTTHGTVETPIFMPVGTQAAVKTMTPEEVKEVGGRLILGNTYHLYLRPGQELIREAGGLHRFMNWDGPILTDSGGFQVFSLGPLRKISEEGVTFRSHIDGSEHFFSPEKAVEVQEALGSDIAMVFDECAPYPCTHEYALEALKRTTRWARRCADAHRREDQALFGIVQGGVFADLRRQSALDLVGLDLPGYAIGGLSVGEPKAVMYEMLDVTVGFLPPEKPRYLMGVGSPDCLVEGVVRGIDMFDCVLPTRIARNGTVLTHHGKLVVRNAEYARDFDPLDPTCDCYACRNYSRAYIRHLIKAGEVLGIRLTTIHNLRFIQRLMQEIRDAIRQGNILEYRDNFLKNYLQA

SEQ ID NO: 58955 - protein, 370 aa, Pelotomaculum sp.
  REGION 1..370: note = tr|A0A1V4VMI9|A0A1V4VMI9_9FIRM Queuine tRNA-ribosyltransferase OS=Pelotomaculum sp. PtaB.Bin104; OX = 1811693 GN=tgt PE=3 SV=1
MAVSFTVTKKERSGRARLGLLHTPHGTVETPVFMPVGTQATVKTMTPEEVREVGGRIILSNTYHLYLRPGQELIREAGGLHRFMNWDGPILTDSGGFQVFSLGPLRKVTEEGVTFRSHIDGSEHFFSPEKAMEVQETLGSDIAMVFDECAPYPCSREYALEALERTSRWAARCRAVHRREDQGVFGIVQGGTFADLRKKSAYELVELDFSGYAIGGLSVGEPKELMYEMLDYTVPLLPEDKPRYLMGVGSPDCLVEGVARGIDMFDCVLPTRLARNGTVLTRHGKLVVRNAEYTKDFAPFDRDCSCYACRNYSRAYVRHLIKTNEVLGIRLTTIHNLHFVLELMKELREAISEDKITEYRDSFLKGYQGA

SEQ ID NO: 58956 - protein, 370 aa, Pelotomaculum sp.
  REGION 1..370: note = tr|A0A1V5BV86|A0A1V5BV86_9FIRM Queuine tRNA-ribosyltransferase OS=Pelotomaculum sp. PtaU1.Bin065; OX = 1811696 GN=tgt PE=3 SV=1
MAVSFTVTNRQKNGRARLGLLHTPHGTVETPVFMPVGTQATVKTMTPEEVCDVGGRLILSNTYHLYLRPGQELVREAGGLHRFMNWSGPILTDSGGFQVFSLGPLRKVSEEGVTFRSHIDGSEHFFSPEKAMEIQMALGSDIAMAFDECAPYPCSYEYAREALDRTSRWAERCLAAHRLKEQGVFGIVQGGVFHDLRKKSAGEIVSLNFAGYAIGGLSVGEPKELMYELLDYTVPFLPEEKPRYLMGVGSPDCLVEGVLRGIDMFDCVLPTRLARNGTVFTRRGRLVVRNAGNARDLNPLDPECGCYVCRNYSRAYIRHLLKAGEVLGIRLTTIHNLSFVLELMKELREAIREGKMVEYRDEFMEKYQYG

SEQ ID NO: 58957 - protein, 370 aa, Pelotomaculum thermopropionicum
  REGION 1..370: note = sp|A5D3G6|TGT_PELTS Queuine tRNA-ribosyltransferase; OS = Pelotomaculum thermopropionicum (strain DSM 13744 / JCM 10971 / SI) OX=370438 GN=tgt PE=3 SV=1
MAVSFTITYKDESTGARLGLLYTPHGTVETPVFMPVGTQATVKTMTPEEVRDIGGRMILSNTYHLYLRPGHELIREAGGLHRFMHWDGPILTDSGGFQVFSLGPLRKVSEEGVAFRSHIDGSEHFFSPEKAMEVQMALGSDIAMAFDECAPYPCSREYALAATERTTRWARRCRTAHDREDQGLFGIVQGGTFKDLRERSARELVELDFPGYAIGGLSVGEPKQLMYEVLDYTVPLLPEEKPRYLMGVGSPDCLVEGVLRGIDMFDCVLPTRIARNGTALTRQGRLVVRNAEYARDFSPLEPDCDCYACRNYTRAYIRHLIKANEILGIRLTTIHNLYFIMKLMEEIRAAVRQGRMLQFRDDFLRKYQGD

SEQ ID NO: 58958 - protein, 373 aa, unidentified
  source 1..373: note = Peptoanaerobacter stomatis
  REGION 1..373: note = tr|V9HNN1|V9HNN1_9FIRM Queuine tRNA-ribosyltransferase OS=Peptoanaerobacter stomatis; OX = 796937 GN=tgt PE=3 SV=1
MQKPLEFEVIKNCTHSKARYGKLKTLHNEFETPVFMPVGTNATVKSMSVDELKEINAQIILSNTYHLYLRPSDLIVKKAGGLHKFMNWDRSILTDSGGFQVFSLGDLRKIKEEGVYFRSHLDGSKHFMGPEESIAIQNNLGSDIMMSFDECAPYPASYEYIKDSYKRTSRWAKRGQIANKNPETQALFGIIQGGMYQDLRYESANELVEMDFLGYSIGGLSVGEPKPLMYEVLDYTVDLIPKEKPRYLMGVGSPDDLFEGVIRGIDMFDCVLPTRIARNGTAMTSNGKVVVRNATYQEDFTPLDEECDCHVCRNYSRAYIRHLIKANEILGARLITYHNLYFLINLMKNIRTAIKEDRLLQYKKDFFAKYYKI

SEQ ID NO: 58959 - protein, 373 aa, unidentified
  source 1..373: note = Peptoanaerobacter stomatis
  REGION 1..373: note = tr|G9XDL4|G9XDL4_9FIRM Queuine tRNA-ribosyltransferase OS=Peptoanaerobacter stomatis; OX = 796937 GN=tgt PE=3 SV=1
MQKPLEFEVIKNCTHSKARYGKLKTLHNEFETPIFMPVGTNATVKSMSVDELKEINAQIILSNTYHLYLRPSDLIVKKAGGLHKFMNWDRSILTDSGGFQVFSLGDLRKIKEEGVYFRSHLDGSKHFMGPEESIAVQNNLGSDIMMSFDECAPYPASYEYIKDSYKRTSRWAKRGQIANKNPETQALFGIIQGGMYQDLRYESANELVEMDFLGYSIGGLSVGEPKPLMYEVLDYTVDLIPKEKPRYLMGVGSPDDLFEGVIRGIDMFDCVLPTRIARNGTAMTSNGKVVVRNATYQEDFTPLDEECNCHVCRNYSRAYIRHLIKANEILGARLITYHNLYFLINLMKNIRTAIKEDRLLQYKKDFFAKYYKI

SEQ ID NO: 58960 - protein, 372 aa, unidentified
  source 1..372: note = Peptoclostridium acidaminophilum
  REGION 1..372: note = tr|W8T5X9|W8T5X9_PEPAC Queuine tRNA-ribosyltransferase OS=Peptoclostridium acidaminophilum DSM 3953 OX=1286171 GN=tgt PE=3 SV=1
MAIRYELIKVCKQTGARLGKLHTPHGVIDTPIFMPVGTQATVKAMTPEELKEIEAQIILSNTYHLYIRPGHDIVKKAGGLHKFMNWDRPILTDSGGYQVFSLGPLRKIKEEGVEFRSHLDGSKHFISPEKAIEIENALGADIIMAFDECAPYPADREYVKNSLERTTRWAKRCKEAHKNTDNQALFGIIQGGMYKDLREQSAREITAIDLPGYAIGGLSVGEPKPLMYEVLDYTVPLMPSDKPRYLMGVGSPDDLIEGVLRGIDMFDCVLPTRIARNGTAFTSGGKVVVRNAIYQEDFTPLDPECDCYTCRNYTKAYLRHLVKCNEILASRLLTYHNLYFLINLMKNVRQAIMDDRLMDFRNEFFEKFGYEK

SEQ ID NO: 58961 - protein, 373 aa, unidentified
  source 1..373: note = Peptoclostridium litorale
  REGION 1..373: note = tr|A0A069RH28|A0A069RH28_PEPLI Queuine tRNA-ribosyltransferase OS=Peptoclostridium litorale DSM 5388 OX=1121324 GN=tgt PE=3 SV=1
MSAIKFELIKTCKQTGARLGKIQTPHGEIQTPIFMPVGTLATVKAMTPEELKDINAQIILSNTYHLYMRPGHELVEKAGGLHKFMNWDRPILTDSGGFQVFSLGPLRKIKEEGVEFRSHIDGSKHFISPEKAIEIENALGADIIMAFDECAPYPADREYVKNSLERTTRWAQRCKDAHKNTERQALFGIVQGGMYKDLREQSAKEITDIGFPGYAIGGLSVGEPKPIMYEVLEYTTPLLPEDKPRYLMGVGSPDDLIEGVLRGVDMFDCVLPTRIARNGTAFTSQGKVVARNAIYADDFRPLDPECDCYTCKNYTRAYIRHLVKCNEILASRLLTYHNLHFLLKLMEDVRTAIQEDRLMDFRNEFFEKYGYTK

SEQ ID NO: 58962 - protein, 373 aa, unidentified; identical to SEQ ID NO: 53991
  source 1..373: note = Peptoclostridium sp.
  REGION 1..373: note = tr|A0A416Q4M4|A0A416Q4M4_9FIRM Queuine tRNA-ribosyltransferase OS=Peptoclostridium sp. AF21-18; OX = 2292243 GN=tgt PE=3 SV=1

SEQ ID NO: 58963 - protein, 370 aa, unidentified
  source 1..370: note = Peptococcaceae bacterium
  REGION 1..370: note = tr|A0A0F2NB63|A0A0F2NB63_9FIRM Queuine tRNA-ribosyltransferase OS=Peptococcaceae bacterium BRH_c4a OX=1629716 GN=tgt PE=3 SV=1
MTVSFREIKRDSVTKARRGELHTPHGVVETPVFMPVGTQATVKTMTPEEVQDAGGRLILGNTYHLYLRPGHRIVAEAGGLHRFMNWGGPILTDSGGFQVFSLGPLRKIEEEGVWFRSHIDGSEHYFSPEKAVEIQEALGSDIAMAFDECAPYPCTKEYALKAVERTTRWAQRCKKAHRREDQSLFGIIQGGVFGDLRRKSAAELVELDFPGYGIGGLSVGEPKDLMYETLEVTIPLIPNDRPRYLMGVGSPDCLLEGVARGVDMFDCVLPTRIARNGTVFTHQGKLVVRNAEYARDFSPLDAECDCYTCRNYTRAYVRHLIKANEILGVRLTTMHNLYFTLNLMHNIRVAIDQGRFDAYKRDFLSKFNLC

SEQ ID NO: 58964 - protein, 373 aa, unidentified
  source 1..373: note = Peptococcaceae bacterium
  REGION 1..373: note = tr|A0A0J1I1P1|A0A0J1I1P1_9FIRM Queuine tRNA-ribosyltransferase OS=Peptococcaceae bacterium CEB3; OX = 999898 GN=tgt PE=3 SV=1
MAAVHLEILKEDLKTRARLGRLHTPHGIIETPVFMPVGTQATVKTMTPEELEEIGAGIILSNTYHLFLRPGPELIRAAGGLHSFMHWRGAILTDSGGFQVFSLGDLRRISEEGVEFRSHLDGSRQFLSPEIATEAQMALGSDIVMAFDECAPYPCSHEYARDSLARTTRWALRCKETLGAREGQALFGIVQGGTFQDLRRESAAGITALDLPGYAVGGLSVGEPKEVMYEILDDTVPLLPADKPRYLMGVGSPDALIEGVMRGIDMFDCVLPTRIARNGTALTRFGKLVVRNATVARDFSAIDPTCDCYTCRHYSRAYVRHLLKADEILGLRLMTIHNLRFLQNLMREIREAIAADRLPEYRKEFFAGYGYPL

SEQ ID NO: 58965 - protein, 369 aa, Peptococcus niger
  REGION 1..369: note = tr|A0A1G6S1G2|A0A1G6S1G2_PEPNI Queuine tRNA-ribosyltransferase OS=Peptococcus niger OX=2741; GN = tgt PE=3 SV=1
MSFEFEKLVEASDSKARLGKFHTPHGVINTPTFMPVGTQATVKTLSPEEVKEAKSQIILANTYHLYLRPGHELIRSAGGLHRFMHWDGPILTDSGGFQVFSLGDLRKITEEGVLFRSHLDGSKHLFTPESVMGIENALGADIIMAFDECTPADADEAYARQSLERTHRWLKRCAAAHKRPDQALFGIVQGGIFPELRLESIQRTLEVDLPGYAIGGLSVGEPNEVMYDLLDQTADELPKDKPRYLMGVGNPDNLVEGVGYGIDMFDCVQATRIARHGAFWTGQGRENIRNAKNQEDFSPLENGCGCYACQHYSRAYIRHLVQAKEVFGIRLLSLHNIYFLNHLMEQLREAIRQDTYQAFRKSFFAQYTV

SEQ ID NO: 58966 - protein, 370 aa, Peptoniphilus asaccharolyticus
  REGION 1..370: note = tr|A0A1W1USS8|A0A1W1USS8_PEPAS Queuine tRNA-ribosyltransferase OS=Peptoniphilus asaccharolyticus DSM 20463 OX=573058 GN=tgt PE=3 SV=1
MFKFELQKTAKDSKARLGKIITPHGEIETPIFMPVGTRATVKTMTPEEVKDLGAQIILSNTYHLFLKPGMDIIEKAGGLHKFMNWDKPILTDSGGFQVFSLSGNRKITEEGVEFRSHIDGSKKFISPEVSIDIQNTLGSDIIMAFDECAPYPSSYEYIYDSMMRTTRWAERCKAHHTREDQALFGIIQGGMYKDLREISAKDLVSMDFPGYAVGGLSVGEPLEIMNEVLDHTTEFMPQNKPRYLMGVGSPDYLFEAVERGIDMADCVLPTRIARNGTVMTSQGKLVIKNAKYKEDFSPLDPECDCYTCRNYSRAYMRHLFNVDEILGLRLATIHNLRFLIKLMEDIRESIRGDYFLEFKSDFYRKYGYNK

SEQ ID NO: 58967 - protein, 373 aa, unidentified
  source 1..373: note = Peptoniphilus coxii
  REGION 1..373: note = tr|A0A134ABC8|A0A134ABC8_9FIRM Queuine tRNA-ribosyltransferase OS=Peptoniphilus coxii OX=755172; GN = tgt PE=3 SV=1
MKFTVTHESSNTKARRGVLETAHGTIQTPIFMPVGTQATVKTMTPEDLESMNAQIILSNTYHLFLRPGTDIIAKAGGLHKFMNWDKPILTDSGGFQVFSLSHRRKITEEGVMFRSHIDGSKQFLSPEKSMEIQHILGSDIMMAFDECAPYPATREYIAHSSDRTTRWAERCKIYHNNKEGQNLFGIVQGGMYKDLRKKSAEELVSLDFPGYAVGGLSVGEPIELMCDVLDYTTDFMPKDKPRYLMGVGTPDYLFEAVERGIDMADCVLPTRNARKGTVFTAHGKLVIKNARYAEDFLPLDPECDCYVCRNYSRAYIRHLFKANEILGLRLASYHNLYFLLKLMENIRTAIENDSFLSFKDDFYAKYGYNNING

SEQ ID NO: 58968 - protein, 371 aa, unidentified
  source 1..371: note = Peptoniphilus duerdenii
  REGION 1..371: note = tr|E0NMT2|E0NMT2_9FIRM Queuine tRNA-ribosyltransferase OS=Peptoniphilus duerdenii ATCC BAA-1640 OX=862517 GN=tgt PE=3 SV=1
MLEYKLIKKSKDTKARVGEIKTNHGIIKTPVFMPVGTRATVKTMTPEEVKDLGAQIILSNTYHLFLRPGPEIIEKAGGLHKFMNWHGPILTDSGGFQVFSLSANRKITEEGVTFRSHIDGSKQFLSPEVSIDVQNSLGSDIIMAFDECAPYPATYEYIEHSMNRTTRWAKRCKDHHKNTDNQALFGIVQGGMYKDLRKKSAEDLVAMDFPGYAVGGLSVGEPKDIMVDILDYTTDFLPEDKPRYLMGVGTPDYLFEAVEHGIDMADCVLPTRIARNGTAMTSVGRVIAKNGKYKEDFTSLDENCDCYTCKNYTKAYIRHLFNVNEILAYRLLSIHNIYFLTKLMENIRNAILEDRFLEYKKEFYESYGYED

SEQ ID NO: 58969 - protein, 370 aa, unidentified
  source 1..370: note = Peptoniphilus grossensis
  REGION 1..370: note = tr|A0A1U7LYM1|A0A1U7LYM1_9FIRM Queuine tRNA-ribosyltransferase OS=Peptoniphilus grossensis; OX = 1465756 GN=tgt PE=3 SV=1
MFKFELLKTAKDSKARLGKITTNHGEIETPIFMPVGTRATVKTMTPDELKEIGSQIILSNTYHLFLRPGTEIIEKAGGLHKFMNWDKPILTDSGGFQVFSLSDNRKITEEGVHFRSHIDGSKMFISPEKSIDIQNILGSDIIMAFDECAPYPASHEYIDNSMRRTLRWAERCKEHHKNTDNQTLFGIIQGGMYKDLREISAREMVDMDFKGYSIGGLSVGEPIDLMNDILDFTTDFMPESKPRYLMGVGSPDYLFEAVERGVDMADCVLPTRIARNGTVLTHNGKIAIKNALYKEDFSALDKECDCYTCRNFSKAYIRHLFNVDEILGMRLATIHNLYFLLDMMKNIRESIRGDYFLEYKDDFYKKYGYK

SEQ ID NO: 58970 - protein, 372 aa, Peptoniphilus harei
  REGION 1..372: note = tr|A0A2X1Y0C9|A0A2X1Y0C9_9FIRM Queuine tRNA-ribosyltransferase OS=Peptoniphilus harei OX=54005; GN = tgt PE=3 SV=1
MFKFDLLKTSKDSKARLGKITTNHGEIETPIFMPVGTRATVKTMTPDELKGIGAQIILSNTYHLFLRPGTEIIEKAGGLHKFMNWDKPILTDSGGFQVFSLSDNRKITEEGVHFRSHIDGSKMFISPEKSIDIQNILGSDIIMAFDECAPYPASHEYIDHSMRRTLRWAQRCKDYHKNVDNQTLFGIIQGGMYKDLREISAKEMVDMDFKGYSIGGLSVGEPIDLMTEILDYTTDFMPENKPRYLMGVGSPDYLFEAVERGVDMADCVLPTRIARNGTVLTHQGRIPIKNAVYKEDFSRLDDECDCYTCRNFSKAYLRHLFNVDEILGMRLATIHNLYFLIDMMENIRESIRGDYFLEYKRDFYKKYGYKQD

SEQ ID NO: 58971 - protein, 370 aa, Peptoniphilus harei
  REGION 1..370: note = tr|E4KZ33|E4KZ33_9FIRM Queuine tRNA-ribosyltransferase OS=Peptoniphilus harei ACS-146-V-Sch2b OX=908338 GN=tgt PE=3 SV=1
MFKFELLKTSKDSKARLGKITTNHGEIETPIFMPVGTRATVKTMTPEELKDIGAQIILSNTYHLFLRPGTEIIEKAGGLHKFMNWDKPILTDSGGFQVFSLSDNRKITEEGVHFRSHIDGSKMFISPEKSIDIQNILGSDIIMAFDECAPYPASHEYIDHSMRRTLRWAERCKNHHKNVDNQTLFGIIQGGMYKDLREISAKEMVDMDFKGYSIGGLSVGEPIDLMTEILDYTTDFMPENKPRYLMGVGSPDYLFEAVERGVDMADCVLPTRIARNGTVLTHQGRIPIKNAIYKDDFSRLDDECDCYTCRNYSKAYIRHLFNVDEILGMRLATIHNLYFLIDMMKNIRESIKGDYFLEYKKDFYKKYGYK

SEQ ID NO: 58972 - protein, 370 aa, Peptoniphilus indolicus
  REGION 1..370: note = tr|A0A379DF08|A0A379DF08_9FIRM Queuine tRNA-ribosyltransferase OS=Peptoniphilus indolicus; OX = 33030 GN=tgt PE=3 SV=1
MFKFELEKTSKGSKARLGKIITPHGEIETPIFMPVGTRATVKTMTPEEVKDLGAQIILSNTYHLFLKPGMDIIEKAGGLHKFMNWDKPILTDSGGFQVFSLSGNRKISEEGVEFRSHIDGSKKFISPEVSIDIQNTLGSDIIMAFDECAPYPSSYEYIYDSMMRTTRWAERCKAHHKREDQALFGIIQGGMYKDLREISAKDLVAMDFPGYAVGGLSVGEPLELMNEILDHTTEFMPQDKPRYLMGVGTPDYLFEAVERGIDMADCVLPTRIARNGTVMTSNGKLVIKNAKYKEDFSPLDPECDCYTCRNYSRAYIRHLFNVDEILGLRLATIHNLRFLIKLMEDIRESIRGDYFLEFKDDFYRKYGYNK

SEQ ID NO: 58973 - protein, 370 aa, Peptoniphilus indolicus; identical to SEQ ID NO: 58972
  REGION 1..370: note = tr|G4D5T6|G4D5T6_9FIRM Queuine tRNA-ribosyltransferase OS=Peptoniphilus indolicus ATCC 29427 OX=997350 GN=tgt PE=3 SV=1

SEQ ID NO: 58974 - protein, 371 aa, Peptoniphilus ivorii
  REGION 1..371: note = tr|A0A448V1X7|A0A448V1X7_9FIRM Queuine tRNA-ribosyltransferase OS=Peptoniphilus ivorii OX=54006; GN = tgt PE=3 SV=1
MKFTVTHTSSDTKARRGVLETAHGTIQTPIFMPVGTLATVKTMTPEELKEIGAQIILSNTYHLFLRPGMEIMKEAGGLHKFMHWDGPILTDSGGFQVFSLAHRRKITEEGVTFRSHIDGSKQFLSPEKSIEIQHILGSDIIMAFDECAPYPATREYIEKSSERTSRWALRCKEYHGDRVDQNLFGIVQGGMYKEIRRRSADQLVAMDFPGYAVGGLSVGEPLDLMCDILDFTTDFLPKDKPRYLMGVGTPDYLFEAVERGIDMADCVLPTRNARNGTCMTSEGKLVVKNAKYAKDFRPLDPECDCYVCRNYSRAYIRHLFQTKEVLALRLASYHNLYFLLQLMERIRASVEGDYFLQYKDDFYRKYGYNSK

SEQ ID NO: 58975 - protein, 370 aa, Peptoniphilus lacrimalis
  REGION 1..370: note = tr|D1VUV8|D1VUV8_9FIRM Queuine tRNA-ribosyltransferase OS=Peptoniphilus lacrimalis 315-B; OX = 596330 GN=tgt PE=3 SV=1
MFKFELYKKAKDSKARLGKIITDHGEIETPIFMPVGTRATVKTMASEELKKIGAQIILSNTYHLFLRPGSEIIKKAGGLHKFMHWDKPILTDSGGFQVFSLSDNRKITEEGVEFRSHIDGSKKFLSPEVSIEMQNILGSDIIMSFDECAPYPASYDYVEKSMQRTLRWAKRGKDFHKNSDHQALFGIIQGGMYKDLRKISAKEMVDMDFPGYSVGGLSVGEPKEIMNEILDYTTDFMPENKPRYLMGVGSPDYLFEAVERGIDMADCVLPTRIARNGSVITHRGKLVIRNAKYKEDFSPLDQECDCYVCRNYTRAYIRHLFNVDEILGPRLATIHNLYFLLNMMENIRESIRGDYFLEYKNDFYKKYGYN

SEQ ID NO: 58976 - protein, 433 aa, Peptoniphilus lacrimalis; identical to SEQ ID NO: 55548
  REGION 1..433: note = tr|A0A2N6SJZ5|A0A2N6SJZ5_9FIRM Queuine tRNA-ribosyltransferase OS=Peptoniphilus lacrimalis; OX = 33031 GN=tgt PE=3 SV=1

SEQ ID NO: 58977 - protein, 376 aa, Peptoniphilus sp.
  REGION 1..376: note = tr|D7N5T0|D7N5T0_9FIRM Queuine tRNA-ribosyltransferase OS=Peptoniphilus sp. oral taxon 386 str. F0131 OX=575609 GN=tgt PE=3 SV=1
MFEFELIKESKECKARLGKIKTTHGEIETPIFMPVGTRATVKTMTPEELKELEAQIILSNTYHLYLKPGMEIIEKAGGLHKFMNWDKPILTDSGGFQVFSLSNNRKISEEGVEFRSHIDGSKKFLSPEISVDIQNTLGSDIMMCFDECAPYPSSYEYILNSMNRTTRWARRCKDHHKNVDNQALFGIIQGGMYKDLREISAKDLVALDFPGYAVGGLSVGEPLELMNEILDFTTDFMPKNKPRYLMGVGSPDYLFEAVERGIDMADCVLPTRIARNGTVITSKGKLVIKNAKYKDDFTPIDDECDCYTCKNYSRAYIRHLFNVDEILALRLATIHNLHFLINLMKKIRESIKNDTFMEFKDDFYNKYGYNKIRREF

SEQ ID NO: 58978 - protein, 370 aa, Peptoniphilus sp.
  REGION 1..370: note = tr|A0A1E9ADB9|A0A1E9ADB9_9FIRM Queuine tRNA-ribosyltransferase OS=Peptoniphilus sp. HMSC062D09; OX = 1739305 GN=tgt PE=3 SV=1
MFKFELLKTAKDSKARLGKITTNHGEIETPIFMPVGTRATVKTMTPDELKKIGSQIILSNTYHLFLRPGTDIIEKAGGLHNFMNWDKPILTDSGGFQVFSLSDNRKITEEGVHFRSHIDGSKMFISPEKSIDIQNVLGSDIMMAFDECAPYPASHEYIDNSMRRTLRWAERCKEHHKNIDKQTLFGIIQGGMYKDLREISAKEMVDMDFKGYSIGGLSVGEPLDLMNDILDYTTDFMPENKPRYLMGVGSPDYLFEAVERGVDMADCVLPTRIARNGTVLTHKGRIAIKNALYKEDFSSLDEDCDCYTCRNFSKAYIRHLFNVDEILGMRLATIHNLYFLLDMMKNIRESIKGDYFLEYKNDFYKKYGYK

SEQ ID NO: 58979 - protein, 373 aa, unidentified
  source 1..373: note = Peptostreptococcaceae bacterium
  REGION 1..373: note = tr|J4KBF8|J4KBF8_9FIRM Queuine tRNA-ribosyltransferase OS=Peptostreptococcaceae bacterium AS15 OX=936556 GN=tgt PE=3 SV=1
MNKPLKFEVIKKCNQSKARLGKIKTLHNEFETPVFMPVGTNATVKSMNEKELKEIGANIILSNTYHLHLRPGDEIVKKAGGLHEFMHWDRSILTDSGGFQVFSLGDLRKIKEEGVYFSSHLDGSKHFMGPEESIAVQNNLGSDIMMSFDECAPYPASYEYIRDSYKRTSRWAKRGKDANRNPETQALFGIIQGGMFEDLRYESANELVEMDFDGYSIGGLSVGEPKELMYEVLDYTVDIIPSEKPRYLMGVGSPDDLFEGVIRGVDMFDCVLPTRIARNGTAMTSNGKVVVRNATYAEDFTPLDHECDCYVCKNYSRAYIRHLVKANEILGARLITYHNLYFLLRMMEKIRQSIRDGRLLEYKKEFFTKYYGV

SEQ ID NO: 58980 - protein, 373 aa, unidentified
  source 1..373: note = Peptostreptococcaceae bacterium
  REGION 1..373: note = tr|A0A1I1X6H4|A0A1I1X6H4_9FIRM Queuine tRNA-ribosyltransferase OS=Peptostreptococcaceae bacterium pGA-8 OX=1520829 GN=tgt PE=3 SV=1
MKHSLTYELIKKDSRTKARRGVIHTLRGDIQTPVFMPVGTQATVKAMRPEQVEESGAEIILANTYHLMLRPGHKLVEEAGGLHKFMNWNKPILTDSGGFQVFSLKGLRKITEDGVTFQSYIDGSRHILTPEIAVEVQTSLGSDIMMAFDECPPYPADWHYVKKSLDRTNRWLQRCKDAHHNTEKQALFGIMQGGMYYDLRKESAEKIVEMDLPGYSIGGLSVGEPKEQMLEVLDYCVDFLPDNKPRYVMGVGTPDYLFEGVERGVDMFDCVLPTRVARNGQAMTSEGPLNMKNKRFEHDFTPLDHKCDCYTCRNYSRAYIRHLVKSNEIMASMLLSNHNLHFLINMMKGIRKSIEEDRFLEFKKEVYEGYYGK

SEQ ID NO: 58981 - protein, 372 aa, Peptostreptococcus anaerobius
  REGION 1..372: note = tr|R5J7K3|R5J7K3_9FIRM Queuine tRNA-ribosyltransferase OS=Peptostreptococcus anaerobius CAG:621 OX=1263100 GN=tgt PE=3 SV=1
MYAVRYELIKTCKQTGARLGRLHTPHGVIDTPIFMPVGTQATVKSMTPEELKEIGSQIILSNTYHLYLRPGHELIKKAGGLHKFMNWDRPILTDSGGFQVFSLGPLRKITEEGVEFRSHHDGSKHFLTPEKVMEIENALGPDIMMAFDECAPYPADREYVKNSLERTTRWLERCKAAHKNPENQALFGIVQGGMYKDLREQSAREITAIDLPGYAIGGLSVGEPKELMYEILEYTTPLLPEDKPRYLMGVGSPDDLIEGVIRGIDMFDCVLPTRIARNGTAMTSQGKVVVRNASYAEDFTPLDPECDCYTCRNYTKSYIRHLVKTNEILGARLISNHNLHFLLNLMKDVRQAIMDDRLMDFRNEFFAKYYGK

SEQ ID NO: 58982 - protein, 372 aa, Peptostreptococcus anaerobius
  REGION 1..372: note = tr|D3MPV7|D3MPV7_9FIRM Queuine tRNA-ribosyltransferase OS=Peptostreptococcus anaerobius 653-L OX=596329 GN=tgt PE=3 SV=1
MYAVRYELIKTCKQTGARLGRLHTPHGVIDTPIFMPVGTQATVKSMTPEELKEIGSQIILSNTYHLYLRPGHELIKKAGGLHKFMNWDRPILTDSGGFQVFSLGPLRKITEEGVEFRSHHDGSKHFLTPEKVMEIENALGPDIMMAFDECAPYPADREYVKNSLERTTRWLERCKAAHKNPENQALFGIVQGGMYKDLREQSAREITAIDLPGYAIGGLSVGEPKDLMYEILEYTTPLLPEDKPRYLMGVGSPDDLIEGVIRGIDMFDCVLPTRIARNGTAMTSQGKVVVRNASYAEDFTPLDPECDCYTCRNYTKSYIRHLVKTNEILGARLISNHNLHFLLNLMKDVRQAIMDDRLMDFRNEFFAKYYGK

SEQ ID NO: 58983 - protein, 372 aa, Peptostreptococcus russellii
  REGION 1..372: note = tr|A0A2P7Q0R2|A0A2P7Q0R2_9FIRM Queuine tRNA-ribosyltransferase OS=Peptostreptococcus russellii; OX = 215200 GN=tgt PE=3 SV=1
MYAVRYELIKTCKQTGARLGRLHTPHGVIDTPIFMPVGTQATVKSLTPEELKEIEAQIILSNTYHLYLRPGHEIVKKAGGLHKFMNWDKPILTDSGGFQVFSLGPLRKISEEGVEFRSHIDGSKHMLTPEKAVEIQNALGSDIMMAFDECAPYPADREYVKNSLERTTRWLQRCKDAHKNTENQALFGIVQGGMYKDLREQSAKEITSIDLPGYAVGGLSVGEPKELMYEVLDYTVPLLPEDKPRYLMGVGTPDILIDGAIRGIDMFDCVLPTRIARNGTAMTSQGKVVVRNAVYAEDFTTLDPECDCYACKNYTKAYIRHLIKTNEILGARLLSIHNLRFLIKLMENVRQAIMEDRLMDFRNEFFEKYYGK

SEQ ID NO: 58984 - protein, 374 aa, Peptostreptococcus russellii
  REGION 1..374: note = tr|A0A1H8I8T6|A0A1H8I8T6_9FIRM Queuine tRNA-ribosyltransferase OS=Peptostreptococcus russellii; OX = 215200 GN=tgt PE=3 SV=1
MYAVRYELIKKCKQSGARLGRLHTPHGVIDTPIFMPVGTQATVKSMTPEELKEIDAQIILSNTYHLYLRPGHELIKKAGGLHNFMHWDRPILTDSGGFQVFSLGPLRKITEEGVEFRSHIDGSKHMLSPEKAMEIQNALGSDIMMAFDECAPYPADREYVKKSLERTTRWLQRCKDAHKNTENQALFGIVQGGMYKDLREQSAKEITAIDLPGYAIGGLSVGEPKELMYEVLDYTVGLLPENKPRYLMGVGTPDILIEAAIRGIDMCDCVLPTRIARNGTAMTSQGKVVVRNATYAEDFTTLDPECDCYTCRNYTKAYIRHLIKTNEILGARLLSIHNLRFLLKLMEDVRQAIMDDRLLDFRDEFYKKYYGESK

SEQ ID NO: 58985 - protein, 372 aa, Peptostreptococcus sp.
  REGION 1..372: note = tr|A0A1I1YME6|A0A1I1YME6_9FIRM Queuine tRNA-ribosyltransferase OS=Peptostreptococcus sp. D1; OX = 72304 GN=tgt PE=3 SV=1
MYAVRYELIKKCRQSGARLGRLHTPHGIIETPIFMPVGTQATVKSMTPEELKEIGSQIILSNTYHLYMRPGYELIKKAGGLHEFMQWDKPILTDSGGFQVFSLGPLRKITEEGVEFRSHLDGSRHTITPEKAVEIQTALGSDIMMAFDECAPYPADRDYVKKSLERTTRWLRRCKDAHKNTENQALFGIVQGGMYKDLREQSAREITAIDLPGYAIGGLSVGEPKDIMYDILGHTVQFLPEDKPRYLMGVGSPDDLLEGVIRGVDMFDCVLPTRIARNGTAMTSQGKVVVRNATYAEDFSSLDPECDCYTCRNYTKAYIRHLIKANEILGARLLTIHNLRFLLKLMENIRTAIHEDRLLDFKEEFLKKYYQK

SEQ ID NO: 58986 - protein, 372 aa, Peptostreptococcus sp.
  REGION 1..372: note = tr|A0A095XYZ8|A0A095XYZ8_9FIRM Queuine tRNA-ribosyltransferase OS=Peptostreptococcus sp. MV1; OX = 1219626 GN=tgt PE=3 SV=1
MYAVRYELIKTCKQTGARLGRLHTPHGIIETPIFMPVGTQATVKAMTPEELKEIGSQIILSNTYHLYMRPGHDLIERAGGLHKFMNWDKPILTDSGGFQVFSLGPLRKIKEEGVEFRSHLDGSKHFLSPEKAMEIQNSLGSDIMMAFDECAPYPADRQYVKNSLERTTRWLERCKEAHKYPEKQALFGIVQGGMYKDLREQSAKEITAIDLPGYAIGGLSVGEPKEMMYEVLDYTVPLLPEDKPRYLMGVGSPDDLLEGVLRGIDMFDCVLPTRIARNGTAMTSQGKVVVRNASYAEDFTTLDPECDCYTCRNYTKAYIRHLIKCNEILGARLLTIHNLHFLLKLMENVRQAIREDRLLDFKNDFFAKYYGK

SEQ ID NO: 58987 - protein, 382 aa, Peptostreptococcus stomatis
  REGION 1..382: note = tr|E0E404|E0E404_9FIRM Queuine tRNA-ribosyltransferase OS=Peptostreptococcus stomatis DSM 17678 OX=596315 GN=tgt PE=3 SV=1
MIEKDYERKYMYAVRYELIKTCKQTGARLGRLHTPHGVIETPIFMPVGTQATVKAMTPEELKDIGSQIILSNTYHLYMRPGHDLIERAGGLHKFMNWDKPILTDSGGFQVFSLGPLRKIKEEGVEFRSHLDGSKHFLSPEKATEIQNALGSDIIMAFDECAPYPADRQYVKNSLERTTRWLERCKAAHKYPERQALFGIVQGGMYKELREQSAREITAIDLPGYAIGGLSVGEPKEMMYEVLDYTVPLLPEDKPRYLMGVGSPDDLLEGVLRGIDMFDCVLPTRIARNGTAMTSQGKVVVRNASYAEDFTSLDPECDCYTCRNYTKAYLRHLIKCNEILGARLLTIHNLHFLLKLMENVREAIREDRLLDYKKDFFEKYYGK

SEQ ID NO: 58988 - protein, 380 aa, Peredibacter sp.
  REGION 1..380: note = tr|A0A2E5CAL8|A0A2E5CAL8_9PROT Queuine tRNA-ribosyltransferase OS=Peredibacter sp. OX=2024850; GN = tgt PE=3 SV=1
MEITKEVNKHFKYKLIHKDKNCNARAGVIITPHGEIPTPVFMPVGTHGAIKALQPNQLKDMDIPIILSNTYHLHLTPGSDLVKKAGGLHKFMAWDRPILTDSGGFQVFSLQGNSITEEGSKFKGPKGKDILLTPETSIQIQQNLGSDIMMAFDECIPYPADKKYVKRSIDRTHRWLDRCINSWDNPKQALFGIIQGSTYDEFRDECLEEVVKRDLPGYAIGGVSVGEGPELMEKAVKYVAPKMPEDKPRYVMGVGMPEDLFMIWENGVDMSDCIIPTKFARGGTLFTNRGKIRITHKNYRRDFFPIEPNLKDYVNSNFTRAYIKHLFDSNEILGQILATAHNIAFYKSLADRAREAILEDRFLDFKKEFLDGYSRQDGKR

SEQ ID NO: 58989 - protein, 370 aa, Peredibacter sp.
  REGION 1..370: note = tr|A0A2E5CAK2|A0A2E5CAK2_9PROT Queuine tRNA-ribosyltransferase OS=Peredibacter sp. OX=2024850; GN = tgt PE=3 SV=1
MSIYKLEGQSGNARAGVVTTEHGEIQTPIFMPVGTRGAVKAIWHHELKEVGAEIILGNTYHLFLRPGHELIEKMGGLHKFMNWDRPILTDSGGYQVFSLGDLNKVTEEGVRFQSHLDGSYHMLSPEKSMEIQKALGSDIVMIFDECPALPASKDRLRESMELTLRWAKRCADYPLQDHQNLFGIVQGGLHEDLREECMERLEELDLPGLALGGLSVGEKNEEMVDFLNSFTPKMPEHKPRYLMGVGKPLDILNGIRAGIDMFDCVLPTRNARNGQFLTSHGPVNIKKQKFQFDELPPDPECDCKVCSNYSRSYVRHLFTVGEYLGGQMISYHNLHFYLKMVKEARAAILEDKFDDYYKEFYKKYTSERWK

SEQ ID NO: 58990 - protein, 371 aa, Perlucidibaca sp.
  REGION 1..371: note = tr|A0A2P6ASQ7|A0A2P6ASQ7_9GAMM Queuine tRNA-ribosyltransferase OS=Perlucidibaca sp. HR-E; OX = 2094561 GN=tgt PE=3 SV=1
MRFTLKATDGKARRGELTFARGTVQTPAFMPVGTYGTVKGMLPRDIHAIGAEIILGNTFHLWLRPGTEIIKAHGDLHDFTQWQGPILTDSGGFQVFSLGKLRKITEEGVRFQSPVDGSKVFLSPEESMRIQRDLGSDIVMIFDECTPYPATHEEADRSLVLSLRWAKRSKGAHGDNPNALFGIVQGGMYEDLRLKSLDGLQAIGFDGYAIGGLSVGEPKEDMIRILDFLPGHLPADKPRYVMGVGKPEDLVEGVRRGIDMFDCVMPTRNARNGHYFVTDGIVRIRNSQYKTDTGPLDPHCDCEACTGFSRAYLHHLDKCGEMLGAQLGTIHNLRYYQRLMAGLREAIEHGRLQPFVDDFYARRGLPTPPLN

SEQ ID NO: 58991 - protein, 371 aa, unidentified
  source 1..371: note = Permianibacter aggregans
  REGION 1..371: note = tr|A0A4R6V2L1|A0A4R6V2L1_9GAMM Queuine tRNA-ribosyltransferase OS=Permianibacter aggregans; OX = 1510150 GN=tgt PE=3 SV=1
MKFQLKATDGQARRGELQFERGTVQTPAFMPVGTYGAVKSMSPDDLKAIGAEIILGNTFHLMLRPGPELLEKLGGLHGFGGWQGPILTDSGGFQVFSLGELRKISEQGVEFRSPIDGSKVWLDPERSMAVQRSIGADIVMIFDECTPYPATYEQAKFSMELSLRWAERSKKAHGDNPAALFGIVQGGMYLDLRKVSLEGLTNIGFDGYAIGGLSVGEPKHEMVKVLNAVTPQLPTDRPRYLMGVGKPEDIVEAVRRGVDMFDCVMPTRNARNAHLFTTEGVVRLRNAKYRDDQRPVEEGCDCYSCQNFSRAYLHHLDKCKETLGARLNTIHNLHYYQRVMAGLRGAIETGNLAAFVDEFYQRRGEKTPPLQ

SEQ ID NO: 58992 - protein, 378 aa, Persephonella hydrogeniphila
  REGION 1..378: note = tr|A0A285NBT0|A0A285NBT0_9AQUI Queuine tRNA-ribosyltransferase OS=Persephonella hydrogeniphila; OX = 198703 GN=tgt PE=3 SV=1
MFEFELLKKDGNARLGKIYTAHGEIETPVFMPVGTQGTVKAVTKEQLLSTKPQIILGNTYHLYLRPGIEVLEYFGGLHRFMNWGKPILTDSGGFQVFSLSREKKKEGKHKAEVILTEEGVKFKSHLDGSWHFFTPELVIHIQEIIGSDIMMPLDVCPPYPVSHTTAKDAVDKTIRWLERSKKAKKNEWQALFGIIQGSVYSDLRRESAIKTVDLDMDGYSIGGLSVGEPAELMYEMTEIVIPFIPEDKPRYLMGVGTPENIIESVERGVDMFDCVMPTRNARNGTLFTTYGRLNIKAAKHRFSDEPVDSECDCYTCKNFSRGYVRHLFNAEEITGMILATIHNLRFYTRLMEEIRKSIKESKFLEFKKEFLDKYTGLK

SEQ ID NO: 58993 - protein, 348 aa, Persephonella marina
  REGION 1..348: note = tr|C0QSJ4|C0QSJ4_PERMH Queuine tRNA-ribosyltransferase OS=Persephonella marina (strain DSM 14350 / EX-H1) OX=123214 GN=tgt PE=3 SV=1
MPVGTQGTVKAVTKDQLLSTKPQIILGNTYHLYLRPGVDVLKHFGGLHRFMNWDLPILTDSGGFQVFSLAKEKNVQGKHKTEVILTEEGVKFRSHLDGSWHFFTPELVIQIQEIIGSDIIMPLDVCPPYPVSHTTARDAVEKTIRWLERSKKAKKDNGQALFGIVQGSTYPDLRRESALKTVEMEMDGYSIGGLSVGEPAEFMYEMTQIVVEILPENRPRYLMGVGTPENIVESVDKGVDMFDCVMPTRNARNGTLFTHYGRLNIKAAKHRLSDDPVDPECDCYTCRNFSRGYLRHLYNAEEITGMILGTIHNLRYYSLLMEKIRDSIRKGRFKQFKKEFYDKQSVVK

SEQ ID NO: 58994 - protein, 378 aa, Persephonella sp.
  REGION 1..378: note = tr|A0A432S306|A0A432S306_9AQUI Queuine tRNA-ribosyltransferase OS=Persephonella sp. OX=2060922; GN = tgt PE=3 SV=1
MKFELIKTDGNARLGKIYTKHGTIETPVFMPVGTQGTVKAITKEQLLDINTQIILGNTYHLYLRPGLEVLKHFKGLHNFMNWEKPILTDSGGFQVFSLALNKKVKSGKHKADVKITEDGVKFKSHLDGSWHYFTPEFVIEIQEIIGSDIMMPLDICPPYPVSYQTAKESVEKTLRWLERSKKAKKNEWQGLFGIIQGSTYEDLRVYSAIKTVELDMDGYSIGGLSVGEPTEYMYSMTEAVVPYLPKDKPRYLMGVGTPENIIESVSRGIDMFDCVMPTRNARNGTLFTHYGRLNIKAGKHKLSDEPIDKDCDCYTCKNFSRGYIRHLFNAEEITGMTLATIHNLRFYMKLMEDIREAIKNDRFEEFKSEFYEKYNNNL

SEQ ID NO: 58995 - protein, 380 aa, Persephonella sp.
  REGION 1..380: note = tr|A0A432S0E2|A0A432S0E2_9AQUI Queuine tRNA-ribosyltransferase OS=Persephonella sp. OX=2060922; GN = tgt PE=3 SV=1
MKFELLNKDGRARLGKIYTERGVIETPVFMPVGTQGSVKALTKQHLLDIKAQIILGNTYHLYLRPGLEVLKHFKGLHNFINWEKPILTDSGGFQVFSLALNKKVKSGKHKAEVKITEEGVRFKSHLDGSWHYFTPEFVIEIQEIIGSDIMMPLDICPPYPVSYQSAKDSVEKTLRWLERSKRRKRYKNQALFGIIQGSTYEDLRIYSAIKTVEMDMDGYSIGGLSVGEPTEYMYSMTEVVVNYLPEDKPRYLMGVGTPENIIESVDRGIDMFDCVMPTRNARNGTLFTHYGRLNIKAGKYKLSEEPIDKDCDCYTCKNFSRGYIRHLFNAEEITGMILATIHNLRFYTKLMEDIRKAIRKNRFKEFKNNFYLKYYSEGSY

SEQ ID NO: 58996 - protein, 376 aa, unidentified
  source 1..376: note = Petrimonas mucosa
  REGION 1..376: note = tr|A0A1G4G356|A0A1G4G356_9PORP Queuine tRNA-ribosyltransferase OS=Petrimonas mucosa OX=1642646; GN = tgt PE=3 SV=1
MKFELQHTDPRSNARAGVITTDHGHIETPVFMPVGTIGSVKAVQMTELKEDIKAQIILGNTYHLYLRPGLKVLEGAGGLHRFNSWNRPILTDSGGFQVFSLAGNRKLTEEGAEFRSHIDGSKHFFTPEKVMDIQRTIGADIIMAFDECTPGDADYAYAKKSLDLTERWLKRCIDRFKETECPYGYRQTLFPIVQGCVFPDLRRRAAENVASLEADGNAIGGLAVGEPTEKMYEMVELVNEILPKDKPRYLMGVGTPANLLEAVERGVDMFDCIMPTRNGRNGQIFTKNGILNMRNERWKEDFSPIEEEGASFVDTLYSKAYLRHLINTNEILGLQIASVHNLAFYTWLMREARKHIIEGDFSSWKRIMVERTMQRL

SEQ ID NO: 58997 - protein, 376 aa, Petrimonas sp.
  REGION 1..376: note = tr|A0A3G9DNE0|A0A3G9DNE0_9PORP Queuine tRNA-ribosyltransferase OS=Petrimonas sp. IBARAKI; OX = 1978337 GN=tgt PE=3 SV=1
MKFELQHTDSSSQARAGLITTDHGQIKTPVFMPVGTVGSVKAVQITELKDDIKAQIILGNTYHLYLRPGLDIMQLAGGLHKFNSWERPILTDSGGFQVFSLAENRKLTEEGAEFRSHIDGSKHFFSPEKVVDIQRIIGADIMMAFDECTPGDADYDYAKKSLELTERWLKRCMDRFNETEGLYGYKQTLFPIVQGCVYPDLRRRAAENVASFEADGNAIGGLAVGEPTEKMYEMVELVNEILPKDKPRYLMGVGTPANLLEGIERGVDMFDCIMPTRNGRNGQIFTKNGILNMRNERWKKDFSPIEEAGASYVDTLYSKAYLRHLINTNEILGLQIASVHNLAFYTWLMQEARKHIIEGDFPSWKRTMVERTMQRL

SEQ ID NO: 58998 - protein, 375 aa, unidentified
  source 1..375: note = Petrocella atlantisensis
  REGION 1..375: note = tr|A0A3P7S2Q6|A0A3P7S2Q6_9FIRM Queuine tRNA-ribosyltransferase OS=Petrocella atlantisensis; OX = 2173034 GN=tgt PE=3 SV=1
MYELLKKDGMAKRGTFHTVHGPIQTPVFMNVGTVAAIKGGVSTNDLKDIKCQVQLSNTYHLHVRTGDATIKKLGGLHKFMVWDRPILTDSGGFQVFSLAALRKIKEEGVYFSSHIDGHKIFMGPEESMQIQSNLSSTIAMAFDECPPIPATRKYVIDSVDRTTRWLERCRKELTRLNSLESTINNRQMLFGINQGGIYDDLRIEHAKVIGDMNLDGYAIGGLAVGESHDEMYRILESTVPYMPENKPTYLMGVGTPENILEAVERGVDFFDCVYPTRNGRHGHVYTNHGKMNIYNAKFELDERPIEEGCGCEACKTYSRAYIRHLMKAKEMLGMRLCVMHNLYFYNTMMEEIRDAIEKGVYQAYKKAKIDGMNIK

SEQ ID NO: 58999 - protein, 375 aa, Petrotoga halophila
  REGION 1..375: note = tr|A0A2S5EJV7|A0A2S5EJV7_9BACT Queuine tRNA-ribosyltransferase OS=Petrotoga halophila DSM 16923; OX = 1122953 GN=tgt PE=3 SV=1
MDDSPIKFELIHIDRYTGARRGRIVTKHGTIETPVFMPVGTNATVKTLTNSLLNDINTEIILANAFHLYLRPGLEVLEHFQGLHNFMNWEKPILTDSGGFQVFSLPNTRLTDEKVIFKSPLDGSQIELTPEKSLDIQKVIGSDIAMVLDVCINSLSGYDAVKDSVQKTFNWALRSKRYHNSNGQALFGIVQGGLFEDLRNLSLSQITSLDFDGYALGGLAVGEKYQDSEKILKAFGNKLPENKPRYIMGIGSPTMMFLSVENGLDMFDCVLPTRMGRHGTALTWKGKLNLKSSEVKFDQKPIDEKCDCYTCKNHSRGYIHHLFKKDEVLGKILLSIHNLRFNISLVEKMREAIENDEFKFFKDEFFSSSTYSLTN

SEQ ID NO: 59000 - protein, 370 aa, Petrotoga mexicana
  REGION 1..370: note = tr|A0A2K1PEG8|A0A2K1PEG8_9BACT Queuine tRNA-ribosyltransferase OS=Petrotoga mexicana DSM 14811; OX = 1122954 GN=tgt PE=3 SV=1
MKFELIHIDRYTGARRGRIITKHGTIETPVFMPVGTNATVKTLTNSLLNDINTEIILANAFHLYLRPGLEVLDHFQGLHNFMNWKKPILTDSGGFQVFSLPNTRLTDEKVIFKSPLDGSQIELTPEKSLDIQKVIGSDIAMVLDVCINSLSGYDAVKDSVQKTFNWALRSKRYHNNNGQALFGIVQGGLFEDLRKLSLSQITSLDFDGYALGGLAVGEKYQDSEKILKAFGNKLPENKPRYIMGIGSPTMMFLSVENGMDMFDCVLPTRMGRHGTALTWKGKLNLKSSQVKFDQKPIDEECDCYTCKNHSRGYIHHLFKKDEVLGKILLSIHNLRFNISLVAKMREAIENDDFKFLKEEFFKSSTYSLTN

SEQ ID NO: 59001 - protein, 375 aa, Petrotoga miotherma
  REGION 1..375: note = tr|A0A2K1P3Y8|A0A2K1P3Y8_9BACT Queuine tRNA-ribosyltransferase OS=Petrotoga miotherma DSM 10691; OX = 1434326 GN=tgt PE=3 SV=1
MDDSPIKFEIIHIDKYTGARRGRIITKHGIVETPVFMPVGTNATVKTLTNSLLNDINTEIILANAFHLYLKPGLEVLEHFQGLHNFMNWEKPILTDSGGFQVFSLPNTRLSDEKVIFKSPLDGSQIELTPEKSLDIQKVIGSDIAMVLDVCINSLSGYDAVKDSVQKTFNWALRSKRYHNNNGQALFGIVQGGLFEDLRNLSLSQITSLDFDGYALGGLAVGEKYQDSEKILKAFGNKLPENKPRYIMGIGSPTMMFLSVENGMDMFDCVLPTRMGRHGTALTWKGKLNLKSSQVKFDQKPIDEECDCYTCKNHSRGYIHHLFKKDEVLGKILLSIHNLRFNISLVEKMREAIENDDFKFLKEEFFNSSTYSLTN

SEQ ID NO: 59002 - protein, 378 aa, Petrotoga mobilis
  REGION 1..378: note = tr|A0A124FEY9|A0A124FEY9_9BACT Queuine tRNA-ribosyltransferase OS=Petrotoga mobilis OX=69499; GN = tgt PE=3 SV=1
MDDSPIKFELIHIDRYTGARRGRIVTKHGTIETPVFMPVGTNATVKTLTNSLLNDINTEIILANAFHLYLRPGLEVLEHFQGLHNFMNWEKPILTDSGGFQVFSLPNTRLTDEKVIFKSPLDGSQIELTPEKSLDIQKVIGSDIAMVLDVCINSLSGYDAVKDSVQKTFNWALRSKRYHNNNHNNGQALFGIVQGGLFEDLRELSLSQITSLDFDGYALGGLAVGEKYQDSEKILKAFGNKLPENKPRYIMGIGSPTMMFLSVENGMDMFDCVLPTRMGRHGTALTWKGKLNLKSSLVKFDQKPIDEECDCYTCKNHSRGYIHHLFKKDEVLGKVLLSIHNLRFNISLVEKMREAIENDNFKFFKDEFFKSSTYSLTN

SEQ ID NO: 59003 - protein, 375 aa, Petrotoga mobilis; identical to SEQ ID NO: 58999
  REGION 1..375: note = tr|A9BF77|A9BF77_PETMO Queuine tRNA-ribosyltransferase OS=Petrotoga mobilis (strain DSM 10674 / SJ95) OX=403833 GN=tgt PE=3 SV=1

SEQ ID NO: 59004 - protein, 378 aa, Petrotoga olearia
  REGION 1..378: note = tr|A0A2K1P5C8|A0A2K1P5C8_9BACT Queuine tRNA-ribosyltransferase OS=Petrotoga olearia DSM 13574; OX = 1122955 GN=tgt PE=3 SV=1
MDDSPIQFELIHIDRYTGARRGRIITKHGIVETPVFMPVGTNATVKTLTNSLLNDINSEIILANAFHLYLRPGLEILEHFKGLHNFMNWEKPILTDSGGFQIFSLPHTKLTDEKVIFKSPLDGSQIELTPEKSLDIQKVIGSDIAMVLDVCINSLSGYDAVKDSVQKTFNWALRSKRYHNNNHNNGQALFGIFQGGLFEDLRELSLSQITSLDFDGYALGGLAVGEKYQDSEKILKAFGNKLPENKPRYIMGIGSPTMMFLSVENGMDMFDCVLPTRMGRHGTALTWKGKLNLKSSLVKFDQKPIDEECDCYTCKNHSRGYIHHLFKKDEVLGKVLLSIHNLRFNISLVEKMREAIENDDFKFFKDEFFKSSTYSLTN

SEQ ID NO: 59005 - protein, 378 aa, Petrotoga sibirica
  REGION 1..378: note = tr|A0A4R8EXL9|A0A4R8EXL9_9BACT Queuine tRNA-ribosyltransferase OS=Petrotoga sibirica OX=156202; GN = tgt PE=3 SV=1
MDDSPIKFELIHTDKYTGARRGRIITKHGTIETPVFMPVGTNATVKTLTNSLLNDINSEIILANAFHLYLRPGLEILEHFKGLHNFMNWEKPILTDSGGFQVFSLPNTKLTDEKVIFKSPLDGSQIELTPEKSLDIQKVIGSDIAMVLDVCINSLSGYDAVKDSVQKTFNWALRSKRYHNNNHNNGQALFGIVQGGLFEDLRELSLSQITSLDFDGYALGGLAVGEKYQDSEKILKAFGNKLPENKPRYIMGIGSPTMMFLSVENGMDMFDCVLPTRMGRHGTALTWKGKLNLKSSQVKFDQKPIDEECDCYTCKNHSRGYIHHLFKKDEVLGKVLLSIHNLRFNISLVEKMREAIENDNFKFLKDEFFKSSTYSLTN

SEQ ID NO: 59006 - protein, 375 aa, Petrotoga sp.
  REGION 1..375: note = tr|A0A328PYS0|A0A328PYS0_9BACT Queuine tRNA-ribosyltransferase OS=Petrotoga sp. 9PW.55.5.1; OX = 1308979 GN=tgt PE=3 SV=1
MEETPIKFELLHVDKYTGARRGRIITKRGIIETPVFMPVGTNATVKGLTKSNLEEINSEIILANAFHLYLRPGLEVLDHFNGLHNFMNWERPILTDSGGFQVFSLPNTKLTDEKVIFKSPLDGSKIELTPEKSLDIQKVIDSDIAMVLDVCVNSKSNYDTVKDSVIKTFNWALRSKEYHNHKTQALFGIVQGGLYKDLRELSLSQITSLDFDGYALGGLAVGEKYQESEKILNSFGNRLPENKPRYIMGIGSPTMMFLSVENGMDMFDCVLPTRMGRHGTALTFEGKINLKSSNVKYDEKPIDEQCDCYTCRNHSRGYIHHLFKKDEILGKVLLSIHNLRFNIFLIEKMRTAIENDDFKYLKEEFFNNSTYSLTN

SEQ ID NO: 59007 - protein, 378 aa, Petrotoga sp.; identical to SEQ ID NO: 59005
  REGION 1..378: note = tr|A0A2S5EEJ9|A0A2S5EEJ9_9BACT Queuine tRNA-ribosyltransferase OS=Petrotoga sp. SL27 OX=1445612; GN = tgt PE=3 SV=1

SEQ ID NO: 59008 - protein, 376 aa, Phaeobacter gallaeciensis
  REGION 1..376: note = tr|V9WG06|V9WG06_9RHOB Queuine tRNA-ribosyltransferase OS=Phaeobacter gallaeciensis DSM 26640 OX=1423144 GN=tgt PE=3 SV=1
MAPKISFDLKATDGKARTGVINTPRGEIRTPAFMPVGTAATVKAMMPESVRATGADILLGNTYHLMLRPTAERIDRLGGLHKFMNWDRPILTDSGGFQVMSLAGLRKLTEKGVTFKSHVDGSKHELTPERSMEIQKLLGSDIVMCFDECPALPADRDRIAESMRLSMRWAERSREAFGDRPGHALFGIMQGGLEQDLREESAEALTKIGFEGYAVGGLAVGEGQEAMFDCLDYAPGFLPEDKPRYLMGVGKPDDIVGAVARGIDMMDCVLPSRSGRTGQAFTRYGVVNIKNARHQDDPRPLDEKCSCPACSNYSRAYLHHVFRSNEMISGMLLTWHNLHYFQEIMQGMRDAIAAGTFEAWQKDFHDTRAQGDIERL

SEQ ID NO: 59009 - protein, 376 aa, Phaeobacter gallaeciensis
  REGION 1..376: note = tr|A0A366WS09|A0A366WS09_9RHOB Queuine tRNA-ribosyltransferase OS=Phaeobacter gallaeciensis; OX = 60890 GN=tgt PE=3 SV=1
MSDRISFDLHATDGKARTGVINTPRGDIRTPAFMPVGTAATVKAMMPESVRETGADILLGNTYHLMLRPTAERIDRLGGLHKFMNWDRPILTDSGGFQVMSLANLRKLTEKGVTFKSHVDGSKHELTPERSMEIQKLLGSDIVMCFDECPALPADRDRIAESMRLSMRWAERSKDAFGDRPGHALFGIMQGGLEQDLREESAAALTKIGFDGYAVGGLAVGEGQEAMFDCLDYAPDYLPQDKPRYLMGVGKPDDIVGAVARGIDMMDCVLPSRSGRTGQVFTRNGVVNIKNARHADDPRPLDEACSCPACSKYSRAYLHHVFRSNEMISGMLLTWHNLHYFQEIMQGMRDAIAAGTFASWQADFHAQRAQGDIEPL

SEQ ID NO: 59010 - protein, 376 aa, Phaeobacter inhibens
  REGION 1..376: note = tr|A0A135INY1|A0A135INY1_9RHOB Queuine tRNA-ribosyltransferase OS=Phaeobacter inhibens OX=221822; GN = tgt PE=3 SV=1
MAPKISFDLKATDGKARTGVINTPRGEIRTPAFMPVGTAATVKAMMPESVRATGADILLGNTYHLMLRPTAERIDRLGGLHKFMNWERPILTDSGGFQVMSLAGLRKLTEKGVTFKSHVDGSKHELTPERSMEIQKLLGSDIVMCFDECPALPADRDRIAESMRLSMRWAERSREAFGDRPGHALFGIMQGGLEQDLREESAEALTKIGFEGYAVGGLAVGEGQEAMFDCLDYAPGFLPEDKPRYLMGVGKPDDIVGAVARGIDMMDCVLPSRSGRTGQAFTRYGVVNIKNARHQDDPRPLDEKCSCPACSNYSRAYLHHVFRSNEMISGMLLTWHNLHYFQEIMGGMRDAIAAGTFEAWQKDFHDTRAQGDIERL

SEQ ID NO: 59011 - protein, 376 aa, Phaeobacter inhibens
  REGION 1..376: note = tr|A0A2I7KA40|A0A2I7KA40_9RHOB Queuine tRNA-ribosyltransferase OS=Phaeobacter inhibens OX=221822; GN = tgt PE=3 SV=1
MAPKISFDLKATDGKARTGVINTPRGEIRTPAFMPVGTAATVKAMMPESVRATGADILLGNTYHLMLRPTAERIDRLGGLHKFMNWERPILTDSGGFQVMSLAGLRKLTEKGVTFKSHVDGSKHELTPERSMEIQKLLGSDIVMCFDECPALPADRDRIAESMRLSMRWAERSREAFGDRPGHALFGIMQGGLEQDLREESAEALTKIGFEGYAVGGLAVGEGQEAMFDCLDYAPGFLPEDKPRYLMGVGKPDDIVGAVARGIDMMDCVLPSRSGRTGQAFTRYGVVNIKNARHQDDPRPLDEKCSCPACSNYSRAYLHHVFRSNEMISGMLLTWHNLHYFQEIMSGMRDAIAAGTFEAWQKDFHDTRAQGDIERL

SEQ ID NO: 59012 - protein, 376 aa, unidentified
  source 1..376: note = Phaeobacter italicus
  REGION 1..376: note = tr|A0A0H5CYN7|A0A0H5CYN7_9RHOB Queuine tRNA-ribosyltransferase OS=Phaeobacter italicus OX=481446; GN = tgt PE=3 SV=1
MAELFNFELKATDGKARTGVINTPRGEIRTPAFMPVGTAATVKAMMPESVRATGADILLGNTYHLMLRPTAERIDRLGGLHKFMNWERPILTDSGGFQVMSLAGLRKLTEKGVTFKSHVDGSKHELTPERSMEIQRLLGSDIVMCFDECPALPADRDRIAESMRLSMRWAERSREAFGDRPGHALFGIMQGGLEQDLREESAEALKKIGFEGYAVGGLAVGEGQEAMFDCLDYAPGFLPEDKPRYLMGVGKPDDIVGAVARGIDMMDCVLPSRSGRTGQAFTRYGVVNIKNARHQDDPRPLDEKCSCPACSNYSRAYLHHVFRSNEMISGMLLTWHNLHYFQEIMGGMRDAIAAGTFEAWQKDFHDTRAQGDIERL

SEQ ID NO: 59013 - protein, 376 aa, unidentified
  source 1..376: note = Phaeobacter piscinae
  REGION 1..376: note = tr|A0A291FPS9|A0A291FPS9_9RHOB Queuine tRNA-ribosyltransferase OS=Phaeobacter piscinae OX=1580596; GN = tgt PE=3 SV=1
MAPKISFDLKATDGKARTGVINTPRGEIRTPAFMPVGTAATVKAMMPESVRATGADILLGNTYHLMLRPTAERIDRLGGLHKFMNWDRPILTDSGGFQVMSLAGLRKLTEKGVTFKSHVDGSKHELTPERSMEIQKLLGSDIVMCFDECPALPADRDRIAESMRLSMRWAERSREAFGDRPGHALFGIMQGGLEQDLREESAEALTKIGFEGYAVGGLAVGEGQEAMFDCLDYAPGFLPEDKPRYLMGVGKPDDIVGAVARGIDMMDCVLPSRSGRTGQAFTRYGVVNIKNARHQDDPRPLDENCTCPACSNYSRAYLHHVFRSNEMISGMLLTWHNLHYFQEIMGGMREAIAAGTFEAWQKDFHDTRAQGDIERL

SEQ ID NO: 59014 - protein, 376 aa, unidentified
  source 1..376: note = Phaeobacter piscinae
  REGION 1..376: note = tr|A0A291G120|A0A291G120_9RHOB Queuine tRNA-ribosyltransferase OS=Phaeobacter piscinae OX=1580596; GN = tgt PE=3 SV=1
MAPKISFDLKATDGKARTGVINTPRGEIRTPAFMPVGTAATVKAMMPESVRATGADILLGNTYHLMLRPTAERIDRLGGLHKFMNWERPILTDSGGFQVMSLAGLRKLTEKGVTFKSHVDGSKHELTPERSMEIQKLLGSDIVMCFDECPALPADRDRIAESMRLSMRWAERSREAFGDRPGHALFGIMQGGLEQDLREESAEALTKIGFEGYAVGGLAVGEGQEAMFECLDYAPGFLPEDKPRYLMGVGKPDDIVGAVARGIDMMDCVLPSRSGRTGQAFTRYGVVNIKNARHQDDPRPLDENCSCPACSTYSRAYLHHVFRSNEMISGMLLTWHNLHYFQEIMGGMRDAIAAGTFEAWQKDFHDTRAQGDIERL

SEQ ID NO: 59015 - protein, 460 aa, unidentified
  source 1..460: note = Phaeobacter porticola
  REGION 1..460: note = tr|A0A1L3I5S5|A0A1L3I5S5_9RHOB Queuine tRNA-ribosyltransferase OS=Phaeobacter porticola; OX = 1844006 GN=tgt PE=3 SV=1
MARAVLADKGKRTRRAASLLSESQAQCSGKAHCRLENQPEIGHIRQAVPVGFLIAQSRVQVADDPVGKSPAVAGPRVRQPKEDIMAPKISFDLKATDGKARTGVINTPRGEIRTPAFMPVGTAATVKAMMPESVRATGADILLGNTYHLMLRPTAERIDRLGGLHKFMNWERPILTDSGGFQVMSLAGLRKLTEKGVTFKSHVDGSKHELTPERSMEIQKLLGSDIVMCFDECPALPADRDRIAESMRLSMRWAERSREAFGDRPGHALFGIMQGGLEQDLREESAEALTKIGFEGYAVGGLAVGEGQEAMFDCLDYAPGFLPEDKPRYLMGVGKPDDIVGAVARGIDMMDCVLPSRSGRTGQAFTRYGVVNIKNARHQDDPRPLDETCSCPACSNYSRAYLHHVFRSNEMISGMLLTWHNLHYFQEIMGGMRDAIAAGTFEAWQKDFHDTRAQGDIERL

SEQ ID NO: 59016 - protein, 376 aa, Phaeobacter sp.
  REGION 1..376: note = tr|A0A384GKI0|A0A384GKI0_9RHOB Queuine tRNA-ribosyltransferase OS=Phaeobacter sp. S60 OX=1569353; GN = tgt PE=3 SV=1
MAPKISFDLKATDGKARTGVINTPRGEIRTPAFMPVGTAATVKAMMPESVRATGADILLGNTYHLMLRPTAERIDRLGGLHKFMNWERPILTDSGGFQVMSLAGLRKLTEKGVTFKSHVDGSKHELTPERSMEIQKLLGSDIVMCFDECPALPADRDRIAESMRLSMRWAERSREAFGDRPGHALFGIMQGGLEQDLREESAEALTKIGFEGYAVGGLAVGEGQEAMFDCLDYAPGFLPEDKPRYLMGVGKPDDIVGAVARGIDMMDCVLPSRSGRTGQAFTRYGVVNIKNARHQDDPRPLDENCTCPACSNYSRAYLHHVFRSNEMISGMLLTWHNLHYFQEIMGGMRDAIAAGTFEAWQKDFHDTRAQGDIERL

SEQ ID NO: 59017 - protein, 375 aa, Phaeobacter sp.
  REGION 1..375: note = tr|A0A254QM68|A0A254QM68_9RHOB Queuine tRNA-ribosyltransferase OS=Phaeobacter sp. 22II1-1F12B; OX = 1317111 GN=tgt PE=3 SV=1
MSRFSYQLNATDGRARTGVISTPRGEIRTPAFMPVGTAATVKAMMPESVAATGADILLGNTYHLMLRPGAERVDRLGGLHKFMNWEKPILTDSGGFQVMSLAGLRKLTEQGVTFKSHVDGSKHELTPERSMEIQRLLGSDIVMCFDECPALPADEKRVAESMRLSMRWAERSRDAFGDRPGHALFGIQQGGVTQELRAESAEKLREIGFDGYAVGGLAVGEGQETMFEVLDYAPEMLPEDRPRYLMGVGKPDDIVGAVKRGIDMMDCVLPSRSGRTGQVFTRRGVVNIKNARHADDPRPLDEECGCPACRNYSRAYLHHVFRAQEMISGMLLTWHNLHYYQDIMAGMRGAISEGRFAAWEAEFHAGRAQGDIEPL

SEQ ID NO: 59018 - protein, 377 aa, unidentified
  source 1..377: note = Phaeodactylibacter luteus
  REGION 1..377: note = tr|A0A5C6RI95|A0A5C6RI95_9BACT Queuine tRNA-ribosyltransferase OS=Phaeodactylibacter luteus; OX = 1564516 GN=tgt PE=3 SV=1
MFSYTLQKTATDCGARAGQIETAHGVIQTPIFMPVGTLGTVKGVHQRELAEDIRAQIILGNTYHLYLRPGLDVLEGAGGLHAFNGWKKPILTDSGGYQVYSLSGQRKITEEGVTFRSHIDGSKHFFSPERAIDIQRSIGADIIMAFDECPPYPCDYRYAKDSMHMTHRWLKRCMAQMGATSGRYGYEQTLFPIVQGSTYPDLRRASAETIAEAGQPGNAIGGLSVGEPAEDMYETTELVCGILPKEKPRYLMGVGTPDNILECIALGVDMFDCVLPTRNARHGMLYTAQGVINIKNAKWKEDFSPIDEHTPCFASQQYSKAYVRHLMHTKELLGPQIASLHNLSFYLWLVGEARKHILEGDFLPWKNQMVKQMQRRL

SEQ ID NO: 59019 - protein, 377 aa, unidentified
  source 1..377: note = Phaeodactylibacter xiamenensis
  REGION 1..377: note = tr|A0A098S911|A0A098S911_9BACT Queuine tRNA-ribosyltransferase OS=Phaeodactylibacter xiamenensis; OX = 1524460 GN=tgt PE=3 SV=1
MFTFQLQHTDPKSAARAGRIETAHGEIQTPIFMPVGTLGTVKGVHQRELESDIRAQIILGNTYHLYLRPGLEILENAGGLHGFNGWKRPMLTDSGGYQVYSLSAQRKIDEEGVTFRSHIDGSSHTFTPERAIDIQRIIGADIIMAFDECPPYPCDYEYAKNSMELTHRWLDRCVKRMAETGGKYGYEQTLFPIVQGSTYPDLRRKSAETIAAAGQPGNAIGGLSVGEPAEAMYETTDQVCHILPKDKPRYLMGVGTPENILECIALGVDMFDCVLPTRNARHGMLYTSEGIINIKNAKWKDDFSPVDASNPCYASQQYSKAYLRHLMHTKELLGPQIASLHNLSFYLWLVGEARQHIIDGDFASWKEEMVKRVQRRL

SEQ ID NO: 59020 - protein, 375 aa, Phaeospirillum fulvum
  REGION 1..375: note = tr|A0A1H6HJQ7|A0A1H6HJQ7_PHAFV Queuine tRNA-ribosyltransferase OS=Phaeospirillum fulvum OX=1082; GN = tgt PE=3 SV=1
MTSFRYERFASDGAARLGRLHTAHGAIDTPAFMPVGTAATVKAMQPESVAATGAQIVLGNTYHLMLRPGAERIDRLGGLHRFMNWSGPILTDSGGFQVMSLAKLRKLDENGVTFQSHHDGSSHHLSPERSMEIQRLLGADITMAFDECTPFPATPAQAAESMRLSMRWAVRSKTAFVERPGHGLFGIVQGGIYPDLRAESAQALIEIGFDGYAVGGLAVGEGQEAMFATLDSTVPLLPEDRPRYLMGVGRPSDIVGAVLRGIDMFDCVMPTRSGRTAQAFTRRGTVNLRNARHQDDPRPLEEGCGCPACRSYSRAYLHHLIRSEEILGPMLLTWHNIQAYQDLMRDLRAAIGEGRVAAFAAEAAAREALGDIPPL

SEQ ID NO: 59021 - protein, 375 aa, Phaeospirillum fulvum
  REGION 1..375: note = tr|S9SF70|S9SF70_PHAFV Queuine tRNA-ribosyltransferase OS=Phaeospirillum fulvum MGU-K5; OX = 1316936 GN=tgt PE=3 SV=1
MTSFRYERFASDGAARLGRLHTAHGAIDTPAFMPVGTAATVKAMQPESVAATGAQIVLGNTYHLMLRPGAERIDRLGGLHRFMNWSGPILTDSGGFQVMSLAKLRKLDENGVTFQSHHDGSSHHLSPERSMEIQRLLGSDITMAFDECTPFPATPAQAAESMRLSMRWAVRSKTAFVERPGHGLFGIVQGGIYPDLRAESAQALIEIGFDGYAVGGLAVGEGQEAMFATLDATVPLLPEDRPRYLMGVGRPSDIIGAVLRGIDMFDCVMPTRSGRTAQAFTRRGTVNLRNARHQDDPRPLEEGCGCPACRSYSRAYLHHLIRSEEILGPMLLTWHNIQAYQDLMRDLRAAIGEGRVAAFAAEAAAREALGDIPPL

SEQ ID NO: 59022 - protein, 375 aa, Phaeospirillum molischianum
  REGION 1..375: note = tr|H8FU18|H8FU18_PHAMO Queuine tRNA-ribosyltransferase OS=Phaeospirillum molischianum DSM 120 OX=1150626 GN=tgt PE=3 SV=1
MTSFRYERFATDGAARLGRLHTAHGAIDTPAFMPVGTAATVKAMQPESVAATGAQIVLGNTYHLMLRPGAERIDRLGGLHRFMNWSGPILTDSGGFQVMSLAKLRKLDENGVTFQSHHDGSSHHLSPERSMEIQRLLGADITMAFDECTPFPATPAQAADSMRLSMRWAVRSKAAFVERPGHGLFGIVQGGIYSDLRAESARALIDIGFDGYAVGGLAVGEGQEAMFATLDATVPLLPEDRPRYLMGVGRPSDIVGAVLRGIDMFDCVMPTRSGRTAQAFTRRGTVNLRNARHQDDPRPLEEGCACPACRSYSRAYLHHLIRSEEILGPMLLTWHNIQAYQDLMRDLRAAIGAGRVAAFAAEAAAREALGDIPAL

SEQ ID NO: 59023 - protein, 370 aa, Phascolarctobacterium faecium
  REGION 1..370: note = tr|A0A3G9HF33|A0A3G9HF33_9FIRM Queuine tRNA-ribosyltransferase OS=Phascolarctobacterium faecium; OX = 33025 GN=tgt PE=3 SV=1
MHAVTYELIKECSRSGARLGKLHTPHGTFDTPMFMPVGTQATVKTLAPEELYAMGSQVILSNTYHLFLRPGHELVKKAGGLHNFMRYDRGMLTDSGGFQVFSLGAMRKIKEEGVTFRSHIDGSKKFLSPEIATEVQEALGADIAMAFDECIPYPADFDYAKESTLRTTRWAKRCLDIHTREDQSMFGIVQGGMYPELRKMSADQLTEMDFAGYGIGGLSVGEPKPLMYDILNQTTEHMPKNKARYLMGVGTPDCIVEAVNLGVDMFDCVFPTRVARNGTAMIPEGRLVVRNAAYAEDFRPIDERCGCYTCRNFSRAYIRHLFKAEELFALRLLTIHNLHFLLDFTKQIRSAIASDTFPELRERFLENYRG

SEQ ID NO: 59024 - protein, 370 aa, Phascolarctobacterium sp.; identical to SEQ ID NO: 59023
  REGION 1..370: note = tr|R6IJR1|R6IJR1_9FIRM Queuine tRNA-ribosyltransferase OS=Phascolarctobacterium sp. CAG:207 OX=1262914 GN=tgt PE=3 SV=1

SEQ ID NO: 59025 - protein, 327 aa, Phascolarctobacterium sp.
  REGION 1..327: note = tr|R6HDV4|R6HDV4_9FIRM Queuine tRNA-ribosyltransferase OS=Phascolarctobacterium sp. CAG:266 OX=1262915 GN=tgt PE=3 SV=1
  VARIANT 310..311: note = Xaa can be any naturally occurring amino acid
MHAVTYELIKECSRSGARLGRLHTPHGTFETPMFMPVGTQATVKTLSPEELYDMGSQVILSNTYHLFLRPGHELVKKAGGLHKFMNYKRGMLTDSGGFQVFSLGAMRKIKEEGVTFRSHIDGSRQFLSPEIATQVQEALGADIAMAFDECIPYPADYDYAKQSTERTTRWAKRCLEAHTREDQSLFGIVQGGMYKDLRKMSADSLTDMDFAGYGIGGLSVGEPKPMMYDILGETTQHLPKNKARYLMGVGTADCIIEGVNLGVDMFDCVFPTRVARNGTAMVPEGRLVVRNKTYAEDFRPIDERCGCYTXXLLYLPQLFARVYQASV

SEQ ID NO: 59026 - protein, 371 aa, Phascolarctobacterium succinatutens
  REGION 1..371: note = tr|R6WU41|R6WU41_9FIRM Queuine tRNA-ribosyltransferase OS=Phascolarctobacterium succinatutens CAG:287 OX=1263101 GN=tgt PE=3 SV=1
MTKHAVTYELIKECPRSGARLGRLHTPHGTFETPMFMPVGTQATVKTLAPEELYDMGSQVILSNTYHLFLRPGHELVRKAGGLHKFMNYKRGMLTDSGGFQVFSLGAMRKITEEGVMFRSHIDGSKQFLSPEVSTQVQEALGADIAMAFDECIPYPADFDYAKRSTERTTRWAKRCLETHTREDQSMFGIVQGGMYPELRRMSVQQLTELDFAGYGIGGLSVGEPKPMMYDILSQTTELMPKDKARYLMGVGTADCIVEAVNLGVDMFDCVFPTRVARNGTAMTHTGRLVVRNATYAEDFRPIEEGCDCYACRNFSRAYIRHLFKAEEIFGLRLLSIHNLHFLLHFAKEIREAIANDCFPEFRERFLENYR

SEQ ID NO: 59027 - protein, 371 aa, Phascolarctobacterium succinatutens
  REGION 1..371: note = tr|E8LGA8|E8LGA8_9FIRM Queuine tRNA-ribosyltransferase OS=Phascolarctobacterium succinatutens YIT 12067 OX=626939 GN=tgt PE=3 SV=1
MTKHAVTYELIKECPRSGARLGRLHTPHGTFETPMFMPVGTQATVKTLAPEELYDMGSQVILSNTYHLFLRPGHELVRKAGGLHKFMNYKRGMLTDSGGFQVFSLGAMRKITEEGVMFRSHIDGSKQFLSPEVSTQVQEALGADIAMAFDECIPYPADFDYAKRSTERTTRWAKRCLETHTREDQSMFGIVQGGMYPELRRMSVQQLTELDFAGYGIGGLSVGEPKSMMYDILSHTTELMPKDKARYLMGVGTADCIVEAVNLGVDMFDCVFPTRVARNGTAMTHTGRLVVRNATYAEDFRPIEEGCDCYACRNFSRAYIRHLFKAEEIFGLRLLSIHNLHFLLHFAKEIREAIANDCFPEFRERFLENYR

SEQ ID NO: 59028 - protein, 372 aa, unidentified
  source 1..372: note = Phenylobacterium deserti
  REGION 1..372: note = tr|A0A328ACR6|A0A328ACR6_9CAUL Queuine tRNA-ribosyltransferase OS=Phenylobacterium deserti; OX = 1914756 GN=tgt PE=3 SV=1
MAAFPFKIDATDGRARTGILATPRGDIRTPAFMPVGTVGTVKAMTVDQVKSTSADIILGNTYHLMLRPTAERVARLGGLHKFMRWDKPILTDSGGFQVMSLSKICKVKEEAVTFQSHLDGSRHVLSPERSMEIQADLLGSDIVMQLDELVSLPTTEDKAADAMRRSARWAQRCKDAFGTRDAQALFGIQQGGTFASLRQESADRLREIGFDGYAIGGLAVGEGHEGMVEVLDYAPEMLPAERPRYLMGVGKPIDIVEAVARGVDMFDCVLPTRSGRHGQAWTWDGPINLKNARFAEDENPLDSNSSVSPSCDYSKAYLHHLVRADEILGQVLLSWHNIAFFQDLMSQLRAAIAEGRLEAFRRTFADRQRRMG

SEQ ID NO: 59029 - protein, 371 aa, unidentified
  source 1..371: note = Phenylobacterium hankyongense
  REGION 1..371: note = tr|A0A328B4J3|A0A328B4J3_9CAUL Queuine tRNA-ribosyltransferase OS=Phenylobacterium hankyongense; OX = 1813876 GN=tgt PE=3 SV=1
MAGFPFTIAATDGEARTGVLSTSRGDIRTPAFMPVGTAATVKALTVDQVAQSGADIILGNTYHLMLRPTAERVARLGGLHRFMRWEKPILTDSGGFQVMSLSKISKVKEDAVTFQSHLDGSRHVLSPERSIEIQADLLGSDIVMQLDECVAWPAEEARAAEAMRLSARWAQRCKNAFGERDTQALFGIQQGSTFEALRRESADRLIEIGFDGYAIGGLAVGEGHEGMVEVLEYAPAMLPADRPRYLMGVGKPIDLVEAVARGVDMFDCVLPTRSGRHGQAWTWEGSVNLKNARFADDDEPLDPTSDVPASRDYSKAYLHHLVKSEEILGQVLLSWHNIGFFQTLMVQLRAAIAEGRLDAFRREFKARQRIG

SEQ ID NO: 59030 - protein, 373 aa, unidentified
  source 1..373: note = Phenylobacterium kunshanense
  REGION 1..373: note = tr|A0A328BU22|A0A328BU22_9CAUL Queuine tRNA-ribosyltransferase OS=Phenylobacterium kunshanense; OX = 1445034 GN=tgt PE=3 SV=1
MGAFPFTVAASDGRARTGVLSTPRGEIRTPAFMPVGTAGTVKALTVEQVAATGADIILGNTYHLMLRPTAERVRRMGGLHRFMRWEKPILTDSGGFQVMSLSKISKVTEEAVTFQSHLDGSRHVLSPERSMEIQADLLGSDIVMQLDELVALPADETRAADAMRRSARWGDRSKAAFGAREAQALFGIQQGGTWEHLRRESAERMIETGFDGYAIGGLAVGEGHEAMVEVLDFAPAMLPADRPRYLMGVGKPIDIVEAVYRGVDMFDCVLPTRSGRHGQAWTWDGPINLKNARFAEDDTPLDAASPVSASRDYSKAYLHHLVKANEILGQVLLSWHNLAFFQALMAEMRAAIAEGRMEAFRAGFASRQLRNAP

SEQ ID NO: 59031 - protein, 371 aa, Phenylobacterium sp.
  REGION 1..371: note = tr|A0A0Q7EYK7|A0A0Q7EYK7_9CAUL Queuine tRNA-ribosyltransferase OS=Phenylobacterium sp. Root1290; OX = 1736445 GN=tgt PE=3 SV=1
MGAFPFEIAATDGAARTGVLKTARGDIRTPAFMPVGTAATVKALTVDQVRSTGADIILGNTYHLMLRPTAERVARLGGLHKFMRWEHPILTDSGGFQVMSLSKIAKVTEESVAFQSHIDGSKHVLTPERSIEIQADLLGSDIVMQLDECVAWPAEEARARQAMQLSARWAQRSKDAFGARDAQALFGIQQGSTFEHLRRESAERLIEIGFDGYALGGLAVGEGHEAMCEVLDYAPAMLPVDRPRYLMGVGKPIDLVEAVARGVDMFDCVLPTRSGRHGQAWTWEGAVNLKNARFAEDDTPLDETSDCPASSQYSKAYLHHLVKAEEILGQVLLSWHNIAHFQALTAAMRAAIAEGRFEQFRRDFKARQRTG

SEQ ID NO: 59032 - protein, 378 aa, Phenylobacterium sp.
  REGION 1..378: note = tr|A0A1E4GUU9|A0A1E4GUU9_9CAUL Queuine tRNA-ribosyltransferase OS=Phenylobacterium sp. SCN 70-31; OX = 1660129 GN=tgt PE=3 SV=1
MTAFPFTVQATDGRARTGVLSTPRGEIRTPAFMPVGTAATVKALTVDQVAATGADILLGNTYHLMLRPTAERVKRLGGLHRFMRWDRPILTDSGGFQVMSLSKIAKVTEEAVTFQSHLDGSRHVLSPERSMEIQADLLGSDIVMQLDELVALPATPERAGEAMRLSARWGQRSKNAFGERDAQNLFAIQQGGLDPALRGESAERLIEIGFDGYAIGGLAVGEGHQAMCEALDFAPGMLPAERPRYLMGVGKPIDIVEAVYRGVDMFDCVLPTRSGRHGQAWTWDGPLNLKNARFAEDETPLDADSDVPASRDYSKAYLHHLVKSDEILGQVLLSWHNLAFFQALMTALRSAVSEGRISAFRRSFAARQSARPGSDSGG

SEQ ID NO: 59033 - protein, 371 aa, unidentified
  source 1..371: note = Phenylobacterium zucineum
  REGION 1..371: note = tr|B4R9Q4|B4R9Q4_PHEZH Queuine tRNA-ribosyltransferase OS=Phenylobacterium zucineum (strain HLK1) OX=450851 GN=tgt PE=3 SV=1
MAAFPFTIAATDGKARTGVLSTPRGDIRTPAFMPVGTAGTVKALTVEQVAATGADILLGNTYHLMLRPTAERVRRLGGLHRFMRWEKPILTDSGGFQVMSLSQISKVTEDSVTFQSHLDGSRHVLTPERSIEIQADLLGSDIVMQLDELVALPAERDRAAEAMRRSARWGQRCRDAFGAREAQALFAIQQGGTDEALRAESAERLREIGFDGYAIGGLAVGEGHEAMCEVLDYAPGMLPAERPRYLMGVGKPIDIVEAVYRGVDMFDCVLPTRSGRHGQAWTWDGPLNLKNARFAEDEEPLDPTIPVSASRDYSKAYLHHLVKAGEILGQVLLSWHNVAFFQALMGEMRAAIAERRMEAFRRDFAARQKAR

SEQ ID NO: 59034 - protein, 373 aa, unidentified
  source 1..373: note = Phenylobacterium zucineum
  REGION 1..373: note = tr|A0A2W5P1V2|A0A2W5P1V2_9CAUL Queuine tRNA-ribosyltransferase OS=Phenylobacterium zucineum; OX = 284016 GN=tgt PE=3 SV=1
MSAFPFTIAATEGKARTGVLSTPRGEIRTPAFMPVGTAGTVKALTVEQVGATGADIILGNTYHLMLRPTAERVRRLGGLHRFMRWEKPILTDSGGFQVMSLSKISKVTEEAVTFQSHIDGSRHVLSPERSMEIQADLLGSDIVMQLDELVALPADENRAAEAMRRSARWGTRSKNAFGERDSQALFGIQQGGTWEHLRRESAERMIETGFDGYAIGGLAVGEGHEAMCEVLDFAPGMLPVDRPRYLMGVGKPIDIVEAVFRGVDMFDCVLPTRSGRHGQAWTWDGPINLKNARFAEDDTPLDATSTVSASRDYSKAYLHHLVKAEEILGQVLLSWHNLAFFQALMAEMRAAIAEGRMATFRADFAARQQRPAA

SEQ ID NO: 59035 - protein, 386 aa, Phocoenobacter uteri
  REGION 1..386: note = tr|A0A379C902|A0A379C902_9PAST Queuine tRNA-ribosyltransferase OS=Phocoenobacter uteri OX=146806; GN = tgt PE=3 SV=1
MKYTLHKTSGVARRGHMSFERNVNGEIKEFKVQTPAFMPVGTYGTVKGMTPEEVAATGAEILLGNTFHLWLRPGQDVMKMHGDLHGFMKWDAPILTDSGGFQVFSLAKMRKITEEGVNFRHPINGSKIFLSPEKSMEIQYDLGSDIVMIFDECAPYPSTFDYTKQSMEMSARWAKRSRQRFDELGNKNALFGIVQGGVFEELRKISVDELLKIGFDGYAVGGLAVGEPKEDMHRILEFTCPLLPADKPRYLMGVGKPEDLVEGVRRGIDMFDCVMPTRNARNGHLFVTDGVVKIRNAKYREDTSPLDPHCDCYTCKNYTKAYLYHLDKCGEILGARLNTIHNLRYYQRLMAEIRQSIDEDRFDDFVVEFYQRMGREVPPLQKEVQK

SEQ ID NO: 59036 - protein, 370 aa, unidentified
  source 1..370: note = Phorcysia thermohydrogeniphila
  REGION 1..370: note = tr|A0A4R1GAI0|A0A4R1GAI0_9BACT Queuine tRNA-ribosyltransferase OS=Phorcysia thermohydrogeniphila; OX = 936138 GN=tgt PE=3 SV=1
MEFQVIRKDGNARYGILRGTHGETETPCFMPVGTLGAVKGVTWDRIGQMGYSLVLSNVYHLYLRPGLEILQEAGGIHPFTGWKGLILTDSGGFQVFSLSKLMKITEDGIYFKSHIDGSEHFFSPEFVVEFEEKIGVDIGMVLDECTPYPATYEYAKHSMERTVRWALRSIRARTTDKTAIFAIVQGGVYNDLRLKCVEMLSELPFEGFAIGGLSVGEPKDEMYRITRLVASQLPEDKPRYLMGVGKPEDILEAVEAGVDMFDCVIPTRNARNGTLFTSRGKINIKAAKFKRDFSPVDPECDCYTCKNFSRAYLRHLYVSGEINAAILNTIHNLHFYGRLMKDIREAIKKGKFQEFKRNFLEKYSSQEGSG

SEQ ID NO: 59037 - protein, 370 aa, unidentified
  source 1..370: note = Phormidesmis priestleyi
  REGION 1..370: note = tr|A0A2W4ZR99|A0A2W4ZR99_9CYAN Queuine tRNA-ribosyltransferase OS=Phormidesmis priestleyi; OX = 268141 GN=tgt PE=3 SV=1
MTAFTYQLQAQCSCTKARAGIFHTPHGPVHTPRFMPVGTLANVKTVTPDQLKSCQAEMVLANTYHLHLQPGEDLVAEAGGVHQFMGWDGPMLTDSGGFQVFSLSEMRKVTDEGATFRSPRDGRIIEMPPERSIEIQNQLGADVIMAFDECPPYPATREAVVAATDRTYRWLKRCIQAHDRTDQALFGIVQGGTYLDLRAEAAKDLADLDLLGYAIGGVSVGEPPALIEKIVQATTPLLPYDKPRYLMGVGTYREMAQAIAAGIDLFDCVIPTRLARHGAALTQGDRWNLKNSRFRRDLTPIDADCPCYTCQTFTRAYLCHLLHAKELLVYTLLSIHNITELIRFTTTIREAILNDRFVELFGHWLSDASG

SEQ ID NO: 59038 - protein, 398 aa, unidentified
  source 1..398: note = Phormidesmis priestleyi
  REGION 1..398: note = tr|A0A0N8KMW8|A0A0N8KMW8_9CYAN Queuine tRNA-ribosyltransferase OS=Phormidesmis priestleyi Ana; OX = 1666911 GN=tgt PE=3 SV=1
MTSAIASSFSYQLQAKCSCTKARAGIFHTPHGPVHTPRFMPVGTLANVKTITPAQLKDCKAEMVLANTYHLHLQPGEDLIAEAGGVHKFMGWDGPMLTDSGGFQVFSLSEMRTVTDEGATFRSPRDGRIIEMPPERSIEIQNQLGADVIMAFDECPPYPATREAVVSATDRTYRWLKRCINAHDRPDQALFPIVQGGTYLDLRADAAKALAQLDMPGYAIGGVSVGEPPALIEKIVQATTPLLPESKPRYLMGVGTYKEMAQAIAAGIDLFDCVIPTRLARHGAALVGSMSPEIMSPELAHGDPSSANGFSSENPSYRWNLKNARFRRDLSPLDPNCPCYTCQNFTRAYLCHLIHAKELLAYTLLSIHNITELIRFTTAIREAILADRFSQAFAKWLM

SEQ ID NO: 59039 - protein, 392 aa, Phormidium ambiguum
  REGION 1..392: note = tr|A0A1U7INJ3|A0A1U7INJ3_9CYAN Queuine tRNA-ribosyltransferase OS=Phormidium ambiguum IAM M-71; OX = 454136 GN=tgt PE=3 SV=1
MNSGFQFVCQACCDRSQARAGVFSTPHGEVETPRFMPVGTLATVKTVTPRQLQATGAQMVLANTYHLHLQPGEQIVAGAGGLHKFMAWKGPILTDSGGFQVFSLSELRKITENGVTFRSPRDGRIIELTPEKSIQIQNALGADVIMAFDECPPYPATREDVVLATERTYRWLKRCITAHKRQDQALFGIVQGGVFLDLRQEAAVSLRELDLPGYAIGGVSVGEPPELIEKIVRATAPMLPAEKPRYLMGVGTYREMVQAIAAGIDLFDCVIPTRWARHGTVVVAGERWNLKNARFREDFTPLDESCDCYTCQNFTRAYLCHLVRSREILAYTLLSIHNITELVRFTQKIRAAILRGSFTEDFAEWLAPTPSSLEPSHVKIYGNSENCVGKEG

SEQ ID NO: 59040 - protein, 339 aa, Phormidium sp.
  REGION 1..339: note = tr|A0A0P8DPW8|A0A0P8DPW8_9CYAN Queuine tRNA-ribosyltransferase OS=Phormidium sp. OSCR OX=1666905; GN = tgt PE=3 SV=1
MPVGTLANVKTLTPAQLKGTGAQMVLANTYHLHLQPGEDIVAEAGGLHRFMGWEGPMLTDSGGFQVFSLSEMRTITEEGVTFRSPRDGARIHLTPERSIEIQNALGADVIMAFDECPPYPASREAVELATARTERWLKRCIDYHARSPQAQQQALFGIVQGGVYTDLRAKAAAALQRLELPGYAIGGVSVGEPPELIEAIVKATTPLLPQHKPRYLMGVGTYREMAGAIASGIDLFDCVIPTRLGRHGAAFVRGERWNLKNARFRRDYEPLDEECPCYACENFSRAYLSHLVRSRELLAYTLLSIHNITELIRFTQRIRQSILDGCFAREFASWLKPAP

SEQ ID NO: 59041 - protein, 374 aa, Phormidium sp.
  REGION 1..374: note = tr|A0A522X971|A0A522X971_9CYAN Queuine tRNA-ribosyltransferase OS=Phormidium sp. SL48-SHIP; OX = 2518363 GN=tgt PE=3 SV=1
MNQFFKYHIQAICPDTGARAGVFETPHGIVETPRFMPVGTLANVKTLTPAQLQGTGAQMVLANTYHLHLQPGEDIVAEAGGLHRFMGWDGPMLTDSGGFQVFSLSEMRTITEEGVTFRSPRDGARIHLTPERSMEIQNALGADVIMAFDECPPYPASREAVELATARTERWLKRCIDYHQKSPQAQQQALFGIVQGGVYTDIRAKAAAALQRLELPGYAIGGVSVGEPPELIEAIVKATTPLLPPHKPRYLMGVGTYREMAGAIASGIDLFDCVIPTRLGRHGAAFVRGERWNLKNARFRRDYGPLDEDCPCYACENFSRAYLSHLVRSQELLAYTLLSIHNITELIRFTQRIRQSILDGCFAQDFAAWLKPAP

SEQ ID NO: 59042 - protein, 392 aa, unidentified
  source 1..392: note = Phormidium tenue
  REGION 1..392: note = tr|A0A1U7J5H8|A0A1U7J5H8_9CYAN Queuine tRNA-ribosyltransferase OS=Phormidium tenue NIES-30; OX = 549789 GN=tgt PE=3 SV=1
MRPVFSLSDRFILTKAFSFSCDARCSHTQARAGTFTTPHGPVHTPRFMPVGTLANVKTVTPAQLATTGAQMVLSNTYHLHLQPGEDIVAEAGGLHRFMGWDGPMLTDSGGFQVFSLSQMRTITEDGVTFKSPKDGRIINIRPETSIQIQNDLGADVIMAFDECPPYPCSRETIKASTDRTWRWLQRCVEAHQRPDQALFGIVQGGVYPDLRTEAAQQLATLDLPGYAIGGVSVGEPPELIETIVKATAPCLPEHKPRYLMGVGTYREMTQAIAAGVDLFDCVIPTRLARHGAALVAGERWNLKNQRFRRDYTPIDAACPCYTCQNFTRAYLCHLIHAKEMLAFTLISIHNITELVRFTQRIREAILGDRFTTEFAHWLAPNAIAADLDAPPS

SEQ ID NO: 59043 - protein, 339 aa, unidentified
  source 1..339: note = Phormidium willei
  REGION 1..339: note = tr|A0A168U241|A0A168U241_9CYAN Queuine tRNA-ribosyltransferase OS=Phormidium willei BDU 130791; OX = 399101 GN=tgt PE=3 SV=1
MPVGTLANVKTLTPAQLQGTGAQMVLANTYHLHLQPGEDIVAEAGGLHRFMGWDGPMLTDSGGFQVFSLSEMRTITEEGVTFRSPRDGARIHLTPERSMEIQNALGADVIMAFDECPPYPASREAVELATARTERWLKRCIDYHQKSPQAQQQALFGIVQGGVYTDLRAKAAAALQRLELPGYAIGGVSVGEPPELIESIVKATTPLLPPDKPRYLMGVGTYREMAGAIASGIDLFDCVIPTRLGRHGAAFVRGERWNLKNARFRRDYGPLDEDCPCYACENFSRAYLSHLVRSQELLAYTLLSIHNITELIRFTQRIRQSILDGCFAQDFADWLKRAP

SEQ ID NO: 59044 - protein, 375 aa, Photobacterium angustum
  REGION 1..375: note = tr|Q1ZRC7|Q1ZRC7_PHOAS Queuine tRNA-ribosyltransferase OS=Photobacterium angustum (strain S14 / CCUG 15956) OX=314292 GN=tgt PE=3 SV=1
MKFELDKTQGRARRGRLQFERGTVETPAFMPVGTYGTVKGMTPEEVKDTGAQILLGNTFHLWLRPGQEVMKLHGDLHDFMQWQGPILTDSGGFQVFSLGSLRKITEEGVHFRNPVNGDKIFMDAEKSMEIQKDLGSDIVMIFDECTPYPATHDEAKKSMEMSLRWAQRSRNHFDKQENPNALFGIVQGGVYEDLRDVSVEGLTKIGFDGYAVGGLAVGEPKEDMHRILEHTCPQLPEDKPRYLMGVGKPEDLVEGVRRGIDMFDCVMPTRNARNGHLFVTGGVIKIRNAKHKTDTTPLDPHCDCYTCKNYSKAYLYHLDKCNEILGARLNTIHNLRYYQRLMASIRKSIEEDRFDAFVEEFYARRDREVPPLQNV

SEQ ID NO: 59045 - protein, 375 aa, Photobacterium angustum; identical to SEQ ID NO: 59044
  REGION 1..375: note = tr|A0A2S7VXC7|A0A2S7VXC7_PHOAN Queuine tRNA-ribosyltransferase OS=Photobacterium angustum OX=661; GN = tgt PE=3 SV=1

SEQ ID NO: 59046 - protein, 376 aa, Photobacterium aphoticum
  REGION 1..376: note = tr|A0A090RMA6|A0A090RMA6_9GAMM Queuine tRNA-ribosyltransferase OS=Photobacterium aphoticum; OX = 754436 GN=tgt PE=3 SV=1
MKFELDKTQGRARRGRLQFERGTVETPAFMPVGTYGTVKGMTPEEVKETGAQILLGNTFHLWLRPGQEVMKMHGDLHDFMNWQGPILTDSGGFQVFSLGAMRKITEEGVHFRNPVNGDKIFMDAEKSMEIQYDLGSDVVMIFDECTPYPATHDEAKQSMEMSLRWAQRSRNHFDKLGNKNALFGIVQGGVYEDLRDVSVDGLTKIGFDGYAVGGLAVGEPKEDMHRILEHTCPQLPVDKPRYLMGVGKPEDLVEGVRRGIDMFDCVMPTRNARNGHLFVTGGVIKIRNAKHKTDTTPLDPHCDCYTCRNYTKAYLYHLDKCNEILGARLNTIHNLRYYQRLMESIRKAIDEDRFDAFVEEFYARRNREVPPLNDNQ

SEQ ID NO: 59047 - protein, 376 aa, unidentified
  source 1..376: note = Photobacterium aquae
  REGION 1..376: note = tr|A0A0J1H2H9|A0A0J1H2H9_9GAMM Queuine tRNA-ribosyltransferase OS=Photobacterium aquae OX=1195763; GN = tgt PE=3 SV=1
MKFELDKTQGNARRGRLVFERGTVETPAFMPVGTYGTVKGMTPEEVKDTGAQILLGNTFHLWLRPGQEVMKLHGDLHDFMNWQGPILTDSGGFQVFSLGAMRKITEEGVHFRNPVNGDKIFMDAEKSMQIQYDLGSDIVMIFDECTPYPATHDEAKTSMEMSLRWAQRSRNEFDRQENPNALFGIVQGGVYEDLRDVSVEGLTKIGFDGYAVGGLAVGEPKEDMHRILEHTCPQLPQDKPRYLMGVGKPEDLVEGVRRGIDMFDCVMPTRNARNGHLFVTGGVIKIRNAKHKTDTTPLDPHCDCYTCRNYSKAYLYHLDKCNEILGARLNTIHNLRYYQRLMASIRKAIEEDRFDAFVEEFYARRNREVPPLNDNN

SEQ ID NO: 59048 - protein, 389 aa, Photobacterium aquimaris
  REGION 1..389: note = tr|A0A2T3IJI0|A0A2T3IJI0_9GAMM Queuine tRNA-ribosyltransferase OS=Photobacterium aquimaris; OX = 512643 GN=tgt PE=3 SV=1
MGTCQIVSLAFGGLVKFELDKTQGRARRGRLQFERGTVETPAFMPVGTYGTVKGMTPEEVEDTGAQIILGNTFHLWLRPGQEVMKMHGDLHDFMQWKGPILTDSGGFQVFSLGALRKITEEGVHFRNPVNGDKIFMDAEKSMEIQKDLGSDIVMIFDECTPYPATHDEAKKSMEMSLRWAQRSRNHFDKLENPNALFGIVQGGVYEDLRDVSVAGLTKIGFDGYAVGGLAVGEPKEDMHRVLEHTCPQLPEDKPRYLMGVGKPEDLVEGVRRGIDMFDCVMPTRNARNAHLFVTGGVIKIRNAKHKTDTTPLDPDCDCYTCRHYSKAYLYHLDKCNEILGARLNTIHNLRYYQRLMASIRKSIEEDRFDAFVEEFYARRDREVPPLQIV

SEQ ID NO: 59049 - protein, 389 aa, Photobacterium aquimaris
  REGION 1..389: note = tr|A0A2T3I0I6|A0A2T3I0I6_9GAMM Queuine tRNA-ribosyltransferase OS=Photobacterium aquimaris; OX = 512643 GN=tgt PE=3 SV=1
MGTCQIVSLAFGGLVKFELDKTQGRARRGRLQFERGTVETPAFMPVGTYGTVKGMTPEEVEDTGAQIILGNTFHLWLRPGQEVMKMHGDLHDFMQWKGPILTDSGGFQVFSLGALRKITEEGVHFRNPVNGDKIFMDAEKSMEIQKDLGSDIVMIFDECTPYPATHDEAKKSMEMSLRWAQRSRNHFDKLENPNALFGIVQGGVYEDLRDVSVAGLTKIGFDGYAVGGLAVGEPKEDMHRILEHTCPQLPEDKPRYLMGVGKPEDLVEGVRRGIDMFDCVMPTRNARNAHLFVTGGVIKIRNAKHKTDTTPLDPDCDCYTCRHYSKAYLYHLDKCNEILGARLNTIHNLRYYQRLMASIRKSIEEDRFDAFVEEFYARRDREVPPLQIV

SEQ ID NO: 59050 - protein, 375 aa, unidentified
  source 1..375: note = Photobacterium carnosum
  REGION 1..375: note = tr|A0A2N4UMT3|A0A2N4UMT3_9GAMM Queuine tRNA-ribosyltransferase OS=Photobacterium carnosum; OX = 2023717 GN=tgt PE=3 SV=1
MKFELDKTQGRARRGRLQFERGTVETPAFMPVGTYGTVKGMTPEEVAETGAQIILGNTFHLWLRPGQEVMKMHGDLHDFMQWKGPILTDSGGFQVFSLGALRKITEEGVHFRNPVNGDRIFMDAEKSMEIQKDLGSDIVMIFDECTPYPATHDEAKKSMEMSLRWAQRSRNHFNELENKNALFGIVQGGVYEDLRDVSVEGLTNIGFDGYAVGGLAVGEPKEDMHRILEHTCPKLPADKPRYLMGVGKPEDLVEGVRRGIDMFDCVMPTRNARNAHLFVTGGVIKIRNAKHKIDTTSLDPECDCYTCKNYSKAYLYHLDKCNEILGARLNTIHNLRYYQRLMASIRKAIDEDRFDAFVEEFYARRDREVPPFQIV

SEQ ID NO: 59051 - protein, 377 aa, unidentified
  source 1..377: note = Photobacterium damsela
  REGION 1..377: note = tr|A0A1Q9H758|A0A1Q9H758_PHODP Queuine tRNA-ribosyltransferase OS=Photobacterium damsela subsp. piscicida OX=38294 GN=tgt PE=3 SV=1
MKLKFELDKKQGNARRGRLIFERGTVETPAFMPVGTYGTVKGMTPEEVKDTGAQILLGNTFHLWLRPGQEVMKLHGDLHDFMQWQGPILTDSGGFQVFSLGDIRKITEEGVHFRNPVNGDKIFMDAEKSMEIQKDLGSDIVMIFDECTPYPATHDEAKKSMEMSLRWAQRSRNHFDKLDNQNSLFGIVQGGVYEELRDVSVEGLTKIGFDGYAVGGLAVGEPKEDMHRVLEHTCLQLPEDKPRYLMGVGKPEDLVEGVRRGIDMFDCVMPTRNARNGHLFVTGGVVKIRNASHKTDTTPLDPQCDCYTCRNYSKAYLHHLDKCNEILGARLNTIHNLRYYQRLMASIRKAIEEDRFDAFVEEFYARRNREVPPLQKG

SEQ ID NO: 59052 - protein, 377 aa, Photobacterium damselae
  REGION 1..377: note = tr|D0YZK7|D0YZK7_PHODD Queuine tRNA-ribosyltransferase OS=Photobacterium damselae subsp. damselae CIP 102761 OX=675817 GN=tgt PE=3 SV=1
MKLKFELDKKQGNARRGRLIFERGTVETPAFMPVGTYGTVKGMTPEEVKDTGAQILLGNTFHLWLRPGQEVMKLHGDLHDFMQWQGPILTDSGGFQVFSLGDIRKITEEGVHFRNPVNGDKIFMDAEKSMEIQKDLGSDIVMIFDECTPYPATHDEAKKSMEMSLRWAQRSRNHFDKLDNQNSLFGIVQGGVYEDLRDVSVEGLTKIGFDGYAVGGLAVGEPKEDMHRVLEHTCPQLPEDKPRYLMGVGKPEDLVEGVRRGIDMFDCVMPTRNARNGHLFVTGGVVKIRNASHKTDTTPLDPQCDCYTCRNYSKAYLHHLDKCNEILGARLNTIHNLRYYQRLMASIRKAIEEDRFDAFVEEFYARRNREVPPLQKG

SEQ ID NO: 59053 - protein, 377 aa, Photobacterium damselae; identical to SEQ ID NO: 59052
  REGION 1..377: note = tr|A0A2T3IBV2|A0A2T3IBV2_9GAMM Queuine tRNA-ribosyltransferase OS=Photobacterium damselae; OX = 38293 GN=tgt PE=3 SV=1

SEQ ID NO: 59054 - protein, 375 aa, Photobacterium frigidiphilum
  REGION 1..375: note = tr|A0A2T3JF65|A0A2T3JF65_9GAMM Queuine tRNA-ribosyltransferase OS=Photobacterium frigidiphilum; OX = 264736 GN=tgt PE=3 SV=1
MKFELDKTQGRARRGRLQFERGTVETPAFMPVGTYGTVKGMTPEEVKETGAQILLGNTFHLWLRPGQEVMKLHGDLHDFMQWHGPILTDSGGFQVFSLGATRKITEEGVHFRNPVNGDKVFMDAEKSMEIQYDLGSDIVMIFDECTPYPATHDEAKKSMEMSLRWAQRSRNHFDKQENPNALFGIIQGGVYEDLRDVSVDGLTNIGFDGYAVGGLAVGEPKEDMHRILEHTCPQLPEDKPRYLMGVGKPEDLVEGVRRGIDMFDCVMPTRNARNGHLFVTGGVIKIRNAKHKTDTTPLDPHCDCYTCLNYSKAYLYHLDKCNEILGSRLNTIHNLRYYQRLMASIRSAIEEDRFDAFVEEFYARRDREVPPLQNA

SEQ ID NO: 59055 - protein, 376 aa, Photobacterium gaetbulicola
  REGION 1..376: note = tr|A0A0B9FT35|A0A0B9FT35_9GAMM Queuine tRNA-ribosyltransferase OS=Photobacterium gaetbulicola; OX = 1295392 GN=tgt PE=3 SV=1
MKFELDKTQGRARRGRLQFERGTVETPAFMPVGTYGTVKGMTPEEVKETGAQILLGNTFHLWLRPGQEVMKMHGDLHDFMQWQGPILTDSGGFQVFSLGDIRKITEEGVHFRNPVNGDKIFMDAEKSMEIQKDLGSDVVMIFDECTPYPATHDEAKKSMEMSLRWAQRSRNHFDKLGNKNALFGIVQGSVYEDLRDVSVEGLTKIGFDGYAVGGLAVGEPKEDMHRVLEHTCPQLPEDKPRYLMGVGKPEDLVEGVRRGIDMFDCVMPTRNARNGHLFVTGGVIKIRNAKHKTDTTPLDPHCDCYTCRNYSKAYLYHLDKCNEILGARLNTIHNLRYYQRLMESIRKAIEEDRFDVFVEEFYARRNREVPPLNDNK

SEQ ID NO: 59056 - protein, 376 aa, Photobacterium gaetbulicola; identical to SEQ ID NO: 59055
  REGION 1..376: note = tr|A0A0C5WDC8|A0A0C5WDC8_9GAMM Queuine tRNA-ribosyltransferase OS=Photobacterium gaetbulicola Gung47 OX=658445 GN=tgt PE=3 SV=1

SEQ ID NO: 59057 - protein, 375 aa, unidentified
  source 1..375: note = Photobacterium galatheae
  REGION 1..375: note = tr|A0A066RWY8|A0A066RWY8_9GAMM Queuine tRNA-ribosyltransferase OS=Photobacterium galatheae; OX = 1654360 GN=tgt PE=3 SV=1
MKFELDKSLGRARRGRLVFERGTVETPAFMPVGTYGTVKGMTPEEVKETGAQILLGNTFHLWLRPGQEVMKLHGDLHDFMQWQGPILTDSGGFQVFSLGDIRKITEEGVHFRNPVNGDKIFMDAEKSMEIQYDLGSDVVMIFDECTPYPATHEEAKQSMEMSLRWAKRSRNHFDKLENKNALFGIVQGGVYEDLRDVSVKGLTEIGFDGYAVGGLAVGEPKEDMHRVLEHTCPQLPEDKPRYLMGVGKPEDLVEGVRRGIDMFDCVMPTRNARNGHLFVTGGVIKIRNAKHKTDTSPLDPHCDCYTCRNYSKAYLYHLDKCNEILGARLNTIHNLRYYQRLMESIRQAIEEDRFDAFVEEFYARRNREVPPLKDV

SEQ ID NO: 59058 - protein, 376 aa, Photobacterium ganghwense
  REGION 1..376: note = tr|A0A0J1H7S8|A0A0J1H7S8_9GAMM Queuine tRNA-ribosyltransferase OS=Photobacterium ganghwense; OX = 320778 GN=tgt PE=3 SV=1
MKFELDKTQGRARRGRLKFERGTVETPAFMPVGTYGTVKGMTPEEVKDTGAQILLGNTFHLWLRPGQEVMKLHGDLHDFMQWQGPILTDSGGFQVFSLGDIRKITEEGVHFRNPVNGDKIFMDAEKSMEIQNDLGSDIVMIFDECTPYPATHDEAKKSMEMSLRWAQRSRNHHDKLGNKNALFGIVQGSVYEDLRDVSVEGLTNIGFDGYAVGGLAVGEPKEDMHRVLEHTCPQLPEDKPRYLMGVGKPEDLVEGVRRGIDMFDCVMPTRNARNGHLFVTGGVIKIRNAKHKTDTSPLDPHCDCYTCRNYSKAYLYHLDKCNEILGARLNTIHNLRYYQRLMASIRKAIEEDRFDAFVEEFYARRNREVPPLNENN

SEQ ID NO: 59059 - protein, 375 aa, Photobacterium halotolerans
  REGION 1..375: note = tr|A0A0F5VIA6|A0A0F5VIA6_9GAMM Queuine tRNA-ribosyltransferase OS=Photobacterium halotolerans; OX = 265726 GN=tgt PE=3 SV=1
MKFELDKTQGRARRGRLVFERGTVETPAFMPVGTYGTVKGMTPEEVKDTGAQILLGNTFHLWLRPGQEVMKLHGDLHDFMQWQGPILTDSGGFQVFSLGDIRKITEEGVHFRNPVNGDKIFMDAEKSMEIQYDLGSDIVMIFDECTPYPATHDEAKTSMEMSLRWAKRSRNHFDKMGNKNALFGIVQGSVYEDLRDVSVKGLTEIGFDGYAVGGLAVGEPKEDMHRVLEHTCPQLPEDKPRYLMGVGKPEDLVEGVRRGIDMFDCVMPTRNARNGHLFVTGGVIKIRNAKHKTDTSPLDPHCDCYTCRNYSKAYLYHLDKCNEILGARLNTIHNLRYYQRLMESIRQAIEEDRFDAFVEEFYARRDREVPPLKNV

SEQ ID NO: 59060 - protein, 375 aa, Photobacterium iliopiscarium
  REGION 1..375: note = tr|A0A0D8P0Z1|A0A0D8P0Z1_9GAMM Queuine tRNA-ribosyltransferase OS=Photobacterium iliopiscarium; OX = 56192 GN=tgt PE=3 SV=1
MKFELDKTQGRARRGRLQFERGTVETPAFMPVGTYGTVKGMTPEEVEETGAQIILGNTFHLWLRPGQEVMKMHGDLHDFMQWKGPILTDSGGFQVFSLGALRKITEEGVHFRNPVNGDKIFMDAEKSMEIQKDLGSDIVMIFDECTPYPATHDEAKKSMEMSLRWAQRSRNHFDELENPNALFGIVQGGVYEDLRDVSVEGLTKIGFDGYAVGGLAVGEPKEDMHRILEHTCPKLPEDKPRYLMGVGKPEDLVEGVRRGIDMFDCVMPTRNARNAHLFVTGGVIKIRNAKHKTDTTSLDPECDCYTCRHYSKAYLYHLDKCNEILGARLNTIHNLRYYQRLMASIRKSIEEDRFDAFVEEFYARRDREVPPLQIV

SEQ ID NO: 59061 - protein, 375 aa, Photobacterium indicum
  REGION 1..375: note = tr|A0A2T3LC89|A0A2T3LC89_9GAMM Queuine tRNA-ribosyltransferase OS=Photobacterium indicum OX=81447; GN = tgt PE=3 SV=1
MKFELDKTQGRARRGRLQFERGTVETPAFMPVGTYGTVKGMTPEEVKDTGAQILLGNTFHLWLRPGQEVMKLHGDLHDFMQWHGPILTDSGGFQVFSLGATRKITEEGVHFRNPVNGDKVFMDAEKSMEIQYDLGSDIVMIFDECTPYPATHDEAKKSMEMSLRWAQRSRNHFDKQENPNALFGIIQGGVYEDLRDVSVDGLTNIGFDGYAVGGLAVGEPKEDMHRILEHTCPQLPEDKPRYLMGVGKPEDLVEGVRRGIDMFDCVMPTRNARNGHLFVTGGVIKIRNAKHKTDTTPLDPHCDCYTCRNYSKAYLYHLDKCNEILGSRLNTIHNLRYYQRLMASIRSAIEEDRFDAFVEEFYARRDREVPPLKNA

SEQ ID NO: 59062 - protein, 375 aa, Photobacterium jeanii
  REGION 1..375: note = tr|A0A178KC79|A0A178KC79_9GAMM Queuine tRNA-ribosyltransferase OS=Photobacterium jeanii OX=858640; GN = tgt PE=3 SV=1
MKFELDKSQGRARRGRLKFERGTVETPAFMPVGTYGTVKGMTPEEVKDTGAQILLGNTFHLWLRPGQEVMKLHGDLHDFMQWQGPILTDSGGFQVFSLGAMRKITEEGVHFRNPVNGDKIFMDAEKSMEIQYDLGSDIVMIFDECTPYPATHDEAKKSMEMSLRWAQRSRNHFDKQENPNALFGIVQGGVYEDLRDVSVEGLTKIGFDGYAVGGLAVGEPKEDMHRILEHTCPQLPEDKPRYLMGVGKPEDLVEGVRRGIDMFDCVMPTRNARNGHLFVTGGVIKIRNAKHKTDTTPLDPHCDCYTCRNYSKAYLYHLDKCNEILGARLNTIHNLRYYQRLMESIRKAIDEDRFDAFVEEFYARRDREVPPLKNA

SEQ ID NO: 59063 - protein, 389 aa, Photobacterium kishitanii
  REGION 1..389: note = tr|A0A2T3QUN8|A0A2T3QUN8_9GAMM Queuine tRNA-ribosyltransferase OS=Photobacterium kishitanii; OX = 318456 GN=tgt PE=3 SV=1
MGICQIVSLAFGGLVKFELDKTQGRARRGRLQFERGTVETPAFMPVGTYGTVKGMTPEEVEDTGAQIILGNTFHLWLRPGQEVMKMHGDLHDFMQWKGPILTDSGGFQVFSLGALRKITEEGVHFRNPVNGDKIFMDAEKSMEIQKDLGSDIVMIFDECTPYPATHDEAKKSMEMSLRWAQRSRNHFDKLENPNALFGIVQGGVYEDLRDVSVEGLTSIGFDGYAVGGLAVGEPKEDMHRILEHTCPKLPEDKPRYLMGVGKPEDLVEGVRRGIDMFDCVMPTRNARNAHLFVTGGVIKIRNAKHKTDTTPLDPECDCYTCRHYSKAYLYHLDKCNEILGARLNTIHNLRYYQRLMASIRKSIEEDRFDAFVEEFYARRDREVPPLQIV

SEQ ID NO: 59064 - protein, 374 aa, Photobacterium leiognathi
  REGION 1..374: note = tr|X0P7M6|X0P7M6_PHOLE Queuine tRNA-ribosyltransferase OS=Photobacterium leiognathi lrivu.4.1 OX=1248232 GN=tgt PE=3 SV=1
MKFELDKTQGRARRGRLQFERGTVETPAFMPVGTYGTVKGMTPEEVKDTGAQILLGNTFHLWLRPGQEVMKLHGDLHDFMQWQGPILTDSGGFQVFSLGSLRKITEEGVHFRNPVNGDKIFMDAEKSMEIQKDLGSDIVMIFDECTPYPATHEEAKKSMEMSLRWAKRSRNHFDKLENPNALFGIVQGGVYEDLRDVSVEGLTNIGFDGYAVGGLAVGEPKEDMHRILEHTCPQLPEDKPRYLMGVGKPEDLVEGVRRGIDMFDCVMPTRNARNGHLFVTGGVIKIRNAKHKTDTTPLDPHCDCYTCRNYSKAYLYHLDKCNEILGARLNTIHNLRYYQRLMESIRKSIEEDRFDAFVEEFYARRDREVPPLNV

SEQ ID NO: 59065 - protein, 374 aa, Photobacterium leiognathi; identical to SEQ ID NO: 59064
  REGION 1..374: note = tr|A0A0M9FCJ5|A0A0M9FCJ5_PHOLD Queuine tRNA-ribosyltransferase OS=Photobacterium leiognathi subsp. mandapamensis OX=48408 GN=tgt PE=3 SV=1

SEQ ID NO: 59066 - protein, 375 aa, Photobacterium lipolyticum
  REGION 1..375: note = tr|A0A2T3MS38|A0A2T3MS38_9GAMM Queuine tRNA-ribosyltransferase OS=Photobacterium lipolyticum; OX = 266810 GN=tgt PE=3 SV=1
MKFELDKTQGRARRGRLQFDRGTVETPAFMPVGTYGTVKGMTPEEVQDTGAQIILGNTFHLWLRPGQEVMKLHGDLHDFMQWKGPILTDSGGFQVFSLGAMRKITEEGVHFRNPVNGDKIFMDAEKSMEIQYDLGSDIVMIFDECTPYPATHDEAKKSMEMSLRWAQRSRNQFDKQENPNALFGIVQGGVYEDLRDVSVEGLTNIGFDGYAVGGLAVGEPKEDMHRILEHTCPKLPEDKPRYLMGVGKPEDLVEGVRRGIDMFDCVMPTRNARNGHLFVTGGVIKIRNAKHKTDTTPLDPHCDCYTCRNYSKAYLYHLDKCNEILGARLNTIHNLRYYQRLMASIRKAIEEDRFDAFVEEFYARRDREVPPLNNA

SEQ ID NO: 59067 - protein, 376 aa, Photobacterium lutimaris
  REGION 1..376: note = tr|A0A2T3IUS6|A0A2T3IUS6_9GAMM Queuine tRNA-ribosyltransferase OS=Photobacterium lutimaris; OX = 388278 GN=tgt PE=3 SV=1
MKFELDKTLGRARRGRLQFERGTVETPAFMPVGTYGTVKGMTPEEVEETGAQILLGNTFHLWLRPGQEVMKMHGDLHDFMQWQGPILTDSGGFQVFSLGDIRKITEEGVHFRNPVNGDKIFMDAEKSMEIQKDLGSDVVMIFDECTPYPATHDEAKKSMEMSLRWAQRSRNHFDKLGNKNALFGIVQGGVYEDLRDVSVEGLTNIGFDGYAVGGLAVGEPKEDMHRVLEHTCPQLPEDKPRYLMGVGKPEDLVEGVRRGIDMFDCVMPTRNARNGHLFVTGGVIKIRNAKHKTDTTPLDPHCDCYTCRKYSKAYLYHLDKCNEILGARLNTIHNLRYYQRLMESIRSAIEEDRFDVFVEEFYARRNREVPPLNDNK

SEQ ID NO: 59068 - protein, 376 aa, unidentified
  source 1..376: note = Photobacterium marinum
  REGION 1..376: note = tr|L8JD12|L8JD12_9GAMM Queuine tRNA-ribosyltransferase OS=Photobacterium marinum; OX = 1056511 GN=tgt PE=3 SV=1
MKFELDKTQGRARRGRLQFERGTVETPAFMPVGTYGTVKGMTPEEVKDTGAQILLGNTFHLWLRPGQEVMKMHGDLHDFMQWQGPILTDSGGFQVFSLGDIRKITEEGVHFRNPVNGDKIFMDAEKSMEIQKDLGSDIVMIFDECTPYPATHDEAKKSMEMSLRWAQRSRNHFDKLGNKNSLFGIVQGSVYEDLRDVSVEGLTNIGFDGYAVGGLAVGEPKEDMHRILEHTCPQLPEDKPRYLMGVGKPEDLVEGVRRGIDMFDCVMPTRNARNGHLFVTGGVIKIRNAKHKTDTTPLDPHCDCYTCRNYTKAYLYHLDKCNEILGARLNTIHNLRYYQRLMASIRKAIEEDRFDAFVEEFYARRDREVPPLNDNK

SEQ ID NO: 59069 - protein, 389 aa, Photobacterium phosphoreum
  REGION 1..389: note = tr|A0A2T3PRU3|A0A2T3PRU3_PHOPO Queuine tRNA-ribosyltransferase OS=Photobacterium phosphoreum; OX = 659 GN=tgt PE=3 SV=1
MGICQIVSLAFGGLVKFELDKTQGRARRGRLQFERGTVETPAFMPVGTYGTVKGMTPEEVEQTGAQIILGNTFHLWLRPGQEVMKMHGDLHDFMQWKGPILTDSGGFQVFSLGALRKITEEGVHFRNPVNGDKIFMDAEKSMEIQKDLGSDIVMIFDECTPYPATHDEAKKSMEMSLRWAQRSRNHFDELENKNALFGIIQGGVYEDLRDVSVEGLTKIGFDGYAVGGLAVGEPKEDMHRILEHTCPQLPEDKPRYLMGVGKPEDLVEGVRRGIDMFDCVMPTRNARNAHLFVTGGVIKIRNAKHKTDTTTLDPECDCYTCKNYSKAYLYHLDKCNEILGARLNTIHNLRYYQRLMASIRKAIDEDRFDAFVEEFYARRDREVPPLQIV

SEQ ID NO: 59070 - protein, 389 aa, Photobacterium phosphoreum
  REGION 1..389: note = tr|A0A2T3JYF5|A0A2T3JYF5_PHOPO Queuine tRNA-ribosyltransferase OS=Photobacterium phosphoreum; OX = 659 GN=tgt PE=3 SV=1
MGICQIVSLAFGGLVKFELDKTQGRARRGRLQFERGTVETPAFMPVGTYGTVKGMTPEEVEQTGAQIILGNTFHLWLRPGQEVMKMHGDLHDFMQWKGPILTDSGGFQVFSLGALRKITEEGVHFRNPVNGDKIFMDAEKSMEIQKDLGSDIVMIFDECTPYPATHDEAKKSMEMSLRWAQRSRNHFDELENKNALFGIIQGGVYEDLRDVSVEGLTKIGFDGYAVGGLAVGEPKEDMHRILEHTCPQLPEDKPRYLMGVGKPEDLVEGVRRGIDMFDCVMPTRNARNAHLFVTGGVIKIRNAKHKTDTTTLDPDCDCYTCKNYSKAYLYHLDKCNEILGARLNTIHNLRYYQRLMASIRKAIDEDRFDAFVEEFYARRDREVPPLQIV

SEQ ID NO: 59071 - protein, 375 aa, unidentified
  source 1..375: note = Photobacterium piscicola
  REGION 1..375: note = tr|A0A1T5I4F8|A0A1T5I4F8_9GAMM Queuine tRNA-ribosyltransferase OS=Photobacterium piscicola; OX = 1378299 GN=tgt PE=3 SV=1
MKFELDKTQGRARRGRLQFERGTVETPAFMPVGTYGTVKGMTPEEVEETGAQIILGNTFHLWLRPGQEVMKMHGDLHDFMQWKGPILTDSGGFQVFSLGALRKITEEGVHFRNPVNGDKIFMDAEKSMEIQYDLGSDIVMIFDECTPYPATHDEAKKSMEMSLRWAQRSRNHFDKLENPNALFGIVQGGVYEDLRDVSVEGLTNIGFDGYAVGGLAVGEPKEDMHRILEHTCPKLPQDKPRYLMGVGKPEDLVEGVRRGIDMFDCVMPTRNARNAHLFVTGGVIKIRNAKHKTDTTPLDPECDCYTCRHYSKAYLYHLDKCNEILGARLNTIHNLRYYQRLMASIRKSIEEDRFDAFVEEFYARRDREVPPLQIV

SEQ ID NO: 59072 - protein, 375 aa, Photobacterium profundum
  REGION 1..375: note = sp|Q6LU69|TGT_PHOPR Queuine tRNA-ribosyltransferase; OS = Photobacterium profundum (strain SS9) OX=298386 GN=tgt; PE = 3 SV=1
MKFELDKTQGRARRGRLQFERGTVETPAFMPVGTYGTVKGMTPEEVKETGAQILLGNTFHLWLRPGQEVMKLHGDLHDFMQWHGPILTDSGGFQVFSLGATRKITEEGVHFRNPVNGDKVFMDAEKSMEIQYDLGSDIVMIFDECTPYPATHDEAKKSMEMSLRWAQRSRNHFDKQENPNALFGIIQGGVYEDLRDVSVDGLTNIGFDGYAVGGLAVGEPKEDMHRILEHTCPQLPEDKPRYLMGVGKPEDLVEGVRRGIDMFDCVMPTRNARNGHLFVTGGVIKIRNAKHKTDTTPLDPHCDCYTCLNYSKAYLYHLDKCNEILGSRLNTIHNLRYYQRLMASIRSAIEEDRFDVFVEEFYARRDREVPPLKNA

SEQ ID NO: 59073 - protein, 375 aa, Photobacterium profundum; identical to SEQ ID NO: 59061
  REGION 1..375: note = tr|Q1YX64|Q1YX64_9GAMM Queuine tRNA-ribosyltransferase OS=Photobacterium profundum 3TCK; OX = 314280 GN=tgt PE=3 SV=1

SEQ ID NO: 59074 - protein, 375 aa, unidentified
  source 1..375: note = Photobacterium proteolyticum
  REGION 1..375: note = tr|A0A1Q9GMK0|A0A1Q9GMK0_9GAMM Queuine tRNA-ribosyltransferase OS=Photobacterium proteolyticum; OX = 1903952 GN=tgt PE=3 SV=1
MKFELDKTQGRARRGRLQFERGTVETPAFMPVGTYGTVKGMTPEEVQDTGAQIILGNTFHLWLRPGQEVMKMHGDLHDFMQWQGPILTDSGGFQVFSLGDIRKITEEGVHFRNPVNGDKIFMDAEKSMEIQKDLGSDIVMIFDECTPYPATHDEAKKSMEMSLRWAQRSRNHFDKLGNKNALFGIVQGSVYEDLRDVSVEGLTNIGFDGYAVGGLAVGEPKEDMHRVLEHTCPQLPEDKPRYLMGVGKPEDLVEGVRRGIDMFDCVMPTRNARNGHLFVTGGVIKIRNAKHKTDTTPLDPHCDCYTCRNYSKAYLYHLDKCNEILGARLNTIHNLRYYQRLMASIRKAIEEDRFDAFVEEFYARRDREVPPLKNA

SEQ ID NO: 59075 - protein, 376 aa, Photobacterium rosenbergii; identical to SEQ ID NO: 59055
  REGION 1..376: note = tr|A0A2T3N278|A0A2T3N278_9GAMM Queuine tRNA-ribosyltransferase OS=Photobacterium rosenbergii; OX = 294936 GN=tgt PE=3 SV=1

SEQ ID NO: 59076 - protein, 376 aa, unidentified
  source 1..376: note = Photobacterium sanctipauli
  REGION 1..376: note = tr|A0A2T3NB38|A0A2T3NB38_9GAMM Queuine tRNA-ribosyltransferase OS=Photobacterium sanctipauli; OX = 1342794 GN=tgt PE=3 SV=1
MKFELDKTQGRARRGRLQFERGTVETPAFMPVGTYGTVKGMTPEEVKETGAQILLGNTFHLWLRPGQEVMKMHGDLHDFMQWQGPILTDSGGFQVFSLGDIRKITEEGVHFRNPVNGDKIFMDAEKSMEIQKDLGSDVVMIFDECTPYPATHEEAKKSMEMSLRWAQRSRNHFDKLGNKNALFGIVQGSVYEDLRDVSVEGLTKIGFDGYAVGGLAVGEPKEDMHRVLEHTCPQLPEDKPRYLMGVGKPEDLVEGVRRGIDMFDCVMPTRNARNGHLFVTGGVIKIRNAKHKTDTTALDPHCDCYTCRNYSKAYLYHLDKCNEILGARLNTIHNLRYYQRLMESIRSAIEEDRFDAFVEEFYARRDREVPPLNDNQ

SEQ ID NO: 59077 - protein, 375 aa, unidentified
  source 1..375: note = Photobacterium sanguinicancri
  REGION 1..375: note = tr|A0A135ZMX5|A0A135ZMX5_9GAMM Queuine tRNA-ribosyltransferase OS=Photobacterium sanguinicancri; OX = 875932 GN=tgt PE=3 SV=1
MKFELDKTQGRARRGRLQFERGTVETPAFMPVGTYGTVKGMTPEEVKETGAQILLGNTFHLWLRPGQEVMKLHGDLHDFMQWQGPILTDSGGFQVFSLGATRKITEEGVHFRNPVNGDKVFMDAEKSMEIQYDLGSDIVMIFDECTPYPATHDEAKKSMEMSLRWAQRSRNHFDKQENPNSLFGIVQGGVYEDLRDVSVEGLTNIGFDGYAVGGLAVGEPKEDMHRILEHTCPKLPQDKPRYLMGVGKPEDLVEGVRRGIDMFDCVMPTRNARNGHLFVTGGVIKIRNAKHKTDTTPLDPHCDCYTCRNYSKAYLYHLDKCNEILGSRLNTIHNLRYYQRLMESIRTAIDEDRFDAFVDEFYARRDREVPPLKNA

SEQ ID NO: 59078 - protein, 392 aa, unidentified
  source 1..392: note = Photobacterium sanguinicancri
  REGION 1..392: note = tr|A0A264TFQ0|A0A264TFQ0_9GAMM Queuine tRNA-ribosyltransferase OS=Photobacterium sanguinicancri; OX = 875932 GN=tgt PE=3 SV=1
MTSRLLCQIVSLAFGGCVKFELDKTQGRARRGRLQFERGTVETPAFMPVGTYGTVKGMTPEEVKETGAQILLGNTFHLWLRPGQEVMKLHGDLHDFMQWQGPILTDSGGFQVFSLGATRKITEEGVHFRNPVNGDKVFMDAEKSMEIQYDLGSDIVMIFDECTPYPATHDEAKKSMEMSLRWAQRSRNHFDKQENPNSLFGIVQGGVYEDLRDVSVEGLTNIGFDGYAVGGLAVGEPKEDMHRILEHTCPKLPQDKPRYLMGVGKPEDLVEGVRRGIDMFDCVMPTRNARNGHLFVTGGVIKIRNAKHKTDTTPLDPHCDCYTCRNYSKAYLYHLDKCNEILGSRLNTIHNLRYYQRLMESIRTAIDEDRFDAFVDEFYARRDREVPPLKNA

SEQ ID NO: 59079 - protein, 375 aa, Photobacterium sp.
  REGION 1..375: note = tr|Q2C7I4|Q2C7I4_9GAMM Queuine tRNA-ribosyltransferase OS=Photobacterium sp. SKA34; OX = 121723 GN=tgt PE=3 SV=1
MKFELDKTQGRARRGRLQFERGTVETPAFMPVGTYGTVKGMTPEEVKETGAQILLGNTFHLWLRPGQEVMKLHGDLHDFMQWQGPILTDSGGFQVFSLGSLRKITEEGVHFRNPVNGDKIFMDAEKSMEIQKDLGSDIVMIFDECTPYPATHDEAKKSMEMSLRWAQRSRNHFDKQENPNALFGIVQGGVYEDLRDVSVEGLTKIGFDGYAVGGLAVGEPKEDMHRILEHTCPQLPEDKPRYLMGVGKPEDLVEGVRRGIDMFDCVMPTRNARNGHLFVTGGVIKIRNAKHKTDTTPLDPHCDCYTCKNYSKAYLYHLDKCNEILGARLNTIHNLRYYQRLMASVRKSIEEDRFDAFVEEFYARRDREVPPLQNV

SEQ ID NO: 59080 - protein, 375 aa, Photobacterium sp.
  REGION 1..375: note = tr|A0A444JKN2|A0A444JKN2_9GAMM Queuine tRNA-ribosyltransferase OS=Photobacterium sp. BEI 247; OX = 2485123 GN=tgt PE=3 SV=1
MKFELDKTQGRARRGRLQFERGTVETPAFMPVGTYGTVKGMTPEEVQDTGAQIILGNTFHLWLRPGQEVMKMHGDLHDFMQWQGPILTDSGGFQVFSLGDIRKITEEGVHFRNPVNGDKIFMDAEKSMEIQKDLGSDIVMIFDECTPYPATHDEAKQSMEMSLRWAQRSRNHFDKLDNKNALFGIVQGSVYEDLRDVSVEGLTNIGFDGYAVGGLAVGEPKEDMHRVLEHTCPQLPEDKPRYLMGVGKPEDLVEGVRRGIDMFDCVMPTRNARNGHLFVTGGVIKIRNAKHKTDTTPLDPHCDCYTCRNYSKAYLYHLDKCNEILGSRLNTIHNLRYYQRLMASIRQAIEEDRFDAFVEEFYARRDREVPPLKNA

SEQ ID NO: 59081 - protein, 375 aa, Photobacterium swingsii
  REGION 1..375: note = tr|A0A0J8Y0U1|A0A0J8Y0U1_9GAMM Queuine tRNA-ribosyltransferase OS=Photobacterium swingsii; OX = 680026 GN=tgt PE=3 SV=1
MKFELDKTQGRARRGRLQFERGTVETPAFMPVGTYGTVKGMTPEEVKDTGAQILLGNTFHLWLRPGQEVMKLHGDLHDFMQWQGPILTDSGGFQVFSLGAMRKITEEGVHFRNPVNGDKIFMDAEKSMEIQYDLGSDIVMIFDECTPYPATHDEAKKSMEMSLRWAQRSRNHFDKQENPNALFGIVQGGVYEDLRDVSVEGLTKIGFDGYAVGGLAVGEPKEDMHRILEHTCPQLPQDKPRYLMGVGKPEDLVEGVRRGIDMFDCVMPTRNARNGHLFVTGGVIKIRNAKHKTDTTPLDPHCDCYTCRNYSKAYLYHLDKCNEILGSRLNTIHNLRYYQRLMESIRKAIDEDRFDAFVEEFYARRDREVPPLKNA

SEQ ID NO: 59082 - protein, 395 aa, unidentified
  source 1..395: note = Photobacterium toruni
  REGION 1..395: note = tr|A0A1T4UC88|A0A1T4UC88_9GAMM Queuine tRNA-ribosyltransferase OS=Photobacterium toruni; OX = 1935446 GN=tgt PE=3 SV=1
MGLNPIMGTCQIVSLAFGGLVKFELDKTQGRARRGRLQFERGTVETPAFMPVGTYGTVKGMTPEEVEETGAQIILGNTFHLWLRPGQEVMKMHGDLHDFMQWKGPILTDSGGFQVFSLGALRKITEEGVHFRNPVNGDKIFMDAEKSMEIQKDLGSDIVMIFDECTPYPATHDEAKKSMEMSLRWAQRSRNHFDKLENPNALFGIVQGGVYEDLRDVSVEGLTKIGFDGYAVGGLAVGEPKEDMHRILEHTCPQLPEDKPRYLMGVGKPEDLVEGVRRGIDMFDCVMPTRNARNAHLFVTGGVIKIRNAKHKTDTTPLDPDCDCYTCRHYSKAYLYHLDKCNEILGARLNTIHNLRYYQRLMASIRKSIEEDRFDAFVEEFYARRDREVPPLQIV

SEQ ID NO: 59083 - protein, 374 aa, Photorhabdus asymbiotica
  REGION 1..374: note = tr|C7BJQ3|C7BJQ3_PHOAA Queuine tRNA-ribosyltransferase OS=Photorhabdus asymbiotica subsp. asymbiotica (strain ATCC 43949 / 3105-77) OX=553480 GN=tgt; PE = 3 SV=1
MKFELQTTDGQARRGRLVFERGVVETPAFMPVGTYGTVKGMTPEEVKETGAQILLGNTFHLWLRPGQEIMKQHGDLHGFMQWHGPILTDSGGFQVFSLGAMRKIKEEGVHFRNPINGTPVFLSPEKSMEIQYDLGSDIVMIFDECTPYPANWDYAKRSMEMSLRWAARSRKRFDELQNKNALFGIIQGSIYEDLRDISVKSLVDIGFDGYAVGGLAVGEPKEDMHRILEHVCPQIPQDKPRYLMGVGKPEDLVEGVRRGIDMFDCVMPTRNARNGHLFVTEGVIKIRNAKHKEDTSPLDEQCDCYTCRNYSRAYLHHLDRCNEILGARLNTIHNLRYYQRLMAGLRKAIEEGNLEQFVEDFYQRIGKPVPLLNV

SEQ ID NO: 59084 - protein, 374 aa, unidentified
  source 1..374: note = Photorhabdus australis
  REGION 1..374: note = tr|A0A1C0U4M1|A0A1C0U4M1_9GAMM Queuine tRNA-ribosyltransferase OS=Photorhabdus australis; OX = 286156 GN=tgt PE=3 SV=1
MKFELHTTDGQARRGRLVFERGVVETPAFMPVGTYGTVKGMTPEEVKETGAQILLGNTFHLWLRPGQEIMKMHGDLHGFMQWHGPILTDSGGFQVFSLGAMRKIKEEGVHFRNPINGTPVFLSPEKSMEIQYDLGSDIVMIFDECTPYPADWDYAKRSMEMSLRWAARSRKRFDELQNKNALFGIIQGSIYEDLRDISVKGLVEIGFDGYAVGGLAVGEPKEDMHRILEHICPQIPQDKPRYLMGVGKPEDLVEGVRRGIDMFDCVMPTRNARNGHLFVTEGVIKIRNAKHKEDTSPLDEQCDCYTCRNYSRAYLHHLDRCNEILGARLNTIHNLRYYQRLMAGLRQAIEEGNLEQFVEDFYQRIGKPVPLLNV

SEQ ID NO: 59085 - protein, 374 aa, unidentified
  source 1..374: note = Photorhabdus bodei
  REGION 1..374: note = tr|A0A329XA05|A0A329XA05_9GAMM Queuine tRNA-ribosyltransferase OS=Photorhabdus bodei OX=2029681; GN = tgt PE=3 SV=1
MKFELQTTDGQARRGRLIFERGVVETPAFMPVGTYGTVKGMTPEEVKETGAQILLGNTFHLWLRPGQEIMKLHGDLHGFMQWHGPILTDSGGFQVFSLGAMRKIKEEGVHFRNPINGTPVFLSPEKSMEIQYDLGSDIVMIFDECTPYPADWDYAKRSMEMSLRWAARSRKRFDELQNKNALFGIIQGSIYEDLRDISVKGLVEIGFDGYAVGGLAVGEPKEDMHRILEHVCPQIPQDKPRYLMGVGKPEDLVEGVRRGIDMFDCVMPTRNARNGHLFVTDGVIKIRNAKHKEDTSPLDEQCDCYTCRNYSRAYLHHLDRCNEILGARLNTIHNLRYYQRLMAKIRQAIEEGNLEQFVEDFYQRIGKPVPALSI

SEQ ID NO: 59086 - protein, 374 aa, unidentified
  source 1..374: note = Photorhabdus heterorhabditis
  REGION 1..374: note = tr|A0A0M9CWH7|A0A0M9CWH7_9GAMM Queuine tRNA-ribosyltransferase OS=Photorhabdus heterorhabditis; OX = 880156 GN=tgt PE=3 SV=1
MKFELQTTDGQARRGRLVFERGVVETPAFMPVGTYGTVKGMTPEEVKETGAQILLGNTFHLWLRPGQEIMKLHGDLHGFMQWHGPILTDSGGFQVFSLGAMRKIKEEGVHFRNPINGTPVFLSPEKSMEIQYDLGSDIVMIFDECTPYPADWDYAKRSMEMSLRWAARSRKRFDELQNKNALFGIIQGSVYEDLRDISIKGLVEIGFDGYAVGGLAVGEPKEDMHRILEHVCPQIPQDKPRYLMGVGKPEDLVEGVRRGIDMFDCVMPTRNARNGHLFVTEGVIKIRNAKYKEDTAPLDEQCDCYTCRNYSRAYLHHLDRCNEILGARLNTIHNLRYYQRLMAGLRKAIEEGNLEQFVEDFYQRIGKPVPLLNV

SEQ ID NO: 59087 - protein, 374 aa, unidentified
  source 1..374: note = Photorhabdus khanii
  REGION 1..374: note = tr|W3VAY8|W3VAY8_9GAMM Queuine tRNA-ribosyltransferase OS=Photorhabdus khanii NC19; OX = 1004151 GN=tgt PE=3 SV=1
MKFELQTTDGKARRGRLVFERGVVETPAFMPVGTYGTVKGMTPEEVKETGAQILLGNTFHLWLRPGQEIMKLHGDLHGFMQWHGPILTDSGGFQVFSLGAMRKIKEEGVHFRNPINGTPVFLSPEKSMEIQYDLGSDIVMIFDECTPYPADWDYAKRSMEMSLRWAARSRQRFDELQNKNALFGIIQGSIYEDLRDISVKGLVEIGFDGYAVGGLAVGEPKEDMHRVLEHVCPQIPQDKPRYLMGVGKPEDLVEGVRRGIDMFDCVMPTRNARNGHLFVTEGVIKIRNAKHKEDISPLDEQCDCYTCQNYSRAYLHHLDRCNEILGARLNTIHNLRYYQRLMAGIRKAIEEGNLEQFVEDFYQRIGKPVPLLNV

SEQ ID NO: 59088 - protein, 374 aa, unidentified
  source 1..374: note = Photorhabdus laumondii
  REGION 1..374: note = sp|Q7MB01|TGT_PHOLL Queuine tRNA-ribosyltransferase; OS = Photorhabdus laumondii subsp. laumondii (strain DSM 15139 / CIP 105565 / TT01) OX=243265 GN=tgt PE=3 SV=1
MKFELQTTDGQARRGRLIFERGVVETPAFMPVGTYGTVKGMTPEEVKETGAQILLGNTFHLWLRPGQEIMKLHGDLHGFMQWHGPILTDSGGFQVFSLGAMRKIKEEGVHFRNPINGTPVFLSPEKSMEIQYDLGSDIVMIFDECTPYPADWDYAKRSMEMSLRWAARSRKRFDELQNKNALFGIIQGSIYEDLRDISVKGLVEIGFDGYAVGGLAVGEPKEDMHRILEHVCPQIPQDKPRYLMGVGKPEDLVEGVRRGIDMFDCVMPTRNARNGHLFVTHGVIKIRNAKHKEDTSPLDEQCDCYTCRNYSRAYLHHLDRCNEILGARLNTIHNLRYYQRLMAKIRQAIEEGNLEQFVEDFYQRIGKPVPALSI

SEQ ID NO: 59089 - protein, 374 aa, unidentified; identical to SEQ ID NO: 59088
  source 1..374: note = Photorhabdus laumondii
  REGION 1..374: note = tr|A0A329VM31|A0A329VM31_9GAMM Queuine tRNA-ribosyltransferase OS=Photorhabdus laumondii subsp. clarkei OX=2029685 GN=tgt PE=3 SV=1

SEQ ID NO: 59090 - protein, 374 aa, Photorhabdus luminescens
  REGION 1..374: note = tr|A0A5C4REG1|A0A5C4REG1_PHOLU Queuine tRNA-ribosyltransferase OS=Photorhabdus luminescens subsp. sonorensis OX=1173677 GN=tgt PE=3 SV=1
MKFELQTTDGQARRGRLIFERGVVETPAFMPVGTYGTVKGMTPEEVKETGAQILLGNTFHLWLRPGQEIMKLHGDLHGFMQWHGPILTDSGGFQVFSLGAMRKIKEEGVHFRNPINGTPVFLSPEKSMEIQYDLGSDIVMIFDECTPYPADWDYAKRSMEMSLRWAARSRKRFDELQNKNALFGIIQGSVYEDLRDISVKCLVEIGFDGYAVGGLAVGEPKEDMHRILEHVCPQIPQDKPRYLMGVGKPEDLVEGVRRGIDMFDCVMPTRNARNGHLFVTNGVIKIRNAKHKEDTSPLDEQCDCYTCRNYSRAYLHHLDRCNEILGARLNTIHNLRYYQRLMAKIRQAIEEGNLEQFVEDFYQRIGKPVPALSI

SEQ ID NO: 59091 - protein, 374 aa, Photorhabdus luminescens
  REGION 1..374: note = tr|A0A2S8Q9P4|A0A2S8Q9P4_PHOLU Queuine tRNA-ribosyltransferase OS=Photorhabdus luminescens; OX = 29488 GN=tgt PE=3 SV=1
MKFELQTTDGQARRGRLIFERGVVETPAFMPVGTYGTVKGMTPEEVKDTGAQILLGNTFHLWLRPGQEIMKLHGDLHGFMQWHGPILTDSGGFQVFSLGAMRKIKEEGVHFRNPINGTPVFLSPEKSMEIQYDLGSDIVMIFDECTPYPADWDYAKRSMEMSLRWAARSRKRFDELQNKNALFGIIQGSIYEDLRDISVKGLVEIGFDGYAVGGLAVGEPKEDMHRILEHVCPQIPQDKPRYLMGVGKPEDLVEGVRRGIDMFDCVMPTRNARNGHLFVTNGVIKIRNAKHKEDTSPLDEQCDCYTCRNYSRAYLHHLDRCNEILGARLNTIHNLRYYQRLMAKIRQAIEEGNLEQFVEDFYQRIGKPVPALSI

SEQ ID NO: 59092 - protein, 374 aa, unidentified
  source 1..374: note = Photorhabdus namnaonensis
  REGION 1..374: note = tr|A0A1B8YMP9|A0A1B8YMP9_9GAMM Queuine tRNA-ribosyltransferase OS=Photorhabdus namnaonensis; OX = 1851568 GN=tgt PE=3 SV=1
MKFELQTTDGQARRGRLIFERGVVETPAFMPVGTYGTVKGMTPEEVKETGAQILLGNTFHLWLRPGQEIMKLHGDLHGFMQWHGPILTDSGGFQVFSLGAMRKIKEEGVHFRNPINGTPVFLSPEKSMEIQYDLGSDIVMIFDECTPYPADWDYAKRSMEMSLRWAARSRKRFDELQNKNALFGIIQGSIYEDLRDVSVKSLVEIGFDGYAVGGLAVGEPKEDMHRILEHVCPQIPQDKPRYLMGVGKPEDLVEGVRRGIDMFDCVMPTRNARNGHLFVTNGVIKIRNAKHKEDTSPLDEQCDCYTCRNYSRAYLHHLDRCNEILGARLNTIHNLRYYQRLMAKIRQAIEEGNLEQFVEDFYQRIGKPVPALSI

SEQ ID NO: 59093 - protein, 374 aa, Photorhabdus sp.
  REGION 1..374: note = tr|A0A329VS03|A0A329VS03_9GAMM Queuine tRNA-ribosyltransferase OS=Photorhabdus sp. S9-53; OX = 2029683 GN=tgt PE=3 SV=1
MKFELQTTDGQARRGRLIFERGVVETPAFMPVGTYGTVKGMTPEEVKETGAQILLGNTFHLWLRPGQEIMKLHGDLHGFMQWHGPILTDSGGFQVFSLGAMRKIKEEGVHFRNPINGTPVFLSPEKSMEIQYDLGSDIVMIFDECTPYPADWDYAKRSMEMSLRWAARSRKRFDELQNKNALFGIIQGSIYEDLRDISVKGLVEIGFDGYAVGGLAVGEPKEDMHRILEHVCPQIPQDKPRYLMGVGKPEDLVEGGRRGIDMFDCVMPTRNARNGHLFVTDGVIKIRNAKHKEDTSPLDEQCDCYTCRNYSRAYLHHLDRCNEILGARLNTIHNLRYYQRLMAKIRQAIEEGNLEQFVEDFYQRIGKPVPALSI

SEQ ID NO: 59094 - protein, 374 aa, Photorhabdus sp.
  REGION 1..374: note = tr|A0A4R4IX49|A0A4R4IX49_9GAMM Queuine tRNA-ribosyltransferase OS=Photorhabdus sp. MEX47-22; OX = 2100167 GN=tgt PE=3 SV=1
MKFELQTTNGQARRGRLIFERGVVETPAFMPVGTYGTVKGMTPEEVKETGAQILLGNTFHLWLRPGQEIMKLHGDLHGFMQWHGPILTDSGGFQVFSLGAMRKIKEEGVHFRNPINGTPVFLSPEKSMEIQYDLGSDIVMIFDECTPYPADWDYAKRSMEMSLRWAARSRKRFDELQNKNALFGIIQGSVYEDLRDISVKGLVEIGFDGYAVGGLAVGEPKEDMHRILEHVCPQIPQDKPRYLMGVGKPEDLVEGVRRGIDMFDCVMPTRNARNGHLFVTNGVIKIRNAKHKEDTSPLDEQCDCYTCRNYSRAYLHHLDRCNEILGARLNTIHNLRYYQRLMAKIRQAIEEGNLEQFVEDFYQRIGKPVPALSI

SEQ ID NO: 59095 - protein, 374 aa, Photorhabdus temperata
  REGION 1..374: note = tr|U7R505|U7R505_PHOTE Queuine tRNA-ribosyltransferase OS=Photorhabdus temperata J3; OX = 1389415 GN=tgt PE=3 SV=1
MKFELQTTDGQARRGRLVFERGVVETPAFMPVGTYGTVKGMTPEEVKETGAQILLGNTFHLWLRPGQEIMKLHGDLHGFMQWHGPILTDSGGFQVFSLGAMRKIKEEGVHFRNPINGTPVFLSPEKSMEIQYDLGSDIVMIFDECTPYPADWDYAKRSMEMSLRWAARSRKRFDELQNKNALFGIIQGSVYEDLRDISVKGLVEIGFDGYAVGGLAVGEPKEDMHRVLEHVCPQIPQDKPRYLMGVGKPEDLVEGVRRGIDMFDCVMPTRNARNGHLFVTDGVIKIRNAKHKEDTSPLDEQCDCYTCRNYSRAYLHHLDRCNEILGARLNTIHNLRYYQRLMAGIRKAIEEGNLEQFVEDFYQRIGKPVPLLNI

SEQ ID NO: 59096 - protein, 374 aa, Photorhabdus temperata; identical to SEQ ID NO: 59095
  REGION 1..374: note = tr|T0PEZ6|T0PEZ6_PHOTE Queuine tRNA-ribosyltransferase OS=Photorhabdus temperata subsp. temperata M1021 OX=1221520 GN=tgt PE=3 SV=1

SEQ ID NO: 59097 - protein, 374 aa, unidentified
  source 1..374: note = Photorhabdus thracensis
  REGION 1..374: note = tr|A0A0F7LKH8|A0A0F7LKH8_9GAMM Queuine tRNA-ribosyltransferase OS=Photorhabdus thracensis; OX = 230089 GN=tgt PE=3 SV=1
MKFELQTTDGQARRGRLVFERGVVETPAFMPVGTYGTVKGMTPEEVKETGAQILLGNTFHLWLRPGQEIMKLHGDLHGFMQWHGPILTDSGGFQVFSLGAMRKIKEEGVHFRNPINGTPVFLSPEKSMEIQYDLGSDIVMIFDECTPYPADWDYAKRSMEMSLRWATRSRKRFDELQNKNALFGIIQGSVYEDLRDISVKGLVEIGFDGYAVGGLAVGEPKEDMHRVLEHVCPQIPQDKPRYLMGVGKPEDLVEGVRRGIDMFDCVMPTRNARNGHLFVTDGVIKIRNAKHKEDTSPLDEQCDCYTCRNYSRAYLHHLDRCNEILGARLNTIHNLRYYQRLMAGIRKAIEEGNLEQFVEDFYQRIGKPVPLLNI

SEQ ID NO: 59098 - protein, 378 aa, unidentified
  source 1..378: note = Phreatobacter cathodiphilus
  REGION 1..378: note = tr|A0A2S0NA42|A0A2S0NA42_9PROT Queuine tRNA-ribosyltransferase OS=Phreatobacter cathodiphilus; OX = 1868589 GN=tgt PE=3 SV=1
MTGFSFAIAARDGAARTGVVSTPRGPIRTPAFMPVGTQATVKGMYMDQVKALGADVILGNTYHLMLRPGAERIAKLGGLHRFGGWTGPILTDSGGFQVMSLAKLRKLTEQGVTFSSHVDGSRFELTPERSVEIQGLLGADIQMQLDECVALPNERAAIDKAMQLSLRWAERSKRAFEAQPEGRALFGIVQGGDQPDLRIASARALAAMDFPGYSIGGLAVGEPQEVMLAMIEAVMPHLPEEKPHYLMGVGTPDDLLAAVARGVDMFDCVMPTRNGRHGQAFTRFGKVNFRNARHAEDPRPLDETSSCPAARDYSRAYLHHLVRTEEMLGSMLITWINLAYYQELMAGAREAIARGAYADYMAAVREGWARGDIAPWQG

SEQ ID NO: 59099 - protein, 381 aa, unidentified
  source 1..381: note = Phreatobacter oligotrophus
  REGION 1..381: note = tr|A0A2T4Z524|A0A2T4Z524_9PROT Queuine tRNA-ribosyltransferase OS=Phreatobacter oligotrophus; OX = 1122261 GN=tgt PE=3 SV=1
MTPVPGFSFAVHGRDGAARTGVVTTPRGAIRTPAFMPVGTQATVKGMYMDQVKALGADVILGNTYHLMLRPGAERIAALGGLHRFGGWSGPILTDSGGFQVMSLAKLRKLTEQGVTFASHVDGSRFELTPERSVEIQGLLGADIQMQLDECVALPNERAAIDKAMQLSLRWAERSRRAFEAQPAGRALFGIVQGGDQPDLRVASAKALAAMDFPGYSIGGLAVGEPQAVMLAMIEEVMPHLPDDKPHYLMGVGTPDDLLAAVARGVDMFDCVMPTRNGRHGQAFTRFGKVNFRNARHADDPRPLDEASSCPAARDYSRAYLHHLVRTEEMLGSMLITWINLAYYQELMAGARAAIAAGRYADYMAEVRDGWARGDIEPWTS

SEQ ID NO: 59100 - protein, 381 aa, unidentified
  source 1..381: note = Phreatobacter sp.
  REGION 1..381: note = tr|A0A4D7QMZ4|A0A4D7QMZ4_9PROT Queuine tRNA-ribosyltransferase OS=Phreatobacter sp. NMCR1094; OX = 2570229 GN=tgt PE=3 SV=1
MTDPTGFSFEITARDGAARTGLITTPRGHIRTPAFMPVGTQATVKGMYMDQVKALGADVILGNTYHLMLRPGAERVAALGGLHQFGGWKGPILTDSGGFQVMSLAKLRKLTEQGVTFASHIDGSRFELTPERSIEIQGLLGADIQMQLDECVSLPNDRATIEKSTHLSLRWAERSKRAFETQPKGRALFGIVQGGDIPDLRVESAKALTDMDFPGYSIGGLAVGEPQAVMLAMIETVMPHLPDAKPHYLMGVGTPDDLLGAVACGVDMFDCVMPTRNGRHGQAFSRFGKINFRNARHAADPRPIDEASSCPAARDYSRAYLHHLIRTEEMLGSMLVTWINLAYYQDLMAGARAAIAAGRYADYAAEVREGWARGDIEPMAV

SEQ ID NO: 59101 - protein, 395 aa, unidentified
  source 1..395: note = Phreatobacter stygius
  REGION 1..395: note = tr|A0A4D7BFX3|A0A4D7BFX3_9PROT Queuine tRNA-ribosyltransferase OS=Phreatobacter stygius; OX = 1940610 GN=tgt PE=3 SV=1
MSHRPDHEPSTASAGDAPAGFSFRIDGRDGAARTGVITTPRGAIRTPAFMPVGTQATVKGMYMDQVRALGADVILGNTYHLMLRPGAERVAGLGGLHRFGGWSGPILTDSGGFQVMSLSKLRKLSEQGVTFASHIDGSRFELTPERSIEIQGLLGSDIQMQLDECVALPNERAVIDKAMRLSIRWAERSRRAFESQPKGRALFGIVQGGDQPDLRVESARALAAMDFPGYSIGGLAVGEPQDVMLAMIETVMPHLPDDKPHYLMGVGTPDDLIGAIARGVDMFDCVMPTRNGRHGQAFSRFGKLNFRNARHAEDPRPVDETSSCPAARDYSRAYLHHLIRTEEMLGSMLVTWINLAYYQDLMAGARAAIAAGRFTDYAAEVRAGWQRGDLAPYGG

SEQ ID NO: 59102 - protein, 428 aa, Phycicoccus sp.
  REGION 1..428: note = tr|A0A542IKG9|A0A542IKG9_9MICC Queuine tRNA-ribosyltransferase OS=Phycicoccus sp. SLBN-51; OX = 1456756 GN=tgt PE=3 SV=1
MPANPAFALPETRSQFSFTVGTRLTDSCPPTDARMADNGGEFLGRTGTIATPHGEIQTPAFIAVGTKATVKAVLPESMADLGAQALLANAYHLYLQPGPDILDEAGGLGAFMNWPGPTFTDSGGFQVMSLGSGFKKVIDMKSVDASGPDDAVAPGKERLAHIDDDGVWFKSYLNGDRHRFSPEISMQVQHRIGADIMFAFDELTTLQNSRRYQEESLERTRLWAERCIEEHFRLTESRAGKPYQALFGVIQGAQYEDLRRKACRDLAAMPFDGFGIGGALEKENLGTIVRWCNEELPEDKPRHLLGISEPDDIFTAIENGADTFDCVSPTRVARNSAFYTPYGRFNLSGAKYKRDFGPLQEGCDCYACANYSRAYIHHLYKAKEMVSATLISIHNERFVVKMVDDARLAIESGTFFDFKADTLGRYYS

SEQ ID NO: 59103 - protein, 387 aa, Phycisphaera mikurensis
  REGION 1..387: note = tr|I0IGY6|I0IGY6_PHYMF Queuine tRNA-ribosyltransferase OS=Phycisphaera mikurensis (strain NBRC 102666 / KCTC 22515 / FYK2301M01) OX=1142394 GN=tgt; PE = 3 SV=1
MKFELHHASGPAGPRTGTVHTPHGSFPTPAFMTVGTQGTVKGVTPEQVRATGAGILLGNTYHLLLRPGPELLERAGGLHRFMRWDGPILTDSGGFQVFSLGHINRIGEDGVVFKNPLNGDLVDLTPERSIATQHAIGGDILMAFDDCPPAGGDDPAAARERSKLAMERTHRWLDRCVAFHRGRGRDGRQALFGIVQGGTDEGDRAACVEAVCSHDLPGYAIGGVAVGEDTAAIDRIVAHTAPLMPADKPRYLMGVGYPRDIVAAVRSGVDLFDCVLPTRHGRSGHAFTAAGALKLKNAPFREDFAVLEDACDCPACVGGYTRAYLHHLVKCGEILGGVLLTLHNLRLYQRLMADLRATIPGGRWDAFFSRWPCAIGPEEGQAADERR

SEQ ID NO: 59104 - protein, 421 aa, Phycisphaera sp.
  REGION 1..421: note = tr|A0A2G1ZUG6|A0A2G1ZUG6_9BACT Queuine tRNA-ribosyltransferase OS=Phycisphaera sp. OX=2030824; GN = tgt PE=3 SV=1
  VARIANT 305: note = Xaa can be any naturally occurring amino acid
  VARIANT 307: note = Xaa can be any naturally occurring amino acid
  VARIANT 359: note = Xaa can be any naturally occurring amino acid
MGSALTFEITHRCPKTNARVGVATTPHGEFATPAFMTVGTKGTVKGLYPGMLRQAGVEVLLGNTYHLLLRPGPDVVESLGGLHTMMGWNGPILTDSGGYQAYSMADINAIDDDGVTFKSILNGEMIRMGPDEAIDIQNKLGADIIMAFDDCPPSVDPDAGPTNQTRLKLATKRDSRSGKAYDHAARLRISNERTVRWLERCKKAHRRPGDQALFGIVQGGTDLDERRWSAENIAAIDLPGYAIGGVAVGETADDIDRVVQFTAPLLPEDKPRYLMGVGYERDILSAVLAGVDMFDCVLPTRNGRXAXAFTRTGQIKLKNAKFTRDTAVIEPGCDCHACDPARHGLMTVDGTGFSRGTIXHLFNAGEMLGPILVSLHNVRHFQLLMLDIRRAVRDDDWLSFASGWPVAVDGLSDELRGRLGL

SEQ ID NO: 59105 - protein, 398 aa, Phycisphaera sp.
  REGION 1..398: note = tr|A0A424JY83|A0A424JY83_9BACT Queuine tRNA-ribosyltransferase OS=Phycisphaera sp. TMED24; OX = 1986832 GN=tgt PE=3 SV=1
MSGPLRFEVEATCSESGARLGRVETPHGGFDTPAFMPVGTQSCVKGLWPDQVAETGSQIILNNAYHLMLRPGDAAVARRGGCHQFMRWSGPILTDSGGYQAYSMAHINRLDEDGVRFRSIVDGAWVDLGPERSMEVQNNIGADIIMAFDDCPPAGDPKEVVGFRKRVTTDGHRGLEHHDRLRDAHERTVRWLDRCVKAHQRPSDQALFGIVQGGTDLDLRAASVEAICQHDLPGFAVGGVAVGERPEQIAEVVAFTAPRLPAQKPRYLMGVGYEQDIVHAVRSGIDMFDCVLPTRNARNAQAFTRSGRMNLKNAKFAEDDAPIDSSCDCATCTGGYSRAYIRHLLNASESMAGSLVATHNLRHFQRLMLDIRQAIRDNDWSAFRAGWPELRTDLAPLS

SEQ ID NO: 59106 - protein, 421 aa, unidentified
  source 1..421: note = Phycisphaeraceae bacterium
  REGION 1..421: note = tr|A0A1Z9QFY4|A0A1Z9QFY4_9BACT Queuine tRNA-ribosyltransferase OS=Phycisphaeraceae bacterium TMED231 OX=1986831 GN=tgt PE=3 SV=1
  VARIANT 183: note = Xaa can be any naturally occurring amino acid
  VARIANT 186: note = Xaa can be any naturally occurring amino acid
  VARIANT 192: note = Xaa can be any naturally occurring amino acid
  VARIANT 196..197: note = Xaa can be any naturally occurring amino acid
  VARIANT 215: note = Xaa can be any naturally occurring amino acid
  VARIANT 218: note = Xaa can be any naturally occurring amino acid
  VARIANT 222: note = Xaa can be any naturally occurring amino acid
  VARIANT 228: note = Xaa can be any naturally occurring amino acid
  VARIANT 241: note = Xaa can be any naturally occurring amino acid
  VARIANT 244: note = Xaa can be any naturally occurring amino acid
  VARIANT 248: note = Xaa can be any naturally occurring amino acid
  VARIANT 259: note = Xaa can be any naturally occurring amino acid
  VARIANT 263: note = Xaa can be any naturally occurring amino acid
  VARIANT 276: note = Xaa can be any naturally occurring amino acid
  VARIANT 302: note = Xaa can be any naturally occurring amino acid
  VARIANT 306: note = Xaa can be any naturally occurring amino acid
  VARIANT 315: note = Xaa can be any naturally occurring amino acid
  VARIANT 317: note = Xaa can be any naturally occurring amino acid
  VARIANT 321: note = Xaa can be any naturally occurring amino acid
  VARIANT 337: note = Xaa can be any naturally occurring amino acid
  VARIANT 342: note = Xaa can be any naturally occurring amino acid
  VARIANT 345..346: note = Xaa can be any naturally occurring amino acid
  VARIANT 348: note = Xaa can be any naturally occurring amino acid
  VARIANT 354: note = Xaa can be any naturally occurring amino acid
  VARIANT 358: note = Xaa can be any naturally occurring amino acid
MTGPLRFKVESRCSTNSARTGTVSTPHGDFKTPAFMPVATAAAMKGVLPSQVRETGSEILLNNAYHLMLRPGTELLERFGGSHRFMRWDGPILTDSGGYQAFSMSDINAIDEDGVTFKSFVDGSRVHLGPESSMAVQNAIGADIIMAFDDCPPSPHARHGSGSPRTRIPTPKDWQKRLRTANXRTXRWLERXVRAXXRPDEQALFGIVQGGTDLXRRXASIXGVCGLXLPGYAIGGVAVGXGPXLIRXIVEFTAPRLPXDRPXYLMGVGYERDIVXAVAAGVDMFDCVLPTRNGRMASVFTXQGPXRLRHARFRXDXGPIXPACDCPACGGGFSRAXLRHCXFAXXMXGPILCXLHNXRHFQRLLLDIRAAIRDDSWSSLAGRWPVLGAPDGLQKAADGSSVASSTADAELKPDAEGSKTS

SEQ ID NO: 59107 - protein, 398 aa, unidentified
  source 1..398: note = Phycisphaeraceae bacterium
  REGION 1..398: note = tr|A0A520Q5C3|A0A520Q5C3_9BACT Queuine tRNA-ribosyltransferase OS=Phycisphaeraceae bacterium; OX = 2026777 GN=tgt PE=3 SV=1
MSGPLRFEVSATCSESNARLGRVETPHGGFDTPAFMPVGTQSCVKGLWPHQVEETGSQIILNNAYHLMLRPGDAAVARRGGCHQFMRWSGPILTDSGGYQAYSMAHINRLDEDGVRFRSIVDGAWVDLGPERSMEVQNNIGADIIMAFDDCPPAGDPQDVVGFRKRVTTDGHRGLAHHERLRDAHERTVRWLDRCVKAHQRPTDQALFGIVQGGTDLELRAASVEAICQHDLPGFAVGGVAVGERPEQIAEVVAFTAPRLPAQKPRYLMGVGYEQDIVHAVRSGIDMFDCVLPTRNARNAQAFTRSGRMNLKNAKFAEDDAPIDSSCDCATCTGGYSRAYIRHLLNASESMAGSLVATHNLRHFQRLMLDIRRAIRDNDWSAFRAGWPELRTDLAPLS

SEQ ID NO: 59108 - protein, 353 aa, unidentified
  source 1..353: note = Phycisphaerae bacterium
  REGION 1..353: note = tr|A0A5C5W5P6|A0A5C5W5P6_9BACT Queuine tRNA-ribosyltransferase OS=Phycisphaerae bacterium RAS1; OX = 2528034 GN=tgt PE=3 SV=1
MPVGTRATVKSLTPEQVAAGGAQIILANTYHLLLRPGPGVVAQLGGLQRFSGWNGPMLTDSGGFQVFSLADLRRLDDDGVEFRSHIDGSPVRLTPQCSIETQNALGADIIMAFDECPALGEQNVGTWGRGKGDDRVCDAVRRTILWARRSKEAHARRDQALYGIVQGGLDLDLRQRCIDELIEIGFDGYAIGGLSVGEPPPAMWALLDAFADRLPADRPRYLMGVGRPIDIVRAVAAGVDQFDCVLPTRNGRKGYAFTSRGVTRLRNAAHKLDSGPLDPLCGCYCCRNFSRGYLRHLFMCEELLGGTLVSLHNLAFYQSLMRAMREAIERDVFAAWMAAYVDAEFRMSNSEYD

SEQ ID NO: 59109 - protein, 375 aa, unidentified
  source 1..375: note = Phycisphaerae bacterium
  REGION 1..375: note = tr|A0A1Q2MHI5|A0A1Q2MHI5_9BACT Queuine tRNA-ribosyltransferase OS=Phycisphaerae bacterium SM-Chi-D1 OX=1851148 GN=tgt PE=3 SV=1
MSIGKFEILCKDAKSNARKGLLTTGHGDIRTPVFMPVGTRGSVKGLTPEMVKDIGSQIILANTYHMYLRPGIDVVEQLGGLHKLMAWDAPILTDSGGYQVFSLSTLNRIGDDGVEFASHIDGQRIYLDPAIATDAQNRLGADIIMAFDECAPYPCERERLVSATERSIRWAKICKDSHKNDLQLLFAIVQGGIDLELRSYCADKLVEIGFPGYAMGGLSVGEGFDNMIRTTAHTVRHLPEDKPRYLMGVGMPADLIAGVREGIDMFDCVLPTRNGRNASAFTEEGPIKLRNSVYTTDIRPLEEGCGCYCCRNFSRGTLRHFFNVGEMLGPTLVSIHNITFLQRIMDKIHKNIDNNTFSEWSEEKLKKYAACGYVR

SEQ ID NO: 59110 - protein, 393 aa, unidentified
  source 1..393: note = Phycisphaerales bacterium
  REGION 1..393: note = tr|A0A3D1EWP6|A0A3D1EWP6_9BACT Queuine tRNA-ribosyltransferase OS=Phycisphaerales bacterium; OX = 2052180 GN=tgt PE=3 SV=1
MSDSPALKYELLVKDPSTHARLGRVTTVHGSFDTPAFMPVGTQGAVKGILHEDLSDLGAQIILGNTYHLMLRPGSELVAKMGGLQKWTTWNKPMLTDSGGFQVFSLSDANKITEDGVVFKSHLNGARIELTPERSMQVQNELGADIMMAFDDCPPAAQRDDADQSTGLTRHAIEQEQYLKRLKLACERSNRWLGRCVKAHARKSEQSLFGIIQGGIDLEQRKWCVDEVCSHDLPGYAIGGVAVGEGFEQLKRVVEYTAPLMPSDKPRYLMGVGYERDILTAVQAGVDMFDCVLPTRNARNANAFTPNGQMRLRNAQFADDPRPIVEGCDCACCARGYSRSYLRHMFMAKEMLGPILVTLHNLRHFQRFLLDIRTAIRDNNWSFVTERWPVACL

SEQ ID NO: 59111 - protein, 412 aa, unidentified
  source 1..412: note = Phycisphaerales bacterium
  REGION 1..412: note = tr|A0A3D0MLG4|A0A3D0MLG4_9BACT Queuine tRNA-ribosyltransferase OS=Phycisphaerales bacterium; OX = 2052180 GN=tgt PE=3 SV=1
MSNPLRFEITHSSASCDARVGRISVPHGSFQTPAFMPVGTRGSVKGLLPEQVAATGSQIILNNAWHLMLRPGDELIASLGGVHAFMQWDGPILTDSGGFQAWSLADTSLLGDDGIVFKSIIDGSKIELTPERSMQVQNNLGADIIMAFDDCPPSVDASTRVRQQRPELAAAHDQQIGHDHHQRLVEAIDRTARWLERCVAAHGRSDEQALFGIVQGGSDEGLRCRSAEQVTSFDLPGYAIGGVAVGESTETLHETVRMTAPMLPVDRPRYLMGVGYERDLVAAVRAGVDMFDCVLPSRNGRSGGIFTAKGRLQIRNARFREDQSVLEPGCDCQACGGGFSRAYLRHLFISGEMLGPILLSLHNIRHFQRLMVDIRRAIRDDAWSSLVQAWPVLGDPVAEGRSSLVPPDLAGP

SEQ ID NO: 59112 - protein, 376 aa, unidentified
  source 1..376: note = Phyllobacteriaceae bacterium
  REGION 1..376: note = tr|A0A2E1XTU2|A0A2E1XTU2_9RHIZ Queuine tRNA-ribosyltransferase OS=Phyllobacteriaceae bacterium; OX = 1871068 GN=tgt PE=3 SV=1
MSSEFTFTLLATDGGARRGEITMPRGTIRTPAFMPVGTGGTVKAMYMDQVRDLGADIILGNTYHLMLRPGAERVARLGGLHEFARWPHPILTDSGGFQVMSLAALRKLDERGVTFKSHIDGVKYEMTPERSIEIQGLLDSDIQMQLDECIRLPAEAGDVERAMELSLRWAERCKTAFGDQPGKAMFGIVQGGDVPALRVRSAEALKAMDLKGYAVGGLAVGEPQAVMLEMLDAVCPVLPGEKPRYLMGVGTPDDILKSVARGIDMFDCVMPTRAGRHGLAYTRFGKINLRNARHAEDPRPLDPDSDCPASRDYSRAYLHHLVRSGEALGGMLLTWNNLAYYQRLMQGARDAIEAGRYGDYMAQTQAGWERGDLAPL

SEQ ID NO: 59113 - protein, 375 aa, unidentified
  source 1..375: note = Phyllobacteriaceae bacterium
  REGION 1..375: note = tr|A0A3A8ADJ2|A0A3A8ADJ2_9RHIZ Queuine tRNA-ribosyltransferase OS=Phyllobacteriaceae bacterium StC1 OX=2184161 GN=tgt PE=3 SV=1
MAEFGFTLHATDGGARRGTVTTGRGDIATPAFMPVGTAGTVKGLYLDQVKGAGADIILGNTYHLMLRPGAERIDRLGGLHGFIGWDGPILTDSGGFQVMSLSALRQMSEKGVTFKSHVDGAIHEMSPERSIEIQGLLGSDIQMQLDECVALPTDAETMKAAMELSLRWAERCRVAFGEQPGKAMFGIVQGGDDEKLRVQSAEALKAMDLKGYSIGGLAVGEPQEVMLAMLDVVCPILPAHKPRYLMGVGTPQDLLRSVARGVDMFDCVMPTRSGRHGLAFTRRGRVNLKNARHAEDHRPLDDEMNCPASRTYSRAYLHHLIRSGEMLGMMLLSWHNTYYYQWLMAEMRRAIEQRRFADFSAETEAMWEAGDIAAL

SEQ ID NO: 59114 - protein, 377 aa, Phyllobacterium bourgognense
  REGION 1..377: note = tr|A0A368Z1H1|A0A368Z1H1_9RHIZ Queuine tRNA-ribosyltransferase OS=Phyllobacterium bourgognense; OX = 314236 GN=tgt PE=3 SV=1
MSENFEFKLNATDGKARRGEITMPRGTVRTPAFMPVGTGGTVKAMYMDQVRDLGADIILGNTYHLMLRPGAERVAKLGGLHEFARWPEPILTDSGGFQVMSLAQLRKLTESGVTFRSHIDGRAYEMTPERSIEIQGLLDSDIQMQLDECVALPSTPKDIQRAMELSLRWAERCKIAFGKQPGKAMFGIVQGGDVADLRIRSAQALTGMDLKGYAVGGLAVGEPQDVMLEMLDVTCPELPDDKPRYLMGVGTPDDILKSVARGIDMFDCVMPTRAGRHGLAFTRRGKVNLRNARHADDPRPLDEESPCPAARDYSRAYLHHLVKSGEALGAMLLTWNNLSYYQQLMQGIRDAIESSNFNRFTEETQVTWARGDIPLLA

SEQ ID NO: 59115 - protein, 378 aa, Phyllobacterium brassicacearum
  REGION 1..378: note = tr|A0A2P7BSV6|A0A2P7BSV6_9RHIZ Queuine tRNA-ribosyltransferase OS=Phyllobacterium brassicacearum; OX = 314235 GN=tgt PE=3 SV=1
MTSENFEFKLIANDGKARRGEITMPRGTVRTPAFMPVGTGGTVKAMYMDQVRELGADIILGNTYHLMLRPSAERVAKLGGLHEFARWPGPILTDSGGFQVMSLAQLRKLTEKSVTFRSHIDGSAYEMSPERSIEIQGLLDSDIQMQLDECVALPSTPQDIQRAMELSLRWAERCKAAFGNQPGKAMFGIVQGGDVADLRIRSAQALKAMDLKGYAVGGLAVGEPQHVMLEMLDITCPELPQEKPRYLMGVGTPDDILKSVARGIDMFDCVMPTRAGRHGLAFTRRGKINLRNARHADDPRPLDEESPCPAARDYSRAYLHHLVKSGEALGGMLLTWNNLSYYQQLMQGIRDAIEGKRYSAFMDETQNTWTRGDIPVFA

SEQ ID NO: 59116 - protein, 377 aa, unidentified
  source 1..377: note = Phyllobacterium endophyticum
  REGION 1..377: note = tr|A0A2P7AX90|A0A2P7AX90_9RHIZ Queuine tRNA-ribosyltransferase OS=Phyllobacterium endophyticum; OX = 1149773 GN=tgt PE=3 SV=1
MNENFQFKLIATDGKARRGEITMPRGTVRTPAFMPVGTGGTVKAMYMDQVRDLGADIILGNTYHLMLRPGAERVAKLGGLHDFARWPGPILTDSGGFQVMSLAQLRKLTESGVTFRSHIDGRAYEMTPERSIEIQGLLDSDIQMQLDECVALPSTPADIQRAMELSLRWAERCKAAFGNQPGKAMFGIVQGGDIADLRIRSAQALKNMDLKGYAVGGLAVGEPQEIMLEMLDATCPELPGDKPRYLMGVGTPDDILKSVARGIDMFDCVMPTRAGRHGLAFTRRGKVNLRNARHADDPRPLDEESTCPAARDYSRAYLHHLVKSGESLGAMLLTWNNLSYYQHLMQGIRSAIEAGNFNGFAGETQAAWEQGDIARYA

SEQ ID NO: 59117 - protein, 379 aa, Phyllobacterium leguminum
  REGION 1..379: note = tr|A0A318T2G3|A0A318T2G3_9RHIZ Queuine tRNA-ribosyltransferase OS=Phyllobacterium leguminum; OX = 314237 GN=tgt PE=3 SV=1
MKNPSTDFQFKLLATDGAARRGEITMPRGTVRTPAFMPVGTGGTVKAMYMDQVRDLGSDIILGNTYHLMLRPGAERVARLGGLHDFARWPGPILTDSGGFQVMSLAQLRKLNENGVTFQSHIDGRAYEMTPERSIEIQGLLDSDIQMQLDECVALPGQERDIERAMELSLRWAERCKTAFGDQPGKAMFGIVQGGDIPRLRERSATALKAMDLKGYSVGGLAVGEPQAVMLEMLDVVCPVLPAEKPRYLMGVGTPDDILKSVARGIDMFDCVMPTRAGRHGLAFTRHGKINLRNARHAEDHRPLDEESDCPAARDYSRAYLHHLIKSGEFLGAMLLTWNNLAYYQKLMQGCRDAIEAGRYADFVAQTQVGWEKGDIAPL

SEQ ID NO: 59118 - protein, 377 aa, Phyllobacterium myrsinacearum
  REGION 1..377: note = tr|A0A2S9K016|A0A2S9K016_9RHIZ Queuine tRNA-ribosyltransferase OS=Phyllobacterium myrsinacearum; OX = 28101 GN=tgt PE=3 SV=1
MTENFEFKLIATDGKARRGEITMPRGTVRTPAFMPVGTAGTVKAMYMDQVAELGADIILGNTYHLMLRPSAERIAKLGGLHDFARWPGPILTDSGGFQVMSLAQLRKLDEKGVTFRSHIDGRAHEMSPERSIEIQGLLDSDIQMQLDECVALPATPKDIQRAMELSLRWAERCKTAFGTQPGKAMFGIVQGGDVPDLRIRSAQALKAMDLKGYAVGGLAVGEPQEVMLDMLDVTCPELPEEKPRYLMGVGTPDDILKSVARGIDMFDCVMPTRAGRHGLAFTRRGKVNLRNARHADDPRPLDEESSCPAARDYSRAYLHHLVKSGEALGGMLLTWNNLAYYQQHMQGIRNAIEAKRFDAFSAETQAAWAEGDIKPYA

SEQ ID NO: 59119 - protein, 377 aa, unidentified
  source 1..377: note = Phyllobacterium salinisoli
  REGION 1..377: note = tr|A0A368K586|A0A368K586_9RHIZ Queuine tRNA-ribosyltransferase OS=Phyllobacterium salinisoli; OX = 1899321 GN=tgt PE=3 SV=1
MISKTFQFKVLATDGKARRGEITMPRGTVRTPAFMPVGTGGTVKAMYMDQVRDLGSDIILGNTYHLMLRPGAERVARLGGLHDFARWPGPILTDSGGFQVMSLAQLRKLNENGVTFRSHIDGRAYEMTPERSIEIQGLLDSDIQMQLDECVALPAQEREMERAMELSLRWAERCRTAFGEQPGKAMFGIVQGGDNARLRTHSAEALKAMDLKGYSIGGLAVGEPQNVMLEMLDVVCPVLPAEKPRYLMGVGTPDDILKSVARGVDMFDCVMPTRAGRHGLAFTRHGKINLRNARHAEDPRPLDEESNCPAARDYSRAYLHHLVKSGEFLGAMLLTWNNLAYYQSLMQGCRDAIEAGEFENFAGATQERWVRGDLPAL

SEQ ID NO: 59120 - protein, 377 aa, unidentified
  source 1..377: note = Phyllobacterium sophorae
  REGION 1..377: note = tr|A0A2P7BJ74|A0A2P7BJ74_9RHIZ Queuine tRNA-ribosyltransferase OS=Phyllobacterium sophorae; OX = 1520277 GN=tgt PE=3 SV=1
MSENFEFKLIATDGMARRGEITMPRGTVRTPAFMPVGTGGTVKAMYMDQVRDLGADIILGNTYHLMLRPSAERVAKLGGLHEFARWAGPILTDSGGFQVMSLAQLRKLTEKGVTFRSHIDGRAYEMSPERSIEIQGLLDSDIQMQLDECVALPSTPKDIERAMELSLRWAERCKVAFGNQPGKAMFGIVQGGDVADLRVRSAQALKAMDLKGYAIGGLAVGEPQDVMLEMLDITCPELPVEKPRYLMGVGTPDDILKSVARGIDMFDCVMPTRAGRHGLAFTRRGKVNLRNARHADDPRPLDEESPCPAARDYSRAYLHHLVKSGEALGGMLLTWNNLSYYQQLMQGIRDAIEAGRYSTFAEETQAAWGRGDIPLLA

SEQ ID NO: 59121 - protein, 377 aa, Phyllobacterium sp.
  REGION 1..377: note = tr|A0A1H0E221|A0A1H0E221_9RHIZ Queuine tRNA-ribosyltransferase OS=Phyllobacterium sp. OV277; OX = 1882772 GN=tgt PE=3 SV=1
MTENFEFKLIATDGKARRGEITMPRGTVRTPAFMPVGTAGTVKAMYMDQVADLGADIILGNTYHLMLRPSAERIAKLGGLHDFARWPGPILTDSGGFQVMSLAQLRKLDEKGVTFRSHIDGRAYEMSPERSIEIQGLLDSDIQMQLDECVALPSTPKDIQRAMELSLRWAERCKTAFGVQPGKAMFGIVQGGDVPDLRIRSAQALKAMDLKGYAVGGLAVGEPQDVMLDMLDVTCPELPTEKPRYLMGVGTPDDILKSVARGIDMFDCVMPTRAGRHGLAFTRRGKVNLRNARHADDPRPLDEESSCPAARDYSRAYLHHLVKSGEALGGMLLTWNNLAYYQQHMQGIRNAIEAKRFEAFSEETQGAWAQGDIPVYA

SEQ ID NO: 59122 - protein, 377 aa, Phyllobacterium sp.
  REGION 1..377: note = tr|J3HT89|J3HT89_9RHIZ Queuine tRNA-ribosyltransferase OS=Phyllobacterium sp. YR531; OX = 1144343 GN=tgt PE=3 SV=1
MTSENFEFKLIATDGKARRGEITMPRGTVRTPAFMPVGTAGTVKAMYMDQVRDLGADIILGNTYHLMLRPGAERVAKLGGLHDFARWPGPILTDSGGFQVMSLAQLRKLDEKGVTFRSHIDGRAYEMTPERSIEIQGLLDSDIQMQLDECVALPSTPKDIQRAMELSLRWAERCKVAFGTQPGKAMFGIVQGGDVPDLRIRSAQALKSMDLKGYAVGGLAVGEPQEVMLDMLDVTCPELPTEKPRYLMGVGTPDDILKSVARGIDMFDCVMPTRAGRHGLAFTRRGKVNLRNARHADDPRPLDEESTCPAARDYSRAYLHHLVKSGEALGGMLLTWNNLAYYQQLMQGVRSAIEATRFDDFVSETQAAWATGDIPVN

SEQ ID NO: 59123 - protein, 378 aa, unidentified
  source 1..378: note = Phyllobacterium zundukense
  REGION 1..378: note = tr|A0A2N9W543|A0A2N9W543_9RHIZ Queuine tRNA-ribosyltransferase OS=Phyllobacterium zundukense; OX = 1867719 GN=tgt PE=3 SV=1
MTSENFEFKLIATDGKARRGEITMPRGTVRTPAFMPVGTGGTVKAMYMDQVRDLGADIILGNTYHLMLRPSAERVAKLGGLHEFSRWQGPILTDSGGFQVMSLAQLRKLTEKGVTFRSHIDGRAYEMSPERSIEIQGLLDSDIQMQLDECVALPSTPKDIQRAMELSLRWAERCKVAFGDQPGKAMFGIVQGGDVADLRVRSAQALKAMDLKGYAVGGLAVGEPQDVMLEMLDITCPELPVEKPRYLMGVGTPDDILKSVARGIDMFDCVMPTRAGRHGLAFTRRGKVNLRNARHADDPRPLDEESPCPAARDYSRAYLHHLVKSGEALGGMLLTWNNLSYYQQLMQGIRDTIEAGRYTAFTEETQAAWTQGDIPVFA

SEQ ID NO: 59124 - protein, 375 aa, unidentified; identical to SEQ ID NO: 56374
  source 1..375: note = Phytobacter diazotrophicus
  REGION 1..375: note = tr|A0A4R4B2F7|A0A4R4B2F7_9GAMM Queuine tRNA-ribosyltransferase OS=Phytobacter diazotrophicus; OX = 395631 GN=tgt PE=3 SV=1

SEQ ID NO: 59125 - protein, 375 aa, unidentified
  source 1..375: note = Phytobacter ursingii
  REGION 1..375: note = tr|A0A508UD18|A0A508UD18_9GAMM Queuine tRNA-ribosyltransferase OS=Phytobacter ursingii OX=1972431; GN = tgt PE=3 SV=1
MKFELDTTDGRARRGRLVFDRGVVETPAFMPVGTYGTVKGMTPEEVEATGAQIILGNTFHLWLRPGQEIMKLHGDLHDFMQWKGPILTDSGGFQVFSLGDIRKITEKGVHFRNPINGDPIFLDPEKSMEIQYDLGSDIVMIFDECTPYPADWDYAKRSMEMSLRWAKRSRDRFDSLENPNALFGIIQGSVYEDLRDISVKGLVEIGFDGYAVGGLAVGEPKEDMHRILEHVCPQIPTDKPRYLMGVGKPEDLVEGVRRGIDMFDCVMPTRNARNGHLFVTNGVVKIRNAKYKSDTGSLDPECDCYTCRNYSLAYLHHLDRCNEILGARLNTIHNLRYYQRLMAGLRKAIEEGKLESFVTDFYQRQGRDVPPLNVA

SEQ ID NO: 59126 - protein, 375 aa, unidentified; identical to SEQ ID NO: 56372
  source 1..375: note = Phytobacter ursingii
  REGION 1..375: note = tr|A0A0G3QC96|A0A0G3QC96_9GAMM Queuine tRNA-ribosyltransferase OS=Phytobacter ursingii OX=1972431; GN = tgt PE=3 SV=1

SEQ ID NO: 59127 - protein, 397 aa, unidentified
  source 1..397: note = Pigmentiphaga aceris
  REGION 1..397: note = tr|A0A5C0B1M2|A0A5C0B1M2_9BURK Queuine tRNA-ribosyltransferase OS=Pigmentiphaga aceris OX=1940612; GN = tgt PE=3 SV=1
MNGLTNGLTNDNENKAGNAPTNGLSFELLATDGLARRGRMTLNHGVVETPIFMPVGTYGTVKAMAPNELVEIGSQIVLGNTFHLWLRPGTEIMDAHKGLHGFMQWNKPILTDSGGFQVFSLEGLRKITEEGVKFASPIDGTRLFLTPEESMRIQRSLNSDIAMVFDECTPYMVGDRPATTEEAAKSMRMSMRWAQRSKDEFNRLENPNALFGIVQGGMYEPLRDESLAGLTDIGFHGYAIGGLSVGEPKEDMLRILDHVGPKLPQNAPRYLMGVGTPEDLVEGVTKGIDMFDCVMPTRNARNGWLFTRFGDVKIRNARYRADMAPLDETCGCYTCRNFTRSYLHHLFRSNEILGARLNTIHNLYFYLDLMQQMRDAIGGGTFAAWRAAFAADRARGV

SEQ ID NO: 59128 - protein, 377 aa, Pigmentiphaga kullae
  REGION 1..377: note = tr|A0A4V2F451|A0A4V2F451_9BURK Queuine tRNA-ribosyltransferase OS=Pigmentiphaga kullae OX=151784; GN = tgt PE=3 SV=1
MNGLKFELLATEGQARRGRVTLNHGVVETPIFMPVGTYGTVKAMAPYELDEVGAQIVLGNTFHLWLRPGTQIIDAHGGLHGFMQWHKPILTDSGGFQVFSLEGLRKITEEGVRFASPIDGARLMLTPEESMRIQRSLNSDIAMVFDECTPYAIDGRPATVDEAATSMRMSLRWARRSRNEFDALENPNALFGIVQGGMYEALRDESLAGLTDIGFHGYAIGGLSVGEPKEDMLRILAHVAPRLPQDAPRYLMGVGTPEDLVDGVAAGVDMFDCVMPTRNARNGWLFTRYGDVKIRNARYRDDTRPLDETCGCYTCQNFSRSYLHHLFRSNEILGARLNTIHNLHYYLQLMQEMRDAIAGGVFAAWRAEFAANRARGV

SEQ ID NO: 59129 - protein, 377 aa, Pigmentiphaga sp.
  REGION 1..377: note = tr|A0A208XMJ1|A0A208XMJ1_9BURK Queuine tRNA-ribosyltransferase OS=Pigmentiphaga sp. NML080357; OX = 2008675 GN=tgt PE=3 SV=1
MNGLKFELLATEGLARRGRVTLNHGVVETPIFMPVGTYGTVKAMAPNELVEIGAQIVLGNTFHLWLRPGTQIIDAHGGLHGFMQWHKPILTDSGGFQVFSLEGLRKITEEGVRFASPIDGARLMLTPEESMRIQRSLNSDIAMVFDECTPYAIDGRPATVDEAATSMRMSLRWARRSRNEFDALENPNALFGIVQGGMYEPLRDESLAGLVDIGFHGYAIGGLSVGEPKEDMLRILAHVAPRLPQDAPRYLMGVGTPEDLVDGVAAGVDMFDCVMPTRNARNGWLFTRYGDVKIRNARYRDDTRPLDETCGCYTCRNFSRAYLHHLFRSNEILGARLNTIHNLYYYLNLMQEMRDAIAGGVFAAWRAEFAANRARGV

SEQ ID NO: 59130 - protein, 377 aa, Pigmentiphaga sp.
  REGION 1..377: note = tr|A0A3G8GHC4|A0A3G8GHC4_9BURK Queuine tRNA-ribosyltransferase OS=Pigmentiphaga sp. H8 OX=2488560; GN = tgt PE=3 SV=1
MNGLKFELLATEGQARRGRVTLNHGVVETPIFMPVGTYGTVKAMAPYELDEVGAQIVLGNTFHLWLRPGTQIIDAHGGLHGFMQWHKPILTDSGGFQVFSLEGLRKITEEGVRFASPIDGARLMLTPEESMRIQRSLNSDIAMVFDECTPYAIDGRPATVDEAATSMRMSLRWARRSRNEFEALENPNALFGIVQGGMYESLRDESLAGLQDIGFHGYAIGGLSVGEPKEDMLRILAHVAPRLPQDAPRYLMGVGTPEDLVDGVAAGVDMFDCVMPTRNARNGWLFTRYGDVKIRNARYRDDTRPLDETCGCYTCQNFSRSYLHHLFRSNEILGARLNTIHNLHYYLQLMQEMRDAIAGGVFAAWRAEFAANRARGV

SEQ ID NO: 59131 - protein, 379 aa, Pilibacter termitis
  REGION 1..379: note = tr|A0A1T4L385|A0A1T4L385_9ENTE Queuine tRNA-ribosyltransferase OS=Pilibacter termitis OX=263852; GN = tgt PE=3 SV=1
MSAIQYRLIKKEKHTGARLGEIITPHGTFPTPMFMPVGTLATVKTISPEELKEMGAGVILSNTYHLWLRPGDELVKKAGGLHKFMNWDQPILTDSGGFQVFSLSDMRNIEEEGVHFRNHLNGAKLFLSPEKAIQIQNNLGSDIMMSFDECPPFDESYDYVKKSVERTSRWALRGLNAHQNPESQGLFGIVQGAGFEDLRKQSARDLVSMDFPGYSIGGLSVGEPKEEMNRVLDFTTPLLPENKPRYLMGVGTADSLIDGVIRGIDMFDCVLPTRIARNGTCMTHSGRLVVKNAQFAEDFRPLDEKCDCYVCKNYTRAYIRHLIKCDETFGIRLTSYHNLYFLIQLMKNVREAIMNDNLLEFREAFFEEYGFNKENAKAF

SEQ ID NO: 59132 - protein, 377 aa, Pirellula sp.
  REGION 1..377: note = tr|A0A142XVE3|A0A142XVE3_9PLAN Queuine tRNA-ribosyltransferase OS=Pirellula sp. SH-Sr6A; OX = 1632865 GN=tgt PE=3 SV=1
MVQSSRFPFELLGVDASTHARRGRLHLTHGVVQTPAFMPVGTQGTVKGLTIDQVESTGAEILLGNTYHLALRPTSELVAELDGLHRFIGWDKPILTDSGGFQIFSLGDLNQVTEDGATFKSHLNGSKIHLRPEDSIRIQQELGSDVAMVLDHVIALPAEKSAVLDAMHRSIRWAERCKRYASREDQALFAIVQGGLDIELRQQCAEGLVSIGFDGYAVGGLSVGEPPEEMLRVLDGICPVLPTDQPRYLMGVGTPIDLVEGVARGIDMFDCVMPTRNGRNALAFTADGPLRMRNSCHTRDARPIEEDCPCLACRHSRAYIRHLFMCDEMLGPTLLSIHNLTFYQRLMAAARSAIEENRYGVFLDEQRVRLAPKKSQD

SEQ ID NO: 59133 - protein, 373 aa, Pirellula staleyi
  REGION 1..373: note = tr|D2R233|D2R233_PIRSD Queuine tRNA-ribosyltransferase OS=Pirellula staleyi (strain ATCC 27377 / DSM 6068 / ICPB 4128) OX=530564 GN=tgt PE=3 SV=1
MASQFSFSLLAHDSTTAARRSVFCTPHGEVQMPAFMPVGTLGTVKGLTIDMVRATGAQMVLSNTYHLALRPGDEVVRHHGGLHNFMLWDGPILTDSGGFQVFSLASQRKITEQSAMFRSHIDGSLLDLSPEKAIQIQENLGSDVAMVLDHVVELPSPKEVVRDACERSIRWAKRCQEAATRDDQAQFAIVQGGLDPEMRVWCAGELAKLNFPGYAIGGLSVGETPEAMYAVLDAVMPAMPVDKPRYLMGVGRPIDLLEAIRRGVDLFDCVLPTRNGRNAQAFTDQGPIRLRNNKYQLDREPLDPHCPCPACRHSKGYIRHLFIAGEMLGPMLLTAHNITYYQRLMAEARAAIEAGEFETFYQRKKAGWTAAGG

SEQ ID NO: 59134 - protein, 379 aa, Piscibacillus halophilus
  REGION 1..379: note = tr|A0A1H9BWK3|A0A1H9BWK3_9BACI Queuine tRNA-ribosyltransferase OS=Piscibacillus halophilus; OX = 571933 GN=tgt PE=3 SV=1
MTAIKYELIKTCKQTGARLGRVTTPHGSFETPVFMPVGTLATVKTMAPEELKDIGANIILSNTYHLWLRPGEDIVEEAGGLHKFMNWDGSILTDSGGFQVFSLSDMRKIEEKGVHFRNHLSGEKLFLSPEGATKIQNSLGSDIMMAFDECPPYPATYDYMKSSVERTSRWAERCLEAHQKPDQQGLFGIVQGGEYEDLRKQSAQDLISLDFPGYAIGGLSVGEPKDVMNRVLDFTTPLLPDDKPRYLMGVGSPDSLVDGAIRGVDMFDCVLPTRIARNGTCMTSKGRVVVRNAKFARDFTPLDDDCDCYTCRNYTKAYLRHLIKTNETLGIRLTTYHNLYFLVKLMKDVREAIKEDRLGDFRDQFFDQYGFNKPNAKNF

SEQ ID NO: 59135 - protein, 381 aa, Pisciglobus halotolerans
  REGION 1..381: note = tr|A0A1I3CS23|A0A1I3CS23_9LACT Queuine tRNA-ribosyltransferase OS=Pisciglobus halotolerans; OX = 745365 GN=tgt PE=3 SV=1
MVEPAIKYRLIKEEKHTGARLGEIITPHGTFPTPMFMPVGTLATVKSISPEELDEMGASIILSNTYHLWLRPGEDLVAEAGGLHKFMNWDKGILTDSGGFQVFSLADMRKIEEEGVHFRNHLNGAKMFLSPEKAIDIQNKLGPDIMMSFDECPPFNESHDYMKRSVERTSRWAERGLKAHANPKTQGLFGIIQGGGFEDLRKQSARDLVSLDFPGYSIGGLSVGESKEEMNRVLEYTTPLIPQLKPRYLMGVGTPDSFIDGVIRGIDMFDCVLPTRIARNGTCMTHKGRLVVKNAQYARDFGPIDDQCNCYTCRNYSRAYIRHLFKADETFGLRLTSYHNLYFLLDVMRNIRQAIKDDQLLEYREHFFEEYGYNKPGAKNF

SEQ ID NO: 59136 - protein, 371 aa, unidentified
  source 1..371: note = Piscirickettsia litoralis
  REGION 1..371: note = tr|A0A1E3GG19|A0A1E3GG19_9GAMM Queuine tRNA-ribosyltransferase (Fragment) OS=Piscirickettsia litoralis OX=1891921 GN=BGC07_01930 PE=3 SV=1
MSFELLRKDGKARRGRLSFPRGVVETPAFMPVGTYGTVKGLTPEEVSATGAHIVLGNTFHLMLRPGTDIIEQHGDLHDFMQWQGPILTDSGGFQVFSLGALRKLDEKGVTFRSPVNGSKVFMGPEESMEVQRKLGSDIVMIFDECTPYPASYETARESMELSLRWARRSKDAHGDNPAALFGIIQGGMYPDLRKRSTEGLLEIGFDGYAIGGLSVGEPKGEMFSTLEATTPLMLEDKPRYLMGVGTPDDLVEGVRRGVDMFDCVMPTRNARNGHLFTSTGVIRLRNSANKTDTRPVDEDCACSTCRNYSRAYLHHLDKCNEMLGARLNTVHNLHYYQKVMSGLRTAIDAGKLDEFVCQYYAKQNKEVPELT

SEQ ID NO: 59137 - protein, 374 aa, Piscirickettsia salmonis
  REGION 1..374: note = tr|A0A0K2L2H8|A0A0K2L2H8_PISSA Queuine tRNA-ribosyltransferase OS=Piscirickettsia salmonis; OX = 1238 GN=tgt PE=3 SV=1
MSHMSFELLHKDGRARRGRLSFPRGVVETPAFMPVGTYGTVKGLTPEEVSATGAHIVLGNTFHLMLRPGTEIIEQHGDLHDFMQWQGPILTDSGGFQVFSLGALRKLDEKGVTFRSPVNGSKVFMGPEESMWVQRKLGSDIVMIFDECTPYPASYETARESMELSLRWARRSKDAHGDNSAALFGIIQGGMYPDLRQRSTEGLLEIGFDGYAIGGLSVGEPKHEMFSTLDATTPLMQEDKPRYLMGVGTPDDLVEGVRRGVDMFDCVMPTRNARNGHLFTSEGVIRLRNSANKTDTRPVDEACACSTCRHYSRAYLHHLDKCNEMLGARLNTVHNLHYYQKVMRGLRTAIDAGKLDEFVCQYYAKQNKDVPELA

SEQ ID NO: 59138 - protein, 374 aa, Piscirickettsia salmonis
  REGION 1..374: note = tr|A0A0K2DYD1|A0A0K2DYD1_PISSA Queuine tRNA-ribosyltransferase OS=Piscirickettsia salmonis; OX = 1238 GN=tgt PE=3 SV=1
MSHMSFELLHKDGRARRGRLSFPRGVVETPAFMPVGTYGTVKGLTPEEVSATGAHIVLGNTFHLMLRPGTEIIEQHGDLHDFMQWQGPILTDSGGFQVFSLGALRKLDEKGVTFRSPVNGSKVFMGPEESMWVQRKLGSDIVMIFDECTPYPASYETARESMELSLRWARRSKDAHGDNPAALFGIIQGGMYPDLRQRSTEGLLEIGFDGYAIGGLSVGEPKHEMFSTLDATTPLMQEDKPRYLMGVGTPDDLVEGVRRGVDMFDCVMPTRNARNGHLFTSEGVIRLRNSANKTDTRPVDEACACSTCRHYSRAYLHHLDKCNEMLGARLNTVHNLHYYQKVMRGLRTAIDAGKLDEFVCQYYAKQNKDVPELA

SEQ ID NO: 59139 - protein, 371 aa, unidentified
  source 1..371: note = Piscirickettsiaceae bacterium
  REGION 1..371: note = tr|A0A3M8FMC6|A0A3M8FMC6_9GAMM Queuine tRNA-ribosyltransferase OS=Piscirickettsiaceae bacterium NZ-RLO2 OX=2163606 GN=tgt PE=3 SV=1
MSFELLHKDGRARRGRLSFPRGVVETPAFMPVGTYGTVKGLTPEEVSATGAHIVLGNTFHLMLRPGTEIIEQHGDLHDFMQWQGPILTDSGGFQVFSLGALRKLDEKGVTFRSPVNGSKVFMGPEESMWVQRKLGSDIVMIFDECTPYPASYETARESMELSLRWARRSKDAHGDNPAALFGIIQGGMYPDLRQRSTEGLLEIGFDGYAIGGLSVGEPKHEMFSTLDATTPLMQEDKPRYLMGVGTPDDLVEGVRRGVDMFDCVMPTRNARNGHLFTSEGVIRLRNSGNKTDTRPVDEACACSTCRHYSRAYLHHLDKCNEMLGARLNTVHNLHYYQKVMRGLRTAIDAGKLDEFVCQYYAKQNKDVPELA

SEQ ID NO: 59140 - protein, 371 aa, unidentified
  source 1..371: note = Piscirickettsiaceae bacterium
  REGION 1..371: note = tr|A0A2A4WFB4|A0A2A4WFB4_9GAMM Queuine tRNA-ribosyltransferase OS=Piscirickettsiaceae bacterium; OX = 2030828 GN=tgt PE=3 SV=1
MKFDLLKTESTARRGRLTFDRGTIETPAFMPVGTYGTVKAMAPEAIVETGAEIVLGNTFHLMLRPGVDVIQAHGDLHDFMHWDKPILTDSGGFQVFSLDEMRKITEEGVHFRSPVDGRKVFMGPEESMEVQRQLGSDIVMIFDECTPFPATEEEAKTSMQLSLRWAKRSKDAHGENPSALFGIIQGGMYEHLRDESLQELMNINFDGFAVGGLSVGEPKDDRERILEHIVPNMPDDKPRYLMGVGKPEDIVEAVLKGIDMFDCVMPTRNARNGYLFTRKGLVKIRNKKYQFDTSPVDAECECYTCKNYTRSYLRHLDKCKEILGSQLNTIHNLHYYQDLMRGLRKAIDEGSLDEFVEDFYQQQGKTPNAVA

SEQ ID NO: 59141 - protein, 377 aa, unidentified
  source 1..377: note = Pistricoccus aurantiacus
  REGION 1..377: note = tr|A0A5B8SRL3|A0A5B8SRL3_9GAMM Queuine tRNA-ribosyltransferase OS=Pistricoccus aurantiacus; OX = 1883414 GN=tgt PE=3 SV=1
MRDECFMQFERLARDGRARRGRLTFPRGTVDTPAFMPVGTYGTVKGMTPASIKEIGAEIILGNTFHLWLRPGTEVIEAHGDLHDFAQWDKPILTDSGGFQVFSLGETRKITEQGVHFRSPVDGAKVFMGPEESMAVQRSLGSDIVMIFDECTPYPASIEEAERSMELSLRWARRSRDAHGSSPSALFGIIQGGMYPELRKRSLEGLLKIGFDGLAIGGLSVGEPKEEMIKVLDYLPTWMPEEAPRYLMGVGKPEDLVESVRRGIDMFDCVMPTRNARNGHLFTFAGTVKIRNATHRHDTRPLEDGCDCYTCRHFSRSYLHHLDRCGEMLGSMLNTIHNLRHYQRLMAGLRGAIEAGTLANFVDTYYAGRGLAVPPGP

SEQ ID NO: 59142 - protein, 372 aa, unidentified
  source 1..372: note = Planctomicrobium piriforme
  REGION 1..372: note = tr|A0A1I3HHG9|A0A1I3HHG9_9PLAN Queuine tRNA-ribosyltransferase OS=Planctomicrobium piriforme; OX = 1576369 GN=tgt PE=3 SV=1
MTSFAFHLDYTDPTSRARLGRFETPHGVVETPIFMPVGTRGTVKGIWPDELREMGAKMILANTYHLALRPGESVVKDLGGLHAFMNWQGPILTDSGGYQVFSLAELRQMDRDRVVFKSHVDGSMFDLTPARAVQIQEDLGADVIMCLDECPPHDAPAEKMQAAVDRTTRWAALCRDAQKRPDQALFGILQGGTDQAMRERSAEGLLPLDFPGYAIGGLSVGEAPADMYSTLDFTVPLLPEHKPRYLMGVGRPIDIIEAVLRGVDMFDCVMPTRNARNATAFTSHGLVKMRNLRYQRDTRPLDANCNCPTCQQFSRGYLRHLFQVEEMLGAQALTVHNLAYYQQVMRDLRAAIKSNSAQEFRLDHLARMTADP

SEQ ID NO: 59143 - protein, 393 aa, Planctomyces sp.
  REGION 1..393: note = tr|A0A2E8EZV6|A0A2E8EZV6_9PLAN Queuine tRNA-ribosyltransferase OS=Planctomyces sp. OX=37635; GN = tgt PE=3 SV=1
MESLSFSFRLDHTDGLARAGELITSHGNVATPAFMTVATQATVKSLLPEEVESLGAEIVLSNAYHLYLRPGVDAVARLGGLHRFMGWSKPILTDSGGFQAFSMGALRKIDEDGIRFRSHIDGSEHRFGPELAIANQRGLGADIIMCLDQCIAHGVSKDEVRRAMDRTHRWAQICYDSHQASGKADVHALFGIVQGGAFSDLRDESARHITGIPFPGYAIGGLAVGESKAELYQVAGQVAGQLPKDKPRYLMGVGSPEDLVECVARGVDMFDCVLPTRVARNGALFTRTGRVDITKRRYADQAEPLDEDCDCYGCRNFSAAYLWHLFKAKELLALRLATMHNLRFILRLMKDMREAILENRFGGFQREFWDAYRPTDEAARQAQKDKWLKARGG

SEQ ID NO: 59144 - protein, 372 aa, Planctomyces sp.
  REGION 1..372: note = tr|A0A2E3GVZ2|A0A2E3GVZ2_9PLAN Queuine tRNA-ribosyltransferase OS=Planctomyces sp. OX=37635; GN = tgt PE=3 SV=1
MSQFRFELEHVDRHTGARAGKWHTPHGVVQTPTFMPVGTLGTVKGLLPEQLREAGAEMILANTYHLALRPGADVVADLGGLHEFSKWDGPILTDSGGFQVFSLAKLSKLTDDKVVFRSHIDGSVLELSPEKAIDIQEKLGADCIMCLDECPPHDVEKPRLRKAIERTTAWAKRCRDAQKRDDQALFGIVQGGIDQELRETSAAGLLPLDFPGYAIGGLSVGEDPQDMYRTLDFTTPLLPKEKPRYLMGVGKPVDLVEGILRGVDMFDCVMPTRNGRNAMAFTSNGPVKIRNAKYQRDEQPLDAEGASRVGREYSRGYLRHLFMAGEMLGPILLSWHNIAFYEQLVRDMRTAILNDESAEFRSRQLARWGMEP

SEQ ID NO: 59145 - protein, 372 aa, unidentified
  source 1..372: note = Planctomycetaceae bacterium
  REGION 1..372: note = tr|A0A1Z8MRA7|A0A1Z8MRA7_9PLAN Queuine tRNA-ribosyltransferase OS=Planctomycetaceae bacterium TMED10 OX=1986833 GN=tgt PE=3 SV=1
  VARIANT 30: note = Xaa can be any naturally occurring amino acid
MPAPAFSFQLRHRSADSLARCSEFTTPHGXVALPAFMPVGTLGTVKGVAVEQLRASGTEFVLSNTYHLALRPGAETVRNLGGLHRFMGWSGPILTDSGGYQIFSLAARTRITEQGATFRSHIDGRSIELTPERAIAIQEDLGSDVAMVLDHVVGLPSTSKEVALAMERSLRWAERCRAAAKREDQALFGIVQGGLDGDLREQSAKGLVALDFPGYAIGGLSVGETHEEMVETLKSTVPHLPEDRPRYLMGVGRPQDILQAIGQGVDMFDCVLPTRSGRHGVAFTSRGTIRLKNECHREKVEPLEENCPCLACQHSLGYLRHLFVSNEMLGPILLSIHNITYYQRLLRGAREAILADQYGAFCEACFKGWQMG

SEQ ID NO: 59146 - protein, 373 aa, unidentified
  source 1..373: note = Planctomycetaceae bacterium
  REGION 1..373: note = tr|A0A352L0T6|A0A352L0T6_9PLAN Queuine tRNA-ribosyltransferase OS=Planctomycetaceae bacterium; OX = 2026779 GN=tgt PE=3 SV=1
MSASFSFHLDAVDPGTAGRAGRWQTPHGTVQTPAFMPVGTLATVKGLLPSQLRAAGAQMVLANTYHLALRPGEKTVAEHGGLHRFMDWDGPILTDSGGFQVFSLAGMRKLTDDKVVFRSHIDGALLELTPERAVEIQEALGADCIMCLDECPPSGESVPKIQQAVDRTTRWAERCRAAQKRTDQALFAIVQGGLHAELRGRSAEGLLKIGFPGYAVGGLSVGEPPAQMYATLDCTVPLLPSDRPRYLMGVGRPEDILEAVCRGIDMFDCVMPTRNGRNAMVFTSRGPVRLRNAVHAKDQSPLDPECPCVACQRYTRSYLRHLFVAGEMLGPILASLHNITYYQTLVRQIREAVLAGTLQQFRTAQLARWGSVH

SEQ ID NO: 59147 - protein, 370 aa, unidentified
  source 1..370: note = Planctomycetales bacterium
  REGION 1..370: note = tr|A0A1W9T9N7|A0A1W9T9N7_9BACT Queuine tRNA-ribosyltransferase OS=Planctomycetales bacterium 4572_13 OX=1971638 GN=tgt PE=3 SV=1
MKSYELVNQDADSRARRGRLLTAHGVVETPVFMPVGTRGCVKGITPAQLATTGAQIVLANTYHMVIRPGTEVVESLGDLHGLMGWDGPILTDSGGYQVFSLSTLNRIGDDGVEFASHIDGAKIYLDPTVATQTQNRLGADVIMCFDECTPWPCPADRLRKAVERTIRWAQQCKDTHANEKQRLFGIVQGGVDLELRSACAQKLIPMDFDGYAIGGLSVGEGHEHMIRTVEHTTAMLPEDKPRYLMGVGMPVDIVEAVRAGVDMFDCVLPTRNGRNAYAFTNNGPIRLRNSQYVKDAGPIETDCPCYACQNFGKGTLRHFFNVGEMLGPILVSIHNLTYYQRLTNEIRTQIENKTYNEWADAFCGKHKGEA

SEQ ID NO: 59148 - protein, 300 aa, unidentified
  source 1..300: note = Planctomycetales bacterium
  REGION 1..300: note = tr|A0A1V4QSU7|A0A1V4QSU7_9BACT Queuine tRNA-ribosyltransferase (Fragment) OS=Planctomycetales bacterium 4484_113 OX=1956161 GN=B1H03_05335 PE=3 SV=1
MSASGIFELAATDGAARAGLLHLASGDVPTPYFMPIATRGMVKDATFDDLAAIGFPLILMNTYHLICRPGVEVIRKLNGLRKFSGWERAILTDSGGFQIFSLSPMTEISGEGVRFRDYASGDEFFLSPEDCVDTQLAFGSDVAMALDICTRLPAERKQVEDDLLITHEWMARGHQHWVAKGGAETGTQLFGIVQGGLERDLREKSIELVSGLGFAGIGVGGLSVGESREDYEDIAAFCAQRLPEDRPRYLMGVGTPADILQAAGMGYDLFDCVLPTRMARHGVAYGWDGYVHIRQEKWKL

SEQ ID NO: 59149 - protein, 380 aa, unidentified
  source 1..380: note = Planctomycetes bacterium
  REGION 1..380: note = tr|A0A1G2Y3J3|A0A1G2Y3J3_9BACT Queuine tRNA-ribosyltransferase OS=Planctomycetes bacterium GWF2_42_9 OX=1801958 GN=tgt PE=3 SV=1
MEVFELKNKDPNCNARTGFLNTYHGRIKTPVFMPVGTRATVKGLMPAQLADAGSQIVLGNTFHLMLRPGTEIIEKIGGLHKFMAWNKPILTDSGGFQVFSLSEINKINDDGTEFASPYDGAKIKLDATSATAIQNKLGADIIMCFDQCPAHDAPEKEQLKAVERTIRWASVCKKHHANDKQLLFGIVQGQTDLNLRKSCADELIKMDFPGYALGGLSVGEGTEEMLKTVRFAAPLLPENKPRYLMGVGTPADLIQCVEAGIDMFDCVMPTRNGRNALAFTSEGPIRLRNSSFIDDQNPIDSQCGCYCCRNFTRSAIRHYFNVGEMLGPILLSLHNIVFYHNLMDKIRENVENGTFTKWAEAALKSPAYKRNGSEKLTLNN

SEQ ID NO: 59150 - protein, 370 aa, unidentified
  source 1..370: note = Planctomycetes bacterium
  REGION 1..370: note = tr|A0A1G2Z2V5|A0A1G2Z2V5_9BACT Queuine tRNA-ribosyltransferase OS=Planctomycetes bacterium RBG_13_50_24 OX=1801962 GN=tgt PE=3 SV=1
MFTETANFQILYQDSSSSARLGLLQTAHGKIETPAFMPVGTAGAVKGITPQQLKETGAGIILGNTYHLLLRPGVETIEKLGGLHKFMAWDRPILTDSGGYQVFSLSPLTKIDDDGVEFASHVDGAKIYLNAEIATEIQNRLDADIIMCFDQCTPAGVDIPELEKAVERTILWAKRCKKAHNKPNQMLFAIVQGGINPDLRTHCAEELVKTGFDGYAVGGLSVGEGHNDMIQTVSHTTPLLPTDKPRYLMGVGTPVDIIAAVSAGIDMFDCVLPTRNGRNAFAFTENGPLRLRNNVHIDDTMPIETGCDCYCCRNFSRGALRHFFNSGEMLGPILVSIHNLTFYQRLMAKIRQAIKRNKLADLAKEFINNN

SEQ ID NO: 59151 - protein, 375 aa, unidentified
  source 1..375: note = Planctomycetia bacterium
  REGION 1..375: note = tr|A0A257U7J1|A0A257U7J1_9BACT Queuine tRNA-ribosyltransferase OS=Planctomycetia bacterium 21-64-5 OX=1970542 GN=tgt PE=3 SV=1
MTEPGAFAFRLLHQDAGCRARRSTFHTPHGAVEMPAFMPVGTQGTVKGLAIDQLRSTGAQMVLANTYHLALRPGEEVVAELGGLHAFMGFSGPILTDSGGFQIFSLAVMARIDEQGATFRSHIDGSLVALSPERAVSLQEALGSDVAMVLDHVVALPGGPPAVREAAERTVRWAERSRDAHRRRDQAQFGIIQGGLDEPLRVWCAEQLAALDFTGYAVGGLSVGESPEEMYRVLDFTVPAMPDNKPRYLMGVGRPQDLLEAIERGIDLFDCVMPTRNGRNAVAFTDVGPLRLRNKQFERDLRPLDADCPCAACRHSRGYLRHLFMAREMLGPVLLSIHNLTYYQRLLAAAREAIEADRFVEYRRGKEQVWRSGTP

SEQ ID NO: 59152 - protein, 374 aa, unidentified
  source 1..374: note = Planctomycetia bacterium
  REGION 1..374: note = tr|A0A3D3KP75|A0A3D3KP75_9BACT Queuine tRNA-ribosyltransferase OS=Planctomycetia bacterium; OX = 2052181 GN=tgt PE=3 SV=1
MRFRILRADNRSKARCGEMETSHGTVKTPVFMPVGTQATVKTLTPVQLRELGVEAIICNAYHLSLRPGEQIIKDMGGIHRFMGWDRTIVTDSGGYQVFSLRNISRTSDEGVEFSSPFTGERIFFSPERVIDIQIALGSDIMMPFDQCVPYPCERDDAKEAMLRTDRWTRRCLAALSKRESNGQALFGIVQGSVFRELRQESVERLGEMDLDGYAVGGLSVGEGRYLMNEVLGYTVEKLPWDKPRYLMGVGSPADILDAVEHGVDMFDCVLPTRNGRNGCAFTKGGKIKLFNSIYREDKRPLDDTCDCYTCRTFSRAYLRHLFFAGEILALTLVSLHNVYFFQEMMRGIREAVLAGTFVRFKEKFLEVQEKEDSK

SEQ ID NO: 59153 - protein, 374 aa, unidentified
  source 1..374: note = Planctopirus ephydatiae
  REGION 1..374: note = tr|A0A518GN51|A0A518GN51_9PLAN Queuine tRNA-ribosyltransferase OS=Planctopirus ephydatiae; OX = 2528019 GN=tgt PE=3 SV=1
MGLSKFAFTLLATDPKSMARAGLWETPHGTIETPAFMPVGTAGTVKGLTPDQLVATGARKILANTYHLALRPGPEVVADLGGLHRFFDWSGPILTDSGGFQIFSLAKLSRMTEEGVTFRSHLDGSALNLTPEKAMSIQEFLGADVIMCLDECPPADAPEEHILRAVDRTTRWAARCREAHQRSDQALFGIVQGGTIESLRIRSAEALLPFDFPGYAVGGLSVGEPPPEMYRTLEFTTPVLPVQKPRYLMGVGRPIDLIEGVLRGIDLFDCVMPTRNGRNGMAFTSTGPVRLKNARHLRDTSPLDAECPCQACQRFSRGYLRHLFMCGEMLGPILLTLHNLTFYQRLMKGLREAILEGRGHEFRASQLARWGESG

SEQ ID NO: 59154 - protein, 372 aa, unidentified
  source 1..372: note = Planctopirus hydrillae
  REGION 1..372: note = tr|A0A1C3E5Z6|A0A1C3E5Z6_9PLAN Queuine tRNA-ribosyltransferase OS=Planctopirus hydrillae; OX = 1841610 GN=tgt PE=3 SV=1
MSKFAFTLLATDPTSMARAGLWETPHGTIETPAFMPVGTAGTVKGLTPDQLAATGARKILANTYHLALRPGPEVVADLGGLHRFFDWSGPILTDSGGFQIFSLAKLSRMTEEGVTFRSHLDGSALNLTPEKAMSIQEFLGADVIMCLDECPPADAPEEHILRAVDRTTRWAARCREAHQRSDQALFGIVQGGTIESLRIRSAEALLPFDFPGYAVGGLSVGEPPPEMYRTLEFTTPVLPVQKPRYLMGVGRPIDLIEGVLRGIDLFDCVMPTRNGRNGMAFTSTGPVRLKNARHLRDTGPLDAECPCQACQRFSRGYLRHLFMCGEMLGPILLTLHNLTFYQRLMKGLREAILEGRGHEFRASQLARWGESG

SEQ ID NO: 59155 - protein, 372 aa, unidentified
  source 1..372: note = Planctopirus limnophila
  REGION 1..372: note = tr|D5SVB1|D5SVB1_PLAL2 Queuine tRNA-ribosyltransferase OS=Planctopirus limnophila (strain ATCC 43296 / DSM 3776 / IFAM 1008 / 290) OX=521674 GN=tgt; PE = 3 SV=1
MSKFAFSLLATDPKSMARAGLWETPHGTIETPAFMPVGTAGTVKGLTPDQLAATGAKKILANTYHLALRPGPEVVADLGGLHRFFDWSGPILTDSGGFQIFSLAKLSRMTEEGVTFRSHLDGSALNLTPEKAMSIQEFLGADVIMCLDECPPADAPEEHILRAVDRTTRWAARCREAHQRSDQALFGIVQGGTIESLRIRSAEALLPFDFPGYAVGGLSVGEPPPEMYRTLEFTTPVLPVQKPRYLMGVGRPIDLIEGVLRGIDLFDCVMPTRNGRNGMAFTSTGPVRLKNARHLRDTSPLDAECPCQACQRFSRGYLRHLFMCGEMLGPILLTLHNLTFYQRLMKGLREAILEGRGIEFRASQLARWGESG

SEQ ID NO: 59156 - protein, 377 aa, Planifilum fimeticola
  REGION 1..377: note = tr|A0A2T0LBS4|A0A2T0LBS4_9BACL Queuine tRNA-ribosyltransferase OS=Planifilum fimeticola OX=201975; GN = tgt PE=3 SV=1
MAVRYELIKVCKQSGARLGRLHTPHGTFETPMFMPVGTQATVKTMSPEELKEIGSGVILANTYHLYLRPGHEVVREAGGLHRFMNWNRGILTDSGGFQVFSLSTLRKITEEGVSFRSHISGEPLFLSPEKSIEVQNALGADIIMAFDECPPFPAEREYVRASLERTTRWAERCLRAHRRPEDQALFGIVQGGMYRDLREQSAAQLVAMDFPGYAVGGLSVGEPKELMYEILSHTTPLLPAGKPRYLMGVGSPDALIEGVIRGIDMFDCVLPTRIARNGTTMTSQGRLVVRNARYARDFSPLDPECDCYTCRHYTRAYIRHLIKADETFGLRLTTYHNLYFLTRLMERVREAIREDRLLDFRDQFFAKYYGGDQVKAF

SEQ ID NO: 59157 - protein, 377 aa, Planifilum fulgidum
  REGION 1..377: note = tr|A0A1I2QUQ9|A0A1I2QUQ9_9BACL Queuine tRNA-ribosyltransferase OS=Planifilum fulgidum OX=201973; GN = tgt PE=3 SV=1
MAVRYELIKVCKQSGARLGRLHTPHGTFETPMFMPVGTQATVKTMSPEELEEIGSGIILANTYHLYLRPGHEIVREAGGLHRFMNWNRGILTDSGGFQVFSLSPLRKITEEGVSFRSHISGEPLFLSPEKSIEVQNALGADIIMAFDECPPYPAEREYVRASLERTTRWAERCLKAHRRPQDQALFGIVQGGMYKDLREQSAKQLVAMDFPGYAVGGLSVGEPKELMYEILSHTTPLLPADKPRYLMGVGSPDALIEGVIRGIDMFDCVLPTRIARNGTTMTSQGRLVVRNARYARDFSPLDPECDCYTCRHYTRAYIRHLIKADEIFGLRLTTYHNLYFLTRLMERIREAIRKDRLLDFRDQFFARYYGEDPIKAF

SEQ ID NO: 59158 - protein, 336 aa, unidentified
  source 1..336: note = Planktomarina sp.
  REGION 1..336: note = tr|A0A2E0AD67|A0A2E0AD67_9RHOB Queuine tRNA-ribosyltransferase (Fragment) OS=Planktomarina sp.; OX = 2024851 GN=CMK01_03990 PE=3 SV=1
MIKQNYFKLKATSGKARLGCFKTPRGEIATPAFMPVGTAATVKAMLPLSVRETGADILLCNTYHLMLRPTAERINRLGGLHSFMNWDRPILTDSGGFQVMSLANLRKVTDDGVTFKSHIDGSRHHLSPERSIEIQQLLDSDILMCFDECPALPAKYDRIADSMRMSMIWAGRSRAVFDESRGKALFGIQQGGLEEKLREESAEKLRSIGFEGYAVGGLAVGEGQSAMFEVLDFAPNQLPVEKPRYLMGVGKPDDIVGAVARGIDMMDCVLPTRSGRTGQVFTRYGALNIKNARHQDDPRPLDELCGCPACKNYSRAYLHHVFRSQEIISSMLLTWH

SEQ ID NO: 59159 - protein, 376 aa, unidentified
  source 1..376: note = Planktotalea frisia
  REGION 1..376: note = tr|A0A1L9NV49|A0A1L9NV49_9RHOB Queuine tRNA-ribosyltransferase OS=Planktotalea frisia OX=696762; GN = tgt PE=3 SV=1
MTERFSYTLNATDGRARTGVINTPRGDIRTPAFMPVGTAATVKAMMPESVRATGADILLGNTYHLMLRPTAERIDRLGGLHKFMNWDRPILTDSGGFQVMSLAELRKLTEEGVTFKSHIDGSKHHLTPERSMEIQKLLGSDIVMCFDECPALPASDEDVRKSMELSMRWAQRSRDAFGDRPGHALFGIQQGGVTEELRGISAEKLREIEFDGYAVGGLAVGEGQEAMFGVLDYAPDMLPKDKPRYLMGVGKPDDIVGAVARGIDMMDCVLPSRSGRTGQAWTRRGQVNIKNARHSDDPRPLDEACTCPACSNYSRAYLNHVFRSHEMISGMLITWHNLHYYQELMQGMRDAISAGTFEAFQAEFHATRAMGDIEPL

SEQ ID NO: 59160 - protein, 386 aa, Planktothrix agardhii
  REGION 1..386: note = tr|A0A2Z6CEM9|A0A2Z6CEM9_PLAAG Queuine tRNA-ribosyltransferase OS=Planktothrix agardhii NIES-204; OX = 282423 GN=tgt PE=3 SV=1
MSHPFSFEIQARCSQTKARVGLFHTPHGWVETPRFMPVGTLANVKTLTPAHLKDAGAQMVLSNTYHLHLQPGEKIVAGAGGLHRFMGWDGPMLTDSGGFQVFSLSKINTITEEGVTFRSPHDGRLINFTPELSIQIQNELGADVIMAFDECPPYPATREAVVKATERTKRWLERCIKAHKRPDQALFGIVQGGVHADLRQQAARDLVEFDLPGYAIGGVSVGEPSALIEKIVQVTTPILPFNKPRYLMGIGTYREMAQAIAAGIDLFDCVIPTRLGRHGAALVQGERWNLKNAQFREDFRPLDATCPCYTCQNFSRAYLSHLVRAKEVLGYTLIAIHNVTELIRFTQRIRESILNHRFAEEFQFWLTSTDAEATLEDDEIDKRSDH

SEQ ID NO: 59161 - protein, 316 aa, Planktothrix agardhii
  REGION 1..316: note = tr|A0A073CE77|A0A073CE77_PLAAG Queuine tRNA-ribosyltransferase OS=Planktothrix agardhii NIVA-CYA 126/8 OX=388467 GN=A19Y_1362 PE=4 SV=1
MMISYADFHKMPSQRKQAMEKGLHEHLGVPKNVKFYLDNGAFSFVKNNQEVPVKEYAEFVREAKPDWFPIPQDFIPTPKMTLEEQEECFNKTMNMNFRYYQGDYVPVVHISNFLEKYIEKIIESKALSNKPYIALGGIVPNLLRASKAIPYKQIIDNLIHFRQQFPDQKLHIFGIGGTATLHLAGLLGINSVDSSGWRNRAARGLIQLPGTGDRIISQLGNWRGRTISKEEEEKLKQCQCPGCKQGGLEGLKLSGGIGFYNRATHNLWVLLEEARQIQEHLHILKDYETWYQEHLDNTTYRPLIQELILELKLFTN

SEQ ID NO: 59162 - protein, 387 aa, unidentified
  source 1..387: note = Planktothrix rubescens
  REGION 1..387: note = tr|A0A1J1L3G8|A0A1J1L3G8_PLARU Queuine tRNA-ribosyltransferase OS=Planktothrix rubescens OX=59512; GN = tgt PE=3 SV=1
MSHPFSFEVQACCSQTKARVGLFHTPHGWVETPRFMPVGTLANVKTLTPAHLKDAGAQMVLSNTYHLHLQPGEKIVAGAGGLHRFMGWDGPMLTDSGGFQVFSLSKINTITEEGVTFRSPHDGRLINFTPELSIQIQNELGADVIMAFDECPPYPATREAVVKATERTKRWLERCIKAHKRSDQALFGIVQGGVHADLRQQAARDLVEFDLPGYAIGGVSVGEPSALIEKIVQVTTPILPFNKPRYLMGIGTYREMAQAIAAGVDLFDCVIPTRLGRHGAALVQGERWNLKNAQFREDYRPLDATCPCYTCQNFSRAYLSHLVRAKEVLSYTLIAIHNVTELIRFTQRIRESILNNRFADEFEFWLTSTDASATLEDDEIDKRSDHP

SEQ ID NO: 59163 - protein, 383 aa, Planktothrix sp.
  REGION 1..383: note = tr|A0A3C1P9F4|A0A3C1P9F4_9CYAN Queuine tRNA-ribosyltransferase OS=Planktothrix sp. UBA8402; OX = 2055759 GN=tgt PE=3 SV=1
MSHPFSFEVQACCSQTKARVGLFHTPHGWVETPRFMPVGTLANVKTLTPAHLKDAGAQMVLSNTYHLHLQPGEKIVAGAGGLHRFMGWDGPMLTDSGGFQVFSLSKINTITEEGVTFRSPHDGRLIHFTPELSIQVQNELGADVIMAFDECPPYPATREAVVKATERTKRWLERCIKAHKRTDQALFGIVQGGVYADLRQQAAQDLAEFDLPGYAIGGVSVGEPSALIEKIVQVTTPILPFNKPRYLMGIGTYREMAQAIAAGVDLFDCVIPTRLGRHGAALVQGERWNLKNAQFREDYRPLDATCPCYTCQNFSRAYLSHLVRAKEVLSYTLIAIHNVTELIRFTQRIRESILNHRFADEFQFWLTSTDAVATLEDYEIDSP

SEQ ID NO: 59164 - protein, 386 aa, Planktothrix sp.
  REGION 1..386: note = tr|A0A1T4ZGI7|A0A1T4ZGI7_9CYAN Queuine tRNA-ribosyltransferase OS=Planktothrix sp. PCC 11201; OX = 1729650 GN=tgt PE=3 SV=1
MSHPFSFEVQACCSQTKARVGLFHTPHGWVETPRFMPVGTLANVKTLTPAHLKDAGAQMVLSNTYHLHLQPGEKIVAGAGGLHRFMGWDGPMLTDSGGFQVFSLSKINTITEEGVTFRSPHDGRLINFTPELSIQIQNELGADVIMAFDECPPYPATREAVVKATERTKRWLERCIKAHKRPDQALFGIVQGGVHADLRQQAARDLVEFDLPGYAIGGVSVGEPSALIEKIVQVTTPILPFNKPRYLMGIGTYREMAQAIAAGVDVFDCVIPTRLGRHGAALVQGERWNLKNAQFREDYRPLDATCPCYTCQNFSRAYLSHLVRAKEVLSYTLIAIHNVTELIRFTQRIRESILNHRFADEFKFWLTSTDAEATLEDYEIDKRSDH

SEQ ID NO: 59165 - protein, 387 aa, unidentified
  source 1..387: note = Planktothrix tepida
  REGION 1..387: note = tr|A0A1J1LQL1|A0A1J1LQL1_9CYAN Queuine tRNA-ribosyltransferase OS=Planktothrix tepida PCC 9214; OX = 671072 GN=tgt PE=3 SV=1
MSHPFSFEVQACCSQTKARVGLFHTPHGWVETPRFMPVGTLANVKTLTPAHLKDAGAQMVLSNTYHLHLQPGENIVARAGGLHRFMGWDGPILTDSGGFQVFSLSEIRTITEDGVTFRSPHDGKIINFTPERSIQIQNELGADVIMAFDECPPYPASREAVLKATERTKRWLERCINAHQRSDQALFAIVQGGIYADLRQKAAQELVEFDLPGYAIGGVSVGEPVTLIEKIVQVTTPILPFNKPRYLMGVGTYREMAQAIAAGVDLFDCVIPTRLARHGAALIKGERLNLKNAQFREDFQPLDETCPCYTCQNFSRAYISHLVRAKELLGYTLISIHNVTELIRFTQRIRDAILNHRFAEEFQFWLSPAPDTETVLDEVEINKRSHG

SEQ ID NO: 59166 - protein, 380 aa, Planococcus antarcticus
  REGION 1..380: note = tr|A0A1C7DIA5|A0A1C7DIA5_9BACL Queuine tRNA-ribosyltransferase OS=Planococcus antarcticus DSM 14505 OX=1185653 GN=tgt PE=3 SV=1
MTPAVTYEHIKTCKQTGARLGIVHTPHGSFETPAFMPVGTQATVKTMSPEELKAMNAGIILSNTYHLWLRPGNDVIKEAGGLHKFMNWDRPILTDSGGFQVFSLSEFRNIKEEGVHFRNHMNGDKLFLSPEKAMHIQNDLGSDIMMAFDECPPFPATHEYMKSSVERTSRWAERCLEAHERKADQGLFGIIQGGEFEDLRKQSAQDLVSLDFPGYAIGGLSVGEPKDVMNRALEFTTPLMPADKPRYLMGVGSPDSLIDGAIRGIDMFDCVLPTRIARNGTLMTSTGRLNIKNAAFKRDFGPIDDKCDCYTCTNYSRAYVHHLIRADETFGIRLTSYHNLQFLLNLMGQVRQAIREDRLGDFREEFFEAYGFNKPNAKNF

SEQ ID NO: 59167 - protein, 380 aa, Planococcus citreus
  REGION 1..380: note = tr|A0A497YHU6|A0A497YHU6_9BACL Queuine tRNA-ribosyltransferase OS=Planococcus citreus OX=1373; GN = tgt PE=3 SV=1
MTHAVTYEHIKTCKQTGARLGIVHTPHGSFETPAFMPVGTQATVKTMSPEELKAMNAGIILSNTYHLWLRPGNDVIKEAGGLHKFMNWDRPILTDSGGFQVFSLSEFRNIKEEGVHFRNHMNGDKLFLSPEKAMQIQNDLGSDIMMAFDECPPYPATHDYMKSSVERTSRWAERCLEAHARPQDQGLFGIIQGGEYEDLRRQSAEDLVALDFPGYAIGGLSVGEPKDVMNRALEFTTPFMPFDKPRYLMGVGSPDSLIDGSIRGIDMFDCVLPTRIARNGTLMTSEGRLNLKNAKFKRDFTPIDEKCTCYTCTNYTRAYVHHLLRADETFGIRLTSYHNLHFLLNLMEQVRQAIREDRLGDFREEFFEAYGFNKPNAKNF

SEQ ID NO: 59168 - protein, 380 aa, Planococcus donghaensis
  REGION 1..380: note = tr|A0A1C7EIL8|A0A1C7EIL8_9BACL Queuine tRNA-ribosyltransferase OS=Planococcus donghaensis; OX = 414778 GN=tgt PE=3 SV=1
MTAAVTYEHIKTCKQTGARLGIVHTPHGSFETPAFMPVGTQATVKTMSPEELKAMNAGIILSNTYHLWLRPGNDVIKEAGGLHKFMNWDRPILTDSGGFQVFSLSEFRNIKEEGVHFRNHMNGDKLFLSPEKAMHIQNDLGSDIMMAFDECPPFPATHEYMKSSVERTSRWAERCLEAHQRPQDQGLFGIIQGGEFEDLRKQSAQDLVSLDFPGYAIGGLSVGEPKDVMNRALEFTTPLMPANKPRYLMGVGSPDSLIDGAIRGIDMFDCVLPTRIARNGTLMTSTGRLNIKNAAFKRDFGPIDEKCDCYTCTNYSRAYVHHLIRADETFGIRLTSYHNLQFLLNLMGQVRQAIREDRLGDFREEFFEAYGFNKPNAKNF

SEQ ID NO: 59169 - protein, 380 aa, Planococcus donghaensis
  REGION 1..380: note = tr|E7RIL5|E7RIL5_9BACL Queuine tRNA-ribosyltransferase OS=Planococcus donghaensis MPA1U2; OX = 933115 GN=tgt PE=3 SV=1
MTAAVTYEHIKACKQTGARLGIVHTPHGSFETPAFMPVGTQATVKTMSPEELKAMNAGIILSNTYHLWLRPGNDVIKEAGGLHKFMNWDRPILTDSGGFQVFSLSEFRNIKEEGVHFRNHMNGDKLFLSPEKAMHIQNDLGSDIMMAFDECPPFPATHEYMKSSVERTSRWAERCLEAHQRPQDQGLFGIIQGGEFEDLRKQSAQDLVSLDFPGYAIGGLSVGEPKDVMNRALEFTTPLMPANKPRYLMGVGSPDSLIDGAIRGIDMFDCVLPTRIARNGTLMTSTGRLNIKNAAFKRDFGPIDEKCDCYTCTNYSRAYVHHLIRADETFGIRLTSYHNLQFLLNLMGQVRQAIREDRLGDFREEFFEAYGFNKPNAKNF

SEQ ID NO: 59170 - protein, 380 aa, unidentified
  source 1..380: note = Planococcus halocryophilus
  REGION 1..380: note = tr|A0A1C7DNN5|A0A1C7DNN5_9BACL Queuine tRNA-ribosyltransferase OS=Planococcus halocryophilus; OX = 1215089 GN=tgt PE=3 SV=1
MTAAVTYEHIKTCKQTGARLGIVHTPHGSFETPAFMPVGTQATVKTMSPEELKAMNAGIILSNTYHLWLRPGNDVIKEAGGLHKFMNWDRPILTDSGGFQVFSLSEFRNIKEEGVHFRNHMNGDKLFLSPEKAMHIQNDLGSDIMMAFDECPPFPATHEYMKSSVERTSRWAERCLEAHQRPQDQGLFGIIQGGEFEDLRKQSAQDLVSLDFPGYAIGGLSVGEPKDVMNRALEFTTPLMPADKPRYLMGVGSPDSLIDGAIRGIDMFDCVLPTRIARNGTLMTSTGRLNIKNAAFKRDFGPIDEKCDCYTCTNYSRAYVHHLIRADETFGIRLTSYHNLQFLLNLMRQVRQAIREDRLGDFREEFFEAYGFNKPNAKNF

SEQ ID NO: 59171 - protein, 380 aa, unidentified
  source 1..380: note = Planococcus halotolerans
  REGION 1..380: note = tr|A0A365KUA1|A0A365KUA1_9BACL Queuine tRNA-ribosyltransferase OS=Planococcus halotolerans; OX = 2233542 GN=tgt PE=3 SV=1
MTEAIRYEHIKTCKQTGARLGIVHTPHGSFETPAFMPVGTQATVKTMSPEELKAMNAGIILSNTYHLWLRPGNDVIKEAGGLHKFMNWDRPILTDSGGFQVFSLSEFRNIKEEGVHFRNHMNGDKLFLSPEKAMEIQNDLGSDIMMAFDECPPYPASHEYMKSSVERTSRWAERCLEAHARKDVQGLFGIIQGGEYEDLRKQSAQDLVSLDFPGYAIGGLSVGEPKDVMNRALEFTTPLMPANKPRYLMGVGSPDSLIDGAIRGIDMFDCVLPTRIARNGTLMTSTGRLNIKNAAFKRDFNPIDEKCDCYTCKNYTRAYVHHLIRADETFGIRLTSYHNLQFLLNLMEQVRQAIREDRLGDFREEFFEAYGFNKPNAKNF

SEQ ID NO: 59172 - protein, 380 aa, Planococcus kocurii
  REGION 1..380: note = tr|A0A0U2ZI86|A0A0U2ZI86_9BACL Queuine tRNA-ribosyltransferase OS=Planococcus kocurii OX=1374; GN = tgt PE=3 SV=1
MTAAVTYEHIKTCKQTGARLGIVHTPHGSFETPAFMPVGTQATVKTMSPEELKAMNAGIILSNTYHLWLRPGNDVIKEAGGLHKFMNWDRPILTDSGGFQVFSLSEFRNIKEEGVHFRNHMNGDKLFLSPEKAMHIQNDLGSDIMMAFDECPPFPATHEYMKSSVERTSRWAERCLEAHQRPQDQALFGIIQGGEFEDLRKQSAQDLVSLDFPGYAIGGLSVGEPKDVMNRALEYTTPLMPADKPRYLMGVGSPDSLIDGAIRGIDMFDCVLPTRIARNGTLMTSTGRLNIKNAAFKRDFGPIDDKCDCYTCTNYSRAYVHHLIRADETFGIRLTSYHNLQFLLNLMGQVRQAIREDRLGDFREEFFEAYGFNKPNAKNF

SEQ ID NO: 59173 - protein, 380 aa, Planococcus maitriensis
  REGION 1..380: note = tr|A0A365K7D6|A0A365K7D6_9BACL Queuine tRNA-ribosyltransferase OS=Planococcus maitriensis; OX = 221799 GN=tgt PE=3 SV=1
MTHAVTYEHIKTCKQTGARLGIVHTPHGSFETPAFMPVGTQATVKTMSPEELKAMNAGIILSNTYHLWLRPGNDVIKEAGGLHKFMNWDRPILTDSGGFQVFSLSEFRNIKEEGVHFRNHMNGDKLFLSPEKAMQIQNDLGSDIMMAFDECPPYPATHEYMKSSVERTSRWAERCLEAHARPQDQGLFGIIQGGEYEDLRRQSAEDLVALDFPGYAIGGLSVGEPKDVMNRALEFTTPFMPFDKPRYLMGVGSPDSLIDGSIRGIDMFDCVLPTRIARNGTLMTSTGRLNLKNAKFKHDFTAIDEKCTCYTCTNYTRAYVHHLLRADETFGIRLTSYHNLHFLLNLMEQVRQAIREDRLGDFREEFFEAYGFNKPNAKNF

SEQ ID NO: 59174 - protein, 380 aa, Planococcus maritimus
  REGION 1..380: note = tr|A0A150W5B7|A0A150W5B7_PLAMR Queuine tRNA-ribosyltransferase OS=Planococcus maritimus OX=192421; GN = tgt PE=3 SV=1
MTHAVTYEHIKTCKQTGARLGIVHTPHGSFETPAFMPVGTQATVKTMSPEELKAMNAGIILSNTYHLWLRPGNDVIKEAGGLHKFMNWDRPILTDSGGFQVFSLSEFRNIKEEGVHFRNHMNGDKLFLSPEKAMQIQNDLGSDIMMAFDECPPYPATHEYMKSSVERTSRWAERCLAAHARPEDQGLFGIIQGGEYEDLRRQSAEDLVALDFPGYAIGGLSVGEPKDVMNRALEFTTPFMPFDKPRYLMGVGSPDSLIDGAIRGIDMFDCVLPTRIARNGTLMTSEGRLNLKNAKFKRDFTPIDEKCTCYTCTNYTRAYVHHLLRADETFGIRLTSYHNLHFLLNLMEQVRQAIREDRLGDFREEFFEAYGFNKPNAKNF

SEQ ID NO: 59175 - protein, 380 aa, unidentified
  source 1..380: note = Planococcus massiliensis
  REGION 1..380: note = tr|A0A098EL76|A0A098EL76_9BACL Queuine tRNA-ribosyltransferase OS=Planococcus massiliensis; OX = 1499687 GN=tgt PE=3 SV=1
MTQAVWYEHIKTCKQTGARLGIVHTPHGSFETPAFMPVGTQATVKTMSPEELKAMNAGIILSNTYHLWLRPGNDVIREAGGLHKFMNWDRPILTDSGGFQVFSLSEFRNIKEEGVHFRNHMNGDKLFLSPEKAMEIQNDLGSDIMMAFDECPPYPASHDYMKSSVERTSRWAERCLEAHARKNDQGLFGIVQGGEYEDLRKQSARDLVSLDFPGYAIGGLSVGEPKDVMNRALEFTTPLLPENKPRYLMGVGSPDSLIDGAIRGVDMFDCVLPTRIARNGTLMTSTGRLNVKNAAFKRDFGPIDEKCDCYTCTNYTRAYVHHLIRTDETFGIRLTSYHNLHFLLNLMEQVRQAIREDRLGDFREEFFEAYGFNKPNAKNF

SEQ ID NO: 59176 - protein, 380 aa, Planococcus plakortidis
  REGION 1..380: note = tr|A0A1C7E6W8|A0A1C7E6W8_9BACL Queuine tRNA-ribosyltransferase OS=Planococcus plakortidis; OX = 1038856 GN=tgt PE=3 SV=1
MTHAVTYEHIKTCKQTGARLGIVHTPHGSFETPAFMPVGTQATVKTMSPEELKAMNAGIILSNTYHLWLRPGNDVIREAGGLHKFMNWDRPILTDSGGFQVFSLSEFRNIKEEGVHFRNHMNGDKLFLSPEKAMQIQNDLGSDIMMAFDECPPYPATHEYMKSSVERTSRWAERCLEAHARPQDQGLFGIIQGGEYEDLRRQSAEDLVALDFPGYAIGGLSVGEPKDVMNRALEFTTPFMPFDKPRYLMGVGSPDSLIDGSIRGIDMFDCVLPTRIARNGTLMTSTGRLNLKNAKFKRDFTPIDEKCTCYTCTNYTRAYVHHLLRADETFGIRLTSYHNLHFLLNLMEQVRQAIREDRLGDFREEFFEAYGFNKPNAKNF

SEQ ID NO: 59177 - protein, 380 aa, Planococcus rifietoensis
  REGION 1..380: note = tr|A0A0U2Q6P8|A0A0U2Q6P8_9BACL Queuine tRNA-ribosyltransferase OS=Planococcus rifietoensis; OX = 200991 GN=tgt PE=3 SV=1
MTHAVTYEHIKTCKQTGARLGIVHTPHGSFETPAFMPVGTQATVKTMSPEELKAMNAGIILSNTYHLWLRPGNDVIKEAGGLHKFMNWDRPILTDSGGFQVFSLSEFRNIKEEGVHFRNHMNGDKLFLSPEKAMQIQNDLGSDIMMAFDECPPYPATHEYMKSSVERTSRWAERCLAAHERPQDQGLFGIIQGGEYEDLRRQSAEDLVALDFPGYAIGGLSVGEPKDVMNRALEFTTPFMPFDKPRYLMGVGSPDSLIDGAIRGIDMFDCVLPTRIARNGTLMTSEGRLNLKNAKFKRDFTPIDEKCTCYTCTNYTRAYVHHLLRADETFGIRLTSYHNLHFLLNLMEQVRQAIREDRLGDFREEFFEAYGFNKPNAKNF

SEQ ID NO: 59178 - protein, 380 aa, unidentified
  source 1..380: note = Planococcus salinus
  REGION 1..380: note = tr|A0A3M8PB63|A0A3M8PB63_9BACL Queuine tRNA-ribosyltransferase OS=Planococcus salinus OX=1848460; GN = tgt PE=3 SV=1
MTQAVTYEHIKTCKQTGARLGIVHTPHGSFETPAFMPVGTQATVKTMSPEELKAMDAGIILSNTYHLWLRPGNDVVKEAGGLHKFMNWDRPILTDSGGFQVFSLSEFRNIKEEGVHFRNHMNGDKLFLSPEKAMQIQNDLGSDIMMAFDECPPYPASHEYMKSSVERTSRWAERCLEAHGRKEDQGLFGIIQGGEYEDLRKQSAQDLVSLDFPGYAIGGLSVGEPKDVMNRALEFTTPLMPFNKPRYLMGVGSPDSLIDGAIRGIDMFDCVLPTRIARNGTLMTSTGRLNVKNAAFKRDFGPIDEKCDCYTCQNYSRAYVHHLIRADETFGLRLTSYHNLRFLLNLMEQVRQAIREDRLGDFREEFFEAYGFNKPNAKNF

SEQ ID NO: 59179 - protein, 380 aa, Planococcus sp.
  REGION 1..380: note = tr|A0A5C5T242|A0A5C5T242_9BACL Queuine tRNA-ribosyltransferase OS=Planococcus sp. CPCC 101016; OX = 2599617 GN=tgt PE=3 SV=1
MTAAVTYEHIKTCKQTGARLGIVHTPHGSFETPAFMPVGTQATVKTMSPEELKAMNAGIILSNTYHLWLRPGNDIIKEAGGLHKFMNWDRPILTDSGGFQVFSLSEFRNIKEEGVHFRNHMNGDKLFLSPEKAMQIQNDLGSDIMMAFDECPPFPATHEYMKSSVERTSRWAERCLEAHERKADQGLFGIIQGGEFEDLRKQSAQDLVSLDFPGYAIGGLSVGEPKDVMNRALEFTTPLMPANKPRYLMGVGSPDSLIDGAIRGIDMFDCVLPTRIARNGTLMTSTGRLNIKNAAFKRDFGPIDEKCDCYTCKNYSRAYVHHLIRADETFGIRLTSYHNLQFLLNLMEQVRQAIREDRLGDFREEFFEAYGFNKPNAKNF

SEQ ID NO: 59180 - protein, 380 aa, Planococcus sp.; identical to SEQ ID NO: 59172
  REGION 1..380: note = tr|A0A5B0CW75|A0A5B0CW75_9BACL Queuine tRNA-ribosyltransferase OS=Planococcus sp. ANT_H30; OX = 2597347 GN=tgt PE=3 SV=1

SEQ ID NO: 59181 - protein, 380 aa, unidentified
  source 1..380: note = Planococcus versutus
  REGION 1..380: note = tr|A0A1B1RXF1|A0A1B1RXF1_9BACL Queuine tRNA-ribosyltransferase OS=Planococcus versutus OX=1302659; GN = tgt PE=3 SV=1
MTPAVTYEHIKTCKQTGARLGIVHTPHGSFETPAFMPVGTQATVKTMSPEELKAMNAGIILSNTYHLWLRPGNDVIKEAGGLHKFMNWDRPILTDSGGFQVFSLSEFRNIKEEGVHFRNHMNGDKLFLSPEKAMHIQNDLGSDIMMAFDECPPFPATHEYMKSSVERTSRWAERCLKAHQRPQDQGLFGIIQGGEFEDLRKQSAQDLVSLDFPGYAIGGLSVGEPKDVMNRALEFTTPLMPADKPRYLMGVGSPDSLIDGAIRGIDMFDCVLPTRIARNGTLMTSTGRLNIKNAAFKRDFGPIDDKCDCYTCKNYSRAYVHHLIRADETFGIRLTSYHNLQFLLNLMGQVRQAIREDRLGDFREEFFEAYGFNKPNAKNF

SEQ ID NO: 59182 - protein, 380 aa, Planomicrobium glaciei
  REGION 1..380: note = tr|A0A1G8IP06|A0A1G8IP06_9BACL Queuine tRNA-ribosyltransferase OS=Planomicrobium glaciei; OX = 459472 GN=tgt PE=3 SV=1
MTEAVWYEHIKTCKQTGARLGIVHTPHGSFETPAFMPVGTQATVKTMSPEELKAMDAGIILSNTYHLWLRPGNDVIREAGGLHKFMNWDRPILTDSGGFQVFSLSEFRNIKEEGVHFRNHMNGDKLFLSPEKAMEIQNDLGSDIMMAFDECPPYPASHEYMKSSVERTSRWAERCMEAHARKKDQGLFGIIQGGEYEDLRKQSARDLVSLDFPGYAIGGLSVGEPKDVMNRALEFTTPLLPTDKPRYLMGVGSPDSLIDGAIRGVDMFDCVLPTRIARNGTLMTSTGRLNIKNAAFKRDFTPIDEKCDCYTCTNYTRAYVHHLIRADETFGIRLTSYHNLQFLLNLMKQVRQAIREDRLGDFREEFFEAYGFNKPNAKNF

SEQ ID NO: 59183 - protein, 380 aa, unidentified
  source 1..380: note = Planomicrobium soli
  REGION 1..380: note = tr|A0A2P8GMC3|A0A2P8GMC3_9BACL Queuine tRNA-ribosyltransferase OS=Planomicrobium soli OX=1176648; GN = tgt PE=3 SV=1
MTPAVTYEHIKTCKQTGARLGIVHTPHGSFETPAFMPVGTQATVKTMSPEELKAMNAGIILSNTYHLWLRPGNDVIKEAGGLHKFMNWDRPILTDSGGFQVFSLSEFRNIKEEGVHFRNHMNGDKLFLSPEKAMQIQNDLGSDIMMAFDECPPYPASHEYMKSSVERTSRWAERCLEAHARPNEQALFGIIQGGEYEDLRQQSARDLVSLDFPGYAIGGLSVGEPKDVMNRALEFTTPLMPFDKPRYLMGVGSPDSLIDGAIRGVDMFDCVLPTRIARNGTLMTSTGRLNIKNAAFKRDFGPIDEKCDCYTCTNYTRAYVHHLIRADETFGIRLTSYHNLQFLLNLMEQVRQAIREDRLGDFREEFFEAYGFNLPNAKNF

SEQ ID NO: 59184 - protein, 379 aa, Planomicrobium sp.
  REGION 1..379: note = tr|A0A5C5T7B4|A0A5C5T7B4_9BACL Queuine tRNA-ribosyltransferase OS=Planomicrobium sp. CPCC 101079; OX = 2599618 GN=tgt PE=3 SV=1
MPAVTYEHIKTCKQTGARLGIVHTPHGSFETPAFMPVGTQATVKTMSPEELKAMNAGIILSNTYHLWLRPGNDVIKEAGGLHKFMNWDRPILTDSGGFQVFSLSEFRNIKEEGVHFRNHMNGDKLFLSPEKAMQIQNDLGSDIMMAFDECPPYPASHEYMKSSVERTSRWAERCLEAHARPNDQALFGIIQGGEYEDLRKQSARDLVSLDFPGYAIGGLSVGEPKDVMNRALEFTTPLMPFDKPRYLMGVGSPDSLIDGAIRGVDMFDCVLPTRIARNGTLMTSTGRLNIKNAAFKRDFGPIDEKCDCYTCTNYTRAYVHHLIRADETFGIRLTSYHNLQFLLNLMEQVRQAIREDRLGDFREEFFEAYGFNLPNAKNF

SEQ ID NO: 59185 - protein, 380 aa, Planomicrobium sp.
  REGION 1..380: note = tr|A0A3L7JPI9|A0A3L7JPI9_9BACL Queuine tRNA-ribosyltransferase OS=Planomicrobium sp. Y74; OX = 2478977 GN=tgt PE=3 SV=1
MTEAIRYEHIKTCKQTGARLGIVHTPHGSFETPAFMPVGTQATVKTMSPEELKAMNAGIILSNTYHLWLRPGNDVIKEAGGLHKFMNWDRPILTDSGGFQVFSLSEFRNIKEEGVHFRNHMNGDKLFLSPEKAMEIQNDLGSDIMMAFDECPPYPASHEYMKSSVERTSRWAERCLEAHARKDVQGLFGIIQGGEYEDLRKQSAQDLVSLDFPGYAIGGLSVGEPKDVMNRALEFTTPLMPTNKPRYLMGVGSPDSLIDGAIRGVDMFDCVLPTRIARNGTLMTSTGRLNIKNAAFKRDFNPIDEKCDCYTCKNYTRAYVHHLIRADETFGIRLTSYHNLQFLLNLMEQVRQAIREDRLGDFREEFFEAYGFNKPNAKNF

SEQ ID NO: 59186 - protein, 373 aa, Plasticicumulans acidivorans
  REGION 1..373: note = tr|A0A317MRQ0|A0A317MRQ0_9GAMM Queuine tRNA-ribosyltransferase OS=Plasticicumulans acidivorans; OX = 886464 GN=tgt PE=3 SV=1
MHFQLLNADGPARRGRLTFDRGTVETPAFMPVGTYGTVKAMTPEELTDIGAQIILGNTFHLMLRPGTEVIQAHGDLHDFMHWGGPILTDSGGFQVFSLAELRKIDERGVTFQNPVNGDRVFLGPEESMAVQHALGSDIVMIFDECTPYPATEEQARSSMELSLRWAKRSRAAFDALGNRNALFGIVQGGMYPPLRTRSAQGLQEIGFDGYAIGGLAVGEPMSERNLMLEHTTPLLPAERPRYLMGVGKPEDIVESVARGIDMFDCVMPTRNARNGHYFTWDGDVRIRNSRYRLDTRPISEDCGCYACRHYSRAYLRHLDRNQEILGARLASIHNLYFYQDLMRGIRAAIAENRFEAFRLDFHARRQGGGDARV

SEQ ID NO: 59187 - protein, 373 aa, unidentified
  source 1..373: note = Plasticicumulans lactativorans
  REGION 1..373: note = tr|A0A4R2L6D9|A0A4R2L6D9_9GAMM Queuine tRNA-ribosyltransferase OS=Plasticicumulans lactativorans; OX = 1133106 GN=tgt PE=3 SV=1
MQFELLHTDGAARRGRLRFARGSVETPVFMPVGTYATVKAMTPEELRASGAEIILGNTFHLWLRPGTEVIRAHGDLHGFMHWDGPILTDSGGFQVFSLAELRTISEAGVSFRSPVNGDRVFLGPEESMQIQHALGSDVVMIFDECTPFPATEEQARASMELSLRWAARSRAEHDRLGNAQALFGIVQGGMYPALRAASAAGLQAIGFDGYAIGGLAVGEPMAVRNAMLDSTVPHLPAARPRYLMGVGKPEDLVEGVLRGVDMFDCVMPTRNARNGHYFTHDGDVRIRNSRYRDDTRPIAEDCDCYTCAHYSRAYLRHLDNCDEILGARLGTLHNCRYYQQLMARLRDAIAAGRLAEYVREFYARRGKPSDARV

SEQ ID NO: 59188 - protein, 374 aa, Plautia stali
  REGION 1..374: note = tr|U3U397|U3U397_9ENTR Queuine tRNA-ribosyltransferase OS=Plautia stali symbiont; OX = 891974 GN=tgt PE=3 SV=1
MKFELDTTDGRARRGRLVFDRGVVETPAFMPVGTYGTVKGMTPEEVKETSAQILLGNTFHLWLRPGQEIMKLHGDLHDFMHWQGPILTDSGGFQMFSLGDIRKITEAGVHFRNPINGDPIFLDPEKSMEIQFDLGSDIVMIFDECTPYPADWDYAKRSMEMSLRWAQRSRDRFDALGNKNALFGIIQGGVYEDLRDVSVKGLVEIGFDGYAVGGLAVGEPKEDMHRILEHVCPQIPQDKPRYLMGVGKPEDLVEGVRRGIDMFDCVMPTRNARNGHLFVTNGVVKIRNAKYKDDTAPLDAECDCYTCRNYTRAYLHHLDRCNEILGARLNTIHNLRYYQRLMAGLRQAIEEGKLEHFVSEFYQRTGKAVPPLNV

SEQ ID NO: 59189 - protein, 368 aa, unidentified
  source 1..368: note = Pleionea mediterranea
  REGION 1..368: note = tr|A0A316FQ76|A0A316FQ76_9GAMM Queuine tRNA-ribosyltransferase OS=Pleionea mediterranea OX=523701; GN = tgt PE=3 SV=1
MATDGVARRGELSFSRGKVQTPAFMPVGTYGTVKAMSPDDVKAIGAEIVLGNTFHLMLRPGTEIIKQHGDLHDFMHWQGPILTDSGGFQVFSLGELRKITEKGVEFRSPINGSKVFLGPEESMQVQRDLGSDIVMIFDECTPYPATWEEAKSSMEMSLRWAERSKTAHGDNPNALFGIVQGGMYEDLRQVSAEGLKQIGFDGYALGGLSVGETKEEMKQVLNYTVPLLPEQKPRYLMGVGKPEDIVEAVRRGIDMFDCVMPTRNARNGHLFTADGVVRLRNSPHKRDTGPIEEACDCYTCKNYSRSYLHHLDKCGEILGARLTTIHNLRYYQRLMASLRDAIETGTLADFVADFYQRRGLDVPALNES

SEQ ID NO: 59190 - protein, 378 aa, unidentified
  source 1..378: note = Pleomorphomonas carboxyditropha
  REGION 1..378: note = tr|A0A2G9WVT7|A0A2G9WVT7_9RHIZ Queuine tRNA-ribosyltransferase OS=Pleomorphomonas carboxyditropha; OX = 2023338 GN=tgt PE=3 SV=1
MTQPFSFRLLATDGRARRGEILTPHGVVRTPAFMPVGTLGTVKAMFMDDVKATGADVILGNTYHLMLRPGAERVAALGGLHKFSTWDKTILTDSGGFQVMSLAKLRRMDEQGVTFQSHIDGSRHELTPERSIEIQGLLGSDIQMQLDECVRLPAEPKEVERGMRLSLRWAERSRRQFEAMGGPQKGQGLYGIVQGGDVSSLRGISARELSAMPFEGYSVGGLAVGEPQAVMLEMIDVVDPILPQGKPRYLMGVGTPDDIIESVARGIDQFDCVMPTRAGRHGLAYTRFGKLNFKNARHMDDPRPIDPTSDCPAARDYSRAYIHHLVRTGESLGAMLLTWVNVAYYQSLMAGIRDAIEAGRFEAFKAETKAAWARGENG

SEQ ID NO: 59191 - protein, 378 aa, unidentified
  source 1..378: note = Pleomorphomonas diazotrophica
  REGION 1..378: note = tr|A0A2N3M2M9|A0A2N3M2M9_9RHIZ Queuine tRNA-ribosyltransferase OS=Pleomorphomonas diazotrophica; OX = 1166257 GN=tgt PE=3 SV=1
MTQPFSFRLLATDGRARRGEIVTPHGVVRTPAFMPVGTLGTVKAMFMDDVKATGADVVLGNTYHLMLRPGAERVAALGGLHKFSTWDKTILTDSGGFQVMSLAQLRKMDERGVTFQSHIDGSRHELTPERSIEIQGLLGSDIQMQLDECVRLPAEPKEVERGMQLSLRWAERSRRQFEAMGGPEKGQGLYGIVQGGDVPSLREVSARELSAMPFEGYSVGGLAVGEPQAVMLKMIDVVDPILPRDKPRYLMGVGTPDDIIESVARGIDQFDCVMPTRAGRHGLAYTRFGKLNFKNARHMDDPRPIDPTSDCPAARDYSRAYIHHLVRTGEALGAMLLTWVNVAYYQSLMQGIRDAIEAGRFEEFKAETKAAWARGENG

SEQ ID NO: 59192 - protein, 378 aa, Pleomorphomonas sp.
  REGION 1..378: note = tr|A0A4R8FIH8|A0A4R8FIH8_9RHIZ Queuine tRNA-ribosyltransferase OS=Pleomorphomonas sp. CF100; OX = 2135722 GN=tgt PE=3 SV=1
MTQPFSFRLLATDGRARRGEIVTPHGIVRTPAFMPVGTLGTVKAMFMDDVKATGADVILGNTYHLMLRPGAERVAALGGLHKFSTWDKTILTDSGGFQVMSLAQLRKMDEHGVTFQSHIDGSRHELTPERSIEIQGLLGSDIQMQLDECVRLPAEPKEVERGMRLSLRWAERSRRQFEAMGGPEKGQGLYGIVQGGDVPALREVSARELSAMPFEGFSVGGLAVGEPQAVMLAMIDVVDPILPRDKPRYLMGVGTPDDIIESVARGIDQFDCVMPTRAGRHGLAYTRFGKLNFKNARHMDDPRPIDPTSDCPAARDYSRAYIHHLVRTGEALGAMLLTWVNVAYYQSLMQGVRDAIEAGRFEGFKAETKAAWARGENG

SEQ ID NO: 59193 - protein, 390 aa, Pleomorphomonas sp.; identical to SEQ ID NO: 58357
  REGION 1..390: note = tr|A0A2Z6HWH4|A0A2Z6HWH4_9RHIZ Queuine tRNA-ribosyltransferase OS=Pleomorphomonas sp. SM30; OX = 1885025 GN=tgt PE=3 SV=1

SEQ ID NO: 59194 - protein, 416 aa, Plesiocystis pacifica
  REGION 1..416: note = tr|A6G9V6|A6G9V6_9DELT Queuine tRNA-ribosyltransferase OS=Plesiocystis pacifica SIR-1; OX = 391625 GN=tgt PE=3 SV=1
MSEPTAPPEVDLRPDPAADLAPFEALGRRSEGDPAPGTLEIVAEDPDSDARSCRLWTGHGPVETPCFMPVGTYGAVKGLLPEELRTVGSQVVLANAYHLTHRPGPERVRSLGGIHGFMHWPGPVLTDSGGYQVFSLRSLQKIDDSGVDYRTHFDGSKARMTPRSVLEAEAAIGPDICMILDHCPPGDADRSAMRAAMERTTRWAREAARLRRDILRPEQLCFGIVQGGTDLELRREHVDALAELDFDGYALGGLSVGEPIPKMHATFAAIAPRMPKHKPRYVMGIGTPADLLAAIRSGVDMFDCVIPSRHARNGQILTFQGRFNIRNGRFRTDDRPPDPDCACPVCSRFSRAYLRHLHVHNDPLYVRLATIHNLYFFHQWVAAQRQAIRAGNYAAVAAALDAVLAERRHPGDGAKG

SEQ ID NO: 59195 - protein, 375 aa, Plesiomonas shigelloides
  REGION 1..375: note = tr|R8ATS5|R8ATS5_PLESH Queuine tRNA-ribosyltransferase OS=Plesiomonas shigelloides 302-73; OX = 1315976 GN=tgt PE=3 SV=1
MKYELITTQGNARRGRLVFERGTVETPAFMPVGTYGTVKGMTPEEVQETGAQILLGNTFHLWLRPGQDIMRKHGDLHDFMKWPGPILTDSGGFQVFSLGDIRKITEEGVHFRNPVNGDKIFLSPEKSMEIQYDLGSDIVMIFDECTPYPADWDYAKRSMEMSLRWADRCRKHFDQLGNKNALFGIVQGSVYEDLRDISVKGLTEIGFDGYAVGGLAVGEPKEDMHRILEHTCPQLPQDKPRYLMGVGKPEDLVEGVRRGIDMFDCVMPTRNARNGHLFVTDGVVKIRNAKYRDDLSPLDAECDCYTCRNYTRAYLHHLDRCNEILGARLNTIHNLRYYQRLMAGIRQAIENGNFDTFVTEFYTRIGKPVPPLNHK

SEQ ID NO: 59196 - protein, 375 aa, Plesiomonas shigelloides; identical to SEQ ID NO: 59195
  REGION 1..375: note = tr|A0A2P1VPW0|A0A2P1VPW0_PLESH Queuine tRNA-ribosyltransferase OS=Plesiomonas shigelloides OX=703; GN = tgt PE=3 SV=1

SEQ ID NO: 59197 - protein, 371 aa, Pleurocapsa sp.
  REGION 1..371: note = tr|A0A2T1CVE0|A0A2T1CVE0_9CYAN Queuine tRNA-ribosyltransferase OS=Pleurocapsa sp. CCALA 161; OX = 2107688 GN=tgt PE=3 SV=1
MGFSFACQANCSHTQARAGVFHTPHGIVETPRFMPVGTLATVKGVIPQQLEAANSQMILANTYHLHLQPGEDIVREAGGLHRFMAWNKPILTDSGGFQVFSLSEMRKVSEEGVIFKSPRDGSTINITPERSIQIQNALGADVIMAFDECPPADATKEQVQAATDRSYRWLKRCVAQHQNTARQALFGIVQGGIHLDLRQKAVEQLAELDLPGYAIGGVSVGEDPQLINATVRHTAPLLPANKPRYLMGVGTYREMAQAIASGIDLFDCVIPTRLGRHGAALIRGKRTNIKNATYKRDYRPLDETCSCYACQNFSRAYLNHMLRSQEMVGYIMLSLHNITELIRFTQEIREAIFKGTFATDFAHWLNDEADN

SEQ ID NO: 59198 - protein, 368 aa, Pleurocapsa sp.
  REGION 1..368: note = tr|K9T9B6|K9T9B6_9CYAN Queuine tRNA-ribosyltransferase OS=Pleurocapsa sp. PCC 7327; OX = 118163 GN=tgt PE=3 SV=1
MGFSFECRASCRQTGARAGIWHTPHGCVETPRFMPVGTLATVKGLTPAQIQTTGAQMILANTYHLHLQPGEAIVEKAGGLHEFMGWQGPILTDSGGFQVFSLSELRQIDESGVTFRSPRDGRIIQLTPERSIQIQNALGADVIMAFDECPPAGAAHEEVVAATERTYRWLERCLNAHQRPQEQALFGIVQGGIYPDLRCAAAESLVKLDLPGYAIGGVSVGEEPELIHKIVRITAPMLPPEKPRYLMGVGTYKEMVVAIASGIDLFDCVIPTRFGRHGAALVRGERLNLKNAQFREDFTPLDPTCPCYTCQNFSRAYLNHLVKSREMLGYILLSLHNISELVRFTQQIREAILRDRFVEEFGSWLDDR

SEQ ID NO: 59199 - protein, 375 aa, unidentified
  source 1..375: note = Pluralibacter gergoviae
  REGION 1..375: note = tr|A0A089PUL8|A0A089PUL8_PLUGE Queuine tRNA-ribosyltransferase OS=Pluralibacter gergoviae; OX = 61647 GN=tgt PE=3 SV=1
MKFELDTTDGRARRGRLVFDRGVVETPAFMPVGTYGTVKGMTPEEVEATGAQIILGNTFHLWLRPGQEIMKLHGDLHDFMQWKGPILTDSGGFQVFSLGDIRKITEQGVHFRNPINGDPIFLDPEKSMEIQYDLGSDIVMIFDECTPYPADWDYARRSMEMSLRWAKRSRDRFDGLGNKNALFGIIQGSVYEDLRDISVKGLVEIGFDGYAVGGLAVGEPKEDMHRILEHVCPQIPADKPRYLMGVGKPEDLVEGVRRGIDMFDCVMPTRNARNGHLFVTDGVVKIRNAKHKSDTAPLDAECDCYTCKHYSRAYLHHLDRCNEILGARLNTIHNLRYYQRLMAGLRKAIEEGKLEGFVTEFYQRQGRPVPPLNVD

SEQ ID NO: 59200 - protein, 375 aa, unidentified
  source 1..375: note = Pluralibacter gergoviae
  REGION 1..375: note = tr|A0A1S2BLF2|A0A1S2BLF2_PLUGE Queuine tRNA-ribosyltransferase OS=Pluralibacter gergoviae; OX = 61647 GN=tgt PE=3 SV=1
MKFELDTTDGRARRGRLVFDRGVVETPAFMPVGTYGTVKGMTPEEVEATGAQIILGNTFHLWLRPGQEIMKLHGDLHDFMQWKGPILTDSGGFQVFSLGDIRKITEQGVHFRNPINGDPIFLDPEKSMEIQYDLGSDIVMIFDECTPYPADWDYAKRSMEMSLRWAKRSRDRFDGLGNKNALFGIIQGSVYEDLRDISVKGLVEIGFDGYAVGGLAVGEPKEDMHRILEHVCPQIPADKPRYLMGVGKPEDLVEGVRRGIDMFDCVMPTRNARNGHLFVTDGVVKIRNAKHKSDTAPLDAECDCYTCKHYSRAYLHHLDRCNEILGARLNTIHNLRYYQRLMAGLRKAIEEGKLEGFVTEFYQRQGRPVPPLNVD

SEQ ID NO: 59201 - protein, 370 aa, unidentified
  source 1..370: note = Pokkaliibacter plantistimulans
  REGION 1..370: note = tr|A0A318C890|A0A318C890_9GAMM Queuine tRNA-ribosyltransferase OS=Pokkaliibacter plantistimulans; OX = 1635171 GN=tgt PE=3 SV=1
MQFELLAEEGQARRGRLTFPRGVVETPAFMPVGTYGTVKGMLPRDIEEIGAQIILGNTFHLMLRPGTEVVKKHGGLHEFNQWPKPILTDSGGFQVFSLGKMRKITEHGVTFRSPVDGAKVELTPERSMEVQRDLGSDVVMIFDECTPYPATERQAADSMRLSLRWAKRSKAAHGENPAALFGIVQGGMYEYLREESLAGLTEIGFDGYAIGGLSVGEPKDDMMRILSHTAPKLPKDRPRYLMGVGRPEDLVEGVRRGVDMFDCVMPTRNARNGHLFTSEGVIKIRNARHREDTGTLDPECDCYTCQNFSRAYLHHLDKCGEMLAAQLNTIHNLRYYQTLMAGLRGAIEAGTLGDFVDDFYQRRGMTTPPL

SEQ ID NO: 59202 - protein, 376 aa, unidentified
  source 1..376: note = Polaribacter atrinae
  REGION 1..376: note = tr|A0A176T4I0|A0A176T4I0_9FLAO Queuine tRNA-ribosyltransferase OS=Polaribacter atrinae OX=1333662; GN = tgt PE=3 SV=1
MKFDLKITDPKSKARAGVITTDHGVIETPIFMPVGTVGTVKGVHQTELKNDINPDIILGNTYHLYLRPGLDILEKAGGLHKFMNWDRNILTDSGGYQVYSLSGRRKINEEGVKFKSHIDGSMHHFTPENVMETQRTIGADIIMAFDECTPYPCDYNYAKRSMHMTHRWLTRCINHLDKLPYKYGFEQTFMPIVQGSTYKDLRRQSAEYIANSGQQANAIGGLSVGEPAEEMYAMTEVVTEILPEDKPRYLMGVGTPINILENIALGIDMFDCVMPTRNARNGMLFTAHGSINIKNKKWAEDFSPIDDMGITGVDTMYSKAYLRHLFAAKEMLGKQIASIHNLGFYVWLTREARKHILAGDFREWKDMMVKQMDKRL

SEQ ID NO: 59203 - protein, 376 aa, Polaribacter butkevichii
  REGION 1..376: note = tr|A0A2P6CBI6|A0A2P6CBI6_9FLAO Queuine tRNA-ribosyltransferase OS=Polaribacter butkevichii; OX = 218490 GN=tgt PE=3 SV=1
MKFDLKITDPKSKARAGVITTDHGEIETPIFMPVGTVGTVKGVHQTELKNEINPDIILGNTYHLYLRPGMDILEKAGGLHKFMNWDRNILTDSGGYQVYSLSGRRKINEEGVKFKSHIDGSMHFFTPENVMETQRTIGADIIMAFDECTPYPCDYNYAKRSMHMTHRWLDRCISHLDKVPYKYGYEQTFMPIVQGSTYKDLRRQSAEYIANSGQQANAIGGLSVGEPAEEMYAMTEVVTEILPEDKPRYLMGVGTPINILENIALGIDMFDCVMPTRNARNGMLFTAHGSINIKNKKWAEDFSPIDDMGITWVDTMYSKAYLRHLFAAKEMLGKQIASIHNLGFYVWLTREARKHILAGDFREWKDMMVKQMDKRL

SEQ ID NO: 59204 - protein, 376 aa, Polaribacter dokdonensis
  REGION 1..376: note = tr|A0A0M9CHU5|A0A0M9CHU5_9FLAO Queuine tRNA-ribosyltransferase OS=Polaribacter dokdonensis DSW-5; OX = 1300348 GN=tgt PE=3 SV=1
MKFDLKLTDPKSKARAGSITTAHGVIETPIFMPVGTVGTVKGVHQTELKNDINPDIILGNTYHLYLRPKLDILEKAGGLHKFMNWDRNILTDSGGYQVYSLSGRRKINEEGVKFKSHIDGSMHFFTPENVMETQRTIGADFIMAFDECTPYPCDYNYAKRSMHMTHRWLKRCINHLEDLPFKYGFEQTFMPIVQGSTYKDLRRQSAEYIANSDQKANAIGGLSVGEPAEEMYAMTEVVTEILPEDKPRYLMGVGTPINILENIALGIDMFDCVMPTRNARNGMLFTAHGSINIKNKKWAEDFSPIDEMGITSVDTMYSKAYLRHLFVSKEMLGKQIASIHNLGFYVWLTREARKHIIAGDFREWKDMMVKQMDKRL

SEQ ID NO: 59205 - protein, 376 aa, Polaribacter filamentus
  REGION 1..376: note = tr|A0A2S7KY41|A0A2S7KY41_9FLAO Queuine tRNA-ribosyltransferase OS=Polaribacter filamentus; OX = 53483 GN=tgt PE=3 SV=1
MKFDLKITDPKSKARAGVLTTDHGVIETPIFMPVGTVGTVKGVHQTELKNEINPDIILGNTYHLYLRPGLDILEKAGGLHKFMNWDRNILTDSGGYQVYSLSARRKINEEGVKFKSHIDGSMHFFTPENVMETQRTIGADIIMAFDECTPYPCDYNYAKRSMHMTHRWLNRCINHLEKLPFKYGFEQTFFPIVQGSTYKDLRQQSAEYIANAGAQGNAIGGLSVGEPAEEMYAMTEVVTAILPEDKPRYLMGVGTPINILENIALGIDMFDCVMPTRNARNGMLFTAHGTINIKNKKWEDDFSAIDELGTTWVDTYYTKAYLRHLFAAKEMLGKQIASIHNLGFYVWLTREARKHILAGDFREWKDKMVVQMDKRL

SEQ ID NO: 59206 - protein, 376 aa, Polaribacter gangjinensis
  REGION 1..376: note = tr|A0A2S7WAU3|A0A2S7WAU3_9FLAO Queuine tRNA-ribosyltransferase OS=Polaribacter gangjinensis; OX = 574710 GN=tgt PE=3 SV=1
MKFDLKLTDPKSKARAGVITTDHGEIQTPIFMPVGTVGTVKGVHQTELKNEINPDIILGNTYHLFLRPKTSILEQAGGLHKFMNWDRNILTDSGGYQVYSLSSNRKINEEGVKFKSHIDGSTHVFTPENVMEIQREIGADIIMAFDECTPYPCDYNYAKRSMHMTHRWLDRCINHLEKLPFKYGYEQTFFPIVQGSTYKDLRKQSADYIANAGAQGNAIGGLSVGEPAEEMYAMTEIVTAILPEDKPRYLMGVGTPINILENIALGIDMFDCVMPTRNARNGMLFTAHGTINIKNKKWENDFSPIDEMAITYVDTLYTKAYLRHLFAANEMLGKQIATIHNLGFYLWLTRQAREHILAGDFREWKDKMVIQMDKRL

SEQ ID NO: 59207 - protein, 376 aa, Polaribacter glomeratus
  REGION 1..376: note = tr|A0A2S7WUX6|A0A2S7WUX6_9FLAO Queuine tRNA-ribosyltransferase OS=Polaribacter glomeratus OX=102; GN = tgt PE=3 SV=1
MKFDLKITDPKSKARAGVITTDHGIIETPIFMPVGTVGTVKGVHQTELKNEINPDIILGNTYHLYLRPGLDILEKAGGLHKFMNWDRNILTDSGGYQVYSLSARRKINEEGVKFKSHIDGSMHFFTPENVMETQRTIGADIIMAFDECTPYPCDYNYAKRSMHMTHRWLNRCINHLEKLPFKYGFEQTFMPIVQGSTYKDLRAQSAEFIANTNQQANAIGGLSVGEPAEEMYAMTEVVTAILPEDKPRYLMGVGTPINILENIALGIDMFDCVMPTRNARNGMLFTAHGTINIKNKKWEDDFSAIDELGTTWVDTYYTKAYLRHLFAAKEMLGKQIASIHNLGFYVWLTREARKHILAGDFREWKDKMVVQMDKRL

SEQ ID NO: 59208 - protein, 376 aa, Polaribacter irgensii
  REGION 1..376: note = tr|A4BZD1|A4BZD1_9FLAO Queuine tRNA-ribosyltransferase OS=Polaribacter irgensii 23-P; OX = 313594 GN=tgt PE=3 SV=1
MKFDLKLTDPKSKARAGIITTDHGTIETPIFMPVGTLGTVKGVHQTELKEQVNPDIILANTYHLFLRPGMDILERAGGLHQFMNWDRPILTDSGGYQVYSLSGRRKINEEGVKFKSHIDGSMHFFTPENVMETQRTIGADIIMAFDECTPYPCDYNYAKRSMHMTHRWLDRCINHLEKLPYKYGFEQTFMPIVQGSTYKDLRRQSAEYIANAGAQANAIGGLSVGEPADEMYAMTEVVTEILPEDKPRYLMGVGTPINILENIALGIDMFDCVMPTRNARNGMLFTAHGTINIKNKKWEDDFSPIDDMGITGVDTMYSKAYLRHLFAAKEMLGKQIASIHNLGFYVWLTREARRHILAGDFRAWKDKMVVQMDKRL

SEQ ID NO: 59209 - protein, 376 aa, unidentified
  source 1..376: note = Polaribacter porphyrae
  REGION 1..376: note = tr|A0A2S7WLE9|A0A2S7WLE9_9FLAO Queuine tRNA-ribosyltransferase OS=Polaribacter porphyrae; OX = 1137780 GN=tgt PE=3 SV=1
MNFDLKTTDPKSQARAGTITTDHGVIETPIFMPVGTVGTVKGVHQTELKNEINPDIILGNTYHLYLRPKLDILEQAGGLHQFMNWNRNILTDSGGYQVYSLSGRRKINEEGVKFKSHIDGSTHFFTPENVMETQRTIGADIIMAFDECTPYPCDYNYAKRSMHMTHRWLDRCINHLKKLPFKYGFEQTFMPIVQGSTYKDLRKQSAEYIANSNQQANAIGGLSVGEPAEEMYAMTEVVTAILPEDKPRYLMGVGTPINILENIALGIDMFDCVMPTRNARNGMLFTAHGTINIKNKKWENDFSPIDEMGITYVDTMYSKAYLKHLFSAKEMLGKQIASIHNLGFYVWLTREARKHILAGDFRAWKDKMVIQMDKRL

SEQ ID NO: 59210 - protein, 376 aa, unidentified
  source 1..376: note = Polaribacter reichenbachii
  REGION 1..376: note = tr|A0A1B8U093|A0A1B8U093_9FLAO Queuine tRNA-ribosyltransferase OS=Polaribacter reichenbachii; OX = 996801 GN=tgt PE=3 SV=1
MKFDLKLTDPKSKARAGSITTDHGVIETPIFMPVGTVGTVKGVHQTELKTEVNPDIILGNTYHLYLRPGLEILEKAGGLHKFMNWDRNILTDSGGYQVYSLSGRRKINEQGVKFKSHIDGSMHFFTPENVMETQRTIGADIIMAFDECTPYPCDYNYAKRSMHMTHRWLDRCINHLEKLPFKYGFEQTFMPIVQGSTYKDLRRQSAEYIANSNQAANAIGGLSVGEPAEEMYAMTEVVTEILPEDKPRYLMGVGTPINILENIALGIDMFDCVMPTRNARNGMLFTAHGTINIKNKKWEDDFSPIDEMGITGVDTYYTKAYLRHLFAAKEMLGKQIASIHNLGFYVWLTREARKHILAGDFREWKDMMVKQMDKRL

SEQ ID NO: 59211 - protein, 376 aa, unidentified
  source 1..376: note = Polaribacter sejongensis
  REGION 1..376: note = tr|A0A2K8VN66|A0A2K8VN66_9FLAO Queuine tRNA-ribosyltransferase OS=Polaribacter sejongensis; OX = 985043 GN=tgt PE=3 SV=1
MKFDLKITDPKSKARAGVITTDHGVIETPIFMPVGTVGTVKGVHQTELKNDINPDIILGNTYHLYLRPGLDILEKAGGLHKFMNWDRNILTDSGGYQVYSLSGRRKINEEGVKFKSHIDGSTHHFTPENVMETQRTIGADIIMAFDECTPYPCDYNYAKRSMHMTHRWLTRCINHLDKLPYKYGFEQTFMPIVQGSTYKDLRRQSAEYIANSGQQANAIGGLSVGEPAEEMYAMTEVVTEILPEDKPRYLMGVGTPINILENIALGIDMFDCVMPTRNARNGMLFTAHGSINIKNKKWAEDFSPIDDMGITGVDTMYSKAYLRHLFAAKEMLGKQIASIHNLGFYVWLTREARKHIIAGDFREWKDMMVKQMDKRL

SEQ ID NO: 59212 - protein, 376 aa, Polaribacter sp.
  REGION 1..376: note = tr|A0A1Y0MC64|A0A1Y0MC64_9FLAO Queuine tRNA-ribosyltransferase OS=Polaribacter sp. SA4-10; OX = 754397 GN=tgt PE=3 SV=1
MKFDLKITDPKSKARAGVITTDHGEIETPIFMPVGTVGTVKGVHQTELKDEIKPDIILANTYHLFLRPGMEILEKAGGLHKFMNWDSNILTDSGGYQVYSLSGRRKINEEGVKFKSHIDGSMHFFTPENVMETQRTIGADIIMAFDECTPYPCDYNYAKRSMHMTHRWLDRCINHLEKVPFKYGFEQTFMPIVQGSTYKDLRAQSAEYIANSGQQANAIGGLSVGEPAEEMYAMTEVVTAILPEDKPRYLMGVGTPINILENIALGIDMFDCVMPTRNARNGMLFTAHGSINIKNKKWADDFSPIDDMDITWVDTMYSKAYLRHLFAAKEMLGKQIASIHNLGFYVWLTREARKHIIAGDFREWKDKMVKQMDKRL

SEQ ID NO: 59213 - protein, 376 aa, Polaribacter sp.
  REGION 1..376: note = tr|A0A099Y5E1|A0A099Y5E1_9FLAO Queuine tRNA-ribosyltransferase OS=Polaribacter sp. Hel1_85; OX = 1250005 GN=tgt PE=3 SV=1
MKFDLKITDPKSKARAGVITTDHGEIETPIFMPVGTVGTVKGVHQTELKNEINPDIILGNTYHLYLRPGLDILEKAGGLHKFMNWDRNILTDSGGYQVYSLSGRRKINEEGVKFKSHIDGSMHFFTPENVMETQRTIGADIIMAFDECTPYPCDYNYAKRSMHMTHRWLDRCINHLDKLPFKYGFEQTFMPIVQGSTYKDLRRQSAEYIANSGQKANAIGGLSVGEPAEEMYAMTEVVTEILPEDKPRYLMGVGTPINILENIALGIDMFDCVMPTRNARNGMLFTAHGSINIKNKKWAEDFSPIDDMGITWVDTMYSKAYLRHLFAAKEMLGKQIASIHNLGFYVWLTREARKHILAGDFREWKDKMVKQMDNRL

SEQ ID NO: 59214 - protein, 376 aa, unidentified
  source 1..376: note = Polaribacter vadi
  REGION 1..376: note = tr|A0A1B8TXN8|A0A1B8TXN8_9FLAO Queuine tRNA-ribosyltransferase OS=Polaribacter vadi OX=1774273; GN = tgt PE=3 SV=1
MKFDLKITDPKSKARAGTITTDHGVIETPIFMPVGTVGTVKGVHQNELKNQVNPDIILANTYHLYLRPKLDVLEAAGGLHKFMNWDRNILTDSGGYQVYSLSGRRKINEEGVKFKSHIDGSMHFFTPENVMETQRTIGADIIMAFDECTPYPCDYNYAKRSMHMTHRWLDRCTNHLEKLPFKYGFEQTFMPIVQGSTYKDLRKQSAEYIANSNQKANAIGGLSVGEPAEEMYAMTEVVTEILPEDKPRYLMGVGTPINILENIALGIDMFDCVMPTRNARNGMLFTAHGSINIKNKKWEKDFSPIDEMGITEVDTYYSKAYLRHLFVAKEMLGKQIASIHNLGFYVWLTREARKHIIAGDFREWKDKMVKQMDNRL

SEQ ID NO: 59215 - protein, 387 aa, Polaromonas naphthalenivorans
  REGION 1..387: note = sp|A1VJ15|TGT_POLNA Queuine tRNA-ribosyltransferase; OS = Polaromonas naphthalenivorans (strain CJ2) OX=365044; GN = tgt PE=3 SV=1
MLEFEVLKTDPATVDSEGAYLGSYARRGQLTLNHGVVQTPIFMPVGTYGTVKGVTPQSLHDMNAQIILGNTFHLWMRPGLDVVAQFGGLHKFESWHKPILTDSGGFQVWSLGEMRKISEEGVKFASPVNGDKLFLTPEISMQIQTLLNSDIVMQFDECTPYDTKGHITTEGEARSSMELSRRWAKRCEIEFDKLENPNALFGIVQGGMFENLRQESLDALVEMDFPGYAVGGVSVGEPKEEMLRIMAHTPHRLPAHKPRYLMGVGTPEDLVEGVASGVDMFDCVMPTRNARNGHMFTRFGDLKIRNARYKSEEAPVDSTCGCYTCRNFSRAYMHHLDRCGEMLGPMLSSIHNLHYYLNLMQEVRGALDAGRFGEFVRQFKADRQRGV

SEQ ID NO: 59216 - protein, 398 aa, Polaromonas sp.
  REGION 1..398: note = sp|Q12GB2|TGT_POLSJ Queuine tRNA-ribosyltransferase; OS = Polaromonas sp. (strain JS666 / ATCC BAA-500) OX=296591; GN = tgt PE=3 SV=1
MLEFEVLKTDARTGEGANAHPGSHARRGQLTLTHGVVQTPIFMPVGTYGTVKGVMPQSLHEMGAQIILGNTFHLWMRPGLDVMKQFGGLHRFESWDKPILTDSGGFQVWSLGDMRKISEEGVKFASPVNGDKLFLTPEISMQIQTVLNSDIVMQFDECTPYDTKGHITTESEARSSMELSLRWAKRCVAEFDKLENPNALFGIVQGGMYQNLRHESLEALVELDLPGYAVGGVSVGEPKEEMQRIMAHTPHRLPADKPRYLMGVGTPEDLVEGVGAGIDMFDCVMPTRNARNGHLFTRFGDLKIRNARHKADEQPLDTTCTCYTCKGRTMPDGSTSGGFSRAYLHHLDRCGEMLGPMLASIHNLHYYLNLMQEIRDALDAGRFGEFAARFRTDRLRGV

SEQ ID NO: 59217 - protein, 375 aa, Polaromonas sp.
  REGION 1..375: note = tr|A0A068YV47|A0A068YV47_9BURK Queuine tRNA-ribosyltransferase OS=Polaromonas sp. CG9_12; OX = 1504672 GN=tgt PE=3 SV=1
MLTFELLKTEGHARRGTLTLNHGVVQTPIFMPVGTYGTVKGVMPQSLIEMGAQIILGNTFHLWMRPGLDVVKQFGGLHKFENWHKPILTDSGGFQVWSLGEMRKISEEGVKFASPVNGDKLFLTPEISMQIQTLLNSDIVMQFDECTPYDTKGHITTESEARSSMELSRRWAKRCETEFDKLENPNALFGIVQGGMFENLRQESLEALVEMDFPGYAVGGVSVGEPKEEMLRIMAHTPHRLPADKPRYLMGVGTPEDLVEGVAAGVDMFDCVMPTRNARNGHMFTRFGDLKIRNARYKSEEAPVDSSCSCYTCRNFSRAYMHHLDRCGEMLGPMLSSIHNLHYYLNLMQEVRDALDAGRFGEFARQFKVDRQRGV

SEQ ID NO: 59218 - protein, 397 aa, unidentified
  source 1..397: note = [Polyangium] brachysporum
  REGION 1..397: note = tr|A0A0G3BRQ9|A0A0G3BRQ9_9BURK Queuine tRNA-ribosyltransferase OS=[Polyangium] brachysporum; OX = 413882 GN=tgt PE=3 SV=1
MDHHTLPSSASARIPLPSGLQFEVLKTEGHARRGRLTLNHGVVETPIFMPVGTYGTVKGVMPRSLEEMGAQIILGNTFHLWLRPGMDVLRPFGGLHRFEGWHKPILTDSGGFQVWSLGDMRKISEEGVKFASPVNGDKLFLTPEVSMQIQHVLNSDVVMQFDECTPYIMGDKASGRLTTEKEARYSMELSLRWAKRCQLEFERLQNPNALFGIVQGGMFTHLRDESLAGLELLDFPGLAVGGLSVGEPKAEMLRVLEHIGPRLPAHKPHYLMGVGTPEDLVDGVANGIDMFDCVMPTRNARNGHLFTRYGDLRLRNTRYKTDERPLDESCSCYTCTNFSRAYLHHLDRCGEMLGPMLTSVHNLHYYLDLMREVRESLDAGGFEAFRRQFATDRARGV

SEQ ID NO: 59219 - protein, 382 aa, Polyangium fumosum
  REGION 1..382: note = tr|A0A4V5PNG8|A0A4V5PNG8_9DELT Queuine tRNA-ribosyltransferase OS=Polyangium fumosum OX=889272; GN = tgt PE=3 SV=1
MSGPSTPGYAFRTLATSGAARAGVLTTPHGDVPTPTFMPVGTQGSVKTMSPDEVAATGARIVLGNTYHLWLRPGPEVVAELGGLHGFTKWPHAMLTDSGGFQAFSLAERRQTSEDGFVFRSHLDGAKKVLTPEVAMQVQGKIGADIAMQLDICPPGDASRADFEAACARTTRWARRCLAAKRPDQAVFGIVQGGTDPALRRAHAEELAAMPFDGLALGGFSVGEPIARMHEVLLEVAHTLDPERPRYLMGVGTPYDLVRAIGAGVDMFDCVLPTRNARNGQALTRTGKVVIKQARYRTDPSPLDPTCTCPTCAAGYSRAYLRHLFIASELLVLRLITVHNLHLYGTLVREAREAILAGRYDVFAKEWLAGLEAGAAEHAPAT

SEQ ID NO: 59220 - protein, 386 aa, Polyangium sp.
  REGION 1..386: note = tr|A0A4U1H313|A0A4U1H313_9DELT Queuine tRNA-ribosyltransferase OS=Polyangium sp. SDU3-1; OX = 2567896 GN=tgt PE=3 SV=1
MSGPSTPGYSFKVLGTSGAARAGVLTTPHGEVPTPTFMPVGTQGSVKTLTPHEVAATGARIVLGNTYHLWLRPGPELVAELGGLHRFTHWPHAMLTDSGGFQAFSLAERRTMSEDGFVFRSHLDGSKRSLTPEEAMRVQGLLGADIAMQLDVCPPGQAPRAEVEQACRMTTRWAARCLAAKRPDQAVFGIVQGSVHPDLRRAHAEELAALPFDGLALGGFSVGEPIARMHEVLLEAAPALDPERPRYLMGVGTPYDLVRAIGAGVDMFDCVLPTRNARNGQALTRTGKIVIKQARYRNDPSPLDPTCDCPTCAEGYSRAYLRHLFLAGEILVLRLFTAHNLHLYGTLVREAREAILAGRYEAFAKAWLDGLGAGASEEAAAADART

SEQ ID NO: 59221 - protein, 372 aa, unidentified
  source 1..372: note = Polycyclovorans sp.
  REGION 1..372: note = tr|A0A2E2JCW8|A0A2E2JCW8_9GAMM Queuine tRNA-ribosyltransferase OS=Polycyclovorans sp. OX=2024852; GN = tgt PE=3 SV=1
MSFEVLARDGHARRGRLQLAHGVVETPVFMPVGTYGTVKSLTPEDLLAVGSQIILGNTFHLMLRPGKAAFERVGGLHPFMHWDKPILTDSGGFQVWSLASLRKITEAGVHFSSPVNGDKLFLSPETAVQMQHALNADIVMQFDECTPYPATEAQAEASMSLSTRWALRCKDAHGNNGNKLYGIVQGGMYADLRRQSLQALEAIGFDGYAIGGLSVGETEDERIAVLDTLAPLLPVNSPRYLMGVGTPRDLVQAVARGIDQFDCVMPTRNARNGHLFTHQGVVKIRNAKYRDDDSPLDPACDCYTCTHYSRAYLYHLDRCDEMLGPRLNTIHNLHYYHRLMADMRAHIETGRFSAFAADFLASAAGAPKSSAA

SEQ ID NO: 59222 - protein, 374 aa, unidentified
  source 1..374: note = Polymorphobacter sp.
  REGION 1..374: note = tr|A0A4Y9EPL0|A0A4Y9EPL0_9SPHN Queuine tRNA-ribosyltransferase OS=Polymorphobacter sp. DJ1R-1; OX = 2511025 GN=tgt PE=3 SV=1
MTRFDFNIHATDGAARTGVIRMQRGDIRTPAFMPVGTAATVKAMRPAEVRASGAEIILGNTYHLMLRPTAERIARLGGLHKFMGWERPILTDSGGFQVMSLGALSKLTEDGVTFASHLDGSKHLITPERSMEIQRLLGSDIVMAFDECTPYPATRVQAESSMLRSMRWAQRSRDGFDSGIDHASRSALFGIQQGSTFEDLRAVSAAKLIDIGFDGYAIGGLAVGEGQAAMFSVLDYAPGQLPADRPRYLMGVGKPDDIVGAVERGIDMFDCVLPTRSGRTGQAFTHAGPINLRNARFAEDEAPLDATCACPVCKTNSRAYIHHLIKSSEILGAMLMTEHNVWFYQQLMAGLRAAIAAGELTKFANDFRAQYGAR

SEQ ID NO: 59223 - protein, 382 aa, unidentified
  source 1..382: note = Polymorphum gilvum
  REGION 1..382: note = tr|F2IZS5|F2IZS5_POLGS Queuine tRNA-ribosyltransferase OS=Polymorphum gilvum (strain LMG 25793 / CGMCC 1.9160 / SL003B-26A1) OX=991905 GN=tgt PE=3; SV = 1
MTAKPFSFRLIATDGAARRGEIETPHGLVRTPAFMPVGTQATVKAMYPDQVRALGSDVVLGNTYHLMLRPTAERVARLGGLHRFMNWPHTILTDSGGFQVMSLAQLRKLDETGVRFQSHIDGQKYHLTPERSIEIQGLLGSDIQMQLDECIGLPAPREEAQRAMELSLRWAERSRAQFEAMGGPAKGQGLYGIVQGGDVAELRIASARALADMPFEGYSVGGLAVGEPQDVMLKMLEITTPAMPVDKPRYLMGVGTPEDILESVTRGIDQFDCVMPTRAGRHGLAYTRYGKVNLKNARHADDPRPLDETSDCPAARDYSRAYLHHLVKAGEGLAAMLLTWNNLAYYQHLMQGMRDAIEAGTFQDFRAAVKADWVRGDIAPLG

SEQ ID NO: 59224 - protein, 385 aa, unidentified
  source 1..385: note = Polynucleobacter aenigmaticus
  REGION 1..385: note = tr|A0A254Q7K2|A0A254Q7K2_9BURK Queuine tRNA-ribosyltransferase OS=Polynucleobacter aenigmaticus; OX = 1743164 GN=tgt PE=3 SV=1
MTKPVHFNILARDSASPARLGQLDLPHGSVQTPIFMPVGTYGTVKAMTPRDLNEAKAQIILGNTFHLWLRPGLNVIKKHGGLHRFMGWDKPILTDSGGFQVFSLGALRKISEEGVTFASPINGDKLFMSPEVSMEIQAVLNSDIAMQFDECTPYEVKGQATSEKTARASLEMSLRWGDRSLKRFRELETGNGLFGIVQGGMFENLREFSLDAVSQQGFDGIAIGGLSVGEPKPEFERILNFTAPKLPEHMPHYLMGVGTPEDLMLGVSLGIDMFDCVMPTRNARNGWLFTRFGDLKLRNAGYKEDDRPVDPTCACYTCQNFTRSYLNHLQKANEILGSQLNTIHNLSYYLQLMEEVRESLAKDRFSAYREEFHRNRQRGVEPGQD

SEQ ID NO: 59225 - protein, 385 aa, unidentified
  source 1..385: note = Polynucleobacter asymbioticus
  REGION 1..385: note = tr|A0A1J0DE70|A0A1J0DE70_9BURK Queuine tRNA-ribosyltransferase OS=Polynucleobacter asymbioticus; OX = 576611 GN=tgt PE=3 SV=1
MTKPVHFNILARDSQSPARLGQLDLPHGSVQTPIFMPVGTYGTVKAMTPRDLHEAKAQIILGNTFHLWLRPGLDVIKKHGGLHRFMGWDKPILTDSGGFQVFSLGALRKISEEGVTFASPINGDKLFMSPEVSMEIQAVLNSDIAMQFDECTPYETKGQATSEKTARASLEMSLRWGDRSLKRFRELNTGNGLFGIVQGGMFEHLREFSLDAVSQQGFDGIAIGGLSVGEPKPEFERILNFTAPKLPEHMPHYLMGVGTPEDLILGVSLGIDMFDCVMPTRNARNGWLFTRFGDLKLRNSGYKDDDRPVDPTCACYTCQNFTRSYLNHLQKANEILGSQLNTIHNLSYYLQLMTEVREALSKDRFSAYREEFKANRQRGVEPGQD

SEQ ID NO: 59226 - protein, 393 aa, unidentified
  source 1..393: note = Polynucleobacter asymbioticus
  REGION 1..393: note = tr|A4SZT8|A4SZT8_POLAQ Queuine tRNA-ribosyltransferase OS=Polynucleobacter asymbioticus (strain DSM 18221 / CIP 109841 / QLW-P1DMWA-1) OX=312153; GN = tgt PE=3 SV=1
MSTREYKAMTKPVHFNILARDSQSPARLGQLDLPHGSVQTPIFMPVGTYGTVKAMTPRDLNEAKAQIILGNTFHLWLRPGLDVIKKHGGLHRFMGWDKPILTDSGGFQVFSLGALRKISEEGVTFASPINGDKLFMSPEVSMEIQAVLNSDIAMQFDECTPYETKGQATSEKTARASLEMSLRWGDRSLKRFRELNTGNGLFGIVQGGMFEHLREFSLDAVSQQGFDGIAIGGLSVGEPKPEFERILNFTAPKLPEHMPHYLMGVGTPEDLILGVSLGIDMFDCVMPTRNARNGWLFTRFGDLKLRNSGYKDDDRPVDPTCACYTCQNFTRSYLNHLQKANEILGSQLNTIHNLSYYLQLMTEVREALSKDRFSAYREEFKANRQRGVEPGQD

SEQ ID NO: 59227 - protein, 385 aa, unidentified
  source 1..385: note = Polynucleobacter campilacus
  REGION 1..385: note = tr|A0A254PT18|A0A254PT18_9BURK Queuine tRNA-ribosyltransferase OS=Polynucleobacter campilacus; OX = 1743163 GN=tgt PE=3 SV=1
MTKPVHFNILARDSQSPARLGQLDLPHGSVQTPIFMPVGTYGTVKAMTPRDLNEAKAQIILGNTFHLWLRPGLEVIKKHGGLHRFMAWDKPILTDSGGFQVFSLGALRKISEEGVTFSSPINGDKLFMSPEVSMEIQAVLNSDIAMQFDECTPYEIKGQPTSEKTARASLEMSLRWGDRSLKRFRELNTGNGLFGIVQGGMFENLREFSLDAVSQQGFDGIAIGGLSVGEPKPEFERILHFTAPKLPEHMPHYLMGVGTPEDLMLGVSLGIDMFDCVMPTRNARNGWLFTRFGDLKLRNSGYKDDDRPLDPTCVCYTCQNFTRSYLNHLQKANEILGSQLNTIHNLSYYLQLMTEVREALSKDRFSAYREEFHQNRQRGVEPGQD

SEQ ID NO: 59228 - protein, 384 aa, Polynucleobacter cosmopolitanus
  REGION 1..384: note = tr|A0A229FUH3|A0A229FUH3_9BURK Queuine tRNA-ribosyltransferase OS=Polynucleobacter cosmopolitanus; OX = 351345 GN=tgt PE=3 SV=1
MNSFNFKLLKKDPRTHARRGELTLTHGKVQTPIFMPVGTYGTVKGMTPRDLEEAAAQIVLGNTFHLWLRPGLDVIGKHHGLHDFMGWKKPILTDSGGFQVFSLGALRKITEEGVAFASPVNGDKLFMSPEISMDIQAVLNSDIAMQFDECTPYETNGITTDEKTAKNSLELSLRWGERSIRRFRELNTGNALFGIVQGGMFEHLRDVSLDGVANQDFDGIAIGGLSVGEPKPEFERILSHIGPKLPENKPHYLMGVGTPEDLVLGVSQGIDMFDCVMPTRNARNGWLFTRFGDLKLRNAAFKDDTRPLDASCGCYTCRNFSRAYLHHLQKTNEILGAQLNTIHNIHYYINLMSEIRQSLDEDLFPEFIKEFHKNRALGVLETTG

SEQ ID NO: 59229 - protein, 385 aa, unidentified
  source 1..385: note = Polynucleobacter duraquae
  REGION 1..385: note = tr|A0A0E3ZMS1|A0A0E3ZMS1_9BURK Queuine tRNA-ribosyltransferase OS=Polynucleobacter duraquae; OX = 1835254 GN=tgt PE=3 SV=1
MTKPVHFNILARDSASPARLGQLDLPHGSVQTPIFMPVGTYGTVKAMTPRDLHEAKAQIILGNTFHLWLRPGLDVVKKHGGLHRFMGWDKPILTDSGGFQVFSLGALRKISEEGVTFASPINGDKLFMSPEVSMEIQAVLNSDIAMQFDECTPYEVKGQATSEKTARASLEMSLRWGDRSLKRFRELETGNGLFGIVQGGMFENLREFSLDAVSQQGFDGIAIGGLSVGEPKPEFERILNFTAPKLPEHMPHYLMGVGTPEDLMLGVSLGIDMFDCVMPTRNARNGWLFTRFGDLKLRNSGYKDDDRPVDPTCSCYTCKNFTRSYLNHLQKANEILGSQLNTIHNLSYYLQLMEEVRESLAKDRFSAYREEFHRNRQRGVEPGQD

SEQ ID NO: 59230 - protein, 385 aa, unidentified
  source 1..385: note = Polynucleobacter hirudinilacicola
  REGION 1..385: note = tr|A0A210RWJ2|A0A210RWJ2_9BURK Queuine tRNA-ribosyltransferase OS=Polynucleobacter hirudinilacicola OX=1743166 GN=tgt PE=3 SV=1
MTKPVHFNILARDSQSPARLGQLDLPHGSVQTPIFMPVGTYGTVKAMTPRDLNEAKAQIILGNTFHLWLRPGLDVIKKHGGLHRFMAWDKPILTDSGGFQVFSLGALRKISEEGVTFASPINGDKLFMSPEVSMEIQAVLNSDIAMQFDECTPYEIKGQPTSEKTARASLEMSLRWGDRSLKRFRELNTGNGLFGIVQGGMFENLREFSLDAVSQQGFDGIAIGGLSVGEPKPEFERILNFTASKLPEHMPHYLMGVGTPEDLMLGVSLGIDMFDCVMPTRNARNGWLFTRFGDLKLRNSGYKDDDRPLDPTCTCYTCQNFTRSYLNHLQKANEILGSQLNTIHNLSYYLQLMTEVREALSKDRFSAYREEFHQNRQRGVEPGQD

SEQ ID NO: 59231 - protein, 385 aa, unidentified
  source 1..385: note = Polynucleobacter meluiroseus
  REGION 1..385: note = tr|A0A240DYE6|A0A240DYE6_9BURK Queuine tRNA-ribosyltransferase OS=Polynucleobacter meluiroseus; OX = 1938814 GN=tgt PE=3 SV=1
MTKPVHFNILARDPASPARLGQLDLPHGSVQTPIFMPVGTYGTVKAMTPRDLKEAKAQIILGNTFHLWLRPGLDVIKKHGGLHRFMAWDKPILTDSGGFQVFSLGALRKISEEGVTFASPINGDKLFMSPEVSMEIQAVLNSDIAMQFDECTPYEIKGQATSEKTARDSLEMSLRWGDRSLKRFRELETGNGLFGIVQGGMFENLREFSLEAVSQQGFDGIAIGGLSVGEPKPEFERILNFTAPKLPELMPHYLMGVGTPEDLMLGVSLGIDMFDCVMPTRNARNGWLFTRFGDLKLRNSGYKDDDRPVDPTCACYTCQNFTRSYLNHLQKANEILGSQLNTIHNLSYYLQLMEEVRESLKLGRFSNYREEFHNNRQRGVEPGQD

SEQ ID NO: 59232 - protein, 385 aa, Polynucleobacter necessarius
  REGION 1..385: note = tr|B1XRV9|B1XRV9_POLNS Queuine tRNA-ribosyltransferase OS=Polynucleobacter necessarius subsp. necessarius (strain STIR1) OX=452638 GN=tgt PE=3; SV = 1
MTKPVYFNILARDSQSPARLGQLDLPHGSVQTPIFMPVGTYGTVKAMTPRDLHEAKAQIILGNTFHLWLRPGLDVIKKHGGLHRFMGWDKPILTDSGGFQVFSLGALRKISEEGVTFASPINGDKLFMSPEVSMEIQAVLNSDIAMQFDECTPYEIKGQPTSEKTARTSLEMSLRWGDRSLKRFRELETGNGLFGIVQGGMFENLREFSLDAVSQQGFDGIAIGGLSVGEPKPEFECILNFTAPKLPEHMPHYLMGVGTPEDLILGVSLGIDMFDCVMPTRNARNGWLFTRFGDLKLRNSGYKDDDRPVDPTCACYTCQNFTRSYLNHLQKANEILGSQLNTIHNLSYYLQLMTEVREALSKDRFSAYREEFHSNRQRGVEPGQD

SEQ ID NO: 59233 - protein, 385 aa, unidentified
  source 1..385: note = Polynucleobacter paneuropaeus
  REGION 1..385: note = tr|A0A2Z4JP35|A0A2Z4JP35_9BURK Queuine tRNA-ribosyltransferase OS=Polynucleobacter paneuropaeus; OX = 2527775 GN=tgt PE=3 SV=1
MTKSIQFNISAHDSSSLARVGQLDLPHGSVQTPIFMPVGTYGTVKAMTPRDLEEAHAQIILGNTFHLWLRPGLEVVKKHGGLHRFMAWDKPILTDSGGFQVFSLGALRKISEEGVTFASPINGDKLFMSPEVSMEIQAVLNSDIAMQFDECTPYESHGKATTEKTAQQSLELSLRWGERSIKRFRELETDNGLFGIVQGGMFENLRELSLAGVSEQGFDGIAIGGLSVGEPKPEFERILNFTAPKLPAHLPHYLMGVGTPEDLILAVSLGIDMFDCVMPTRNARNGWLFTRFGDLKLRNSGYKDDDRPLDPSCACYTCKHFTRSYLNHLQKANEILGSQLNTIHNLSYYLQLMTEVREAISQARFQAYREEFHRNRQRGVEPGQD

SEQ ID NO: 59234 - protein, 385 aa, unidentified
  source 1..385: note = Polynucleobacter paneuropaeus
  REGION 1..385: note = tr|A0A2Z4JUL6|A0A2Z4JUL6_9BURK Queuine tRNA-ribosyltransferase OS=Polynucleobacter paneuropaeus; OX = 2527775 GN=tgt PE=3 SV=1
MTKSIQFNISAHDSSSLARVGQLDLPHGSVQTPIFMPVGTYGTVKAMTPRDLEEAHAQIILGNTFHLWLRPGLEVVKKHGGLHRFMAWDKPILTDSGGFQVFSLGALRKISEEGVTFASPINGDKLFMSPEVSMEIQAVLNSDIAMQFDECTPYESHGKATTEKTAQQSLELSLRWGERSIQRFRELETGNGLFGIVQGGMFENLRELSLAGVSEQGFDGIAIGGLSVGEPKPEFERILNFTAPKLPAHLPHYLMGVGTPEDLILAVSLGIDMFDCVMPTRNARNGWLFTRFGDLKLRNSGYKDDDRPLDPSCACYTCKHFTRSYLNHLQKANEILGSQLNTIHNLSYYLQLMTEVREAISQARFQAYREEFHRNRQRGVEPGQD

SEQ ID NO: 59235 - protein, 385 aa, Polynucleobacter sp.
  REGION 1..385: note = tr|A0A258X861|A0A258X861_9BURK Queuine tRNA-ribosyltransferase OS=Polynucleobacter sp. 16-46-70; OX = 1970421 GN=tgt PE=3 SV=1
MTKPVHFNILARDSQSPARLGQLDLPHGSVQTPIFMPVGTYGTVKAMTPRDLNEAKAQIILGNTFHLWLRPGLDVIKKHGGLHRFMGWDKPILTDSGGFQVFSLGALRKISEEGVTFASPINGDKLFMSPEVSMEIQAVLNSDIAMQFDECTPYEVKGQPTSEKTARASLEMSLRWGDRSLKRFRELETGNGLFGIVQGGMFENLREFSLEAVRQQGFDGIAIGGLSVGEPKPEFERILNFTAPKLPEHMPHYLMGVGTPEDLMLGVSLGIDMFDCVMPTRNARNGWLFTRFGDLKLRNSGYKDDDRPLDPTCACYTCQNFTRSYLNHLQKANEILGSQLNTIHNLSYYLQLMEEVREALSKDRFSAYREQFHRDRQRGVEPGQD

SEQ ID NO: 59236 - protein, 385 aa, Polynucleobacter sp.
  REGION 1..385: note = tr|A0A1G3CT79|A0A1G3CT79_9BURK Queuine tRNA-ribosyltransferase OS=Polynucleobacter sp. GWA2_45_21; OX = 1801989 GN=tgt PE=3 SV=1
MTKPVHFNILARDSASPARLGQLDLPHGSVQTPIFMPVGTYGTVKAMTPRDLNEAKAQIILGNTFHLWLRPGLDVIKKHGGLHRFMGWDKPILTDSGGFQVFSLGALRKISEEGVTFASPINGDKLFMSPEVSMEIQAVLNSDIAMQFDECTPYEVKGQATSEKTARASLEMSLRWGDRSLKRFRELETGNGLFGIVQGGMFENLREFSLDAVSQQGFDGIAIGGLSVGEPKPEFERILNFTAPKLPEHMPHYLMGVGTPEDLMLGVSLGIDMFDCVMPTRNARNGWLFTRFGDLKLRNSGYKDDDRPVDPTCGCYTCKNFTRSYLNHLQKANEILGSQLNTIHNLSYYLQLMEEVRDSLAKDRFSAYREEFHRNRQRGVEPGQD

SEQ ID NO: 59237 - protein, 385 aa, unidentified
  source 1..385: note = Polynucleobacter sphagniphilus
  REGION 1..385: note = tr|A0A1R0HDM3|A0A1R0HDM3_9BURK Queuine tRNA-ribosyltransferase OS=Polynucleobacter sphagniphilus; OX = 1743169 GN=tgt PE=3 SV=1
MSKPVNFSILARDSQSPARLGQLDLPHGSVQTPIFMPVGTYGTVKAMTPRDLEEAKAQIILGNTFHLWLRPGLDVIKKHGGLHRFMGWNKPILTDSGGFQVFSLGALRKISEEGVTFASPINGDKLFMSPEVSMEIQAVLNSDIAMQFDECTPYEVKGQATTEKTARQSLEMSLRWGDRSLKRFRELNTGNGLFGIVQGGMFENLREFSSDAVSQQGFDGIAIGGLSVGEPKPEFERILNFTAPKLPEHMPHYLMGVGTPEDLILGVSLGIDMFDCVMPTRNARNGWLFTRFGDLKLRNAGYKEDDRPLDPTCACYTCQHFTRSYLNHLQKANEILGSQLNTIHNLSYYLQLMTEVREALSLGRFSAYREEFHRNRQRGVEPGQD

SEQ ID NO: 59238 - protein, 384 aa, unidentified
  source 1..384: note = Polynucleobacter victoriensis
  REGION 1..384: note = tr|A0A212TGB1|A0A212TGB1_9BURK Queuine tRNA-ribosyltransferase OS=Polynucleobacter victoriensis; OX = 2049319 GN=tgt PE=3 SV=1
MKPLNFKLIKKDSRTHARRGEVSLPHGKVQTPIFMPVGTYGTVKGMTPRDLEEAQAQIILGNTFHLWLRPGLEVINQHHGLHDFMGWKKPILTDSGGFQVFSLGALRKITEEGVAFASPVNGDKLFMSPEISMEIQAELNSDIAMQFDECTPYETNGIPTDEKTVKNSLELSLRWGERSIKRFRDLDTGNALFGIVQGGMFEHLRDVSLDGVSQQDFDGIAIGGLSVGEPKPEFERILSHIGPKLPENKPHYLMGVGTPEDLVLGVSQGIDMFDCVMPTRNARNGWLFTRFGDLKLRNASFKTDTRPLDPTCSCYTCRNFSRSYLHHLQKANEILGSQLNTIHNIHYYLNLMSEIRDALDQDQFPEFIKEFHQNRAIGVLETTG

SEQ ID NO: 59239 - protein, 385 aa, unidentified
  source 1..385: note = Polynucleobacter wuianus
  REGION 1..385: note = tr|A0A191UHI1|A0A191UHI1_9BURK Queuine tRNA-ribosyltransferase OS=Polynucleobacter wuianus; OX = 1743168 GN=tgt PE=3 SV=1
MTKPVHFNILARDSQSPARLGQLDLPHGSVQTPIFMPVGTYGTVKAMTPRDLNEAKAQIILGNTFHLWLRPGLDVIKKHGGLHRFMGWDKPILTDSGGFQVFSLGALRKISEEGVTFASPINGDKLFMSPEVSMEIQAVLNSDIAMQFDECTPYEIKGQPTSEKTARASLEMSLRWGDRSLKRFRELNTGNGLFGIVQGGMFENLREFSLDAVSQQGFDGIAIGGLSVGEPKPEFERILNFTAPKLPEHMPHYLMGVGTPEDLILGVSLGIDMFDCVMPTRNARNGWLFTRFGDLKLRNSGYKDDDRPLDPTCACYTCQNFTRSYLNHLQKANEILGSQLNTIHNLSYYLQLMTEVREALSKDRFSAYREEFHANRQRGVEPGQD

SEQ ID NO: 59240 - protein, 376 aa, Pontibaca methylaminivorans
  REGION 1..376: note = tr|A0A1R3WDI1|A0A1R3WDI1_9RHOB Queuine tRNA-ribosyltransferase OS=Pontibaca methylaminivorans; OX = 515897 GN=tgt PE=3 SV=1
MGAGITFALQASDEKARAGMITTPRGVIRTPAFMPVGTAATVKAMLPESVAATGADILLGNTYHLMLRPGAERIAALGGLHRFMNWDRPILTDSGGFQVMSLAGLRKLTEEGVRFRSHVDGSRHMLTPERSMMIQRLLGSDIVMCFDECPALPASEAEVAGSMRRSMRWAARSREAFGDRPGHALFGIQQGGISRELREESAQALRAIGFDGYAIGGLAVGEGQEAMFSVLDHAPDMLPAEKPRYLMGVGKPEDIVGAVARGVDMMDCVLPSRSGRTGQVFTRLGALNIKNARHAEDPRPLDDTCTCPACRSYSRAYLHHVFRSGEIVSAMLLTWHNLHYYQQIMAGMRAAIAEGGFAAWSAEFHAARTRGDIEPI

SEQ ID NO: 59241 - protein, 379 aa, Pontibacillus chungwhensis
  REGION 1..379: note = tr|A0A0A2UUL1|A0A0A2UUL1_9BACI Queuine tRNA-ribosyltransferase OS=Pontibacillus chungwhensis BH030062 OX=1385513 GN=tgt PE=3 SV=1
MMPIRYEHIKTCKQTGARLGRVHTPHGSFETPMFMPVGTLATVKTMAPEELKQMGAEIILSNTYHLWLRPGEDIVEEAGGLHKFMNWDGSILTDSGGFQVFSLSKLRDIKEEGVHFRNHISGEKLFLSPEKAMHIENALGADIMMAFDECPPYPASHEYMKKSVERTSRWAERCLEAHKRPHDQGLFGIVQGGEYEDLRRQSINDLVSMDFPGYAVGGLSVGEPKDVMNRVLDFTTPYLPTDKPRYLMGVGSPDSLIDGAMRGIDMFDCVLPTRIARNGTCMTSQGRLVVRNAKFARDFGPIDPECDCHTCRNYSRAYIRHLIKCNETFGFRLTTYHNLYFLLKLMKQVREAIREDRLGDFREEFFEQYGFNKPDAKNF

SEQ ID NO: 59242 - protein, 379 aa, Pontibacillus halophilus
  REGION 1..379: note = tr|A0A0A5GQL9|A0A0A5GQL9_9BACI Queuine tRNA-ribosyltransferase OS=Pontibacillus halophilus JSM 076056 = DSM 19796 OX=1385510 GN=tgt PE=3 SV=1
MSAITYEFIKEDKQTGARLGRVHTPHGSFDTPTFMPVGTLATVKTMAPEELKQMGANMILSNTYHLWLRPGEDIVEEAGGLHKFMNWDGSILTDSGGFQVFSLSNLRDIQEEGVHFRSHISGEKLFLSPEKAMQIQNSLGADIMMAFDECPPYPASYDYIKKSVERTSRWAERCLTAHKRPHDQGLFGIVQGGEYEDLRRQSAQDLISLDFPGYAIGGLSVGEPKDVMNRVLDFTTPLLPKDKPRYLMGVGSPDSLIDGAIRGVDMFDCVLPTRIARNGTCMTSEGRLVVRNAKFARDFRPIDENCDCYTCRNYSRAYIRHLVKANETFGFRLTTYHNLYFLLKLMENVRQAIREDRLGDFREEFFEQYGFNKPGAKNF

SEQ ID NO: 59243 - protein, 379 aa, Pontibacillus litoralis
  REGION 1..379: note = tr|A0A0A5G7B2|A0A0A5G7B2_9BACI Queuine tRNA-ribosyltransferase OS=Pontibacillus litoralis JSM 072002 OX=1385512 GN=tgt PE=3 SV=1
MMAIKYELIKTDKQTGARLGRVHTPHGSFDTPTFMPVGTLATVKTMAPEELKEMGANIILSNTYHLWLRPGEDIVEEAGGLHSFMNWDGSILTDSGGFQVFSLSKLRDIQEEGVHFRNHISGEKLFLSPEKAMHIQNSLGSDIMMAFDECPPYPASYDYMKSSVERTSRWAERCLEAHKRPHDQGLFGIIQGGEYEELRRQSARDLVSLDFPGYAIGGLSVGEPKDVMNRVLDFTTPLMPENKPRYLMGVGSPDSLIDGAIRGVDMFDCVLPTRIARNGTCMTSKGRLVVRNAKYARDFGPIDDACTCHTCRNYSRAYIRHLIKANETFGFRLTTYHNLHFLLKLMEQVREAIRQDRLGDFREAFFEQYGFNKPNAKNF

SEQ ID NO: 59244 - protein, 378 aa, Pontibacillus marinus
  REGION 1..378: note = tr|A0A0A5FU86|A0A0A5FU86_9BACI Queuine tRNA-ribosyltransferase OS=Pontibacillus marinus BH030004 = DSM 16465 OX=1385511 GN=tgt PE=3 SV=1
MPIKYELIKTCKQTGARLGRVHTPHGSFETPMFMPVGTLATVKTMAPEELKEMGADIILANTYHLWLRPGEDIVEEAGGLHKFMNWDGSILTDSGGFQVFSLSDLRDIKEEGVHFRNHISGEKLFLSPEKAMQIQNSLGPDIMMAFDECPPYPASHEYMKSSVERTTRWAERCLEAHKRPNEQGLFGIVQGGEYEDLRRQSARDLVSMDFPGYAVGGLSVGEPKDVMNRALEFTTPLLPDHKPRYLMGVGSPDSLIDGALRGIDMFDCVLPTRIARNGTCMTSEGRLVVRNAKYSRDFRPIDEACDCHTCRNYSRAYIRHLIKCNETFGFRLTTYHNLYFLLNLMKQVRQAILDDRLGDFREEFFEQYGFNKPDAKNF

SEQ ID NO: 59245 - protein, 379 aa, Pontibacillus yanchengensis
  REGION 1..379: note = tr|A0A0A2TDL8|A0A0A2TDL8_9BACI Queuine tRNA-ribosyltransferase OS=Pontibacillus yanchengensis Y32; OX = 1385514 GN=tgt PE=3 SV=1
MPAIRYELIKTCKQTGARLGRVHTPHGSFETPMFMPVGTLATVKTMAPEELKQMGADIILSNTYHLWLRPGEDIVEEAGGLHKFMNWDGSILTDSGGFQVFSLSDLRDIKEEGVHFRNHISGEKLFLSPEKAMHIQNSLGADIMMAFDECPPYPASHEYMKSSVERTSRWAERCLEAHQRPHDQGLFGIIQGGEYEDLRRQSAKDLISLDFPGYAIGGLSVGEPKDVMNRVLDFTTPLLPNDKARYLMGVGSPDSLIDGSIRGVDMFDCVLPTRIARNGTCMTSQGRLVVRNAKFARDFRPIDENCDCHTCRNYSRAYIRHLVKANETFGFRLTTYHNLYFLLKLMEQVRQAIREDRLGDFREEFFEQYGLNKPNAKNF

SEQ ID NO: 59246 - protein, 376 aa, Pontibacter actiniarum
  REGION 1..376: note = tr|A0A1X9YMF8|A0A1X9YMF8_9BACT Queuine tRNA-ribosyltransferase OS=Pontibacter actiniarum; OX = 323450 GN=tgt PE=3 SV=1
MQFNLVATDAQSKARAGVVQTDHGAIETPIFMPVGTAGTVKAVHQRELKEDVKAEIILGNTYHLYLRPGLEVLEKAGGLHKFNGWDRPILTDSGGYQVFSLAGTRKIKEEGVKFKSHIDGSTLNFTPENVMDTQRIIGADIIMAFDECTPYPCDYGYARNSMERTHRWLQRCVDRFDSTEPKYGYSQTLFPIVQGSTYKDLRVQSAETIASFGREGNAIGGLSVGEPAEMMYEMTDLVCDILPKDKPRYLMGVGTPANILENIALGVDMFDCVLPTRNARNGMLFTTQGIINIRNKKWADDFSPIDAELGGYVSTFYSKAYLRHLIHSTEYLAGQIASVHNLTFFLWLVKQARQQILNGTFRDWKDVMVKKLMTRL

SEQ ID NO: 59247 - protein, 396 aa, Pontibacter akesuensis
  REGION 1..396: note = tr|A0A1I7J518|A0A1I7J518_9BACT Queuine tRNA-ribosyltransferase OS=Pontibacter akesuensis; OX = 388950 GN=tgt PE=3 SV=1
MGRLALRIAFARQGASTDTTMQFNLVATDAQSKARAGVIQTDHGTIETPIFMPVGTAGTVKAVHQRELKEDIKAEIILGNTYHLYLRPGLDVLEQAGGLHKFNGWDRPLLTDSGGYQVFSLAGTRKIKEEGVKFRSHIDGSSLDFTPENVMDTQRIIGADIIMAFDECTPYPCDYGYARNSMERTHRWLQRCVDRFDSTEPKYGYSQTLFPIVQGSTYKDLRVQSADTIASFGREGNAIGGLSVGEPAEMMYEMTDLVCDILPKDKPRYLMGVGTPANILENIALGVDMFDCVLPTRNARNGMLFTTQGIINIRNKKWADDFSPIDAELGGYVSTFYSKAYLRHLIHSTEYLAGQIASIQNLTFYLWLVKQARQRIIDGTFRDWKDVMVKKLMTRL

SEQ ID NO: 59248 - protein, 376 aa, unidentified
  source 1..376: note = Pontibacter chinhatensis
  REGION 1..376: note = tr|A0A1I2YUL9|A0A1I2YUL9_9BACT Queuine tRNA-ribosyltransferase OS=Pontibacter chinhatensis; OX = 1436961 GN=tgt PE=3 SV=1
MQFNLVATDPQSKARAGVVQTDHGAIETPIFMPVGTAGSVKAVHQRELKEDIKAEIILGNTYHLYLRPGLEVLEKAGGLHKFNGWDRPLLTDSGGYQVFSLAGTRKIKEEGVKFKSHIDGSTLNFTPENVMDTQRTIGADIIMAFDECTPYPCDYTYAKQSMERTHRWLQRCVDRFDSTEPKYGYSQTLFPIVQGSTYKDLRIQSAETIASFGREGNAIGGLSVGEPAEMMYEMTEVVCDILPKDKPRYLMGVGTPANILENIALGVDMFDCVLPTRNARNGMLFTTQGIINIKNKKWAEDFSPIDAELGGYVSTFYTKAYLRHLIHSTEYLAGQIASVHNLTFFLWLVKQARQQILNGTFRDWKDLMVKKLMTRL

SEQ ID NO: 59249 - protein, 376 aa, unidentified
  source 1..376: note = Pontibacter diazotrophicus
  REGION 1..376: note = tr|A0A3D8L8X3|A0A3D8L8X3_9BACT Queuine tRNA-ribosyltransferase OS=Pontibacter diazotrophicus; OX = 1400979 GN=tgt PE=3 SV=1
MQFDLIAKDAQSKARAGVVQTDHGAIETPIFMPVGTAGTVKAVHQRELKEDVKAEIILGNTYHLYLRPGLNVLEQAGGLHKFNGWDRPILTDSGGYQVFSLAGTRKIKEEGVKFRSHIDGSPLDFTPENVMDTQRIIGADIIMAFDECTPYPCDYTYAKNSMERTHRWLQRCVDRFDSTEPKYGYSQTLFPIVQGSTYKDLRVKSAETIASFGREGNAIGGLSVGEPAEMMYEMTELVCDILPADKPRYLMGVGTPANILENIALGVDMFDCVLPTRNARNGMLFTTQGIVNIRNERWANDHSPIDAELGVYASSFYSKAYLRHLVRANEMLGAQISSIHNLTFYLWLVKQARQQIINGTFRDWKDLMVKKLMTRL

SEQ ID NO: 59250 - protein, 376 aa, unidentified
  source 1..376: note = Pontibacter indicus
  REGION 1..376: note = tr|A0A1R3XL63|A0A1R3XL63_9BACT Queuine tRNA-ribosyltransferase OS=Pontibacter indicus OX=1317125; GN = tgt PE=3 SV=1
MQFSLVAKDIQSKARAGVVQTAHGAIETPIFMPVGTAGTVKAVHQRELKDDIKAEIILGNTYHLYLRPGLNILEQAGGLHKFNGWDRPILTDSGGYQVFSLAGTRKIKEEGVKFKSHIDGSTLNFTPENVMDTQRTIGADIIMAFDECTPYPCDYTYAKQSMERTHRWLQRCVDRFDSTEPKYGYDQTLFPIVQGSTYKDLRVQSAETIASFGREGNAIGGLSVGEPAEMMYEMTEVVCDILPADKPRYLMGVGTPANILENIALGVDMFDCVLPTRNARNGMLFTTQGIVNIRNQKWATDHSPIDAELGGYVSTFYSKAYLRHLIHSGEYLAGQIASVHNLTFYLWLVKQARQHIIAGTFRDWKDVMVKKLMTRL

SEQ ID NO: 59251 - protein, 376 aa, Pontibacter korlensis
  REGION 1..376: note = tr|A0A0E3UWK0|A0A0E3UWK0_9BACT Queuine tRNA-ribosyltransferase OS=Pontibacter korlensis OX=400092; GN = tgt PE=3 SV=1
MQFNLVATDPQSKARAGVVQTDHGAIETPIFMPVGTAGTVKAVHQRELKEDIKAEIILGNTYHLYLRPGLDILEQAGGLHKFNGWDRPILTDSGGYQVFSLAGTRKIKEEGVKFKSHIDGSTLNFTPENVMDTQRTIGADIIMAFDECTPYPCDYTYAKQSMERTHRWLQRCVDRFDSTEPKYGYNQTLFPIVQGSTYKDLRIQSAETIASFGREGNAIGGLSVGEPAEMMYEMTEVVCDILPKDKPRYLMGVGTPANILENIALGVDMFDCVLPTRNARNGMLFTTQGIVNIKNKKWADDFSPIDAELGGYVSTFYTKAYLRHLIHSTEYLAGQIASVHNLTFFLWLVKQARQQILNGTFRDWKDMMVKKLMTRL

SEQ ID NO: 59252 - protein, 376 aa, unidentified
  source 1..376: note = Pontibacter lucknowensis
  REGION 1..376: note = tr|A0A1N6T5A3|A0A1N6T5A3_9BACT Queuine tRNA-ribosyltransferase OS=Pontibacter lucknowensis; OX = 1077936 GN=tgt PE=3 SV=1
MEFSLVAKDIQSKARAGVVQTAHGAIETPIFMPVGTAGTVKAVHQRELKEDIKAEIILGNTYHLYLRPGLNILEQAGGLHKFNGWDRPILTDSGGYQVFSLAGTRKIKEEGVKFKSHIDGSALDFTPENVMDTQRTIGADIIMAFDECTPYPCDYTYAKNSMERTHRWLQRCVDRFDSTEPKYGYDQTLFPIVQGSTYKDLRVQSAETIASFGREGNAIGGLSVGEPAEMMYEMTEIVCDILPADKPRYLMGVGTPANILENIALGVDMFDCVLPTRNARNGMLFTTQGIINIRNQKWSTDHSPIDAELGGYVSTFYSKAYLRHLVHSGEYLAGQIASVHNLTFYLWLVKQARQHIIDGTFRDWKDVMVKKLMTRL

SEQ ID NO: 59253 - protein, 376 aa, unidentified
  source 1..376: note = Pontibacter mucosus
  REGION 1..376: note = tr|A0A2T5YJB4|A0A2T5YJB4_9BACT Queuine tRNA-ribosyltransferase OS=Pontibacter mucosus OX=1649266; GN = tgt PE=3 SV=1
MQFNLVATDPQSKARAGVVQTDHGAIETPIFMPVGTAGSVKAVHQRELKEDIKAEIILGNTYHLYLRPGLEVLEKAGGLHKFNGWDRPLLTDSGGYQVFSLAGTRKIKEEGVKFKSHIDGSTLNFTPENVMDTQRTIGADIIMAFDECTPYPCDYTYAKQSMERTHRWLQRCVDRFDSTEPKYGYSQTLFPIVQGSTYKDLRMQSAETIASFGREGNAIGGLSVGEPAEMMYEMTEVVCDILPKDKPRYLMGVGTPANILENIALGVDMFDCVLPTRNARNGMLFTTQGIINIKNKKWAEDFSPIDAELGGYVSTFYTKAYLRHLIHSTEYLAGQIASVHNLTFFLWLVKQARQQILNGTFRDWKDLMVKKLMTRL

SEQ ID NO: 59254 - protein, 376 aa, unidentified
  source 1..376: note = Pontibacter ramchanderi
  REGION 1..376: note = tr|A0A2N3UAK4|A0A2N3UAK4_9BACT Queuine tRNA-ribosyltransferase OS=Pontibacter ramchanderi; OX = 1179743 GN=tgt PE=3 SV=1
MQFSLVAKDIQSKARAGVVQTAHGAIETPIFMPVGTAGTVKAVHQRELKEDIKAEIILGNTYHLYLRPGLNILEQAGGLHKFNGWDRPILTDSGGYQVFSLAGTRKIKEEGVKFKSHIDGSTLNFTPENVMDTQRTIGADIIMAFDECTPYPCDYTYAKNSMERTHRWLQRCVDRFDSTEPKYGYDQTLFPIVQGSTYKDLRVQSAETIASFGREGNAIGGLSVGEPAEMMYEMTEIVCDILPADKPRYLMGVGTPANILENIALGVDMFDCVLPTRNARNGMLFTTQGVINIRNQKWATDHSPIDAELGGYVSTFYSKAYLRHLIHSGEYLAGQIASVHNLTFYLWLVKQARQHIIAGTFRDWKDVMVKKLMVRL

SEQ ID NO: 59255 - protein, 376 aa, Pontibacter sp.
  REGION 1..376: note = tr|A0A364RJG0|A0A364RJG0_9BACT Queuine tRNA-ribosyltransferase OS=Pontibacter sp. 2b14 OX=2080288; GN = tgt PE=3 SV=1
MQFTLTAKDTQSKARAGVVQTAHGAIETPIFMPVGTAGTVKAVHQRELKEDVKAEIILGNTYHLYLRPGLGVLESAGGLHKFNGWDRPILTDSGGYQVFSLAGTRKIKEEGVKFKSHIDGSTLNFTPENVMDTQRTIGADIIMAFDECTPYPCDHTYAKYSMERTHRWLQRCVDRFDSTEPKYGFDQTLFPIVQGSTYKDLRIQSAETIAGFGREGNAIGGLSVGEPAEMMYEMTELVCDILPADKPRYLMGVGTPANILENIALGVDMFDCVLPTRNARNGMLFTTQGIINIKNQRWADDHTPIDAELGGYASTFYSKAYLRHLIHSKEYLGGQIASIHNLTFYLWLVKQARQQIIAGTFRDWKDMMVKKLMTRL

SEQ ID NO: 59256 - protein, 376 aa, Pontibacter sp.
  REGION 1..376: note = tr|A0A5C8K5J4|A0A5C8K5J4_9BACT Queuine tRNA-ribosyltransferase OS=Pontibacter sp. GY10130; OX = 2603253 GN=tgt PE=3 SV=1
MQFTLVANDTQSKARAGVVQTDHGTIETPIFMPVGTAGTVKAVHQRELTDDIKAKIILGNTYHLYLRPGLDVLERAGGLHKFNGWNGPILTDSGGYQVFSLAGTRKIKEEGVKFKSHIDGSTLNFTPENVMDTQRTIGADIIMAFDECTPYPCDYTYAKNSMDRTHRWLQRCVDRFDSTEPKYGYNQTLFPIVQGSTYKDLRVKSAETIASFGRAGNAIGGLSVGEPAEMMYEMTELVCDILPADKPRYLMGVGTPANILENIALGVDMFDCVLPTRNARNGMLFTTQGIVNIRNKKWADDFSPIDAELGGYVSTFYSKAYLRHLVHSTEMLGAQISSVHNLTFYLWLVKQAREQILKGTFRDWKDLMVKKLMTRL

SEQ ID NO: 59257 - protein, 376 aa, unidentified
  source 1..376: note = Pontibacter ummariensis
  REGION 1..376: note = tr|A0A239EEA5|A0A239EEA5_9BACT Queuine tRNA-ribosyltransferase OS=Pontibacter ummariensis; OX = 1610492 GN=tgt PE=3 SV=1
MQFSLVAKDKQSKARAGVVQTDHGAIETPIFMPVGTAGTVKAVHQQELKEDVKAEIILGNTYHLYLRPGLDVLEKAGGLHKFNGWDRPILTDSGGYQVFSLAGTRKIKEEGVKFKSHIDGSPLDFTPENVMDTQRTIGADIIMAFDECTPYPCDYTYAKNSMERTHRWLQRCVDRFDSTEPKYGYNQTLFPIVQGSTYKDLRVQSAETIASFGREGNAIGGLSVGEPAEVMYEMTELVCDILPTDKPRYLMGVGTPANILENIALGVDMFDCVLPTRNARNGMLFTTQGIVNIRNKKWADDFSPIDAELGGYVSTFYTKAYLRHLIHSGEYLAGQIASVHNLTFYLWLVKQARQQILNGTFREWKDVMVKKLMTRL

SEQ ID NO: 59258 - protein, 376 aa, unidentified
  source 1..376: note = Pontibacter virosus
  REGION 1..376: note = tr|A0A2U1AZG7|A0A2U1AZG7_9BACT Queuine tRNA-ribosyltransferase OS=Pontibacter virosus OX=1765052; GN = tgt PE=3 SV=1
MQFSLVAKDIQSKARAGVVETAHGAIETPIFMPVGTAGTVKAVHQRELKDDIKAEIILGNTYHLYLRPGLNILEQAGGLHKFNGWDRPILTDSGGYQVFSLAGTRKIKEEGVKFKSHIDGSALDFTPENVMDTQRTIGADIIMAFDECTPYPCDYTYAKNSMERTHRWLQRCVDRFDSTEPKYGYDQTLFPIVQGSTYKDLRVQSAETIASFGREGNAIGGLSVGEPAEMMYEMTEVVCDILPADKPRYLMGVGTPANILENIALGVDMFDCVLPTRNARNGMLFTTQGIVNIRNLKWATDHSPIDAELGGYVSTFYSKAYLRHLVHSGEYLAGQIASVHNLTFYLWLVKQARQHIIAGTFRDWKDVMVKKLMVRL

SEQ ID NO: 59259 - protein, 370 aa, Ponticaulis sp.
  REGION 1..370: note = tr|A0A2D7J2I2|A0A2D7J2I2_9RHOB Queuine tRNA-ribosyltransferase OS=Ponticaulis sp. OX=2020902; GN = tgt PE=3 SV=1
MTDFPFEILGRENRARTGVLKTSRGDIRTPAFMPVGTVGTVKALYSEQVADAGADIVLGNTYHLMLRPGSERVHRLGGLHKFMRWEKPILTDSGGFQVWSLAGLRKMKEEGVSFKSHIDGSTHFLSPERSIEIQADHLGADISMQLDECTAYPVSHEEAKSSMEMSIRWGARSKAAFGERDTQNLFGIVQGSDFEDLRRQSAEQLQEIGFGGYAIGGLAVGEGHERMVEVIDFTEPHLPQHRPRYLMGVGKPIDILEAVAHGVDMFDCVLPTRSGRHGQAWTWDGPINLKNAKFAEDDTPIDETSSCPATRDYSKAYLNHLFKSGEYLAAMVLSWHNTAFFQELMSEIRVSIAEGRFETFRAELKSRWAK

SEQ ID NO: 59260 - protein, 369 aa, Ponticaulis sp.; identical to SEQ ID NO: 56177
  REGION 1..369: note = tr|A0A2D7KDC0|A0A2D7KDC0_9RHOB Queuine tRNA-ribosyltransferase OS=Ponticaulis sp. OX=2020902; GN = tgt PE=3 SV=1

SEQ ID NO: 59261 - protein, 419 aa, unidentified
  source 1..419: note = Ponticoccus gilvus
  REGION 1..419: note = tr|A0A4R6LUS4|A0A4R6LUS4_9ACTN Queuine tRNA-ribosyltransferase OS=Ponticoccus gilvus OX=519423; GN = tgt PE=3 SV=1
MSAGDYPPGVPFSFEVRDRLPDRQGRTGIIHTPHGEIQTPAFIAVGTQATVKAVLPEAMRDLGAQAVLANAYHLYLQPGADIVDEAGGVGAFMNWPGPTFTDSGGFQVMSLGVGFKKVLSMDSSRVSDDDVIAEGKERLAHVDDDGVTFKSHLNGDRHRFTPEISMRVQHQLGADIIFAFDELTTLMNTRAYQEESLERTRLWAERCLAAHRELTAERADKPYQALFGVLQGAQYEDLRRKAARDLGAMEVAGQRFDGFGIGGALEKENLGTIVDWVSSELPEDRPRHLLGISEPDDFFAAIAAGADTFDCVQPSRVARNAALYTADGRFNVNTAANRRNFNPIDESCDCYTCAHYTRAYLHHLFKAREMVASTLATIHNERFTVRLVDDIRASIGTGEFDAFKDEFLGRFYRGAGSKA

SEQ ID NO: 59262 - protein, 373 aa, unidentified
  source 1..373: note = Ponticoccus marisrubri
  REGION 1..373: note = tr|A0A0W7WER8|A0A0W7WER8_9RHOB Queuine tRNA-ribosyltransferase OS=Ponticoccus marisrubri; OX = 1685382 GN=tgt PE=3 SV=1
MTSFDLTARDGRARLGVIRTPRGEIRTPAFMPVGTAATVKGMLPESVAATGADILLGNTYHLMLRPGAERIDRLGGLHRFMNWDRPILTDSGGFQVMSLSDLRKLTEDGVEFRSHIDGSRHMLSPERSMEIQRLLGSDIVMAFDECPALPADRERIAASMQLSMRWAARSREAFGDRPGHMLFGIMQGGLERDLREESAAALRDIGFDGYAVGGLAVGEGQAAMFDCLDYAPGFLPEDRPRYLMGVGKPDDIVGAVVRGIDMMDCVLPSRSGRTGQAWTRRGQVNIKNARHADDPRPLDEACSCPACQGYSRAYLHHVFRAGEMIAGMLLTWHNLHYYQELMAGLRAAIAEGRMAAFEADFHAAREEGDIPPL

SEQ ID NO: 59263 - protein, 343 aa, unidentified
  source 1..343: note = Pontivivens insulae
  REGION 1..343: note = tr|A0A2R8A9S0|A0A2R8A9S0_9RHOB Queuine tRNA-ribosyltransferase OS=Pontivivens insulae OX=1639689; GN = tgt PE=3 SV=1
MPVGTAATVKAMLPENVRATGADILLGNTYHLMLRPTAERIAKLGGLHKFMNWDRPILTDSGGFQVMSLAQLRKLTEEGVTFKSHIDGSRHMLSPERSMEIQKLLGSDIVMCFDECPALPADRKRIEQSMELSMRWAQRSRDAFGDRPGHALFGIQQGGLEEDMRARSADALRAIEFDGYAVGGLAVGEGQEAMFACLDYAPEQLPQDKPRYLMGVGKPDDIVGAVQRGIDMFDCVLPSRSGRTGQAQTRMGQVNLRNARHADDPRPLDPECTCPCCTQYSRAYLHHVHKAQEMIAGMLLTWHNLHYYQELMQGLRDAIAERALDEFVAVFHARREQGDLERL

SEQ ID NO: 59264 - protein, 378 aa, Porphyrobacter dokdonensis
  REGION 1..378: note = tr|A0A1A7BJG0|A0A1A7BJG0_9SPHN Queuine tRNA-ribosyltransferase OS=Porphyrobacter dokdonensis DSW-74 OX=1300349 GN=tgt PE=3 SV=1
MIAPRFSFTLQATDGKARTGAIAMQRGEIRTPAFMPVGTAATVKAMKPEAVRQTGADIILGNTYHLMLRPGAERVARLGGLHKFMNWPRPILTDSGGYQVMSLSDLRKLTEQGVEFRSHLDGSKHMLTPERSMQIQRLLGSDIVMAFDECPRADRPRDEIAASMELSMRWARRSREGFDAGEEHAARAALFGIQQGALHEDLRRVSAEKLTEIGFDGYAVGGLAVGEGQEAMFGVLDYAPDMLPADRPRYLMGVGKPDDLVGAVERGIDMFDCVLPTRSGRNGQAFTWNGPLNLRNARFAEDTGPLDERCRCPVCTTYSRAYIHHLVKSGEMLGAMLVTEHNLSFYQALMHGMRDAIAEGRFASFAAAFRRDYLGSSD

SEQ ID NO: 59265 - protein, 374 aa, unidentified
  source 1..374: note = Porphyrobacter mercurialis
  REGION 1..374: note = tr|A0A0B2BWX4|A0A0B2BWX4_9SPHN Queuine tRNA-ribosyltransferase OS=Porphyrobacter mercurialis; OX = 1572751 GN=tgt PE=3 SV=1
MTRFAFNVHATDGRARTGTITMRRGEIRTPAFMPVGTAATVKAMKPESVRAIGADIILGNTYHLMLRPGAERVARLGGLHRFMHWDRPILTDSGGYQVMSLAALRKLTEEGVTFRSHLDGSRHLISPERSMEIQRLLGSDIVMCFDECPRADRPLAEIEESMALSMRWARRSREAFDSGGEHAAGAALFGIQQGALDERLRARSAEALREIGFDGYAIGGLAVGEGQEAMFATLDFAPEQLPQDAPRYLMGVGKPDDLVGAVERGVDMFDCVLPTRSGRNGQAFTWTGPLNMRNAVHAEDTGPLDPRCSCDTCTHYSRAYLHHLHRSGEILGAMLLTEHNLAFYQQLMQAMRDAIGARQFAGFAADFRRDYLRK

SEQ ID NO: 59266 - protein, 378 aa, Porphyrobacter neustonensis
  REGION 1..378: note = tr|A0A192D6K8|A0A192D6K8_9SPHN Queuine tRNA-ribosyltransferase OS=Porphyrobacter neustonensis; OX = 1112 GN=tgt PE=3 SV=1
MTLPRFSFTLHATSGKARTGVIQMQRGEIRTPAFMPVGTAATVKAMKPEAVRQTGADIILGNTYHLMLRPGAERVARLGGLHKFMNWDRPILTDSGGYQVMSLSELRKLTEQGVEFRSHIDGSKHMISPERSMEIQRLLGSDIVMAFDECPRADRPRDDIAASMELSMRWARRSREGFDSGAEHAARAALFGIQQGALHEDLRRISADKLTDIGFDGYAVGGLAVGEGQEAMFGVLDYAPDMLPADRPRYLMGVGKPDDLVGAVERGIDMFDCVLPTRSGRNGQAFTWNGPLNLRNARFAEDTGPLDDRCTCPVCTTYSRAYIHHLVKSGEMLGAMLVTEHNLSFYQALMAGMRTAIAAGTFAEFAATFRRDYLGSSA

SEQ ID NO: 59267 - protein, 378 aa, Porphyrobacter sanguineus
  REGION 1..378: note = tr|A0A1M7RSF2|A0A1M7RSF2_9SPHN Queuine tRNA-ribosyltransferase OS=Porphyrobacter sanguineus; OX = 198312 GN=tgt PE=3 SV=1
MIAPRFSFTLHAVDGKARTGTIAMQRGEIRTPAFMPVGTAATVKAMKPESVRATGADIILGNTYHLMLRPGAERVARLGGLHDFMNWPRPILTDSGGYQVMSLSELRKLTEQGVEFRSHLDGSKHMLTPERSMEIQRLLGSDIVMAFDECPRADRPKDEIAASMELSMRWAKRSREGFDSGEEHAMRAALFGIQQGALHEDLRRISADALTDIGFDGYAVGGLAVGEGQEAMFGVLDYAPDMLPADRPRYLMGVGKPDDLVGAVERGIDMFDCVLPTRSGRNGQAFTWDGPLNLRNARFAEDTGPLDSRCTCPVCTTYSRAYIHHLVKSGEMLGAMLLTEHNLCFYQALMAAMRDAIAAGGFASFARTFRRDYLRQGA

SEQ ID NO: 59268 - protein, 377 aa, Porphyrobacter sp.
  REGION 1..377: note = tr|A0A0N1LAA8|A0A0N1LAA8_9SPHN Queuine tRNA-ribosyltransferase OS=Porphyrobacter sp. AAP60; OX = 1523423 GN=tgt PE=3 SV=1
MAPRFSFTLHATDGKARTGAIAMQCGEIRTPAFMPVGTAATVKAMKPEAVRQTGADIILGNTYHLMLRPGAERVARLGGLHKFMNWQRPILTDSGGYQVMSLSELRKLTEQGVEFRSHLDGSRHMLTPERSMEIQRLLGSDIVMAFDECPRADRSRDEIAASMELSMRWAKRSREGFDSGEDHAARAALFGIQQGALHEDLRRISADALTDIGFDGYAVGGLAVGEGQEAMFGVLDYAPDMLPVDRPRYLMGVGKPDDLVGAVERGIDMFDCVLPTRSGRNGQAFTWNGPLNLRNARFAEDTGPLDERCACPVCTTYSRAYIHHLVKSGEMLGAMLVTEHNLSFYQALMQGMRDAIAGGRFNDFAATFRRDYLGSSV

SEQ ID NO: 59269 - protein, 378 aa, Porphyrobacter sp.
  REGION 1..378: note = tr|A0A2L0GL12|A0A2L0GL12_9SPHN Queuine tRNA-ribosyltransferase OS=Porphyrobacter sp. HT-58-2; OX = 2023229 GN=tgt PE=3 SV=1
MTSPRFAFTLHATDGKARTGTIQMQRGEIRTPAFMPVGTAATVKAMKPEAVRQTGADIILGNTYHLMLRPGAERVARLGGLHRFMNWQRPILTDSGGYQVMSLSELRKLTEQGVEFRSHLDGSKHMLTPERSMEIQRLLGSDIVMAFDECPRADRPRDEIAASMELSMRWARRSREGFDAGEEHAARAALFGIQQGALHEDLRRISADKLVDVGFDGYAVGGLAVGEGQEAMFGVLDYAPDMLPADRPRYLMGVGKPDDLVGAVERGIDMFDCVLPTRSGRNGQAFTWNGPLNLRNARFAEDTGPLDERCTCPVCTTYSRAYIHHLVKSGEMLGAMLVTEHNLSFYQALMQGMRTAIAAGTFADFAATFRRDYLGSSD

SEQ ID NO: 59270 - protein, 376 aa, unidentified
  source 1..376: note = Porphyromonadaceae bacterium
  REGION 1..376: note = tr|A0A1I7GF67|A0A1I7GF67_9PORP Queuine tRNA-ribosyltransferase OS=Porphyromonadaceae bacterium KHP3R9 OX=1855398 GN=tgt PE=3 SV=1
MKFELQHTDPRSNARAGVITTDHGQIETPVFMPVGTIGSVKAVQMTELKEDIKAQIILGNTYHLYLRPGLKVLEGAGGLHRFNSWNRPILTDSGGFQVFSLAGNRKLTEEGAEFRSHIDGSKHFFTPEKVMDIQRTIGADIIMAFDECTPGDADYAYAKKSLDLTERWLKRCIDRFKETECPYGYRQTLFPIVQGCVFPDLRRRAAENVASLEADGNAIGGLAVGEPTEKMYEMVELVNEILPKDKPRYLMGVGTPANLLEAVERGVDMFDCIMPTRNGRNGQIFTKNGILNMRNERWKEDFSPIEEEGASFVDTLYSKAYLRHLINTNEILGLQIASVHNLAFYTWLMREARKHIIEGDFSSWKRIMVERTMQRL

SEQ ID NO: 59271 - protein, 376 aa, unidentified
  source 1..376: note = Porphyromonadaceae bacterium
  REGION 1..376: note = tr|A0A354X377|A0A354X377_9PORP Queuine tRNA-ribosyltransferase OS=Porphyromonadaceae bacterium; OX = 2049046 GN=tgt PE=3 SV=1
MDFKLQHTDLQSKARAGIITTDHGVIETPIFMPVGTAGSVKAVHATELEDDIEAQIILGNTYHLYLRPGLDTLQQAGGLHRFNSWRKPILTDSGGFQVFSLAENRKLSEEGAEFRSHIDGSKHFFTPEKVIDIQRIIGADIMMAFDECTPGDAPYDYAKQSLELTERWLDRCLTRFRETECPHGYRQTLFPIVQGCVYPDLRKQAAENVASKGADGNAIGGLSVGESTEEMYEMIDIVNEILPEDKPRYLMGVGTPANMLEAIDRGVDMFDCIMPTRNGRNGQLFTKNGIMNMRNQKWKNDFSPIEEDGASFVDTRYSKAYLRHLFNTGEILALQIASIHNLAFYLWLVKEARRQILQNNFPAWKASMIDTIMRRL

SEQ ID NO: 59272 - protein, 376 aa, Porphyromonas asaccharolytica
  REGION 1..376: note = tr|F4KLG7|F4KLG7_PORAD Queuine tRNA-ribosyltransferase OS=Porphyromonas asaccharolytica (strain ATCC 25260 / DSM 20707 / BCRC 10618 / JCM 6326 / LMG 13178 / VPI 4198 ) OX=879243 GN=tgt PE=3 SV=1
MQFTIDHTCPHSDARTGVIKTDHGDIQTPVFMPVGTAGAIKAVTMEQMEQETDARIILGNTYHLYLRPGIEILKEVGGLHRFGTWSKPILTDSGGYQVFSLAAMRRITPEGVTFASHIDGSKHLFTPERVMEIERAIGADIMMAFDECCPGDASYAYAKQSLDTTEQWLDRCIKHLEHTPPLYGYEQALFPIVQGCVYPDLRRRAAEHIASLGAPGNAIGGLAVGEPTDKMYEMIELTNSILPKDKPRYLMGVGTPANILEGIARGVDMFDCIMPTRNARNGQLFTWQGTINIRNAKWRTCHEPIDPEGTASTDHRYTRAYLYHLFKAQEITGLTLASIHNIAFYLDLVNQAHDHIVAGDYTDWMRSVLPALTRRL

SEQ ID NO: 59273 - protein, 376 aa, Porphyromonas cangingivalis
  REGION 1..376: note = tr|A0A099WSD2|A0A099WSD2_PORCN Queuine tRNA-ribosyltransferase OS=Porphyromonas cangingivalis; OX = 36874 GN=tgt PE=3 SV=1
MKFDIEATDSRSSARAGVLHTDHGDIHTPIFMPVGTVGSVKAVHMHEVKDDIGAEIILGNTYHLYLRPGVDVLKSAGGLHRFNSWNRPILTDSGGFQVFSLTHRRKMSEEGVVFRSHIDGSKHLFSPERVMDIERAIGADIMMAFDECTPGDADYRYAKESLALTERWLDRCFKRFNETEPLYGHSQSLFPIVQGCVYPDLRRQAAEKVAEYGADGNAIGGLSVGEPTEAMYDMIEVVNEVLPKDKPRYLMGVGTPANILEGIERGVDMFDCIMPTRNGRNGQLFTWQGTMNMRNAKWANDHSPLDPQGTSFVDHTYSRAYVRHLMVSQEILALQIASIHNLAFYLDLVRTARQHIIQGDFTQWKASVLPALSQRL

SEQ ID NO: 59274 - protein, 377 aa, Porphyromonas catoniae
  REGION 1..377: note = tr|L1NFQ4|L1NFQ4_9PORP Queuine tRNA-ribosyltransferase OS=Porphyromonas catoniae F0037; OX = 1127696 GN=tgt PE=3 SV=1
MLKFDIHKTCSESAARAGRIETDHGEILTPIFMPVGTVGSVKAVHMTELRDDIRAQIILGNTYHLYLRPGLDILREAGGLHKFNSWDGSILTDSGGYQVFSLAHRRKITEEGVTFQSHIDGSRHLFTPERVMDIERTIGADIIMAFDECCPGDADIHYAKKSLALTEGWLRRCVNRIKETEPLYGYHQSLFPIVQGCVYPELRTRAAEFVSSLEAEGNAIGGLAVGEPTEKMYEMVELTNSILPKDKPRYLMGVGTPINLLENIARGVDMFDCIMPTRNGRNGQLFTSRGTINIRNAKWAREFSPIDPEGYSFVDSQYSLAYLHHLIRADELLGLQIASIHNLAFYLRLVREAREHILAGDFVAWKTKMVRQMDNRL

SEQ ID NO: 59275 - protein, 377 aa, Porphyromonas catoniae; identical to SEQ ID NO: 59274
  REGION 1..377: note = tr|Z4WQ99|Z4WQ99_9PORP Queuine tRNA-ribosyltransferase OS=Porphyromonas catoniae ATCC 51270 OX=887901 GN=tgt PE=3 SV=1

SEQ ID NO: 59276 - protein, 375 aa, Porphyromonas circumdentaria
  REGION 1..375: note = tr|A0A1T4LDE7|A0A1T4LDE7_9PORP Queuine tRNA-ribosyltransferase OS=Porphyromonas circumdentaria; OX = 29524 GN=tgt PE=3 SV=1
MKYEILSQDPLSSARTGIITTDHGTVETPIFMPVGTAGAVKALTMEQVEATQAQIILGNTYHLYLRPGLDILHQAGGLHKFGTWKKPILTDSGGFQVYSLAHRRKITEEGVLFASHIDGSRHLFTPERVMEIERIIGADIIMAFDECCPGDASYKYALNSLNITERWLKRCWDYFSQSKPLYGYHQSLFPIVQGCVYPELRRRAAENIASLGADGNAIGGLAVGEPTEKMYEMIEVTNEILPKNKPRYLMGVGTPANLLEAIERGVDMFDCIMPTRNGRNGQLFTRNGVINIKNAKWKDCFEPIDAGGASPIDERYTLAYLHHLFKAEELTGLTLASIHNVSFYLWLMEEARKAIREERFTQWKASILPQLQKRL

SEQ ID NO: 59277 - protein, 376 aa, Porphyromonas crevioricanis
  REGION 1..376: note = tr|T1CQX3|T1CQX3_9PORP Queuine tRNA-ribosyltransferase OS=Porphyromonas crevioricanis JCM 15906 OX=1305617 GN=tgt PE=3 SV=1
MKYSLLHTCSTTQARVGLIRTDHGDIPTPIFMPVGTVGSVKAVEMSNLEDDIDAKIILGNTYHLYLRPGLDILQSAGGLHRFGTWSRPILSDSGGFQVFSLAENRKISEEGVWFRSHIDGSKHLFSPERVMDIERVIGADIIMAFDECCPGDADYGYARHSLDLTERWLKRCVDRIRDTEPLYGYSQSLFPIVQGCVYPDLRKRAAENVAAIEADGNAIGGLAVGEPTEKMYEMIELTNEILPKNKPRYLMGVGTPANILEGIARGVDMFDCIMPSRDGRNAKLFTWQGIINMKNAKWAKDFSPIDPEGTSYVDQRYSRAYLHHLFRVGEILALEVASRHNLAFYLELVRQARAHIVAGDYGSWYPMMAEQVSRRL

SEQ ID NO: 59278 - protein, 376 aa, Porphyromonas crevioricanis; identical to SEQ ID NO: 59277
  REGION 1..376: note = tr|A0A0A2G283|A0A0A2G283_9PORP Queuine tRNA-ribosyltransferase OS=Porphyromonas crevioricanis; OX = 393921 GN=tgt PE=3 SV=1

SEQ ID NO: 59279 - protein, 375 aa, Porphyromonas endodontalis
  REGION 1..375: note = tr|C3J8U8|C3J8U8_POREA Queuine tRNA-ribosyltransferase OS=Porphyromonas endodontalis (strain ATCC 35406 / BCRC 14492 / JCM 8526 / NCTC 13058 / HG 370) OX=553175 GN=t gt PE=3 SV=1
MKYEVLRNDPKSAARLGRITTDHGVIETPIFMPVGTAGAVKALTMEQMETTGAQIILGNTYHLYLRPGLEVLRSAGGLHKFGTWQKPILTDSGGFQVFSLAHRRKITEEGVTFASHIDGSKHLFSPERVMDIERTIGADIIMAFDECCPGDAPYEYARQSLDITERWLERCRKRLAETEPLYGYQQSLFPIVQGCVYPDLRRRAAENITALGADGNAIGGLAVGEPTEKMYEMIELTNSILPLDKPRYLMGVGTPANLLEGIERGVDMFDCIMPTRNGRNGMLFTRHGTINIKNAKWRKCFEPIDHGGAHPMDERYTLAYLHHLFKAEELTGLTLASLHNVAFYLWLVGEARKALEEDRFTEWKAGILPELTRRL

SEQ ID NO: 59280 - protein, 376 aa, Porphyromonas gingivalis
  REGION 1..376: note = tr|A0A2D2NBG4|A0A2D2NBG4_PORGN Queuine tRNA-ribosyltransferase OS=Porphyromonas gingivalis OX=837; GN = tgt PE=3 SV=1
MTFDLQYTCADCEARVGLLTTDHGPIETPIFMPVGTVGSVKAVHMHELEEDIRAQIILGNTYHLYLRPGLDVLKRAGGLHKFNSWERPLLTDSGGFQVFSLAENRKITEEGATFRSHIDGSKHLFSPERVMDIQRVIGADIIMAFDECCPGDADREYARRSMLLTGRWLERCLRRMRETEPLYGYEQQLFPIVQGCVYPDLRRRSAEMVAAVDAAGNAIGGLAVGEPTEKMYEMIELTNEILPKDRPRYLMGVGTPINILEAIDRGVDMFDCIMPTRNGRNGQLFTWHGTINIRNAKWADDYSPLDPDGTSYVDSRYSKAYLHHLIHTQEILGLQIASIHNLAFYLELVRQARKHIQIGDYRTWKTAMIRQLDNRL

SEQ ID NO: 59281 - protein, 376 aa, Porphyromonas gingivalis
  REGION 1..376: note = tr|A0A1R4DXN2|A0A1R4DXN2_PORGN Queuine tRNA-ribosyltransferase OS=Porphyromonas gingivalis OX=837; GN = tgt PE=3 SV=1
MTFDLQYTCADCEARAGLLTTDHGPIETPIFMPVGTVGSVKAVHMHELEEDIRAQIILGNTYHLYLRPGLDVLKRAGGLHKFNSWERPLLTDSGGFQVFSLAENRKITEEGATFRSHIDGSKHLFSPERVMDIQRVIGADIIMAFDECCPGDADREYARRSMLLTGRWLERCLRRMRETEPLYGYEQQLFPIVQGCVYPDLRRRSAEMVAAVEAAGNAIGGLAVGEPTEKMYEMIELTNEILPKDRPRYLMGVGTPINILEAIDRGVDMFDCIMPTRNGRNGQLFTWHGTINIRNAKWADDYSPLDPDGTSYVDSRYSKAYLHHLIHTQEILGLQIASIHNLAFYLELVRQARKHIQIGDYRTWKTAMIRQLDNRL

SEQ ID NO: 59282 - protein, 375 aa, Porphyromonas gingivicanis
  REGION 1..375: note = tr|A0A0A2G6J0|A0A0A2G6J0_9PORP Queuine tRNA-ribosyltransferase OS=Porphyromonas gingivicanis; OX = 266762 GN=tgt PE=3 SV=1
MKYEILAKDPLSSARTGLITTEHGTIETPIFMPVGTAGAVKALTMEQVEATQAQIILGNTYHLYLRPGLDILRQAGGLHQFGTWKKPILTDSGGFQVYSLAHRRKITEEGVTFASHIDGSRHLFTPERVMEIERIIGADIVMAFDECCPGDASYQYALNSLNITERWLNRCWEAFSHSEPLYGYQQSLFPIVQGCVYPDLRRRAAENIACLGADGNAIGGLAVGEPTEKMYEMIEVTNEILPEDKPRYLMGVGTPVNLLEAIERGVDMFDCIMPTRNGRNGQLFTRNGIINIKNAKWKDCFEPIELGGASSIDERYTLAYLHHLFKAEEITGLTLASIHNVSFYIKLMAEAREAIKKGQFTQWKTSMIPQLQKRL

SEQ ID NO: 59283 - protein, 376 aa, Porphyromonas gulae
  REGION 1..376: note = tr|A0A099WSF3|A0A099WSF3_9PORP Queuine tRNA-ribosyltransferase OS=Porphyromonas gulae OX=111105; GN = tgt PE=3 SV=1
MTFDLQYTCADCEARAGLLTTDHGAIETPIFMPVGTVGSVKAVHMHELEEDIRAQIILGNTYHLYLRPGLDVLRRAGGLHKFNSWERPLLTDSGGFQVFSLAENRKITEEGATFRSHIDGSKHLFSPERVMDIQRVIGADIIMAFDECCPGDADREYARRSMLLTGRWLERCLRRMRETEPLYGYEQQLFPIVQGCVYPDLRRQSAEMVAAVGAAGNAIGGLAVGEPTEKMYEMIELTNGILPKDRPRYLMGVGTPINILEAIDRGVDMFDCIMPTRNGRNGQLFTWQGTINIRNAKWADDYSPLDPDGTSYVDSRYSKAYLHHLIHAQEILGLQIASIHNLAFYLELVRQARKHIQIGDYRTWKTAMVRQLDNRL

SEQ ID NO: 59284 - protein, 376 aa, Porphyromonas gulae
  REGION 1..376: note = tr|A0A0A2F8D4|A0A0A2F8D4_9PORP Queuine tRNA-ribosyltransferase OS=Porphyromonas gulae OX=111105; GN = tgt PE=3 SV=1
MTFDLQYTCADCEARAGLLTTDHGTIETPIFMPVGTVGSVKAVHMHELEEDIRAQIILGNTYHLYLRPGLDVLRRAGGLHKFNSWERPLLTDSGGFQVFSLAENRKITEEGATFRSHIDGSKHLFSPERVMDIQRVIGADIIMAFDECCPGDADREYARRSMLLTGRWLERCLRRMRETEPLYGYEQQLFPIVQGCVYPDLRRQSAEMVAAVGAAGNAIGGLAVGEPTEKMYEMIELTNGILPKDRPRYLMGVGTPINILEAIDRGVDMFDCIMPTRNGRNGQLFTWQGTINIRNAKWADDYSPLDPDGTSYVDSRYSKAYLHHLIHTQEILGLQIASIHNLAFYLELVRQARKHIQIGDYRTWKTAMVRQLDNRL

SEQ ID NO: 59285 - protein, 376 aa, Porphyromonas levii
  REGION 1..376: note = tr|A0A4Y8WNJ5|A0A4Y8WNJ5_9PORP Queuine tRNA-ribosyltransferase OS=Porphyromonas levii OX=28114; GN = tgt PE=3 SV=1
MRFEIEHSDARSSARAGVLHTPHGEVHTPIFMPVGTVGTVKAVHAHELREDIKAEIILGNTYHLYLRPGTEIIKGAGGIQKFNSWNGPMLTDSGGFQVFSLAHRRKITEEGAEFQSHIDGSRHLFTPERVMDIQREIGADIIMAFDECPPGDCDRQYARTSLDLTMRWLKRCQNRLAETEPLYGYPQSLFPIVQGAGFADLRREAAERVAELGADGNAIGGLSVGEPTEVMYEMIEVVNEVLPKDKPRYLMGVGTPANILEGIERGVDMFDCIMPTRNGRNGQLFTWQGTMNMRNEKWKDDHTPLDPEGTSFVDHAYTKAYLRHLIRSEEILGLQIASIHNLAFYLELVRQARQHIIAGDYTEWKAGVLPQLQQRR

SEQ ID NO: 59286 - protein, 376 aa, unidentified
  source 1..376: note = Porphyromonas loveana
  REGION 1..376: note = tr|A0A2U1F7F7|A0A2U1F7F7_9PORP Queuine tRNA-ribosyltransferase OS=Porphyromonas loveana; OX = 1884669 GN=tgt PE=3 SV=1
MTFDLQYTCADCEARAGVLTTDHGAIETPIFMPVGTVGSVKAVHMHELEEDIRAQIILGNTYHLYLRPGLDVLRRAGGLHRFNSWERPLLTDSGGFQVFSLAENRKITEEGVTFRSHIDGSKHLFSPESVMDIQRVIGADIIMAFDECCPGDADHDYARRSMLLTGRWLERCLKRMAETEPLYGHEQQLFPIVQGCVYPDLRRRSAEMVAAVGAAGNAIGGLAVGEPTDKMYEMIELTNTILPKDRPRYLMGVGTPINILEAIARGVDMFDCIMPTRNGRNGQLFTWHGTINIRNAKWADDYSPLDPEGTSYVDSRYSKAYLHHLIHTQELLGLQIASIHNLAFYLDLVRQAREHIRQGDYRSWKTAMVRQLDNRL

SEQ ID NO: 59287 - protein, 376 aa, Porphyromonas macacae
  REGION 1..376: note = tr|A0A379E975|A0A379E975_9PORP Queuine tRNA-ribosyltransferase OS=Porphyromonas macacae OX=28115; GN = tgt PE=3 SV=1
MDFKIKTECRSTNARTGLITTDHGQIETPIFMPVGTVGSVKAVHMRELRDDIKAQIILGNTYHLYLRPGLDILKQAGGLHKFGGWTKPILTDSGGYQVFSLTDRRKITEEGVTFRSHIDGSKHLFTPERVMDVERVIGADIIMAFDECCPGDADYSYAAKSLKLTESWLDRCVKRIKETEPLYGYGQSLFPIVQGCVYPDLRKRAAENVASIGADGNAIGGLAVGEPTEKMYEMVELTNEILPKDKPRYLMGVGTPVNLLEGIARGVDMFDCIMPTRNGRNGQLFTRNGTINIKNTKWAKELTPIDPEGATWVDREYTLGYLHHLIKTQEILGLQIASIHNLGFYLSLMQEAREHIAAGTFGPWKDEMIYRLDKRL

SEQ ID NO: 59288 - protein, 376 aa, Porphyromonas macacae
  REGION 1..376: note = tr|A0A0A2E823|A0A0A2E823_9PORP Queuine tRNA-ribosyltransferase OS=Porphyromonas macacae OX=28115; GN = tgt PE=3 SV=1
MDFKIKTECRSTNARTGLITTDHGQIETPIFMPVGTVGSVKAVHMRELRDDIKAQIILGNTYHLYLRPGLDILKQAGGLHKFGGWTKPILTDSGGYQVFSLTDRRKITEEGVTFRSHIDGSKHLFTPERVMDIERVIGADIIMAFDECCPGDADYSYAAKSLKLTESWLDRCVKRIKETEPLYGYGQSLFPIVQGCVYPDLRKRAAENVASIGADGNAIGGLAVGEPTEKMYEMVELTNEILPKDKPRYLMGVGTPVNLLEGIARGVDMFDCIMPTRNGRNGQLFTRNGTINIKNTKWAKELTPIDPEGATWVDREYTLGYLHHLIKTQEILGLQIASIHNLGFYLSLMQEAREHIAAGTFGPWKDEMIYRLDKRL

SEQ ID NO: 59289 - protein, 377 aa, Porphyromonas somerae
  REGION 1..377: note = tr|A0A134BAV8|A0A134BAV8_9PORP Queuine tRNA-ribosyltransferase OS=Porphyromonas somerae OX=322095; GN = tgt PE=3 SV=1
MLKFDIHKTCTKTAARAGRIETDHGEILTPIFMPVGTVGSVKAVHMPELSDDIHAQIILGNTYHLYLRPGLDTLYKAGGLHKFNSWSGSILTDSGGYQVFSLAHRRKITEEGVTFRSHIDGSKHLFTPERVMDIERIIGADIIMAFDECCPGDADFHYAKKSLALTEDWLRRCVKRVNETDPHYGYHQSLFPIVQGCVYPELRTRAAEFVASLGAEGNAIGGLAVGEPTEKMYEMVELTNSILPKDKPRYLMGVGTPINLLENIARGVDMFDCIMPTRNGRNGQLFTSYGTINIRNAKWAQEFSPIDPEGTSFVDKQYSLAYLHHLIRADEILGLQIASIHNLAFYLRLVREAREHILAGDFSEWKDKMVRQLNNRL

SEQ ID NO: 59290 - protein, 377 aa, Porphyromonas sp.
  REGION 1..377: note = tr|A0A0A2DXR0|A0A0A2DXR0_9PORP Queuine tRNA-ribosyltransferase OS=Porphyromonas sp. COT-239 OH1446 OX=1515613 GN=tgt PE=3 SV=1
MLTFKVQHNCMGTSARAGEITTDHGVIQTPIFMPVGTVGSVKAVHMTELREDIGAQIILGNTYHLYLRPGLEILREAGGLHRFNSWDGPILTDSGGYQVFSLAENRKITEEGVTFRSHIDGSKHLFSPERVMDIERVIGADIIMAFDECCPGDAPYEYAARSLALTERWLDRCISRVRETEPLYGYHQSLFPIVQGCVYPDLRARAAEHVASLGAEGNAIGGLAVGEPTEKMYEMVELTNSILPQDKPRYLMGVGTPINLLENIARGVDMFDCIMPTRNGRNGQLFTSRGTINIRNAKWAREFSPIDPEGTSFVDQQYTLAYLHHLIRADEILGLQIASIHNLAFYLRLVREAREHIISGDFASWKEQMVRSMSHRL

SEQ ID NO: 59291 - protein, 376 aa, Porphyromonas sp.; identical to SEQ ID NO: 58644
  REGION 1..376: note = tr|A0A073IC67|A0A073IC67_9PORP Queuine tRNA-ribosyltransferase OS=Porphyromonas sp. 31_2; OX = 658663 GN=tgt PE=3 SV=1

SEQ ID NO: 59292 - protein, 376 aa, Porphyromonas uenonis
  REGION 1..376: note = tr|C2M9H9|C2M9H9_9PORP Queuine tRNA-ribosyltransferase OS=Porphyromonas uenonis 60-3; OX = 596327 GN=tgt PE=3 SV=1
MQFTIDHTCPHSDARTGVIKTAHGDIQTPVFMPVGTAGAIKAVTMEQMEQETDARIILGNTYHLYLRPGIEILKEVGGLHRFGTWSKPILTDSGGYQVFSLAAMRRITPEGVTFASHIDGSKHLFTPERVMEIERAIGADIMMAFDECCPGDASYAYAKQSLDTTEQWLDRCLKHLEQTPPLYGYEQALFPIVQGCVYPDLRRRAAEHIASLGAPGNAIGGLAVGEPTDKMYEMIELTNSILPKDKPRYLMGVGTPANILEGIARGVDMFDCIMPTRNARNGQLFTWQGTINIRNAKWRTCHEPIDPEGTASTDHRYTRAYLYHLFKAQEITGLTLASIHNIAFYLDLVNQAHDHIIAGDYPDWMRSVLPALARRL

SEQ ID NO: 59293 - protein, 373 aa, unidentified
  source 1..373: note = Porticoccaceae bacterium
  REGION 1..373: note = tr|A0A351NXY7|A0A351NXY7_9GAMM Queuine tRNA-ribosyltransferase OS=Porticoccaceae bacterium; OX = 2026782 GN=tgt PE=3 SV=1
MKFNLLATDGKARRGEMSFPRGTVQTPAFMPVGTYGTVKGMLPKDITEIGAEMILGNTFHLMLRPGTEVIKAHGDLHDFIQWQGPILTDSGGFQVFSLGDMRKITEKGVKFKSPIDGSPVFIDPETSMQVQRDLGSDVVMIFDECTPYPATEKEAEVSMQLSLRWAQRSKDAHRGNPSALFGIVQGGMYESLRNVSLAGLVDIDFDGYAIGGLSVGEPKDDMIRILDHLADNMPADKPRYLMGVGKPADLVEGVRRGIDMFDCVMPTRNARNGHLFTSTGVIKIRNAKHRHDTSPLDSECDCYTCLNFSRGYLHHLEKCGEMLSAQLNTIHNLRFYQNLMAGLREAIAIGRLDEFADEFYRKQSIADGRGLNT

SEQ ID NO: 59294 - protein, 369 aa, unidentified
  source 1..369: note = Porticoccaceae bacterium
  REGION 1..369: note = tr|A0A2D4QRC6|A0A2D4QRC6_9GAMM Queuine tRNA-ribosyltransferase OS=Porticoccaceae bacterium; OX = 2026782 GN=tgt PE=3 SV=1
MEFSVIATDGPARLGKLQFPRGAVQTPAFMPVGTYGTVKGMPPKNIAEVGAEIILGNAFHLMLRPGVEVIKSHGGLHQFMNWPGPILTDSGGFQVFSLGAMRNISEDGVKFRSPIDGSEIFIKPEISTEIQRDLDSDIVMIFDDCTPYKASKREVAESMRLSLTWAELCKIAHGNSSAALFGIVQGGMHENLRDESLSELSKIEFDGYAIGGLSVGEPKADMFRILNHVGKQMPANKPRYLMGVGKPGDLVQAVLKGIDMFDCVMPTRNARNGHLFTHDGVIKIRNARYRFDMSPLDNECDCYTCTNFSRSYLHHLDKCGEILGAQLNTIHNLRYYQKLMSDIRKAIELGKLEAFAANFFSEENEFKTS

SEQ ID NO: 59295 - protein, 369 aa, Porticoccus sp.
  REGION 1..369: note = tr|A0A2G2QRW7|A0A2G2QRW7_9GAMM Queuine tRNA-ribosyltransferase OS=Porticoccus sp. OX=2024853; GN = tgt PE=3 SV=1
MSFEVACRDGEARRGRMTFPRGTVETPAFMPVGTCGTVKGMLPRDVAATGAQILLGNTFHLMLRPGTDVVMEHGGLHEFMHWPGPILTDSGGFQVFSLGAISKISEQGVAFRSPIDGSDVFLDPETSIRVQQQLGADVVMIFDECTPYPATEQQARASMELSQRWAKRSKDAHGDNPSALFGIVQGGMYEDLRDASLAGLESIGFDGYAIGGLSVGEPKEDMLRILDYLPPKMPQDRPRYLMGVGKPQDILEAVRRGIDMFDCVMPTRNARNGHLFTSAGVVKIRNAVHRHDTRPLDANCDCYTCQNFSRAYLHHLEKCGEILGAQLNTLHNLRYYQTLMTHIRQAITDGDLDEFAVRFYAQQGLELPA

SEQ ID NO: 59296 - protein, 257 aa, Porticoccus sp.
  REGION 1..257: note = tr|A0A2D5QFY9|A0A2D5QFY9_9GAMM Queuine tRNA-ribosyltransferase (Fragment) OS=Porticoccus sp.; OX = 2024853 GN=CMK44_04595 PE=3 SV=1
MRFELDIQDGSARTGSLKFPRGIVDTPTFMPVGTSGTVKAILPKDLQETGAQIILGNTFHLMLRPGTDVIKSHGGLHNFMHWEGPILTDSGGFQVYSLGTIRKISEKGVSFRSPIDGSHIFLDPETSIQVQEDLGADIVMIFDDCTPYPASKRDAHESMQLSLRWAKRSKVQHGVSNSALFGIIQGGMYEELREISLKSLEKIGFDGYAIGGLSVGEPKEDMLRILKSTTPKMPEDKPRYLMGVGKPWAILEAVKSG

SEQ ID NO: 59297 - protein, 376 aa, Poseidonocella pacifica
  REGION 1..376: note = tr|A0A1I0VQC2|A0A1I0VQC2_9RHOB Queuine tRNA-ribosyltransferase OS=Poseidonocella pacifica; OX = 871651 GN=tgt PE=3 SV=1
MAQGCTFERTGQDGKARTGVISTPRGDIRTPAFMPVGTTATVKAMMPESVRATGADILLGNTYHLMLRPGAERIHRLGGLHRFMNWDRPILTDSGGFQVMSLAELRKLTEKGVTFRSHIDGSRHELTPESSMEVQRLLGSDIVMAFDECPALPADRDRIASSMQLSMRWAARSREAFGDRPGHMLFGIQQGGLEQDFREESAKALREIGFDGYAVGGLAVGEGQEAMFSTLDFAPDMLPEDKPRYLMGVGKPDDIVGAVKRGIDMMDCVLPSRSGRTGQVFTRHGVVNIKNARHSDDPRPLDEACGCPACRGYSRAYLHHVFRAGEMISGMLLTWHNLHYFQDLMAGMRAAIADGRFAQFEAEFHSQRADGDIPQL

SEQ ID NO: 59298 - protein, 376 aa, Poseidonocella sedimentorum
  REGION 1..376: note = tr|A0A1I6EHN7|A0A1I6EHN7_9RHOB Queuine tRNA-ribosyltransferase OS=Poseidonocella sedimentorum; OX = 871652 GN=tgt PE=3 SV=1
MADGCTFERTAQDGKARLGRITTPRGEIRTPAFMPVGTAATVKAMLPESVRATGADILLGNTYHLMLRPGAERIHNLGGLHRFMNWDRPILTDSGGFQVMSLAELRKLTETGVTFRSHIDGSKHELTPESSMEIQRLLGSDIVMAFDECPALPADRDRIAESMRLSMRWADRSREAFGDRPGHMLFGIQQGGLEQDFREESAEALRGIGFDGYAVGGLAVGEGQEAMFATLDFAPDMLPEDKPRYLMGVGKPDDIVGAVKRGIDMMDCVLPSRSGRTGQAWTRRGQVNIKNARHADDPRPLDESCSCPACSGYSRAYLHHVFRSGEMISGMLLTWHNLHYFQELMGEMRAAIAAGQFEAFEARFHAARAEGDIPQL

SEQ ID NO: 59299 - protein, 379 aa, unidentified
  source 1..379: note = Pradoshia eiseniae
  REGION 1..379: note = tr|A0A2S7N312|A0A2S7N312_9BACI Queuine tRNA-ribosyltransferase OS=Pradoshia eiseniae OX=2064768; GN = tgt PE=3 SV=1
MTAIRYELIKTCKQTGARLGRVHTPHGSFDTPAFMPVGTLATVKTMSPEELKEMGANIILGNTYHLWLRPGTEVIKAAGGLHKFMNWDRAILTDSGGFQVFSLSEFRKIEEEGVHFRNHLNGDKLFLSPEKAMEIQNILGSDIMMAFDECPPYPAEYDYMKKSVERTSRWAERCLKAHARPQDQGLFGIVQGGEYEDLRRQSAEDLVSLDFPGYAVGGLSVGEPKDVMNRTLEFTTPYLPTDKPRYLMGVGSPDSLIDGAIRGIDMFDCVLPTRIARNGTLMTSEGRLVVKNAKYALDFGPLDPNCDCHVCQNYSRAYIRHLIRCDETFGIRLTSYHNLYFLLKLMEQVRQAIMEDRLGDFREEFFEKYGFNKPNAKNF

SEQ ID NO: 59300 - protein, 379 aa, unidentified
  source 1..379: note = Pradoshia sp.
  REGION 1..379: note = tr|A0A5J6XPQ1|A0A5J6XPQ1_9BACI tRNA guanosine(34) transglycosylase Tgt OS=Pradoshia sp. D12 OX=2651284; GN = tgt PE=4 SV=1
MTAIRYELIKTCKQTGARLGRVHTPHGTFETPAFMPVGTLATVKTMSPEELKQMGANIILGNTYHLWLRPGTEVIKAAGGLHKFMNWDRAILTDSGGFQVFSLSQFRKIEEEGVHFRNHLNGDKLFLSPEKAMEIQNILGSDIMMAFDECPPYPATHEYMKKSVERTSRWAERCLNAHERPNDQGLFGIVQGGEYEDLRRQSASDLVSLDFPGYAIGGLSVGEPKDVMNRALEFTTPLLPSNKPRYLMGVGSPDSLIDGAIRGVDMFDCVLPTRIARNGTLMTSEGRLVVKNAKYSMDFGPLDPNCDCHVCKAYSRAYIRHLIRCDETFGIRLTSYHNLYFLLNLMEQVRQAIREDRLGDFREEFFENYGFNKPNAKNF

SEQ ID NO: 59301 - protein, 374 aa, Pragia fontium
  REGION 1..374: note = tr|A0A0G3CLA4|A0A0G3CLA4_9GAMM Queuine tRNA-ribosyltransferase OS=Pragia fontium OX=82985 GN=tgt; PE = 3 SV=1
MKFELQTKDGRARRGRLIFERGVVETPAFMPVGTYGTVKGMTPEEVKDTGAQIILGNTFHLWLRPGQEIMRQHGDLHDFMNWHGPILTDSGGFQVFSLGDIRKITEEGVNFRNPINGDAIFLSPEKSMEIQYDLGSDIVMIFDECTPYPADWDYAKRSMEMSLRWAKRSRDRFDELNNNNALFGIIQGSVYPDLRDISVKGLVEIGFDGYAVGGLAVGEPKEDMHRILEHVCPQIPEDKPRYLMGVGKPEDLVEGVRRGIDMFDCVMPTRNARNGHLFVTDGVVKIRNAKYKDDTAALDEHCDCYTCRNYSRAYLHHLDRCNEILGARLNTIHNLRYYQRLMAGLREAIEQGTLEQFVSDFYGRIGKTIPPLAN

SEQ ID NO: 59302 - protein, 374 aa, Pragia sp.
  REGION 1..374: note = tr|A0A411WHD9|A0A411WHD9_9GAMM Queuine tRNA-ribosyltransferase OS=Pragia sp. CF-458 OX=2498113; GN = tgt PE=3 SV=1
MKFELQTKDGRARRGRLVFERGTVETPAFMPVGTYGTVKGMTPEEVKDTGAQIILGNTFHLWLRPGQEIMRKHGDLHDFMQWHGPILTDSGGFQVFSLGDIRKITEEGVNFRNPINGDSIFLSPEKSMEIQYDLGSDIVMIFDECTPYPADWDYAKRSMEMSLRWAKRSRQRFDELNNKNALFGIIQGSVYEDLRDVSVKGLVEIGFDGYAVGGLAVGEPKEDMHRILEHVCPQIPEDKPRYLMGVGKPEDLVEGVRRGIDMFDCVMPTRNARNGHLFVTDGVVKIRNAKHKDDTATLDEHCDCYTCRHYSRAYLHHLDRCNEILGARLNTIHNLRYYQRLMAGLREAIEQGTLERFVTDFYERIGKAVPPLVK

SEQ ID NO: 59303 - protein, 375 aa, unidentified
  source 1..375: note = Prevotella aff.
  REGION 1..375: note = tr|A0A1I0M2T6|A0A1I0M2T6_9BACT Queuine tRNA-ribosyltransferase OS=Prevotella aff. ruminicola Tc2-24 OX=81582 GN=tgt PE=3 SV=1
MTFEVQYRDNASDARAGLIQTAHGPIQTPIFMPVGTAGTVKGVHFSELRDQVKAQIILGNTYHLYLRPGLDILKKAGGLHQFNTWDRPILTDSGGFQVFSLTGIRKLREEGCEFRSHIDGSKHFFTPENVMDTERAIGADIMMAFDECPPGQSDYQYAKNSLHLTQRWLERCVKRFRETEPLYGYEQSLFPIVQGCTYKDLRREAAKHVADIGADGNAIGGLAVGEPTEVMYEMIEVVNEILPKDKPRYLMGVGTPQNILEGIERGVDMFDCVMPTRNGRNAMLFTYEGTMNMRNKKWEDDFSPIDPEGCEIDRIHTKAYLHHLFKAQELLAMQIASIHNLAFYLRLVTDARQHIIAGDFVQWKRSVIEQLGKRR

SEQ ID NO: 59304 - protein, 375 aa, Prevotella amnii
  REGION 1..375: note = tr|A0A096AX22|A0A096AX22_9BACT Queuine tRNA-ribosyltransferase OS=Prevotella amnii DNF00058; OX = 1401066 GN=tgt PE=3 SV=1
MKFELQHTDPASDARTGIITTDHGEIKTPIFMPVGTVGSVKGVHFEELRKQVKAQIILGNTYHLYLRPGLEILKAAGGLHKFNGWERPILTDSGGFQVFSLTGIRKLSEEGCEFRSHIDGSKHIFTPESVMNTERVIGADIIMAFDECPPGKSSYEYAKKSLGLTQRWLDRCIKQLEKTSPLYGYNQSLFPIVQGCTYKDLRSEAAKFVADKGADGNAIGGLAVGEPTEVMYEMIEVVNNILPKDKPRYLMGVGTPQNILEAIERGVDMFDCVMPTRNGRNSMLFTYNGTMNMRNKKWEADFSPIDIDGCDIDIITTKAYLHHLFKAGELLAMQIASIHNLAFYLRLVSDARKHIEKGDFTMWKSSVIEQLGRRI

SEQ ID NO: 59305 - protein, 375 aa, Prevotella amnii; identical to SEQ ID NO: 59304
  REGION 1..375: note = tr|A0A134B2G1|A0A134B2G1_9BACT Queuine tRNA-ribosyltransferase OS=Prevotella amnii OX=419005; GN = tgt PE=3 SV=1

SEQ ID NO: 59306 - protein, 375 aa, Prevotella baroniae
  REGION 1..375: note = tr|U2NR06|U2NR06_9BACT Queuine tRNA-ribosyltransferase OS=Prevotella baroniae F0067; OX = 1115809 GN=tgt PE=3 SV=1
MKFELQHTDNASDARTGLITTDHGQIKTPVFMPVGTCGTVKGVHFSELRQQVEAQIILGNTYHLYLRPGLEVLRKAGGLHRFNSWDRPILTDSGGFQVFSLSGIRKLKEEGCEFRSHIDGSKHFFTPENVMDTERVIGADIMMAFDECPPGQSDYGYAKNSLKLTQRWLDRCIKRCAETEPLYGYHQSLFPIVQGCTYKDLRQEAAKFVADKGADGNAIGGLAVGEPTEVMYDMIEVVNGILPKDKPRYLMGVGTPQNILEAIERGVDMFDCVMPTRNGRNAMLFTYNGTMNMRNKKWEEDFSPIDPDGCDIDLVHTKAYLHHLFKAQEYLALQIASIHNLAFYLRLVTDARQHIEAGDFVQWKASIIDQLGQRI

SEQ ID NO: 59307 - protein, 388 aa, Prevotella bergensis
  REGION 1..388: note = tr|D1PYZ9|D1PYZ9_9BACT Queuine tRNA-ribosyltransferase OS=Prevotella bergensis DSM 17361; OX = 585502 GN=tgt PE=3 SV=1
MPKRRIKKTRGLPMTFELQHTDPCSNARTGLIMTDHGPIKTPIFMPVGTCASVKGVHFEELRHQVNAQIILGNTYHLYLRPGLDILEKAGGLHGFNGWERPILTDSGGFQVFSLTGIRKLREEGCEFRSHIDGSKHFFTPENVMDTQRVIGADIMMAFDECPPGQSDYSYAKNSLALTERWLNRCIKRFNETEPRYGYQQSLFPIVQGCTYKDLRQEAAKFVADKGADGNAIGGLAVGEPTEVMYEMIEVVNDILPKDKPRYLMGVGTPQNILEAIERGVDMFDCVMPTRNGRNAMLFTYNGTMNMRNKKWEADFSPIDAEGCYIDRIHTKAYLHHLFKAGELLAMQIASIHNLAFYLRLVTDARQHIEQGDFVQWKRSIIDQLGQRI

SEQ ID NO: 59308 - protein, 375 aa, Prevotella bivia
  REGION 1..375: note = tr|A0A096AC86|A0A096AC86_9BACT Queuine tRNA-ribosyltransferase OS=Prevotella bivia DNF00320; OX = 1401068 GN=tgt PE=3 SV=1
MKFELQHTDAASNARAGIITTDHGQIKTPIFMPVGTVGSVKGVHFEELRKQVKAQIILGNTYHLYLRPGLDILKSAGGLHKFNGWERPILTDSGGFQVFSLTGIRKLSEEGCEFRSHIDGSKHFFTPEGVMDTERIIGADIIMAFDECPPGKSSYEYAKNSLGLTQRWLDRCIKRLDETAPLYGYSQSLFPIVQGCTYKDLRQEAAKFVADKGADGNAIGGLAVGEPTEVMYEMIEVVNEILPKGKPRYLMGVGTPQNILEAIERGVDMFDCVMPTRNGRNAMLFTYNGTMNMRNKKWEADFSPIDPDGCDIDVITTKAYLHHLFKAGELLAMQIASIHNLAFYLRLVTDARQHIEAGDFVQWKTSIIEQLGRRI

SEQ ID NO: 59309 - protein, 375 aa, Prevotella bivia
  REGION 1..375: note = tr|A0A137SZQ7|A0A137SZQ7_9BACT Queuine tRNA-ribosyltransferase OS=Prevotella bivia OX=28125; GN = tgt PE=3 SV=1
MKFELQHTDAASNARAGIITTDHGQIKTPIFMPVGTVGSVKGVHFEELRKQVKAQIILGNTYHLYLRPGLDILKSAGGLHKFNGWERPILTDSGGFQVFSLTGIRKLSEEGCEFRSHIDGSKHFFTPESVMDTERIIGADIIMAFDECPPGKSSYEYAKNSLGLTQRWLDRCIKRLDETAPLYGYSQSLFPIVQGCTYKDLRQEAAKFVADKGADGNAIGGLAVGEPTEVMYEMIEVVNEILPKDKPRYLMGVGTPQNILEAIERGVDMFDCVMPTRNGRNAMLFTYNGTMNMRNKKWEADFSPVDPDGCDIDVITTKAYLHHLFKAGELLAMQIASIHNLAFYLRLVTDARQHIEAGDFVQWKTSIIEQLGRRI

SEQ ID NO: 59310 - protein, 375 aa, Prevotella bryantii
  REGION 1..375: note = tr|D8DY54|D8DY54_PREBR Queuine tRNA-ribosyltransferase OS=Prevotella bryantii B14; OX = 752555 GN=tgt PE=3 SV=1
MKFELQHTDSASDARTGIITTDHGQIKTPIFMPVGTVGTVKGVHFNELKEQVKAQIILGNTYHLYLRPGLDVLRKAGGLHKFNGWDRPILTDSGGFQVFSLTGIRKLSEEGCEFRSHIDGSKHFFTPENVMDTERIIGADIMMAFDECPPGKSDYQYAKKSLEMTQRWLDRCIKRFNETEPLYGYNQSLFPIVQGCTYKDLRQEAAKYIADKGADGNAIGGLAVGEPTEIMYEMIEVVNEILPKDKPRYLMGVGTPQNLLEGIERGVDMFDCVMPTRNGRNAMLFTYNGTMNMRNKKWEDDFSPVDPDGCEIDRITTKAYLHHLFKAQELLAMQIASIHNLSFYLRLVTDARHHIEQGDFVTWKRSIIDQLGRRI

SEQ ID NO: 59311 - protein, 375 aa, Prevotella bryantii; identical to SEQ ID NO: 59310
  REGION 1..375: note = tr|A0A255SKX3|A0A255SKX3_PREBR Queuine tRNA-ribosyltransferase OS=Prevotella bryantii OX=77095; GN = tgt PE=3 SV=1

SEQ ID NO: 59312 - protein, 375 aa, Prevotella buccae
  REGION 1..375: note = tr|D3I0X9|D3I0X9_9BACT Queuine tRNA-ribosyltransferase OS=Prevotella buccae D17 OX=575611; GN = tgt PE=3 SV=1
MTFELQHTDPSSDARAGIITTDHGPIKTPIFMPVGTCGSVKGVHFSELREQVKAQIILGNTYHLYLRPGLDVLRKAGGLHGFNGWERPILTDSGGFQVFSLTGIRKLREEGCEFRSHIDGSKHFFTPENVMDTERVIGADIMMAFDECPPGQSDYRYAKESLALTQRWLDRCIKRFNETEPLYGHRQSLFPIVQGCTYKDLREEAAKFVADKGADGNAIGGLAVGEPTEVMYEMIEVVNGILPKDKPRYLMGVGTPQNILEAIERGVDMFDCVMPTRNGRNAMLFTYEGTMNMRNKKWEDDFSPVDPDGCDIDRITTKAYLHHLFKAQELLAMQIASIHNLAFYLRLVGDARRHIEQGDFARWKAGIISQLGRRV

SEQ ID NO: 59313 - protein, 375 aa, Prevotella buccae; identical to SEQ ID NO: 59312
  REGION 1..375: note = tr|E6KA94|E6KA94_9BACT Queuine tRNA-ribosyltransferase OS=Prevotella buccae ATCC 33574; OX = 873513 GN=tgt PE=3 SV=1

SEQ ID NO: 59314 - protein, 375 aa, Prevotella buccalis
  REGION 1..375: note = tr|A0A2N6QR73|A0A2N6QR73_9BACT Queuine tRNA-ribosyltransferase OS=Prevotella buccalis OX=28127; GN = tgt PE=3 SV=1
MTFELQHTDPSSDARAGLITTAHGQIKTPIFMPVGTAGTVKAVHFSELKEQINAQIILGNTYHLYLRPGLDILKAAGGLHKFNGWDRPILTDSGGFQVFSLTGIRKLREEGCEFRSHIDGSKHFFSPESVMDTERIIGADIMMAFDECPPGDCDYQYAKTSLAMTHRWLDRCIKRFNETQPLYGYDQCLFPIVQGAAYKDLREESAKYIADKGADGNAIGGLAVGEPTEVMYEMIEVVNAILPKDKPRYLMGVGTPQNILEGIERGVDMFDCVMPTRNGRNAMLFTYEGTMNMRNKKWENDFTPIDPNGCDTDQLCTKAYLHHLFKAKEYLALQIASIHNLAFYLRLVTDARQHIQQGDFSTWKRGIIEQLGRRI

SEQ ID NO: 59315 - protein, 375 aa, Prevotella buccalis
  REGION 1..375: note = tr|A0A095ZPK4|A0A095ZPK4_9BACT Queuine tRNA-ribosyltransferase OS=Prevotella buccalis DNF00853; OX = 1401074 GN=tgt PE=3 SV=1
MTFELQHTDPSSDARAGLITTAHGQIKTPIFMPVGTAGTVKAVHFRELKEQINAQIILGNTYHLYLRPGLDILKAAGGLHKFNGWDRPILTDSGGFQVFSLTGIRKLREEGCEFRSHIDGSKHFFSPESVMDTERIIGADIMMAFDECPPGDCDYQYAKTSLAMTHRWLDRCVKRFNETQPLYGYDQCLFPIVQGAAYKDLREESAKYIADKGADGNAIGGLAVGEPTEVMYEMIEVVNAILPKDKPRYLMGVGTPQNILEGIERGVDMFDCVMPTRNGRNAMLFTYEGTMNMRNKKWENDFTPIDPNGCDTDQLCTKAYLHHLFKAQEYLALQIASIHNLAFYLRLVTDARQHIQQGDFSTWKRGIIEQLGRRI

SEQ ID NO: 59316 - protein, 375 aa, unidentified
  source 1..375: note = Prevotella colorans
  REGION 1..375: note = tr|A0A2U0ULM5|A0A2U0ULM5_9BACT Queuine tRNA-ribosyltransferase OS=Prevotella colorans OX=1703337; GN = tgt PE=3 SV=1
MRFELQYTDPNSDARTGLIKTDHGCVKTPIFMPVGTCGCVKAVHFSELREQVNAQIILGNTYHLYLRPGLDILRKAGGLHGFNGWERPILTDSGGFQVFSLTGIRKLREEGCEFRSHIDGSKHFFTPENVMDTERVIGADIMMAFDECPPGQSDYAYAKKSLALTERWLDRCIKRFNETEALYGYSQSLFPIVQGCTYKDLRQEAAKYVADKGADGNAIGGLAVGEPTEVMYEMIEVVNEILPKDKPRYLMGVGTPSNILEAIERGVDMFDCVMPTRNGRNAMLFTYDGTMNLRNKKWENDFTPIDANGCDVDRVYTKAYLHHLFKAGEFLAMQIASIHNLAFYLRLVTDARRHIEQGDFVQWKKSVVDQLGKRV

SEQ ID NO: 59317 - protein, 375 aa, Prevotella copri
  REGION 1..375: note = tr|D1PGS5|D1PGS5_9BACT Queuine tRNA-ribosyltransferase OS=Prevotella copri DSM 18205; OX = 537011 GN=tgt PE=3 SV=1
MKFELQVTDKASDARTGIITTDHGQIKTPIFMPVGTVGSVKGVHFEELKKQVMAQIILGNTYHLYLRPGLDVIRAAGGLHKFNGWDRPILTDSGGFQVFSLTGIRKLKEEGCEFRSHIDGSKHFFTPENVMDTERIIGADIMMAFDECPPGQSDYQYAKNSLMLTQRWLDRCIKRFNETEPLYGYQQSLFPIVQGCTFPDLRREAAKYIADKGADGNAIGGLAVGEPTEVMYEMIEVVNEILPKDKPRYLMGVGTPQNILEAIERGVDMFDCVMPTRNGRNAMLFTYQGTMNMRNKKWEKDFSPVDPDGCDIDLVTTKAYLHHLFKAQELLAMQIASIHNLSFYLRLVTDARHHIEQGDFVAWKNSIIDQLGRRI

SEQ ID NO: 59318 - protein, 375 aa, Prevotella copri; identical to SEQ ID NO: 59317
  REGION 1..375: note = tr|A0A3E4SCM6|A0A3E4SCM6_9BACT Queuine tRNA-ribosyltransferase OS=Prevotella copri OX=165179; GN = tgt PE=3 SV=1

SEQ ID NO: 59319 - protein, 375 aa, Prevotella corporis
  REGION 1..375: note = tr|A0A133QD76|A0A133QD76_9BACT Queuine tRNA-ribosyltransferase OS=Prevotella corporis OX=28128; GN = tgt PE=3 SV=1
MKFELQHTDSCSDARTGIITTEHGQIKTPIFMPVGTAGTVKGVHFSELVNQVKAQIILGNTYHLYLRPGLEILKQAGGLHKFNGWNKPILTDSGGFQVFSLTGIRKLSEEGCEFRSHIDGSKHFFTPESVMDTERIIGADIMMAFDECPPGNSNYDYAKQSLMLTQRWLDRCIKRFNETEPLYGYKQSLFPIVQGCTYKDLRTEAAQFVADKGADGNAIGGLAVGEPTEVMYEMIEVVNGILPKDKPRYLMGVGTPQNILEGIERGVDMFDCVMPSRNGRNAMLFTYDGTMNMRNKKWEMDFSPIDPNGCKIDRITTKAYLHHLFKAGELLAMQIASIHNLSFYLRLVNDAQKHIEQDDFTNWKSSVIEQLGRRI

SEQ ID NO: 59320 - protein, 375 aa, Prevotella dentalis
  REGION 1..375: note = tr|F9D1C5|F9D1C5_PREDD Queuine tRNA-ribosyltransferase OS=Prevotella dentalis (strain ATCC 49559 / DSM 3688 / JCM 13448 / NCTC 12043 / ES 2772); OX = 908937 GN=tgt PE=3SV=1
MTFELQHTDKGSDARTGLITTAHGQIKTPIFMPVGTCGSVKGVHFSELREQVKAQIILGNTYHLYLRPGLEVLRAAGGLHGFNGWERPILTDSGGFQVFSLTGIRKLREEGCEFRSHIDGSKHIFTPENVMDTERVIGADIMMALDECPPGQSDYAYAKRSLAMTQRWLDRCIRRFDETEPLYGYQQNLFPIVQGCTFKDLRREAAKFVADKGAEGNAIGGLAVGEPTEVMYEMIEVVNEILPKDKPRYLMGVGTPQNILEAIERGVDMFDCVMPTRNGRNAMLFTYEGTMNMRNKKWEMDFSPIDSDGCDTDRIYTKAYLHHLFKAQELLAMQIASIHNLAFYLRLVGDARQHIEQGDFVQWKASVVDRLGQRI

SEQ ID NO: 59321 - protein, 375 aa, Prevotella denticola
  REGION 1..375: note = tr|A0A095ZW72|A0A095ZW72_9BACT Queuine tRNA-ribosyltransferase OS=Prevotella denticola DNF00960; OX = 1401077 GN=tgt PE=3 SV=1
MTFELQHTDNASDARTGVITTDHGQIRTPIFMPVGTVGSVKGVHFEELRRQVKAQIILGNTYHLYLRPGLDILRAAGGLHGFNGWDRPILTDSGGFQVFSLTGIRKLTEEGCEFRSHIDGSRHIFTPENVMDTERVIGADIMMALDECPPGRSDYAYAKKSLGLTQRWLDRCIRRFNETEPLYGYKQSLFPIVQGCTYKDLRCEAAKFVADKGADGNAIGGLAVGEPTEVMYEMIEVVNEILPKDKPRYLMGVGTPQNILEAIERGVDMFDCVMPTRNGRNAMLFTYDGTMNMKNKKWEDDFSPIDPEGCDVDLITSKAYLHHLFKAGELLAMQIASIHNLAFYLRLVTDARTHIEQGDFVQWKASVIEQLGRRI

SEQ ID NO: 59322 - protein, 375 aa, Prevotella denticola; identical to SEQ ID NO: 59321
  REGION 1..375: note = tr|F2KTM0|F2KTM0_PREDF Queuine tRNA-ribosyltransferase OS=Prevotella denticola (strain F0289) OX=767031 GN=tgt PE=3 SV=1

SEQ ID NO: 59323 - protein, 375 aa, Prevotella disiens
  REGION 1..375: note = tr|A0A3E4QJV3|A0A3E4QJV3_9BACT Queuine tRNA-ribosyltransferase OS=Prevotella disiens OX=28130; GN = tgt PE=3 SV=1
MTFELQCTDNASDARTGIITTDHGQIKTPIFMPVGTAGTVKGVHFSELVEQVKAQIILGNTYHLYLRPGLEVLKAAGGLHKFNGWNRPILTDSGGFQVFSLTGIRKLSEEGCQFRSHIDGSKHIFTPENVMDTQRVIGADIIMAFDECPPGNSDYEYSKRSLGLTQRWLDRCIKRFNETEPLYGYKQSLFPIVQGCTYKDLRTEAAKFVADKGADGNAIGGLAVGEPTEVMYEMIEHVNAILPKDKPRYLMGVGTPQNILEGIERGVDMFDCVMPTRNGRNAMLFTYEGTMNMRNKKWEKDFSPVDADGCDIDVITSKAYLHHLFKAGELLAMQIASIHNIAFYLRLVTDARKHIEQGDFVTWKASIIEKLGRRL

SEQ ID NO: 59324 - protein, 375 aa, Prevotella disiens
  REGION 1..375: note = tr|U2JFZ2|U2JFZ2_9BACT Queuine tRNA-ribosyltransferase OS=Prevotella disiens JCM 6334 = ATCC 29426 OX=1235811 GN=tgt PE=3 SV=1
MTFELQCTDNASDARTGIITTDHGQIKTPIFMPVGTAGTVKGVHFSELVEQVKAQIILGNTYHLYLRPGLEVLKAAGGLHKFNGWNRPILTDSGGFQVFSLTGIRKLSEEGCQFRSHIDGSKHIFTPENVMDTQRVIGADIIMAFDECPPGNSDYEYSKRSLGLTQRWLDRCIKRFNETEPLYGYKQSLFPIVQGCTYKDLRTEAAKFVADKGADGNAIGGLAVGEPTEVMYEMIEHVNAILPKDKPRYLMGVGTPQNILEGIERGVDMFDCVMPTRNGRNAMLFTYEGTMNMRNKKWEKDFSPVDADGCDIDVITSKAYLHHLFKAGELLAMQIASIHNIAFYLRLVTDARKHIKQGDFVTWKASIIEKLGRRL

SEQ ID NO: 59325 - protein, 375 aa, Prevotella enoeca
  REGION 1..375: note = tr|A0A0S2KL69|A0A0S2KL69_9BACT Queuine tRNA-ribosyltransferase OS=Prevotella enoeca OX=76123; GN = tgt PE=3 SV=1
MTFELQHTDNASEARTGLITTDHGVIKTPIFMPVGTCGSVKAVHFRELEEQVKAQIILGNTYHLYLRPGLDVLRAAGGLHKFNGWSHPILTDSGGYQVFSLTGIRKLREEGCEFRSHIDGSKHIFTPENVIDTERVIGADIIMALDECPPGQSDYQYAKKSLGLTQRWLDRCIRRFNETEPLYGYKQALFPIVQGCTFKDLRQEAAKFVADKGAEGNAIGGLAVGEPTEVMYEMIEVVNEILPKDKPRYLMGVGTPQNILEAIERGVDMFDCVMPTRNGRNAMLFTYDGTMNMRNKKWETDFTPIDPDGCETDRLYTKAYLHHLFKAQELLAMQIASIHNLAFYLRLVTDARQHIEQGDFVAWKRSVIDLLGRRI

SEQ ID NO: 59326 - protein, 375 aa, Prevotella fusca
  REGION 1..375: note = tr|A0A0K1NIT6|A0A0K1NIT6_9BACT Queuine tRNA-ribosyltransferase OS=Prevotella fusca JCM 17724; OX = 1236517 GN=tgt PE=3 SV=1
MTFELQHTDNASDARTGIITTDHGQIKTPIFMPVGTVGSVKGVHFEELRKQVKAQIILGNTYHLYLRPGLEVLKAAGGLHGFNGWERPILTDSGGFQVFSLTGIRKLSEEGCEFRSHIDGSKHIFTPENVMDTERIIGADIMMALDECPPGKSDYEYAKKSLRMTQRWLDRCIKRFNETEPLYGYNQSLFPIVQGCTYKDLRREAAKFVADKGADGNAIGGLAVGEPTEIMYEMIEVVNEILPKDKPRYLMGVGTPQNILEAIERGVDMFDCVMPTRNGRNAMLFTYNGTMNMKNKKWENDFSPIDPDGCDVDLITSKAYLHHLFKAGELLAMQIASIHNLAFYLRLVTDARAHIEQGDFVQWKASVIEQLGRRI

SEQ ID NO: 59327 - protein, 375 aa, Prevotella histicola
  REGION 1..375: note = tr|G6AE68|G6AE68_9BACT Queuine tRNA-ribosyltransferase OS=Prevotella histicola F0411; OX = 857291 GN=tgt PE=3 SV=1
MTFELQHTDNASDARTGIITTAHGQIKTPIFMPVGTVGSVKGVHFDELYKQVKAQIILGNTYHLYLRPGLEVLKAAGGLHGFNGWKRPILTDSGGFQVFSLTGIRKLSEEGCEFRSHIDGSKHIFTPESVMDTERIIGADIMMALDECPPGKSDYEYAKKSLGMTQRWLNRCIKRFNETEPLYGYSQSLFPIVQGCTYKDLRREAAKFVADKGADGNAIGGLAVGEPTEIMYEMIEVVNDILPKDKPRYLMGVGTPQNLLEAIERGVDMFDCVMPTRNGRNAMLFTYQGTMNMRNKKWEMDFSPVDSEGCEIDQITSKAYLHHLFKAGELLAMQIASIHNLSFYLRLVTDARSHIEQGDFVQWKASIIEQLGRRI

SEQ ID NO: 59328 - protein, 375 aa, Prevotella histicola; identical to SEQ ID NO: 59327
  REGION 1..375: note = tr|A0A096ATJ3|A0A096ATJ3_9BACT Queuine tRNA-ribosyltransferase OS=Prevotella histicola JCM 15637 = DNF00424 OX=1236504 GN=tgt PE=3 SV=1

SEQ ID NO: 59329 - protein, 375 aa, Prevotella intermedia
  REGION 1..375: note = tr|A0A1P8JER7|A0A1P8JER7_PREIN Queuine tRNA-ribosyltransferase OS=Prevotella intermedia ATCC 25611 = DSM 20706 OX=1122984 GN=tgt PE=3 SV=1
MTFELQCTDNASNARTGLITTDHGQIKTPIFMPVGTAGTVKGVHFSELVEQVKAQIILGNTYHLYLRPGLEVLKAAGGLHKFNGWNRPILTDSGGFQVFSLTGIRKLSEEGCQFRSHIDGSKHIFTPENVMDTQRIIGADIIMAFDECPPGNSDYAYSKRSLGLTQRWLDRCIKRFNETEPLYGYKQSLFPIVQGCTYKDLRTEAAKFVADKGADGNAIGGLAVGEPTEVMYEMIEVVNDILPKDKPRYLMGVGTPQNILEGIERGVDMFDCVMPTRNGRNAMLFTYEGTMNMRNKKWENDFSSVDADGCDIDVITSKAYLHHLFKAGELLAMQIASIHNIAFYLRLVTDARAHIEKGDFTQWKSSIIEKLGRRL

SEQ ID NO: 59330 - protein, 375 aa, Prevotella intermedia
  REGION 1..375: note = tr|A0A0D9NFU1|A0A0D9NFU1_PREIN Queuine tRNA-ribosyltransferase OS=Prevotella intermedia ZT; OX = 1347790 GN=tgt PE=3 SV=1
MTFELQCTDNASNARTGLITTDHGQIKTPIFMPVGTAGTVKGVHFSELVEQVKAQIILGNTYHLYLRPGLEVLKAAGGLHKFNGWNRPILTDSGGFQVFSLTGIRKLSEEGCQFRSHIDGSKHIFTPENVMDTQRIIGADIIMAFDECPPGNSDYAYSKRSLGLTQRWLDRCIKRFNETEPLYGYKQSLFPIVQGCTYKDLRTEAAKFVADKGADGNAIGGLAVGEPTEVMYEMIEVVNDILPKDKPRYLMGVGTPQNILEGIERGVDMFDCVMPTRNGRNAMLFTYEGTMNMRNKKWENDFSPVDANGCDIDVITSKAYLHHLFKAGELLAMQIASIHNIAFYLRLVTDARAHIEKGDFTQWKSSIIEKLGRRL

SEQ ID NO: 59331 - protein, 375 aa, unidentified
  source 1..375: note = Prevotella jejuni
  REGION 1..375: note = tr|A0A2K9H7Q7|A0A2K9H7Q7_9BACT Queuine tRNA-ribosyltransferase OS=Prevotella jejuni OX=1177574; GN = tgt PE=3 SV=1
MTFELQHTDNASDARTGIITTDHGQIKTPIFMPVGTVGSVKGVHFEELRKQVKAQIILGNTYHLYLRPGLDIIKAAGGLHGFNGWDRPILTDSGGFQVFSLTGIRKLSEEGCEFRSHIDGSKHIFTPENVMDTERIIGADIMMAFDECPPGQSDYQYAKKSLQLTQRWLDRCIKRFNETEPLYGHNQSLFPIVQGCTYKDLRREAAKFVADKGADGNAIGGLAVGEPTEVMYEMIEVVNEILPKDKPRYLMGVGTPQNILEAIERGVDMFDCVMPTRNGRNAMLFTYNGTMNMKNKKWENDFSPIDPDGCDIDIITSKAYLHHLFKAGELLAMQIASIHNLAFYLRLVTDARTHIEQGDFVQWKASVIEQLGRRI

SEQ ID NO: 59332 - protein, 375 aa, Prevotella loescheii
  REGION 1..375: note = tr|A0A069QIU1|A0A069QIU1_PRELO Queuine tRNA-ribosyltransferase OS=Prevotella loescheii DSM 19665 = JCM 12249 = ATCC 15930 OX=1122985 GN=tgt PE=3 SV=1
MKFELQHTDTASDARTGIITTDHGQIKTPVFMPVGTCGSVKGVHFSELRQQVKAQIILGNTYHLYLRPGLDVLKKAGGLHKFNTWDRPILTDSGGFQVFSLTGIRRLTENGCEFRSHIDGSKHVFTPESVMDTERIIGADIMMAFDECPPGNSDYAYAKKSLGLTQRWLDRCFKRFSETEPLYGYLQSLFPIVQGCTYKDLRQEAAKHVADKDADGNAIGGLAVGEPTEVMYEMIEVVNEILPKDKPRYLMGVGTPQNILEAIERGVDMFDCVMPTRNGRNAMLFTYQGTMNMRNKKWEDDFSPIDPDGCEIDRIHSKAYLHHLFKAQELLAMQIASIHNLAFYLRLTADARLHIEQGDFVQWKASVIDNLNRRV

SEQ ID NO: 59333 - protein, 375 aa, Prevotella maculosa
  REGION 1..375: note = tr|H1HPB0|H1HPB0_9BACT Queuine tRNA-ribosyltransferase OS=Prevotella maculosa OT 289; OX = 999422 GN=tgt PE=3 SV=1
MTFEVQHTDNASDARTGLITTDHGKIKTPIFMPVGTAGTVKGVHFSELREQVNAQIILGNTYHLYLRPGLDILRRAGGLHGFNGWERPILTDSGGFQVFSLTGIRKLTEEGCTFQSHIDGSRHIFTPENVMDTERVIGADIMMALDECPPGQSDYQYAQKSLALTQRWLDRCIKRFNETEPLYGYHQSLFPIVQGCTYKDLRREAAKFVADKEADGNAIGGLAVGEPTEVMYEMIEVVNEILPKDKPRYLMGVGTPQNILEAIERGVDMFDCVMPTRNGRNALLFTYNGTMNMRNKKWENDFTPIDSEGCDVDKVYSKAYLHHLFKAKELLAMQIGSIHNLAFYLRLVTDARQHIEQGDFVTWKKSVIERLGQRL

SEQ ID NO: 59334 - protein, 375 aa, Prevotella marshii
  REGION 1..375: note = tr|E0NRQ0|E0NRQ0_9BACT Queuine tRNA-ribosyltransferase OS=Prevotella marshii DSM 16973 = JCM 13450 OX=862515 GN=tgt PE=3 SV=1
MKFELQHTDNASDARTGLITTAHGQIKTPIFMPVGTCGSVKGVHIAELEEQVKAQIILGNTYHLYLRPGLDILKAAGGLHRFNAWNHPILTDSGGFQVFSLTGIRKLREEGCEFRSHIDGSKHFFTPENVMDTERIIGADIMMALDECPPGKSDYAYARKSLALTQRWLDRCIARFNATEPLYGYSQSLFPIVQGCTYKDLRREAAKFVADKGADGNAIGGLAVGEPTETMYEMIEVVNEILPKDKPRYLMGVGTPQNILEAIERGVDMFDCVMPTRNGRNAMLFTYEGTMNMKNKKWESDFSPIDPEGCHVDRVHTKAYLHHLFKAQELLAMQIASIHNLSFYLRLVTDAREHIEQGDFVKWKASIIHQLGRRI

SEQ ID NO: 59335 - protein, 375 aa, Prevotella melaninogenica
  REGION 1..375: note = tr|A0A096CGX4|A0A096CGX4_9BACT Queuine tRNA-ribosyltransferase OS=Prevotella melaninogenica DNF00666 OX=1401073 GN=tgt PE=3 SV=1
MTFELQHTDNASDARTGIITTDHGQIKTPIFMPVGTVGSVKGVHFEELRKQVKAQIILGNTYHLYLRPGLDIIKAAGGLHGFNGWDRPILTDSGGFQVFSLTGIRKLSEEGCEFRSHIDGSKHIFTPENVMDTERIIGADIMMAFDECPPGQSDYQYAKKSLEMTQRWLDRCIKRFNETEPLYGHNQSLFPIVQGCTYKDLRCEAARFVADKGADGNAIGGLAVGEPTEVMYEMIEVVNEILPKDKPRYLMGVGTPQNILEAIERGVDMFDCVMPTRNGRNAMLFTYNGTMNMKNKKWENDFSPIDPDGCDIDVITSKAYLHHLFKAGELLAMQIASIHNLAFYLRLVTDARTHIEQGDFVQWKTSVIEQLGRRI

SEQ ID NO: 59336 - protein, 375 aa, Prevotella melaninogenica
  REGION 1..375: note = tr|D3I793|D3I793_9BACT Queuine tRNA-ribosyltransferase OS=Prevotella melaninogenica D18; OX = 575612 GN=tgt PE=3 SV=1
MTFELQHTDNASDARTGIITTDHGQIKTPIFMPVGTVGSVKGVHFEELRKQVKAQIILGNTYHLYLRPGLDIIKAAGGLHGFNGWDRPILTDSGGFQVFSLTGIRKLSEEGCEFRSHTDGSKHIFTPENVMDTERIIGADIMMAFDECPPGQSDYQYAKKSLEMTQRWLDRCIKRFNETEPLYGHNQSLFPIVQGCTYKDLRCEAAKFVADKGADGNAIGGLAVGEPTEVMYEMIEVVNEILPKDKPRYLMGVGTPQNILEAIERGVDMFDCVMPTRNGRNAMLFTYNGTMNMKNKKWENDFSPIDSDGCDIDVITSKAYLHHLFKAGELLAMQIASIHNLAFYLRLVTDARTHIEQGDFVQWKASVIEQLGRRI

SEQ ID NO: 59337 - protein, 375 aa, Prevotella micans
  REGION 1..375: note = tr|H1Q222|H1Q222_9BACT Queuine tRNA-ribosyltransferase OS=Prevotella micans F0438; OX = 883158 GN=tgt PE=3 SV=1
MTFELQFADSASNARTGLIKTDHGQIETPIFMPVGTAGAVKGVHFAELIEQVKAQIILGNTYHLYLRPGIETLKKAGGLHNFNGWQRPILTDSGGFQVFSLTGIRKLSEEGCEFRSHIDGSKHFFTPENVMDTQRIIGADIMMAFDECPPGKSDYEYAKKSLALTQRWLDRCLKRFRETEPLYGHKQSLFPIVQGCTYKDLRVEAAKFVADKEADGNAIGGLAVGEPTEVMYEMIEVVNDILPKDKPRYLMGVGTPQNLLEAIARGVDMFDCVMPTRNGRNAMLFNSEGTMNMRNKKWENDFSPLDPEGCTIDRITTKAYLHHLFKAGELLAMQIASIHNLAFYLRLVKEARSHIAQGDFTVWKSQAVEKLGRRI

SEQ ID NO: 59338 - protein, 375 aa, Prevotella multiformis
  REGION 1..375: note = tr|F0F5T3|F0F5T3_9BACT Queuine tRNA-ribosyltransferase OS=Prevotella multiformis DSM 16608 OX=888743 GN=tgt PE=3 SV=1
MTFELQHTDTASEARTGVITTDHGQIRTPVFMPVGTVGSVKGVHFEELRRQVKAQIILGNTYHLYLRPGLDILRAAGGLHGFNGWERPILTDSGGFQVFSLTGIRKLTEEGCEFRSHIDGSRHIFTPENVMDTERVIGADIMMALDECPPGKSDYAYAKKSLGLTQRWLDRCIRRFNETEPLYGYKQSLFPIVQGCTYKDLRREAARFVADKGADGNAIGGLAVGEPTEVMYEMIEVVNEILPKDKPRYLMGVGTPQNILEAIERGVDMFDCVMPTRNGRNAMLFTYDGTMNMKNKKWEDDFSPIDPGGCDVDLVTSKAYLHHLFKAGELLAMQIASIHNLAFYLRLVTDARTHIEQGDFVQWKASVIDQLGRRI

SEQ ID NO: 59339 - protein, 375 aa, Prevotella multisaccharivorax
  REGION 1..375: note = tr|F8N5B5|F8N5B5_9BACT Queuine tRNA-ribosyltransferase OS=Prevotella multisaccharivorax DSM 17128 OX=688246 GN=tgt PE=3 SV=1
MDFQLQYTDKASDARAGVITTGHGKIETPIFMPVGTAGAVKAVHFSELRQQVKAQIILGNTYHLYLRPGLEVLRAAGGLHEFNGWERPILTDSGGFQVFSLSGIRKLTEEGCEFRSHIDGSKHIFTPENVMDTERIIGADIMMALDECPPGLSDYAYAKKSLAMTQRWLDRCINRFNETEPLYGYHQSLFPIVQGCTYKDLRQEAAKYVADKGAEGNAIGGLAVGEPTEVMYEMIEVVNGILPKDKPRYLMGVGTPQNILEGIERGVDMFDCVMPTRNGRNAMLFTYEGTMNMRNKKWEMDFSPLDPNGCETDRVTTKAYLHHLFKAQELLAMQIASIHNLAFYLRLVTDARQHILAGDFVQWKNSIVGQLGQRR

SEQ ID NO: 59340 - protein, 375 aa, Prevotella nigrescens
  REGION 1..375: note = tr|A0A246ENH2|A0A246ENH2_9BACT Queuine tRNA-ribosyltransferase OS=Prevotella nigrescens OX=28133; GN = tgt PE=3 SV=1
MTFELQCTDRASEARTGLITTDHGQIKTPIFMPVGTAGTVKGVHFSELVEQVKAQIILGNTYHLYLRPGLEVLKAAGGLHKFNGWNRPILTDSGGFQVFSLTGIRKLSEEGCQFRSHIDGSKHIFTPENVMDTQRIIGADIIMAFDECPPGNSDYAYSKKSLGLTQRWLDRCIRRFNETEPLYGYKQSLFPIVQGCTYKDLRTEAAKFVADKGADGNAIGGLAVGEPTEVMYEMIEIVNEILPKDKPRYLMGVGTPQNILEGIERGIDMFDCVMPTRNGRNAMLFTYEGTMNMRNKKWETDFSPVDSNGCDIDIVTSKAYLHHLFKAGELLAMQIASIHNLAFYLRLVTDARTHIEKGDFTQWKSSIIDKLGRRL

SEQ ID NO: 59341 - protein, 375 aa, Prevotella nigrescens
  REGION 1..375: note = tr|V8CRJ7|V8CRJ7_9BACT Queuine tRNA-ribosyltransferase OS=Prevotella nigrescens CC14M; OX = 1073366 GN=tgt PE=3 SV=1
MTFELQCTDRASEARTGLITTDHGQIKTPIFMPVGTAGTVKGVHFSELVEQVKAQIILGNTYHLYLRPGLEVLKAAGGLHKFNGWNRPILTDSGGFQVFSLTGIRKLSEEGCQFRSHIDGSKHIFTPENVMDTQRIIGADIIMAFDECPPGNSDYAYSKKSLGLTQRWLDRCIRRFNETEPLYGYKQSLFPIVQGCTYKDLRTEAAKFVADKGADGNAIGGLAVGEPTEVMYEMIEIVNEILPKDKPRYLMGVGTPQNILEGIERGIDMFDCVMPTRNGRNAMLFTYEGTMNMRNKKWETDFSPVDSNGCDIDIVTSKAYLHHLFKAGELLAMQIASIHNLAFYLRLVTDARAHIEKGDFTQWKSSIIDKLGRRL

SEQ ID NO: 59342 - protein, 375 aa, Prevotella oralis
  REGION 1..375: note = tr|E7RSW3|E7RSW3_9BACT Queuine tRNA-ribosyltransferase OS=Prevotella oralis ATCC 33269; OX = 873533 GN=tgt PE=3 SV=1
MTFELQHTDSASDARTGIITTAHGQIKTPIFMPVGTAGTVKGVHFSELREQVKAQIILGNTYHLYLRPGLDILKAAGGLHGFNGWERPILTDSGGFQVFSLTGIRKLCEEGCEFRSHIDGSKHIFTPENVMDTERIIGADIMMALDECPPGQSDYAYAKRSLGLTQRWLDRCIKRFNETEPLYGYNQSLFPIVQGCTYKDLRREAAKFVADKDADGNAIGGLAVGEPTEVMYEMIEVVNDILPKQKPRYLMGVGTPQNILEAIERGVDMFDCVMPTRNGRNAMLFTYNGTMNMKNKKWEYDFSPIDETGCDVDRVYTKAYLHHLFKAQELLAMQIASIHNLAFYLRLVSDARQHIEQGDFVRWKAGVIEQLGKRI

SEQ ID NO: 59343 - protein, 375 aa, Prevotella oralis
  REGION 1..375: note = tr|V8C1K2|V8C1K2_9BACT Queuine tRNA-ribosyltransferase OS=Prevotella oralis CC98A; OX = 1073367 GN=tgt PE=3 SV=1
MTFELQHTDSASDARTGIITTAHGQIKTPIFMPVGTAGTVKGVHFSELREQVKAQIILGNTYHLYLRPGLDILKAAGGLHGFNGWERPILTDSGGFQVFSLTGIRKLREEGCEFRSHIDGSKHIFTPENVMDTERIIGADIMMALDECPPGQSDYAYAKRSLGLTQRWLDRCIKRFNETEPLYGYNQSLFPIVQGCTYKDLRREAAKFVADKDADGNAIGGLAVGEPTEVMYEMIEVVNDILPKQKPRYLMGVGTPQNILEAIERGVDMFDCVMPTRNGRNAMLFTYNGTMNMKNKKWEYDFSPIDETGCDVDRVYTKAYLHHLFKAQELLAMQIASIHNLAFYLRLVSDARQHIEQGDFVRWKADVIEQLGKRI

SEQ ID NO: 59344 - protein, 375 aa, Prevotella oris
  REGION 1..375: note = tr|D7NA30|D7NA30_9BACT Queuine tRNA-ribosyltransferase OS=Prevotella oris C735 OX=563008; GN = tgt PE=3 SV=1
MTFEVQHTDNASDARTGVITTDHGQIKTPIFMPVGTAGTVKGVHFSELREQVNAQIILGNTYHLYLRPGLDILRQAGGLHGFNGWERPILTDSGGFQVFSLTGIRKLTEEGCTFQSHIDGSKHIFTPENVMDTERIIGADIMMAFDECPPGKSDYQYAKKSLGMTQRWLDRCIKRFNETKPLYGYNQSLFPIVQGCTYKDLRQEAAKFVADKGADGNAIGGLAVGEPTEVMYEMIEVVNEILPKDRPRYLMGVGTPQNILEAIERGVDMFDCVMPTRNGRNALLFTYNGTMNMRNKKWENDFTPIDPEGCDVDRIYTKAYLHHLFKAKELLAMQIGSIHNLAFYLRLVTDARQHIEQGDFVTWKKSVIDQLGQRL

SEQ ID NO: 59345 - protein, 375 aa, Prevotella oris
  REGION 1..375: note = tr|A0A448L7C0|A0A448L7C0_9BACT Queuine tRNA-ribosyltransferase OS=Prevotella oris OX=28135 GN=tgt; PE = 3 SV=1
MTFEVQHTDNASDARTGIITTDHGQIKTPIFMPVGTAGTVKGVHFSELREQVNAQIILGNTYHLYLRPGLDILRQAGGLHGFNGWERPILTDSGGFQVFSLTGIRKLTEEGCTFQSHIDGSKHIFTPENVMDTERIIGADIMMAFDECPPGKSDYQYAKKSLSMTQRWLDRCIKRFNETKPLYGYNQSLFPIVQGCTYKDLRQEAAKFVADKGADGNAIGGLAVGEPTEVMYEMIEVVNEILPKDRPRYLMGVGTPQNILEAIERGVDMFDCVMPTRNGRNALLFTYNGTMNMRNKKWENDFTPIAPEGCDVDRVYTKAYLHHLFKAKELLAMQIGSIHNLAFYLRLVTDARQHIEQGDFVTWKKSVIDQLGQRL

SEQ ID NO: 59346 - protein, 375 aa, Prevotella oulorum
  REGION 1..375: note = tr|G1W9B6|G1W9B6_9BACT Queuine tRNA-ribosyltransferase OS=Prevotella oulorum F0390; OX = 702438 GN=tgt PE=3 SV=1
MTFDVQYSDSSSNARAGVITTDHGQILTPIFMPVGTAGTVKGVHFSELIEQVKAQIILGNTYHLYLRPGLDILQKAGGLHGFNGWQYPILTDSGGFQVFSLTGIRKLTEEGCVFQSHIDGSKHFFTPENVMDTERIIGADIMMAFDECPPGKSDYHYAKKSLQLTQRWLDRCLKRFQETQPLYGHQQSLFPIVQGCTYKDLRQEAAKFIADKGADGNAIGGLAVGEPTEVMYEMIEVVNDILPKDKPRYLMGVGTPQNILEAIERGVDMFDCVMPTRNGRNALLFTYEGTMNMRNKKWEEDFLPLDANGCDIDKCTSKAYLHHLFKAKELLAMQIGSIHNLAFYLRLVTDARQHIQQGDFINWKKSVIERLGQRL

SEQ ID NO: 59347 - protein, 375 aa, Prevotella oulorum
  REGION 1..375: note = tr|A0A1T4KX15|A0A1T4KX15_9BACT Queuine tRNA-ribosyltransferase OS=Prevotella oulorum OX=28136; GN = tgt PE=3 SV=1
MTFDVQYSDSSSNARAGVITTDHGQILTPIFMPVGTAGTVKGVHFSELIEQVKAQIILGNTYHLYLRPGLNILQKAGGLHGFNGWQHPILTDSGGFQVFSLTGIRKLTEEGCVFQSHIDGSKHFFTPENVMDTERIIGADIMMAFDECPPGKSDYHYAKKSLQLTQRWLDRCLKRFQETQPLYGHRQSLFPIVQGCTYKDLRQEAAKFIADKGADGNAIGGLAVGEPTEVMYEMIEVVNDILPKDKPRYLMGVGTPQNILEAIERGVDMFDCVMPTRNGRNALLFTYEGTMNMRNKKWEDDFSPLDANGCDIDKCTSKAYLHHLFKAKELLAMQIGSIHNLAFYLRLVTDARQHIQQGNFISWKKSVIERLGQRL

SEQ ID NO: 59348 - protein, 375 aa, Prevotella pallens
  REGION 1..375: note = tr|A0A379F1H7|A0A379F1H7_9BACT Queuine tRNA-ribosyltransferase OS=Prevotella pallens OX=60133; GN = tgt PE=3 SV=1
MTFELQCTDRASEARVGLITTDHGQIKTPIFMPVGTAGTVKGVHFSELIEQVKAQIILGNTYHLYLRPGLEILKAAGGLHKFNGWNRPILTDSGGFQVFSLTSIRKLSEEGCQFRSHIDGSKHIFTPENVMDTQRIIGADIIMAFDECPPGNSDYAYSKQSLGLTQRWLDRCIKRFNETEPLYGYKQSLFPIVQGCTYKDLRTEAAKFVADKGADGNAIGGLAVGEPTEVMYEMIEVVNEILPKDKPRYLMGVGTPQNILEGIERGVDMFDCVMPTRNGRNAMLFTYEGTMNMRNKKWENDFSPVDSNGCDIDIITSKAYLHHLFKAGELLAMQIASIHNIAFYLRLVTDARTHIEKGDFTQWKSSIMDKLGRRL

SEQ ID NO: 59349 - protein, 375 aa, Prevotella pallens
  REGION 1..375: note = tr|F9DHQ8|F9DHQ8_9BACT Queuine tRNA-ribosyltransferase OS=Prevotella pallens ATCC 700821; OX = 997353 GN=tgt PE=3 SV=1
MTFELQCTDKASEARAGLITTDHGQIKTPIFMPVGTAGTVKGVHFSELIEQVKAQIILGNTYHLYLRPGLEILKAAGGLHKFNGWNRPILTDSGGFQVFSLTGIRKLSEEGCQFRSHIDGSKHIFTPENVMDTQRIIGADIIMAFDECPPGNSDYAYSKQSLGLTQRWLDRCIKRFNETEPLYGYKQSLFPIVQGCTYKDLRTEAAKFVADKGADGNAIGGLAVGEPTEVMYEMIEVVNEILPKDKPRYLMGVGTPQNILEGIERGVDMFDCVMPTRNGRNAMLFTYEGTMNMRNKKWENDFSPVDSNGCDIDIITSKAYLHHLFKAGELLAMQIASIHNIAFYLRLVTDARTHIEKGDFTQWKSSIMDKLGRRL

SEQ ID NO: 59350 - protein, 375 aa, Prevotella pleuritidis
  REGION 1..375: note = tr|U2KK72|U2KK72_9BACT Queuine tRNA-ribosyltransferase OS=Prevotella pleuritidis F0068; OX = 1081904 GN=tgt PE=3 SV=1
MTFELQHTDDASEARTGLITTDHGIIKTPIFMPVGTCGSVKAVHLRELEEQVKAQIILGNTYHLYLRPGLDVLRAAGGLHKFNGWAHPMLTDSGGFQVFSLTGIRKLREEGCEFRSHIDGSKHFFTPENVMDTERVIGADIIMALDECPPGQSDYQYAKKSLALTQRWLDRCIRRFNETEPLYGYKQALFPIVQGCTFKDLRQEAAKFVADKGAEGNAIGGLAVGEPTEVMYEMIEIVNEILPKDKPRYLMGVGTPQNILEAIERGVDMFDCVMPTRNGRNAMLFTYNGTMNMRNKKWETDFTPIDPDGCETDRLYTKAYLHHLFKAQELLAMQIASIHNLAFYLRLAADARQHIEQGGFVIWKRSIINQLGRRV

SEQ ID NO: 59351 - protein, 380 aa, Prevotella ruminicola
  REGION 1..380: note = tr|D5EZA5|D5EZA5_PRER2 Queuine tRNA-ribosyltransferase OS=Prevotella ruminicola (strain ATCC 19189 / JCM 8958 / 23) OX=264731 GN=tgt PE=3 SV=1
MKFEVQHTDAASDARAGLITTDHGQIQTPIFMPVGTVGSVKGVHFSELREQVKAQIILGNTYHLYLRPGLDILRQAGGLHKFNTWDRPILTDSGGFQVFSLTGIRKLREEGCEFRSHIDGSKHIFTPENVMDTERVIGADIMMAFDECPPGQSDYKYAENSLRLTQRWLERCVKRFNETEPLYGYNQTLFPIVQGCTYKDLRQDAAKHVCDVLAKLNDGGGASIGGLAVGEPTEVMYEMIEVVNEILPKDRPRYLMGVGTPQNILEGIERGVDMFDCVMPTRNGRNAMLFTYEGTMNMRNKKWENDFSPIDPDGCEIDRIHSKAYLHHLFKAQELLAMQIASIHNLAFYLRLVGDARQHIIAGDFVQWKRSVIDQLGRRR

SEQ ID NO: 59352 - protein, 380 aa, Prevotella ruminicola
  REGION 1..380: note = tr|A0A1M6UYU2|A0A1M6UYU2_PRERU Queuine tRNA-ribosyltransferase OS=Prevotella ruminicola OX=839; GN = tgt PE=3 SV=1
MTFEVQHTDAASDARAGLITTDHGQIQTPIFMPVGTVGSVKGVHFSELREQVKAQIILGNTYHLYLRPGLDILRQAGGLHKFNTWDRPILTDSGGFQVFSLTGIRKLREEGCEFQSHIDGSRHIFTPENVMDTERVIGADIMMAFDECPPGQSDYKYAENSLRLTQRWLERCVKRFNETEPLYGYNQTLFPIVQGCTYKDLRQDAAKHVCDVLGKLNDGGGASIGGLAVGEPTEVMYEMIEVVNEILPKDRPRYLMGVGTPQNILEAIERGVDMFDCVMPTRNGRNAMLFTYEGTMNMRNKKWENDFSPIDPDGCDIDRIHSKAYLHHLFKAQELLAMQIASIHNLAFYLRLVGDARQHIIAGDFVQWKRSVIDQLGRRR

SEQ ID NO: 59353 - protein, 375 aa, Prevotella saccharolytica
  REGION 1..375: note = tr|L1N0N5|L1N0N5_9BACT Queuine tRNA-ribosyltransferase OS=Prevotella saccharolytica F0055; OX = 1127699 GN=tgt PE=3 SV=1
MKFELQHTDSASDARTGIITTDHGQIKTPIFMPVGTCGTVKGVHFEELRKQVKAQIILGNTYHLYLRPGLDVLRKAGGLHQFNTWDRPILTDSGGFQVFSLTGIRKLTEAGCEFRSHIDGSKHIFTPENVMDTERVIGADIMMAFDECPPGNSDYNYAKKSLGLTQRWLDRCIKRFNETEPLYGYQQSLFPIVQGCTYKDLRREAAKFVADKGADGNAIGGLAVGEPTEVMYEMIEVVNEILPKDKPRYLMGVGTPQNILEAIERGVDMFDCVMPTRNGRNAMLFTYNGTMNMRNKKWEDDFSPIDADGCDIDRLHTKAYLHHLFKAQELLAMQIASIHNLAFYLRLVTDARRHIEQGDFVQWKAGVIDNLSRRV

SEQ ID NO: 59354 - protein, 375 aa, Prevotella salivae
  REGION 1..375: note = tr|U2MHJ8|U2MHJ8_9BACT Queuine tRNA-ribosyltransferase OS=Prevotella salivae F0493; OX = 1395125 GN=tgt PE=3 SV=1
MTFEVQHTDNASDARAGLITTDHGTIKTPIFMPVGTAGTVKGVHFSELHEQVKAQIILGNTYHLYLRPGLDILRQAGGLHGFNGWELPILTDSGGFQVFSLTGIRKLTEEGCTFQSHIDGSKHMFTPENVMDTERIIGADIMMAFDECPPGKSDYQYAKKSLAMTQRWLDRCIKRFNETEPLYGYNQSLFPIVQGCTYKDLRQEAAKYIADKGADGNAIGGLAVGEPTEVMYEMIEVVNEILPKEKPRYLMGVGTPQNILEAIERGVDMFDCVMPTRNGRNALLFTYDGTMNMRNKKWENDFTPIDAAGCDVDKRYTKAYLHHLFKAKELLAMQIGSIHNLAFYLRLVTDARHHIEQGDFVSWKKSVIDRLGQRL

SEQ ID NO: 59355 - protein, 375 aa, Prevotella salivae; identical to SEQ ID NO: 59354
  REGION 1..375: note = tr|E6MMM2|E6MMM2_9BACT Queuine tRNA-ribosyltransferase OS=Prevotella salivae DSM 15606; OX = 888832 GN=tgt PE=3 SV=1

SEQ ID NO: 59356 - protein, 375 aa, Prevotella scopos
  REGION 1..375: note = tr|A0A1B1I898|A0A1B1I898_9BACT Queuine tRNA-ribosyltransferase OS=Prevotella scopos JCM 17725; OX = 1236518 GN=tgt PE=3 SV=1
MTFELQHTDKASDARTGIITTDHGQIKTPIFMPVGTVGSVKGVHFEELRKQVKAQIILGNTYHLYLRPGLDIIKATGGLHAFNGWDRPILTDSGGFQVFSLTGIRKLSEEGCEFRSHIDGSKHIFTPENVMDTERIIGADIMMAFDECPPGQSDYQYAKKSLEMTQRWLDRCIKRFNETEPLYGYNQSLFPIVQGCTYKDLRREASKFVADKGADGNAIGGLAVGEPTEVMYEMIEVVNEILPKDKPRYLMGVGTPQNILEAIERGVDMFDCVMPTRNGRNAMLFTYNGTMNMKNKKWENDFSPIDLDGCDIDVITSKAYLHHLFKAGELLAMQIASIHNLAFYLRLVTDARTHIEQGDFVQWKASVIEQLGRRI

SEQ ID NO: 59357 - protein, 375 aa, Prevotella shahii
  REGION 1..375: note = tr|A0A318IDR1|A0A318IDR1_9BACT Queuine tRNA-ribosyltransferase OS=Prevotella shahii DSM 15611 = JCM 12083 OX=1122991 GN=tgt PE=3 SV=1
MKFELQHTDSASDARTGIITTDHGQIKTPVFMPVGTCGTVKGVHFSELRQQVKAQIILGNTYHLYLRPGLDVLKNAGGLHKFNTWDKPILTDSGGFQVFSLTGIRRLTENGCEFRSHIDGSKHIFTPESVMDTERIIGADIMMAFDECPPGNSDYAYAKKSLGLTQRWLDRCFKRFNETEPLYGYQQSLFPIVQGCTFKDLRQEAAKHVADKGADGNAIGGLAVGEPTEVMYEMIEVVNEILPKDKPRYLMGVGTPQNILEGIERGVDMFDCVMPTRNGRNAMLFTYQGTMNMRNKKWENDFSPIDPDGCEIDRIHSKAYLHHLFKAQELLAMQIASIHNLAFYLRLTADARHHIEQGDFVQWKASVIDNLNRRV

SEQ ID NO: 59358 - protein, 375 aa, Prevotella sp.
  REGION 1..375: note = tr|C9Q0R6|C9Q0R6_9BACT Queuine tRNA-ribosyltransferase OS=Prevotella sp. oral taxon 472 str. F0295 OX=619693 GN=tgt PE=3 SV=1
MKFELQHTDTASDARTGIITTDHGQIKTPVFMPVGTCGSVKGVHFSELRQQVKAQIILGNTYHLYLRPGLDVLKKAGGLHKFNTWDRPILTDSGGFQVFSLTGIRRLTENGCEFRSHIDGSKHVFTPESVMDTERIIGADIMMAFDECPPGDSDYAYAKKSLGLTQRWLDRCFKRFNETEPLYGYQQSLFPIVQGCTYKDLRQEAAKHVADKGADGNAIGGLAVGEPTEVMYEMIEVVNEILPKDKPRYLMGVGTPQNILEAIERGVDMFDCVMPTRNGRNAMLFTYQGTMNMRNKKWEDDFSPIDPDGCEIDRIHSKAYLHHLFKAQELLAMQIASIHNLAFYLRLTADARLHIEQGDFVQWKASVIDNLNRRV

SEQ ID NO: 59359 - protein, 376 aa, Prevotella sp.
  REGION 1..376: note = tr|R7HM25|R7HM25_9BACT Queuine tRNA-ribosyltransferase OS=Prevotella sp. CAG:279; OX = 1262924 GN=tgt PE=3 SV=1
MDFELQKEDLNSNARAGLITTAHGTIETPIFMPVGTVGSVKAVHFHELENDIKAQIILGNTYHLYLRPGMDIIEKAGGLHKFNGWKRPILTDSGGFQVFSLSANRKLKEEGAYFRSHIDGSKHLFTPEGVVDIQRSIGSDIMMALDECPPGDSDYQYAKKSLALTLRWLRRGWDHYKATDGKYGYSQAYFPIVQGCVYKDLRQESAKFVADLGADGNAIGGLAVGEPTEKMYEMIEIVNEILPKDKPRYLMGVGTPANILEAIERGVDMMDCVMPTRNGRNGMLFTKNGIMNMRNKKWADDFSPIEIDGASEVDRMYSRAYLRHLFVSQEILAMQIASIHNLAFYLWLVGEARSHILAGDFKAWKDETVVRVMQRL

SEQ ID NO: 59360 - protein, 375 aa, Prevotella stercorea
  REGION 1..375: note = tr|A0A3C0CFD8|A0A3C0CFD8_9BACT Queuine tRNA-ribosyltransferase OS=Prevotella stercorea OX=363265; GN = tgt PE=3 SV=1
MTFELQHTDPCSDARTGIITTDHGQIKTPIFMPVGTVGSVKGVHFNELREQVKAQIILGNTYHLYLRPGLDTLQKAGGLHKFNTWDRPILTDSGGFQVFSLTGIRKLREEGCEFRSHIDGSKHIFTPENVMDTERIIGADIMMAFDECPPGESDYEYAKKSLGLTQRWLDRCFKRFNETEPLYGYNQSLFPIVQGCKYKDLRREAAKHVADKGADGNAIGGLAVGEPTEVMYEMIEVVNEILPKDKPRYLMGVGTPQNILEAIERGVDMFDCVMPTRNGRNAMLFTYEGTINIRNKKWEQDFSPIDPDGCDIDRIHSKAYLHHLFKAQELLAMQIASIHNLAFYLRLVTDARKHIEQGDFVQWKASVIDNLGRRI

SEQ ID NO: 59361 - protein, 375 aa, Prevotella stercorea; identical to SEQ ID NO: 59360
  REGION 1..375: note = tr|R7GUJ4|R7GUJ4_9BACT Queuine tRNA-ribosyltransferase OS=Prevotella stercorea CAG:629; OX = 1263103 GN=tgt PE=3 SV=1

SEQ ID NO: 59362 - protein, 375 aa, Prevotella timonensis
  REGION 1..375: note = tr|A0A2K0XMI6|A0A2K0XMI6_9BACT Queuine tRNA-ribosyltransferase OS=Prevotella timonensis OX=386414; GN = tgt PE=3 SV=1
MTFELQHTDPNSSARTGLITTAHGQIKTPIFMPVGTVGTVKAVHFSELKQQVKAQIILGNTYHLYLRPGLEILKAAGGLHQFNGWDRPILTDSGGFQVFSLTGIRKLTEEGCEFRSHIDGSKHFFTPENVMDTERIIGADIMMALDECPPGDCDYQYAKQSLGMTHRWLDRCIKRFKETEPLYGYDQCLFPIVQGAAYKDLRQESAKYIADQGADGNAIGGLAVGEPTEVMYEMIEVVNDILPKDKPRYLMGVGTPQNILEGIERGVDMFDCVMPTRNGRNAMLFTYEGTMNMKNKKWENDFTPIDSSGCDIDMVCTKAYLHHLFKAKEYLALQIASIHNLAFYLRLVTDARQHIEQGDFVSWKRSIIEQLGRRI

SEQ ID NO: 59363 - protein, 375 aa, Prevotella timonensis
  REGION 1..375: note = tr|A0A098YS44|A0A098YS44_9BACT Queuine tRNA-ribosyltransferase OS=Prevotella timonensis S9-PR14; OX = 1401062 GN=tgt PE=3 SV=1
MTFELQHTDPNSSARTGLITTAHGQIKTPIFMPVGTVGTVKAVHFSELKQQVKAQIILGNTYHLYLRPGLEILKAAGGLHQFNGWDRPILTDSGGFQVFSLTGIRKLTEEGCEFRSHIDGSKHFFTPENVMDTERIIGADIMMALDECPPGDCDYQYAKQSLGMTHRWLDRCIKRFKETEPLYGYDQCLFPIVQGAAYKDLRQESAKYIADKGADGNAIGGLAVGEPTEVMYEMIEVVNDILPKDKPRYLMGVGTPQNILEGIERGVDMFDCVMPTRNGRNAMLFTYEGTMNMKNKKWENDFTPIDSSGCDIDMVCTKAYLHHLFKAKEYLALQIASIHNLAFYLRLVTDARQHIEQGDFVSWKRSIIEQLGRRI

SEQ ID NO: 59364 - protein, 375 aa, Prevotella veroralis
  REGION 1..375: note = tr|C9MPV6|C9MPV6_9BACT Queuine tRNA-ribosyltransferase OS=Prevotella veroralis F0319; OX = 649761 GN=tgt PE=3 SV=1
MTFELQHTDNASDARTGLITTAHGQIKTPIFMPVGTVGSVKGVHFEELRRQVKAQIILGNTYHLYLRPGLDVLKAAGGLHGFNGWERPILTDSGGFQVFSLTGIRKLSEEGCEFRSHIDGSKHFFTPENVMDTERIIGADIMMALDECPPGQSDYEYAKKSLGMTQRWLTRCIKRFNETEPLYGYEQSLFPIVQGCTYKDLRQEAAKFVTDQGADGNAIGGLAVGEPTDVMYEMIEVVNEILPKDKPRYLMGVGTPQNILEAIERGVDMFDCVMPTRNGRNAMLFTYNGTMNMRNKKWEKDFSPVDHDGCDIDQITSKAYLHHLFKAGELLAMQIASIHNLAFYLRLVTDARTHIEQGDFVQWKASVIEQLGRRI

SEQ ID NO: 59365 - protein, 380 aa, unidentified
  source 1..380: note = Prevotellaceae bacterium
  REGION 1..380: note = tr|A0A239R1M0|A0A239R1M0_9BACT Queuine tRNA-ribosyltransferase OS=Prevotellaceae bacterium MN60; OX = 1945887 GN=tgt PE=3 SV=1
MKFEVQHNDPYSSARTGLITTDHGQIKTPIFMPVGTVGSVKGVHFAELREQVKAQIILGNTYHLYLRPGLDILRKAGGLHKFNTWDRPILTDSGGFQVFSLTGIRKLKEEGCEFRSHIDGSKHIFTPENVMDTERVIGADIMMAFDECPPGESDYQYAKNSLKLTQRWLERCVKRFNETEPLYGYNQTLFPIVQGCTYKDLRQDAAKHVVDTLGKLNDGGGASIGGLAVGEPTEVMYEMIEVVNDILPKDRPRYLMGVGTPQNILEAIERGVDMFDCVMPTRNGRNAMLFTYEGTMNMRNKKWENDFSPIDPDGCEIDRIHTKAYLHHLFKAQELLAMQIASIHNLAFYLRLVTDARMHIEQGDFTQWKRGVIDNLGRRR

SEQ ID NO: 59366 - protein, 380 aa, unidentified
  source 1..380: note = Prevotellaceae bacterium
  REGION 1..380: note = tr|A0A1K1PE74|A0A1K1PE74_9BACT Queuine tRNA-ribosyltransferase OS=Prevotellaceae bacterium HUN156; OX = 1520830 GN=tgt PE=3 SV=1
MKFEVQHNDPYSSARTGLITTDHGQIKTPIFMPVGTVGSVKGVHFAELREQVKAQIILGNTYHLYLRPGLDILRKAGGLHKFNTWDRPILTDSGGFQVFSLTGIRKLKEEGCEFRSHIDGSKHIFTPENVMDTERVIGADIMMAFDECPPGESDYQYAKNSLKLTQRWLERCVKRFNETEPLYGYNQTLFPIVQGCTYKDLRQDAAKHVVDTLGKLNDGGGASIGGLAVGEPTEVMYEMIEVVNDILPKDRPRYLMGVGTPQNILEAIERGVDMFDCVMPTRNGRNAMLFTYEGTMNMRNKKWEDDFSPIDPDGCEIDRIHTKAYLHHLFKAQELLAMQIASIHNLAFYLRLVTDARMHIEQGDFTQWKRSVIDNLGRRR

SEQ ID NO: 59367 - protein, 386 aa, unidentified
  source 1..386: note = Pricia antarctica
  REGION 1..386: note = tr|A0A1G7I4E0|A0A1G7I4E0_9FLAO Queuine tRNA-ribosyltransferase OS=Pricia antarctica OX=641691; GN = tgt PE=3 SV=1
MITFAPIIRSLKFTLHHTDVHSKARAGSMVTDHGTIETPIFMPVGTVASVKSVHQRELKEDINPDIILGNTYHLFLRPKTDILKQAGGLHKFMGWDRNILTDSGGYQVYSLSNNRKIKEEGVKFKSHIDGSTHMFTPERVMEIQRTIGADIIMAFDECTPYPCDYKYAQRSMHMTHRWLERCITHLEKTPFEYGYSQTFFPIVQGSTYTDLRKQSAEYIAGVGAEGNAIGGLSVGEPAEEMYAMAEVVCDILPEDKPRYLMGVGTPINILENIALGVDMFDCVMPTRNARNGMLFTAHGTINIKNKKWEDDFSPVDEMGLTFVDTEYSKAYLRHLFAANEYLGKQIATIHNLGFYLWLVREARKHILAGDFLQWKAVMVKQMDKRL

SEQ ID NO: 59368 - protein, 381 aa, unidentified
  source 1..381: note = Primorskyibacter insulae
  REGION 1..381: note = tr|A0A2R8AWR1|A0A2R8AWR1_9RHOB Queuine tRNA-ribosyltransferase OS=Primorskyibacter insulae; OX = 1695997 GN=tgt PE=3 SV=1
MGQIGGMTQTSFTLHATDGKARTGVINTPRGDIRTPAFMPVGTAATVKAMMPESVRATGADILLGNTYHLMLRPTAERVDRLGGLHKFMNWDRPILTDSGGFQVMSLAGLRKLTEKGVTFKSHIDGSKHELTPERSMEIQRLLGSDIVMCFDECPALPADRDRIAESMRLSMRWAQRSRDAFGDRPGHMLFGIQQGGLEQDFREESAKALREIGFDGYAIGGLAVGEGQDAMFSVLDFAPDQLPQDKPRYLMGVGKPDDIVGAVKRGIDMMDCVLPSRSGRTGQAWTRRGQVNIKNARHQDDPRPLDEQCTCPACTNYSRAYLHHVYRSQEMISGMLLTWHNLHYFQEIMQGMRDAIAAGTFAEWEADFHALRAEGDIAPV

SEQ ID NO: 59369 - protein, 375 aa, Primorskyibacter sedentarius
  REGION 1..375: note = tr|A0A4R3JDT9|A0A4R3JDT9_9RHOB Queuine tRNA-ribosyltransferase OS=Primorskyibacter sedentarius; OX = 745311 GN=tgt PE=3 SV=1
MTRFSFSLDATDGAARTGVISTPRGDIRTPAFMPVGTAATVKAMMPESVRATGADILLGNTYHLMLRPGAERIAGLGGLHRFMNWDRPILTDSGGFQVMSLAELRKLTEKGVTFRSHIDGSKHELTPERSMEIQKLLGSDIVMCFDECPALPADDARVAESMRLSMRWAERSKQAFGDRPGHALFGIMQGGVTQHLREESAEALKAIGFDGYAVGGLAVGEGQEAMFGVLDYAPGMLPQDKPRYLMGVGKPDDIVGAVKRGIDMMDCVLPSRSGRTGQAWTRRGQVNIKNARHADDPRPLDEHCSCPACRGYSRAYLHHVFRAQEMISGMLLTWHNLHYYQEIMQGMRDAIAEGRFADWEAEFHRQREMGDIEKL

SEQ ID NO: 59370 - protein, 375 aa, Primorskyibacter sp.
  REGION 1..375: note = tr|A0A4R6A9H1|A0A4R6A9H1_9RHOB Queuine tRNA-ribosyltransferase OS=Primorskyibacter sp. SS33; OX = 2547833 GN=tgt PE=3 SV=1
MPRFGFTLHATDGTARTGTIATPRGEIRTPAFMPVGTAATVKGMLPESVRATGADILLGNTYHLMLRPGAERIERLGGLHRFMNWERPILTDSGGFQVMSLADLRKLTEEGVTFRSHIDGSRHTLTPERSMEIQRALGSDIVMAFDECPALPADRDRIAGSMRLSMRWARRSRDAFGDRPGHALFGIVQGGLERDLRTDSAEALREIGFDGYAIGGLAVGEGQAAMFDCLDYAPGLLPQDRPRYLMGVGKPDDIVGAVARGVDMMDCVLPSRSGRTGQAWTRRGQVNIKNARHADDPRPLDEDCTCPACRGYSRAYLHHVFRAGEMISGMLLTWHNLHYYQQIMAGMREAIAAGRFDEWQAAFHALRAEGDIDPV

SEQ ID NO: 59371 - protein, 372 aa, Prochlorococcus marinus
  REGION 1..372: note = sp|Q7VDR5|TGT_PROMA Queuine tRNA-ribosyltransferase; OS = Prochlorococcus marinus (strain SARG / CCMP1375 / SS120) OX=167539 GN=tgt PE=3 SV=1
MFDFKVLSRSTNTAGRVGRLSTPHGILSTPQFMPVGTLGTVKGITATQLKDTNAQMILANTFHLHLQPGEAIIKESGGLHSFMSWDQPILTDSGGYQVFSLGKLNKIDDFGVSFKSPRDGSHIELTPEKAIQIQMDLGADVVMAFDQCPPYPASKVEVEEACKRTHLWLERCVATHSKEDQALFGIVQGGCFLDLREESARRVASFHLPGIAIGGVSVGEPSDQIHKIVRHVAPLLPNEVPRYLMGIGTIREMAVAVANGVDFFDCVLPTRLGRHGTALVRDERWNLRNACFRNDYQPLDTTCVCETCTNYNRAYLHHLIRNDELLGLTLLSLHNLSHLIRFSRAMAVAIEDDCFSEDFAPWQKSSIAHYTW

SEQ ID NO: 59372 - protein, 372 aa, Prochlorococcus marinus
  REGION 1..372: note = sp|A2CCL1|TGT_PROM3 Queuine tRNA-ribosyltransferase; OS = Prochlorococcus marinus (strain MIT 9303) OX=59922; GN = tgt PE=3 SV=1
MFDFQINAHCSHTRARVGCFRTPHGSVNTPRFMPVGTLATVKGITATQLADTGAQMVLANTYHLHLQPGEGIVADAGGLHRFMGWDRPLLTDSGGFQIFSLADLNRIDDHGVVFRNPRNGSQIELTPERAIEIQMALGADVAMAFDQCPPYPASESDVEAACKRTHAWLERCSNTHQLTNQALFGIVQGGCFPHLREQSAQIVASFDLPGIAIGGVSVGEPVEDIHRIVRQVSPLLPQDRPRYLMGIGTLREIAIAVASGIDLFDCVLPTRLGRHGTALVAGERWNLRNARFREDHTPLDQSCTCTACRHHSRAYLHHLIRNEELLGLTLLSLHNLTQLIRFTSAISQAIQDDCFSEDFAPWQPDSAAHHTW

SEQ ID NO: 59373 - protein, 372 aa, Prochlorococcus sp.
  REGION 1..372: note = tr|A0A0A2CJM7|A0A0A2CJM7_9PROC Queuine tRNA-ribosyltransferase OS=Prochlorococcus sp. MIT 0701; OX = 1499502 GN=tgt PE=3 SV=1
MFDFQINAHCSHTRARVGCFRTPHGSVNTPRFMPVGTLATVKGITATQLADTGAQMVLANTYHLHLQPGEGIVADAGGLHRFMGWDRPLLTDSGGFQIFSLADLNRIDDHGVVFRNPRNGSQIELTPERAIEIQMALGADVAMAFDQCPPYPASESDVEAACKRTHAWLERCSNTHQHTSQALFGIVQGGCFPHLREQSAHIVASFDLPGIAIGGVSVGEPVEDIHRIVRQVSPLLPQDRPRYLMGIGTLREIAIAVASGIDLFDCVLPTRLGRHGTALVAGERWNLRNARFREDHTPLDQSCACTACRHHSRAYLHHLIRNEELLGLTLLSLHNLTQLIRFTSAISQAIQDDCFSEDFAPWQPDSAAHHTW

SEQ ID NO: 59374 - protein, 372 aa, Prochlorococcus sp.
  REGION 1..372: note = tr|A0A520Q277|A0A520Q277_9PROC Queuine tRNA-ribosyltransferase OS=Prochlorococcus sp. MED-G132; OX = 2518985 GN=tgt PE=3 SV=1
MFDFQINAQCSHTRARVGCFRTPHGSVNTPRFMPVGTLATVKGITATQLADTGAQMVLANTYHLHLQPGEGIVADAGGLHRFMGWDRPLLTDSGGFQIFSLADLNRIDDHGVVFRNPRNGSQIELTPERAIEIQMALGADVAMAFDQCPPYPASESDVEAACKRTHAWLERCSNTHQLTNQALFGIVQGGCFPHLREQSAQIVASFDLPGIAIGGVSVGEPVEDIHRIVRQVSPLLPQDRPRYLMGIGTLREIAIAVASGIDLFDCVLPTRLGRHGTALVAGERWNLRNARFREDHTPLDQSCTCTACRHHSRAYLHHLIRNEELLGLTLLSLHNLTQLIRFTSAISQAIQDDCFSEDFAPWQPDSAAHHTW

SEQ ID NO: 59375 - protein, 386 aa, unidentified
  source 1..386: note = Prochlorothrix hollandica
  REGION 1..386: note = tr|A0A0M2PS54|A0A0M2PS54_PROHO Queuine tRNA-ribosyltransferase OS=Prochlorothrix hollandica PCC 9006 = CALU 1027 OX=317619 GN=tgt PE=3 SV=1
MPLLNFQFHCQAQCSHSHARAGQWTTPHGVVETPRFMPVGTTATVKGVTPAQLVDTGAQMVLANTYHLHLQPGESIVAKAGGLHSFMQWSGPLLTDSGGFQVFSLSGLRKIQEDGVTFRSPRDGRTIHLTPEKSIEIQNQLGADVIMAFDECPPYPATREEVTAATDRTYRWLQRCIAAHQRSDQALFGIVQGGTFLDLRAKTAQSLVELDLPGYAIGGVSVGEPAAFIQAIVAATAPLLPVDKPRYLMGVGTYREMAQAIAAGIDLFDCVIPTRLARHGAVLSQGHRWNIKNAQYREDFTPLDDTCPCYTCQTFSRAYLNHLVRSREVLAYTLLSIHNITELVRFTQRIRASILDDRFTEEFAPYLQPDPLPSEEPFVSSLLQQS

SEQ ID NO: 59376 - protein, 376 aa, Prolinoborus fasciculus
  REGION 1..376: note = tr|A0A2U3MG05|A0A2U3MG05_9NEIS Queuine tRNA-ribosyltransferase OS=Prolinoborus fasciculus; OX = 1056810 GN=tgt PE=3 SV=1
MKFEKLGQSGRARRGRLTLEHGVVETPMFMPVGTYGTVKGLLPRDIKEIKSQVILGNTFHLYLRPGLDVIREHGGLHEFMKWNSPILTDSGGFQVFSLGAMRKIKEEGVTFRSPIDGSKVFLSPEISMDIQHTLNSDIVMIFDECTPYPATHEEAQKSLQLSLRWAKRCKTQHHDVLKNRNALFGIIQGGMYEDLRDESLKGLLEIDFDGYAIGGLSVGEPKEEMIKVLDYLPEKMPADKPRYLMGVGKPEDIVEAVRRGVDMFDCVMPTRNARNGHYFVTDGLVRIRNAKYRHDQSPLDPHCDCYTCTNFTRAYLFHLEKCGEMLGSMLGTIHNLRYYLRLTEAMRDALDNGTFDEFVHDFYARRGLEVPPCPQD

SEQ ID NO: 59377 - protein, 376 aa, unidentified
  source 1..376: note = Prolixibacter denitrificans
  REGION 1..376: note = tr|A0A2P8CKF3|A0A2P8CKF3_9BACT Queuine tRNA-ribosyltransferase OS=Prolixibacter denitrificans; OX = 1541063 GN=tgt PE=3 SV=1
MKFELQYTLQGTKARAGKLYTAHGEIETPIFMPVGTVGSVKGVHFRDLKDDVNAQIILGNTYHLYLRPGMDTIEKAGGLHKFNGWDGPILTDSGGFQVFSLGDIRKLSEEGAKFQSHIDGSRHMFTPENVVDIQRTIGADIIMAFDECPPGDSDFDYAKKSLELTQRWLERCVKRFDETEPKYGYDQTLFPIVQGGIYPELRKKAAEHVISFERDGYAIGGLSVGEKEEDMYSTIEVVNEILPKDKPRYLMGVGTPVNILEAIDRGVDMFDCVMPTRNGRNGMLFTSEGIINIKNKKWENDFSPVDPNGTSFVDHHYTRAYLRHLFQAKEMLGAQIGSLHNLAFYLWLVGEAREQIKAGTFKQWKNVMVEKVSRRL

SEQ ID NO: 59378 - protein, 375 aa, unidentified
  source 1..375: note = Prolixibacteraceae bacterium
  REGION 1..375: note = tr|A0A399SVT8|A0A399SVT8_9BACT Queuine tRNA-ribosyltransferase OS=Prolixibacteraceae bacterium XSD2 OX=2305463 GN=tgt PE=3 SV=1
MNFLLEKTTDNSRARAGVITTDHGKIETPIFMPVGTAGSVKGIHTRDIRDDIKAEIILGNTYHLYLRPGIDVIEKAGGLHKFNGWDRPILTDSGGFQVFSLGDLRKLTEEGARFQSHIDGSYHQFTPESVMDIQRSIGADIMMAFDECTPGDADYDYAKKSMELTRRWLDRCFKRFNSTEPKYGYSQSLFPIVQGATYADLRRQSVAHVRNFDANGYAIGGLSVGETEEEMYEMTEVVTADLPQDKPRYLMGVGTPVNILEGIHRGVDMFDCVMPTRNGRNGMLFTSEGIINIRNQKWENDHSPIDPNGTSFVDQYSKAYLRHLVISKEMLGAQIASQHNLAFYLWLVKTAREKILGGDFVSWKNEMVLKLKHRL

SEQ ID NO: 59379 - protein, 376 aa, unidentified
  source 1..376: note = Prolixibacteraceae bacterium
  REGION 1..376: note = tr|A0A3D5Z045|A0A3D5Z045_9BACT Queuine tRNA-ribosyltransferase OS=Prolixibacteraceae bacterium; OX = 2053594 GN=tgt PE=3 SV=1
MHFELKHTAAGTKARAGFITTDHGNIETPIFMPVGTAGSVKGIHKRDLKEDIKAQIILGNTYHLYLRPGLEIIEQAGGLHKFNGWDGPILTDSGGYQVFSLGDIRKLSEEGAKFQSHIDGSSHLFTPEKVMDIQRTIGADIMMAFDECTPGDADYEYARKSMEMTQRWLDRCFNQFEKTSPKYGHSQSLFPIVQGAVYPDLREIAARNVLQYKSDGYAIGGLSVGESEKDMYAMIEVVNEILPENKPRYLMGVGTPVNILEGIDRGIDMFDCVMPTRNGRNGMLFTQKGIMNMRNKKWADDFSPVDPDGTSFVDHHYSRAFLRHLVISGEMLGAEIASQHNLAFYLWLVKEARRQILANTFPEWKAKMVQQLSVRL

SEQ ID NO: 59380 - protein, 417 aa, unidentified
  source 1..417: note = Propionibacteriaceae bacterium
  REGION 1..417: note = tr|A0A255E2S7|A0A255E2S7_9ACTN Queuine tRNA-ribosyltransferase OS=Propionibacteriaceae bacterium NML 160184 OX=2016506 GN=tgt PE=3 SV=1
MNPFGFEVDARLPDSPGRAGVISTPHGPVATPAFIPVGTKATVKAVLPDSVAGLGGQAVLANAYHLYLQPGSDIVDEAGGLAAFMNWRGPTFTDSGGFQVMSLGAGFKKVLAMNTAGLANDDVIAEGKERRALVDDDGVTFKSHLDGTQHRFTPEVSMKVQHELGADIIFAFDELTTLMNTRRYQEEALDRTTRWALRCLSAHAALTDQRQHRPYQALFGVIQGAQYEDLRRQACRDLALMEDPDSGQRFDGFGVGGALEKENLGTIVGWCSEELDRHDGDRPRPRHLLGISEPEDVFAAVEAGADTFDCVQPSRVARNAAVYTDRGRFNVNTAAHRRAFAPIDEDCDCYTCQHYTRAYLHHLFKAKEMLASTLATIHNERWTVRLVDRIRAALRAGDFHDFRDEFLAGWTPPNRSN

SEQ ID NO: 59381 - protein, 419 aa, unidentified
  source 1..419: note = Propionibacteriaceae bacterium
  REGION 1..419: note = tr|A0A255FW80|A0A255FW80_9ACTN Queuine tRNA-ribosyltransferase OS=Propionibacteriaceae bacterium NML 030167 OX=2016500 GN=tgt PE=3 SV=1
MSAGDYPPGVPFSFEVRDRLPDRQGRTGIIHTPHGEIQTPAFIAVGTQATVKAVLPEAMRDLGAQAVLANAYHLYLQPGADIVDEAGGVGAFMNWPGPTFTDSGGFQVMSLGVGFKKVLSMDSSRVSDDDVIAEGKERLAHVDDDGVTFKSHLNGDRHRFTPEISMRVQNQLGADIIFAFDELTTLMNTRAYQEESLERTRLWAERCLAAHRELTAERADKPYQALFGVLQGAQYEDLRRKAARDLGSMEVSGQRFDGFGIGGALEKENLGTIVDWVSSELPEDRPRHLLGISEPDDFFAAIAAGADTFDCVQPSRVARNAALYTADGRFNVNTAANRRNFNPIDESCDCYTCAHYTRAYLHHLFKAREMVASTLATIHNERFTVRLVDDIRASIGAGEFDAFKTEFLGRFYRGAGSKA

SEQ ID NO: 59382 - protein, 418 aa, Propionibacterium acidifaciens
  REGION 1..418: note = tr|U2QB70|U2QB70_9ACTN Queuine tRNA-ribosyltransferase OS=Propionibacterium acidifaciens F0233 OX=553198 GN=tgt PE=3 SV=1
MTSQDDFGFTPGARLPNGLGRTGTITTPHGTVRTPAFVVVGTKAAVKAMLPEQVAAAGGQAVLANAFHLYLQPGPGIVDAAGGLGRFMGWPGPTLTDSGGFQVMSLGSGFRKTLAMDTTGLQDDDVIAAGHERRARVDDDGVDFKSPLDGSPHRFTPEVSMGVQHRLGADIMFAFDELTTLFNTRGYQVEALERTRRWARRCLDEHARLTGARRHRPYQALFGIIQGAQYEDLRRRACRELSAMRSSDGGLPFDGYGIGGAIEKARLGEIVGWCADELPDDRPRHLLGISEPDDLFAACAAGADTFDCVNPSRVARNAAIYTADGRYNVTTAANRRAFVPLEDGCDCYTCTHCTRAYLHHLFKAHEINGKVLATVHNERFTVRLVDRIRRSMADGDFEDFRAEWLGRYNANGGRAASP

SEQ ID NO: 59383 - protein, 418 aa, Propionibacterium acidifaciens; identical to SEQ ID NO: 59382
  REGION 1..418: note = tr|A0A3G5HU12|A0A3G5HU12_9ACTN Queuine tRNA-ribosyltransferase OS=Propionibacterium acidifaciens; OX = 556499 GN=tgt PE=3 SV=1

SEQ ID NO: 59384 - protein, 416 aa, Propionibacterium australiense
  REGION 1..416: note = tr|A0A383S9J4|A0A383S9J4_9ACTN Queuine tRNA-ribosyltransferase OS=Propionibacterium australiense; OX = 119981 GN=tgt PE=3 SV=1
MAFFDHFGFTVRTTLSNGRGRTGVITTPHGTIRTPAFVVVGTKAAVKAMLPDQVAAVGGQAVLANAFHLYLQPGADIVDEAGGLGSFMAWTGPTFTDSGGFQVMSLGSGFKKTLAMDVSGLQNDDVIAEGHERQAHVDDDGVNFKSPLDGSRHRFTPEVSMRVQHGLGADIMFAFDELTTLFNTRGYQVEALERTRRWAQRCLDEHVRLTGSRRHRPYQALFGVIQGAQYEDLRRKACRDLSTMRSADGDRPFDGYGIGGAMEKARLGEIVGWCADELPDDRPRHLLGISEPEDLFAACAAGADTFDCVNPSRVARNAAIYTADGRYNVTTAANRRAFVPLEDGCDCYTCTHCTRAYLHHLFKAREIDGKVLATIHNERFTVRLVDQIRQSMEDGSFEDFRAEWLGRYDATGRRTR

SEQ ID NO: 59385 - protein, 431 aa, Propionibacterium cyclohexanicum
  REGION 1..431: note = tr|A0A1H9Q733|A0A1H9Q733_9ACTN Queuine tRNA-ribosyltransferase OS=Propionibacterium cyclohexanicum OX=64702 GN=tgt PE=3 SV=1
MPGASPSEFSFRVDHELPNGLGRTGILATPHGTIETPAFVVVGTKAAVKAMLPEQVRQAQGQAVLANAFHLYLQPGPDLVDAAGGLGRFMNWPGPTFTDSGGFQVMSLGVGFKKVLAMDVTGLQDDDIIAPGTTRNARVDDDGVTFKSPLDGSKHRFTPEVSMSVQHRLGADIMFAFDELTTLMNTRSYQEESVARTQRWALRCLDEHVRLTDERVGKPYQALFGVVQGAQFEDLRRLACRGLVAARAGVSGHEDQGFDGYGIGGAIEKRRLGEIVSWCASELPRDKPRHLLGISEPDDLFAACAAGADTFDCVNPSRVARNAAIYTADGRFNVTTAANRWAFTPLEEGCDCYTCQHYTRAYLHHLFRAKEIAAKMLATIHNERFTIRLVDDIRHAMRQGDFEAFRTEFLGRFYAGRPEQARREAAGTDRS

SEQ ID NO: 59386 - protein, 422 aa, Propionibacterium freudenreichii
  REGION 1..422: note = tr|D7GCZ4|D7GCZ4_PROFC Queuine tRNA-ribosyltransferase OS=Propionibacterium freudenreichii subsp. shermanii (strain ATCC 9614 / DSM 4902 / CIP 103027 / NCIMB 8099 /CIRM-BIA1) OX=754252; GN = tgt PE=3 SV=1
MCAAKSCDFSFSVDHVLPNGLGRSGTITTPHGPISTPAFVVVGTKATVKTVTPEQMDQAGAQAVLANAFHLYLQPGPDIVDEAGGLGRFMNWPGPSFTDSGGFQVMSLGVGFKKVLAMDVTGMQNDDVIAEGKQRDAQVDEDGVTFKSPLDGSTHRFTAEVSMGVQHQLGADIMFAFDELTTLMNTRGYQEDSVRRTQRWAQRCVDEHFRLTDARSGHPYQALFGVVQGAQYEDLRREACRGLRQTRAQVPGHEHEGFDGYGIGGAIEKQHLGDIVGWCAEELPDDKPRHLLGISEPDDLFAACAAGADTFDCVNPSRTARNGAIYTARGRYNVTTAANRRAFVALEEGCDCYTCTHYTRAYLHHMFKAHEFLGKTLATIHNERFTIRLVDSIRHAVRGGEFDALRTEFLGSFYGGATPGRA

SEQ ID NO: 59387 - protein, 422 aa, Propionibacterium freudenreichii; identical to SEQ ID NO: 59386
  REGION 1..422: note = tr|A0A0A8PT59|A0A0A8PT59_9ACTN Queuine tRNA-ribosyltransferase OS=Propionibacterium freudenreichii OX=1744 GN=tgt PE=3 SV=1

SEQ ID NO: 59388 - protein, 520 aa, unidentified
  source 1..520: note = [Propionibacterium] humerusii
  REGION 1..520: note = tr|E4HM87|E4HM87_9ACTN Queuine tRNA-ribosyltransferase OS=[Propionibacterium] humerusii HL044PA1 OX=765109 GN=tgt PE=3 SV=1
MPVKAMVRANTFLQSAQVWPFMRGWTIGARRIAAKDIRSATVPNAPIRGMRVAAKAPPNCTERMAMNTKIAPRINATITTWLPSSLPGWACEPEVTTRFGHPARMATMPFDFEVTSRLDDACGRTGIIHTPHGSIETPAFVVVGTKATVKSLLPESVAQLGAQAVLANAYHLFLRPGPELVDEAGGLGRFMNWSGPTFTDSGGFQVLSLGAGFKKTLAMDVSQLTQADVIAADADRKAMVDDDGVTFRNPLNGDSHRFTPEVSMGIQHHLGADVMMAFDELTILMNTRAYQEEALERTRRWAERCLAEHRRLTEVRPEKPYQALYGVIQGAQYEDLRRKACRDLAAMDVDGQRFDGFGLGGAIEKVNLGRIVTWCAEELPEDRPRHLLGISEPDDLFAACRAGADTFDCVNPSRVARNAAIYTVDGRYNVDTARFRRDFGPLEDGCDCYTCTHYSRAYIHHLFKAKEMLANTLATIHNERWTVRLVDQIRVAMRSGDLDAFEVEFMGRWNANGGRLARVG

SEQ ID NO: 59389 - protein, 413 aa, unidentified
  source 1..413: note = [Propionibacterium] humerusii
  REGION 1..413: note = tr|F3P043|F3P043_9ACTN Queuine tRNA-ribosyltransferase OS=[Propionibacterium] humerusii P08 OX=999892 GN=tgt PE=3 SV=1
MPFDFEVTSRLDDACGRTGIIHTPHGSIETPAFVVVGTKATVKSLLPESVAQLGAQAVLANAYHLFLRPGPELVDEAGGLGRFMNWSGPTFTDSGGFQVLSLGAGFKKTLAMDVSQLTQADVIAADADRKAMVDDDGVTFRNPLNGDSHRFTPEVSMGIQHHLGADVMMAFDELTILMNTRAYQEEALERTRRWAERCLAEHRRLTEVRPEKPYQALYGVIQGAQYEDLRRKACRDLAAMDVDGQRFDGFGLGGAIEKVNLGRIVTWCAEELPEDRPRHLLGISEPDDLFAACRAGADTFDCVNPSRVARNAAIYTVDGRYNVDTARFRRDFGPLEDGCDCYTCTHYSRAYIHHLFKAKEMLANTLATIHNERWTVRLVDQIRVAMRSGDLDAFEVEFMGRWNANGGRLARVG

SEQ ID NO: 59390 - protein, 430 aa, unidentified
  source 1..430: note = [Propionibacterium] namnetense
  REGION 1..430: note = tr|F9NTU1|F9NTU1_9ACTN Queuine tRNA-ribosyltransferase OS=[Propionibacterium] namnetense SK182B-JCVI OX=1051006 GN=tgt PE=3 SV=1
MQTGVNDAIRTSCKNDPMTFGFEVTCRLDDACGRTGIIHTPHGSIETPAFVVVGTKATVKSVLPESVAQLGAQAVLANAYHLFLQPGPELVDEAGGLGRFMNWSGPTFTDSGGFQVLSLGAGFKKTLAMDVSQLTEADVIAADADRKAMVDDDGVTFRSPLNGDLHRFTPEVSMGIQHHLGADIMFAFDELTTLMNTRGYQEEALERTRRWAERCLAEHHRLTEVRPEKPYQALFGVIQGAQYEDLRRRACRDLAGMEVDGQRFDGFGLGGAIEKVNLGRIVTWCAEELPEDRPRHLLGISEPDDLFAACRAGADTFDCVNPSRVARNAAIYTVDGRYNVDTARFRRDFGPLEDGCDCYTCTHYSRAYIHHLFKAKEMLANTLATIHNERWTVRLVDQIRGAMRSGDLDAFEAEFMGRWNANGGRLTRAD

SEQ ID NO: 59391 - protein, 415 aa, Propionibacterium sp.
  REGION 1..415: note = tr|A0A375HY40|A0A375HY40_9ACTN Queuine tRNA-ribosyltransferase OS=Propionibacterium sp. JV5; OX = 1962131 GN=tgt PE=3 SV=1
MAFSDDFGFTVRTRLPNGRGRTGVITTPHGTIRTPAFVVVGTKAAVKAMLPDQVAAVGGQAVLANAFHLYLQPGADIVDEAGGLGSFMGWTGPTFTDSGGFQVMSLGSGFKKTLAMDVTGLQNDDVIAEGHERQAHVDEDGVNFKSPLDGSRHRFTPEVSMRVQHGLGADIMFAFDELTTLFNTREYQVEALERTRRWAQRCLDEHVRLTGSRRHRPYQALFGVIQGAQYEDLRRRACRDLSAMRSADGDRPFDGYGIGGAIEKARLGEIVGWCADELPEDRPRHLLGISEPEDLFAACAAGADTFDCVNPSRVARNAAIYTADGRYNVTTAANRRAFVPLEEGCDCYTCTHCTRAYLHHLFKAREIDGKVLATIHNERFTVRLVDQIRRSMEDGSFEDFRAEWLGRYRSAASTR

SEQ ID NO: 59392 - protein, 413 aa, Propionibacterium sp.
  REGION 1..413: note = tr|U7IV04|U7IV04_9ACTN Queuine tRNA-ribosyltransferase OS=Propionibacterium sp. KPL2000; OX = 1203629 GN=tgt PE=3 SV=1
MSFGFEVTSRLDDACGRTGIIHTPHGSVETPAFVVVGTKATVKSLLPESVAQLGAQAVLANAYHLFLQPGPDLVDEAGGLGRFMNWTGPTFTDSGGFQVLSLGAGFKKTLAMDVSQLTEDDVIAADADRKAMVDDDGVTFRSPLNGDLHRFTPEVSMGIQHCLGADIMFAFDELTTLMNTRSYQEEALERTRRWAERCLAEHRRLTEARVGKPYQALFGVVQGAQYEDLRRKACRDLSQMEIDGQRFDGFGLGGAIEKVNLGRIVTWCAEELPEDRPRHLLGISEPDDLFAACRAGVDTFDCVNPSRVARNAAIYTVDGRYNVNTARFRRDFGPLEEGCDCYTCTHYSRAYLHHLFKAREMLANTLATIHNERWTVRLVEQIRAAMRHGELDALETDFMGRWNINGGRLVKAN

SEQ ID NO: 59393 - protein, 413 aa, unidentified
  source 1..413: note = Propioniciclava sinopodophylli
  REGION 1..413: note = tr|A0A4Q9KE80|A0A4Q9KE80_9ACTN Queuine tRNA-ribosyltransferase OS=Propioniciclava sinopodophylli; OX = 1837344 GN=tgt PE=3 SV=1
MSGPDADAPFGLTPGTVLPNGRGRTGVITTPHGEIATPAFIAVGTKATVKAVTPEAVAGLGAQAVLANAYHLYLQPGSDLIDAAGGLGRFMNWPGPTFTDSGGFQVMSLGVGFRKVLAMDAAGVADDDVIAEGKERLAHVDEDGVTFKSHLNGDLHRFTPEVSMRVQHEIGADIMFAFDELTTLKNTRGYQEESVERTHRWAARCLAAHRALTDERVGKPYQALFGVVQGAQYEDLRRKAASGLAALEVDGQRFDGFGIGGALEKENLGTIVGWVADELPFDKPRHLLGISEPDDLFAAIENGADTFDCVNPSRVARNSAVYTADGRYNLLTAANRRHLGPIEDDCDCYTCAHYSRAYLHHLFKAKEMLSATLATIHNERFTVRLVDHIRASIEQGRFDAFRAAFLGRFYARR

SEQ ID NO: 59394 - protein, 435 aa, Propioniciclava tarda
  REGION 1..435: note = tr|A0A4Q9KML3|A0A4Q9KML3_9ACTN Queuine tRNA-ribosyltransferase OS=Propioniciclava tarda OX=433330; GN = tgt PE=3 SV=1
MGCCARRPPGSSRWPSCRPSVPAESDAARPFGFSVASTLPDALGRTGVITTPHGEIKTPAFIVVGTKATVKAVVPEAVAAVGGQAVLANAYHLYLQPGSDIVDAGGGLGAFMNWPGPTFTDSGGFQVMSQGVGFKKVLAMDTAGLAASDIVAPNKERMAHVDDDGVTFKSFLNGSLHRFTPEVSMRVQHELGADIMFAFDELTTLADSRAYQEASVERTHRWAARCLAAHGELTRDRVGKPYQALFGVVQGAQYEDLRRRAASGLAALEVDGRRFDGFGLGGAIEKENLGRIVGWCCEELPADKPRHLLGISEPDDFFAAIEAGADTFDCVNPSRVARNGAIYTADGRYNVNTAANRRAFAPLEAGCDCYTCAHYTRAYLHHLFKAKEMLASTLATIHNERFTVRLVDDIRASIESGSFEAFRDEFLGRFYAGRR

SEQ ID NO: 59395 - protein, 408 aa, Propionicimonas paludicola
  REGION 1..408: note = tr|A0A2A9CRB5|A0A2A9CRB5_9ACTN Queuine tRNA-ribosyltransferase OS=Propionicimonas paludicola; OX = 185243 GN=tgt PE=3 SV=1
MADFGFTVGTVLDNGLGRTGVINTPHGPIKTPAFIAVGTKATVKAVLPESVSELGAQAVLANAYHLYLQPGSDLVDEAGGLAAFMNWPGPTFTDSGGFQVMSLGVGFKKVLAMDATGLANDDVIAEGKNRLAHVDDDGVTFTSHLNGDRHRFTPEVSMQIQHQLGADIMFAFDECTTLLNTRGYQERSLARTQAWAVRCLDEHARLTAERVGKPYQALFGVVQGAQYEDLRRKAARDLAELETSGQSFDGFGIGGALEKENLGTIVGWVCSELPVDKPRHLLGISEPDDFFAAIEAGADTFDCVMPSRVARNAAIYTLDGRFNVNTAANRRNFAPLDAECDCYTCANYSRAYLHHLFKAKEMLASTLATIHNERFTVRLVDDIRASIEEGRFAEFKAAFLGRFYSSAR

SEQ ID NO: 59396 - protein, 426 aa, Propioniferax innocua
  REGION 1..426: note = tr|A0A542ZRD2|A0A542ZRD2_9ACTN Queuine tRNA-ribosyltransferase OS=Propioniferax innocua OX=1753; GN = tgt PE=3 SV=1
MSDDAQSRGFGFSIGARLSETSSLTDAGGRTGVIETPHGTIRTPAFIAVGTKATVKTVTPEQVAEVGAQAVLANAYHLYLQPGSDLIDEAGGLGAFMHWDGPTFTDSGGFQVMSLGVGFKKIIQMEAGQGPDDEAMAADRERLAVVDDDGVTFKSHLDGTKHRFTPEVSMRVQHQIGADIMFAFDELTTLMNTRGYQEKSLERTRLWAERCLAEHRRLTEERSHRPYQALFGVLQGAQYEDLRRKAARDLGSMEIDGQMFDGFGIGGALEKHNLGTIVDWVCSELPEDKPRHLLGISEPEDFFAAIEAGADTFDCVQPSRVARNAAIYHPDGRFNINTAPNRRNFEPIDPGCSCYTCRNYSRAYLHHLFKAKEMLGFTLATIHNEHFTIDLVDRIRASIENGDFAEFRDEFLGRFHARRAGVSSDA

SEQ ID NO: 59397 - protein, 420 aa, Propionimicrobium lymphophilum
  REGION 1..420: note = tr|S2WGZ9|S2WGZ9_9ACTN Queuine tRNA-ribosyltransferase OS=Propionimicrobium lymphophilum ACS-093-V-SCH5 OX=883161 GN=tgt PE=3 SV=1
MTSFEASSKPASQEDFGFEVTATLSNGLGRTGLISTPHGKIETPAFIVVGTKATVKSVLPETVRDLGAQAVLANAFHLYLQPGPDLVDEAGGLGKFMNWQGPTFTDSGGFQVLSLGAGFKKVLAMDVTGMQNDEVIAEGKERKAHVDEDGVNFKSPLDGSMHRFTPEVSMCVQHKLGADIMFAFDELTTLLNTREYQVESIARTQRWAQRCLAEHKRLTLERKGKPYQALFGVVQGAQYEDLRRKASRDLAATESDGWTFDGFGLGGALEKHNLAKIVTWMAQELPDNKPRHLLGISEPDDLFAACEVGADTFDCVNPSRVARNAAIYTADGRYNITNSRFRRDFSPLEEGCDCYTCANYSRAYVRHLFKAKEMLANTLATIHNERFTVRLVDQIRSSIRNGDFYEFKGEMLGRFYQKKS

SEQ ID NO: 59398 - protein, 370 aa, Propionispira arboris
  REGION 1..370: note = tr|A0A1H6W725|A0A1H6W725_9FIRM Queuine tRNA-ribosyltransferase OS=Propionispira arboris OX=84035; GN = tgt PE=3 SV=1
MTAIKYELIKECSKTGARAGKIHTPHGSFDTPMFMPVGTQASVKSVSPEELKDMGAGVILSNTYHLFLRPGEDLVKEAGGLHKFMNWDQAILTDSGGFQVFSLGDLRKITEDGVTFRSHIDGSKKFLSPEVATKIQMDLGADIIMAFDECVPYPADHDYTKQSTQRTTRWAKRCKDTLTRTDQGLFGIVQGGMYKDLRTMSVNDLKEMDFPGYAIGGLSVGEPKDLMYEILEHTVCQLPKDKPRYLMGVGTPDCLVEGVQRGIDMFDCVFPTRVARNGTAMTWMGRLVIKNAEYTRDFRPIDEHCGCYACRNYSRAYIRHLVRVNEIFGLRLMTIHNLYFLLDFMRKMRESIMEDHFVEFQNKFLANYSH

SEQ ID NO: 59399 - protein, 369 aa, Propionispora hippei
  REGION 1..369: note = tr|A0A1M6AHK9|A0A1M6AHK9_9FIRM Queuine tRNA-ribosyltransferase OS=Propionispora hippei DSM 15287; OX = 1123003 GN=tgt PE=3 SV=1
MAVQYELIKRCSKTGARAGRLHTPHGTFDTPIFMPVGTQATVKAMSPHELKEMGAGIILSNTYHLYLRPGHELVAEAGGLHKFMNWDGGILTDSGGFQVFSLGPLRKITEEGVTFRSHIDGSKQFLSPERATEVQMALGADIIMAFDECVPYPADHDYARKSTERTTRWAERCKGAHTRADQALFGIVQGGMYKDLRSMSVRDLVSLDFPGYAIGGLSVGEPKDLMYEMLEHTVPLLPVNKPRYLMGVGTPDCLVEGVLHGIDMFDCVFPTRVARNGTVMTHQGRLVVKNAEYTRDFRPIDSDCGCYTCRNFSRAYIRHLLKTEEIFGLRLTTIHNLYFLIHFMKKMRQAIIEDRFLEFRAEFWSQYQK

SEQ ID NO: 59400 - protein, 369 aa, Propionispora sp.
  REGION 1..369: note = tr|A0A0K8J8Y7|A0A0K8J8Y7_9FIRM Queuine tRNA-ribosyltransferase OS=Propionispora sp. 2/2-37; OX = 1677858 GN=tgt PE=3 SV=1
MAVRYELIKQCSQTGARAGRLHTPHGTFDTPIFMPVGTQATVKAMSPHELKAMGAGIILSNTYHLYLRPGHELVAEAGGLHAFMQWDGGILTDSGGFQVFSLGPLRKITEEGVTFRSHLDGSKHFLSPERATEVQMSLGADIIMAFDECVPYPAEHDYAKASTERTTRWAERCKAVHARDKQALFGIVQGGMFKDLRSMSARDLVELDFPGYAIGGLSVGEPKELMYEMLEHTVPLLPITKPRYLMGVGTPDCLVEGVLHGIDMFDCVFPTRVARNGTVMTSQGRLVVKNAEFARDFRPIDSQCGCYACRNFSRAYIRHLLKTEEIFGLRLTTTHNLYFLIHFMKDMRQAIIEDRFLEFRVAFWSHYQR

SEQ ID NO: 59401 - protein, 369 aa, Propionispora vibrioides
  REGION 1..369: note = tr|A0A1H8NXG3|A0A1H8NXG3_9FIRM Queuine tRNA-ribosyltransferase OS=Propionispora vibrioides; OX = 112903 GN=tgt PE=3 SV=1
MAVQYELIKRCSKTGARAGRLHTPHGTFDTPIFMPVGTQATVKAMSPHELKEMGAGIILSNTYHLYLRPGHELVAEAGGLHKFMNWDGGILTDSGGFQVFSLGPLRKITEEGVTFRSHIDGSKQFLSPERATEVQMALGADIIMAFDECVPYPADHDYARKSTERTTRWAERCKGAHTRADQALFGIVQGGMYKDLRSMSVRDLVSLDFPGYAIGGLSVGESKDLMYEMLEHTVPLLPVNKPRYLMGVGTPDCLVEGVLHGIDMFDCVFPTRVARNGTVMTHQGRLVVKNAEYTRDFRPIDSDCGCYTCRNFSRAYIRHLLKTEEIFGLRLTTIHNLYFLIHFMKKMRQAIIDDRFLEFRAEFWSQYQK

SEQ ID NO: 59402 - protein, 369 aa, Propionivibrio dicarboxylicus
  REGION 1..369: note = tr|A0A1G8BQQ1|A0A1G8BQQ1_9RHOO Queuine tRNA-ribosyltransferase OS=Propionivibrio dicarboxylicus; OX = 83767 GN=tgt PE=3 SV=1
MKFELITTDGGARRGRLTLAHGCVETPVFMPVGTYGTVKAMTPRDLDEIGAQICLGNTFHLWLRPGLDVIGKHGGLHRLMGWDKPILTDSGGFQVFSLGALRKITEEGVKFSSPIDGRKLFLTPEESMRIQHTLNSDIVMIFDECTPFPATHVQAADSMRMSLRWAKRSYDEHQRLGNANALFGIVQGGMYEDLRDESLAGLDTIGFDGMAIGGLSVGEPKEEMARILAHTAPRLPTHKPRYLMGVGTPEDLVNGVQAGIDMFDCVMPTRNARNGHLFTRFGDVRIKNAQYKDDLRPLDASCDCYTCRNFSRAYLHHLFRVGEILGAQLNTIHNLRYYQTLMRELREAIAAGTLAETVARFHAGRAGQE

SEQ ID NO: 59403 - protein, 379 aa, Prosthecobacter debontii
  REGION 1..379: note = tr|A0A1T4X4H4|A0A1T4X4H4_9BACT Queuine tRNA-ribosyltransferase OS=Prosthecobacter debontii; OX = 48467 GN=tgt PE=3 SV=1
MFELLATDPSSSARRGRLTTPHGVIETPIFMPVGTQATVKAVHPQELRSLDAQIILGNTYHLWVRPGTEIIGAAGGLHKFMNWDRPILTDSGGFQVFSLAKLRKLKEEGCYFNNHVDGTPMFLGPETAMEIQATLGSDIAMLFDECTPWPCKHEDARSSMELTLRWARRCRDWIDKHQPQTGGGAQLHFGIVQGSTFEDLRQRCAREMVAMGFSGYAIGGLSVGEPEEDMMRIAEWTCPLLPQNQARYAMGLGTPPQIVELIARGIDMFDCVLPTRLARNGTAYTHDGPMNLRNNKFAKDFRPLSEDTHPLCQGFSRAYIRHLINTQEVLGLRLISLHNLHFYLSLASRARLAIEQGCFAEFRAEVVARYQNRPETSDT

SEQ ID NO: 59404 - protein, 571 aa, Prosthecobacter debontii
  REGION 1..571: note = tr|A0A1T4XTC1|A0A1T4XTC1_9BACT Queuine tRNA-ribosyltransferase OS=Prosthecobacter debontii; OX = 48467 GN=tgt PE=3 SV=1
MSPSRLDFRLEARASGSRARAATFRTLHTTVRTPLFMPVGTQATVKAQLPESLHESGSQILLANTYHLLLRPGPEVFQKMGGIHPFMQWPGSVLTDSGGYQIFSLPHSRSMREEGAVFQSYVDGRRILLSPELSIETQMAIGSDIMMVLDQCIPSTADEKAARAALQITQRWAVRSLAARKDSPQSMFGIVQGALYPHLRQESAEGLMQLPFDGFAIGGLAVGEAKQEREDTCEVTAALLPEDRPRYLMGVGTPLDVLEAVHRGVDMFDCIIPTQVAKHGTAFTSRGMVQIRRTVHKFSDRPLDPACTCSACQKYSRAYLHHLVKTQEPLGWQLMGQHNIHFYHQLMREIRQSILEDCFLKLYEEKRQILQAEDLDFPVTQERPPVISPDHGHRIGDYELQLDPGKPARIVHVTSGKTVPTEADIHQWPQAAQLALHLRLPADQSPEEATPLIIWDLDLGAADSALAAILVYEEESSKGPVRPMHLVSLTEDVSALRLALSHKRYFAYLRHGAADTVLRRGHWKSRYREGLSWTLLQGPLAAIQAQAPGPAEMILGLPETISEPISTTASA

SEQ ID NO: 59405 - protein, 571 aa, Prosthecobacter fusiformis
  REGION 1..571: note = tr|A0A4R7RR84|A0A4R7RR84_9BACT Queuine tRNA-ribosyltransferase OS=Prosthecobacter fusiformis; OX = 48464 GN=tgt PE=3 SV=1
MSPSRLDFQLEAQATGSRARAATFRTLHSTVRTPLFMPVGTQATVKAQLPETLHESGSQILLANTYHLLLRPGPEVFKRMGGIHQFMQWPGSVLTDSGGYQIFSLPHSRSMTEAGAVFQSYVDGQRILLSPELSIQTQMAIGSDIMMVLDQCIPSTADEAAARAALQVTQRWAVRSLAAREDSPQSMFAIVQGALYPHLRRESAEGLMQLPFDGFAIGGLAVGEEKAEREDTCEMTACLLPQDRPRYLMGVGTPLDVLEAVHRGVDMFDCIIPTQVAKRGSLFTSRGIVQLRRSVYKFSEERLDPDCTCPVCAKYTRAYLHHLTKTQEPLGWQLMGQHNIHFYHQLMREIRQSILEDRFLKLYHEKRQILQVEDVDHPITTVKPPVISPDHAQRMGDYELELRAGEAARIFHIGTGQTVNTDVTAAAWTEDAHLATHLRLPAGESAEESMPLIVWDIGLGAGAAAIAAILTYEMEADKGPVRPMHIVSLTNDLSPLRLALSHKRHFPYLRHGAADTLLHRNAWTSRYKTGLTWTLLQGPLDKTIPQAPSPPEATFHQVLPGMEIPIGTPER

SEQ ID NO: 59406 - protein, 379 aa, Prosthecobacter fusiformis
  REGION 1..379: note = tr|A0A4R7SRZ0|A0A4R7SRZ0_9BACT Queuine tRNA-ribosyltransferase OS=Prosthecobacter fusiformis; OX = 48464 GN=tgt PE=3 SV=1
MFELLATDPSSSARRGRLTTPHGVIETPIFMPVGTQATVKAVHPDELRSLNAQIILGNTYHLWVRPGTEIIGAAGGLHKFMNWDRPILTDSGGYQVFSLAKLRKLKEEGCYFNNHVDGTPMFLGPETAMEIQATLGSDIAMLFDECTPWPCEHAPAKESLELTLRWARRCRDWIDKHQPQTGGGAQLHFGIVQGSTYEDLRQHSARELVAMDFSGYAIGGLSVGEPEEDMMRIAEWTCPLLPEHKARYAMGLGTPPQMVELIARGIDMFDCVLPTRLARNGTAYTHEGTLNLRNNKFAKDFRPLAEDTHPLCQGFSRAYIRHLINTQEVLGLRLISLHNLHFYLSLASRARSAIEQGCFADFRAEVVARYQTRPETLDS

SEQ ID NO: 59407 - protein, 379 aa, Prosthecochloris aestuarii
  REGION 1..379: note = tr|B4S8Z5|B4S8Z5_PROA2 Queuine tRNA-ribosyltransferase OS=Prosthecochloris aestuarii (strain DSM 271 / SK 413) OX=290512 GN=tgt PE=3 SV=1
MNFSVTHKDSRTAARAATMTTDHGEIPTPVFMPVGTRASVKSVEPHELKDQQVHIILANTYHLYLKPGNGILEKAGGIHSFMGWDQPLLTDSGGYQVYSLSDLRTITEEGVRFKSHLDGSTLYFTPENVIETQRIIGSDIMMPLDECPPWPAEKHYVEQSAAMTVRWAERARTHLEATTPLYGHSQALFGITQGGTYAHLRKEMTGQLVDLDFDGYSIGGMAVGEPAEEMYRMLELSHTLLPEHKPRYLMGVGTPENILNAIERGVDMFDCVIPTREARNGRVYTRNGYINLRSARYSDDFTPIDEGFDNHVCRHYTRAYIRHLLHVGEILGLKLCTLHNISFFMWLTRSAREQILQGSFSEWKEHFLRQFNAGQQSRT

SEQ ID NO: 59408 - protein, 377 aa, unidentified
  source 1..377: note = Prosthecochloris marina
  REGION 1..377: note = tr|A0A317T9F1|A0A317T9F1_9CHLB Queuine tRNA-ribosyltransferase OS=Prosthecochloris marina; OX = 2017681 GN=tgt PE=3 SV=1
MNFSVIHKDSRTAARSGLLRTDHGEIPTPVFMPVGTKASVKSVEPEELTAQQTHIILANTYHLYLRPGNGIVGKAGGVHRFMNWHKPLLTDSGGYQVYSLSELRTIDEEGVRFKSHIDGSMLYFTPENVIDTQRIIGSDIMMPLDECPPWPAEKTYVQESGDMTVRWAERAKKHFESTQPHYNHSQALFGITQGGTYADLRTQVSKELVDLDFDGYSIGGLAVGEPAEEMYRILELSHTVLPENKPRYLMGVGTPENILNAIERGVDMFDCVIPTREARNGRVYTRNGHINLRSARFAEDFTPIDEGFDNHVCRNYSRAYIRHLLNVGEILGLKLCTLHNISFFMWLTRTAREQIIRGSFREWKDSFLQTFNAGKQS

SEQ ID NO: 59409 - protein, 397 aa, Prosthecochloris sp.
  REGION 1..397: note = tr|A0A1B1Q129|A0A1B1Q129_9CHLB Queuine tRNA-ribosyltransferase OS=Prosthecochloris sp. CIB 2401; OX = 1868325 GN=tgt PE=3 SV=1
MLVYSAKDYSIHAPGLDIDIMKFRVSHKDNRTAARTGILETDHGTVPTPVFMPVGTRASVKSVEASELKAEQVHIILANTYHLYLKPGNDIMRAAGGIHSFMQWNQPLLTDSGGYQVYSLSELRSISEEGVRFKSHLDGSKLFFTPENVIDTQRIIGSDIMMPLDECPPWPAEKSYVETSGAMTVRWAERARSHLEKTAPLYGHSQALFGITQGGTYADVREWTTRELVDLDFDGYSIGGMAVGEPAEEMYRMLELSHTLLPEHKPRYLMGVGTPENILNAIERGVDMFDCVIPTREARNGRVYTRNGYINLRSAKFARDFRPIDEGFPNHVCRTYSRAYIRHLLNVGEILGLKLCTMHNISFYMWLTRTAREHIEQDTFSEWKLEFLETFNAGQPA

SEQ ID NO: 59410 - protein, 380 aa, Prosthecochloris sp.
  REGION 1..380: note = tr|A0A1W6HR26|A0A1W6HR26_9CHLB Queuine tRNA-ribosyltransferase OS=Prosthecochloris sp. HL-130-GSB; OX = 1974213 GN=tgt PE=3 SV=1
MNFTLSHKDSRTSARAGILVTDHGTIPTPVFMPVGTRASVKSVEPDELRELQVHIILANTYHLYLKPGNSIMKDAGGIHSFMNWDHPLLTDSGGYQVYSLSELRTITEEGVRFKSHLDGSRLHFTPENVIDTQRIIGSDIMMPLDECPPWPAEKEYVKKSSEMTVRWAERARSYFEKTSPLYHHTQALFGITQGGTYADLRKTTTKALVDMDFDGYSIGGMAVGEPAEEMYRILELSDTLLPEHKPRYLMGVGTPENILNAIERGIDMFDCVIPTREARNGRVYTRTGHINLRSARYANDFSPIDEGFDNHVCRNYSKAYIRHLLNVGEILGLKLCTLHNISFFMWLTRTAREQILNGTFEEWKKAFLAEFNGPKQSGAE

SEQ ID NO: 59411 - protein, 377 aa, Prosthecochloris vibrioformis
  REGION 1..377: note = tr|A0A5C4S2G5|A0A5C4S2G5_PROVB Queuine tRNA-ribosyltransferase OS=Prosthecochloris vibrioformis; OX = 1098 GN=tgt PE=3 SV=1
MKFRVSHKDNRTAARTGILETDHGTVPTPVFMPVGTRASVKSVEASELKAEQVHIILANTYHLYLKPGNDIMQAAGGIHNFMQWDQPLLTDSGGYQVYSLSELRSISEEGVRFKSHLDGSKLFFTPENVVDTQRIIGSDIMMPLDECPPWPAEKSYVETSGAMTVRWAERARSHLEKTAPLYGHSQALFGITQGGTYADVREWTTRELVDLDFDGYSIGGMAVGEPAEEMYRMLELSHTLLPEHKPRYLMGVGTPENILNAIERGVDMFDCVIPTREARNGRVYTRNGYINLRSAKFARDFRPIDEGFPNHVCRTYSRAYIRHLLNVGEILGLKLCTMHNISFYMWLTRTAREHIEQDTFSEWKLEFLETFNAGQPA

SEQ ID NO: 59412 - protein, 384 aa, Prosthecomicrobium hirschii
  REGION 1..384: note = tr|A0A0P6VVY1|A0A0P6VVY1_9RHIZ Queuine tRNA-ribosyltransferase OS=Prosthecomicrobium hirschii; OX = 665126 GN=tgt PE=3 SV=1
MTAPTEPAAVPAFGFRLIATDGMARRGEVTTAHGAIRTPAFMPVGTQATVKTMYPEQVRALGADILLGNTYHLMLRPTAERVDRLGGLHRFMNWPHPILTDSGGFQVMSLAKLRKLNEQAVTFQSHIDGSRHVLSPERSLEIQGLLGSDIQMQLDECVALPAERAEIERAMRLSLRWAERSKAAFFGKPGHGLFAIVQGGDDEALRVESARALTAIGFHGYAVGGLAVGEPQDVMLRILSATTPELPADRPRYLMGVGTPDDIVESVGRGIDMFDCVMPTRAGRHGQAFTRRGKVNLRNARHADDPRPIDEESTCPAARDYSRAYLHHLVKAEEALGAMLLTWINLSYYQDLMAGLRAAIEAGRFQDHKAAVKDGWARGDLPAL

SEQ ID NO: 59413 - protein, 372 aa, Proteiniborus ethanoligenes; identical to SEQ ID NO: 55764
  REGION 1..372: note = tr|A0A1H3QSC1|A0A1H3QSC1_9FIRM Queuine tRNA-ribosyltransferase OS=Proteiniborus ethanoligenes; OX = 415015 GN=tgt PE=3 SV=1

SEQ ID NO: 59414 - protein, 372 aa, Proteiniborus sp.
  REGION 1..372: note = tr|A0A1M4M7C2|A0A1M4M7C2_9FIRM Queuine tRNA-ribosyltransferase OS=Proteiniborus sp. DW1; OX = 1889883 GN=tgt PE=3 SV=1
MVFRYELIKEARDSKARLGKIYTPHGVIETPIFMPVGTRATVKAMTPEELKELGAQIILSNTYHLYLRPGHKLIEEAGGLHKFMNWDRPILTDSGGFQVFSLGDLRKITEEGVEFRSHIDGSKHFISPEKSIEIQNSLGSDIIMAFDECAPYPSDWDYVKKSLERTTRWARRCKEANKNPDTQALFGIVQGGMYKDLREQSAKEIIDLDFPGYAIGGLSVGEPSELMCEMLDFTVPLLPKEKPRYLMGVGSPDYLFEAVIRGIDMADCVLPTRIARNGTVLTSHGKVVIRNAKYSRDFSRLDPECDCYTCQNYSKAYIRHLFNVDEILGARLATIHNLYFLIKLMENIREAIREDRLLQYKDEFYNKYGYTK

SEQ ID NO: 59415 - protein, 381 aa, Proteiniclasticum ruminis
  REGION 1..381: note = tr|A0A1G8GCT2|A0A1G8GCT2_9CLOT Queuine tRNA-ribosyltransferase OS=Proteiniclasticum ruminis; OX = 398199 GN=tgt PE=3 SV=1
MYTLLKTEKRARRGRFETPHGTIETPVFMNVGTLAVIKGAVSSMDLKEIGCQVELSNTYHLHLRPGDKLVRKMGGIHKFMNWDRPILTDSGGFQVFSLAKIRKIKEEGVTFNSHIDGSSIFMGPEESMRIQSNLASTIAMAFDECIELPAEREYVEKSVERTTRWLVRCKNELDRLNEKEDTINKKQMLFGINQGGTYEDIRIAHAKEISKMDLDGYAIGGLAVGETHEEMYRILDVVVPHLPQDKPIYLMGVGTPENILESVERGVDFFDCVLPARNGRHGHVFTSRGKINLNNKRFEMDEKPIDEGCECPACKHYTRSYIRHLFKAKEMLALRLCVLHNLYFYNKLMEDIRKALDEDRFHEFKENKLSEWSRGQEPVEN

SEQ ID NO: 59416 - protein, 381 aa, Proteiniclasticum ruminis
  REGION 1..381: note = tr|A0A1I4YK42|A0A1I4YK42_9CLOT Queuine tRNA-ribosyltransferase OS=Proteiniclasticum ruminis; OX = 398199 GN=tgt PE=3 SV=1
MYTLLKTEKRARRGRFETPHGTIETPVFMNVGTLAVIKGAVSSMDLKEIGCQVELSNTYHLHLRPGDKLVRKMGGIHKFMNWDRPILTDSGGFQVFSLAKIRKIKEDGVTFNSHIDGSSIFMGPEESMRIQSNLASTIAMAFDECIELPAERQYVEKSVERTTRWLVRSKNELDRLNAKEDTINKKQMLFGINQGGTYEDIRIAHAKEISKMDLDGYAIGGLAVGETHEEMYRILDVVVPHLPQDKPIYLMGVGTPENILESVERGVDFFDCVLPARNGRHGHVFTSRGKINLNNKRFEMDEKPIDEGCECPACKHYTRSYIRHLFKAKEMLALRLCVLHNLYFYNKLMEDIRKALDEDRFHEFKENKLSEWSRGQEPVEK

SEQ ID NO: 59417 - protein, 381 aa, Proteiniclasticum sp.
  REGION 1..381: note = tr|A0A358S4V8|A0A358S4V8_9CLOT Queuine tRNA-ribosyltransferase OS=Proteiniclasticum sp.; OX = 2053595 GN=tgt PE=3 SV=1
MYTLLKTEKRARRGRFETPHGTIETPVFMNVGTLAVIKGAVSSMDLKEIGCQVELSNTYHLHLRPGDKLVRKMGGIHKFMNWDRPILTDSGGFQVFSLAKIRKIKEEGVTFNSHIDGSSIFMGPEESMRIQSNLASTIAMAFDECIELPAERQYVEKSVERTTRWLVRSKNELDRLNAKEDTINKKQMLFGINQGGTYEDIRIAHAKEISKMDLDGYAIGGLAVGETHEEMYRILDVVVPHLPQDKPIYLMGVGTPENILESVERGVDFFDCVLPARNGRHGHVFTSRGKINLNNKRFEMDEKPIDEGCECPACKHYTRSYIRHLFKAKEMLALRLCVLHNLYFYNKLMEDIRKALDEDRFHEFKENKLSEWSRGQEPVEK

SEQ ID NO: 59418 - protein, 376 aa, Proteiniphilum acetatigenes
  REGION 1..376: note = tr|A0A117LZN3|A0A117LZN3_9BACT Queuine tRNA-ribosyltransferase OS=Proteiniphilum acetatigenes; OX = 294710 GN=tgt PE=3 SV=1
MDFQLIHTDPKSDARAGVITTDHGKVETPVFMPVGTAGSVKAVHISELKEDIKAEIILGNTYHLYLRPGLEIIGAAGGLHRFNGWNRPMLTDSGGYQVFSLTGNRKLTEEGALFQSHIDGSRHFFTPEKVIDIQRIIGADIIMAFDECTPGDADYGYAKKSLELTERWLDRCITRMRETECPYGHSQTLFPIVQGCVYRNLRRRAAEKIASLGADGNAIGGLAVGEPTEKMYEMVELVNGILPKDKPRYLMGVGKPENILEAIERGVDMFDCIMPTRNGRNGQIFTKEGIMNMRNERWKNDFTPLEEDGESFVDRLYSKAYLRHLINTNEILGLQIASIHNLAFYVWLTREARKHIIAGDFTEWKPRMIEKVTRRL

SEQ ID NO: 59419 - protein, 345 aa, unidentified
  source 1..345: note = Proteiniphilum saccharofermentans
  REGION 1..345: note = tr|A0A1R3T4G5|A0A1R3T4G5_9BACT Queuine tRNA-ribosyltransferase OS=Proteiniphilum saccharofermentans OX=1642647 GN=tgt PE=3 SV=1
MPVGTVGSVKAVHVSELKEDIGAQIILGNTYHLYLRPGLDILQQAGGLHRFNSWNKPMLTDSGGFQVFSLTENRKLSEEGAEFQSHIDGSRHFFTPEKAVDIQRIIGADIMMAFDECTPGDADYDYAKKSLDLTERWLDRCLARFRETECPYGHRQALFPIVQGCVYPDLRRRAAENVAAKGADGNAIGGLAVGEPTEKMYEMVELVNEILPKDKPRYLMGVGKPENILEAIERGVDMFDCIMPTRNGRNGQIFTKQGVMNMRNERWKNDFSPIEEDGASFVDTLYSKAYLRHLINVNEILGLQIASIHNLAFYIWLVQEARKHIIAGDFSEWKPMILQNVTRRL

SEQ ID NO: 59420 - protein, 376 aa, Proteiniphilum sp.
  REGION 1..376: note = tr|A0A3M8EDP7|A0A3M8EDP7_9BACT Queuine tRNA-ribosyltransferase OS=Proteiniphilum sp. X52; OX = 2382159 GN=tgt PE=3 SV=1
MDFRLLHTDPKSNARAGILSTDHGEVETPVFMPVGTIGSVKAVHVTELKQDIGAQIILGNTYHLYLRPGLDTLQQAGGLHRFNSWNKPMLTDSGGFQVFSLTENRKLSEEGAEFQSHIDGSRHFFTPEKVIDIQRIIGADIIMAFDECTPGDADYDYAKKSLDLTERWLDRCLARFGETECPYGHRQTLFPIVQGCVYPDLRRRAAENVAAKEADGNAIGGLAVGEPTEKMYEMVELVNEILPKDKPRYLMGVGKPENILEAIERGVDMFDCIMPTRNGRNGQIFTKQGVMNMRNERWKNDFSPIEDDGASFVDTLYSKAYLRHLINVNEILGLQIASIHNLAFYIWLAQEARKHIIAGDFSEWKPMMLENVTRRL

SEQ ID NO: 59421 - protein, 377 aa, unidentified; identical to SEQ ID NO: 58796
  source 1..377: note = Proteobacteria bacterium
  REGION 1..377: note = tr|R6ANZ7|R6ANZ7_9PROT Queuine tRNA-ribosyltransferase OS=Proteobacteria bacterium CAG:139 OX=1262986 GN=tgt PE=3 SV=1

SEQ ID NO: 59422 - protein, 373 aa, unidentified
  source 1..373: note = Proteobacteria bacterium
  REGION 1..373: note = tr|A0A2G6J7A6|A0A2G6J7A6_9PROT Queuine tRNA-ribosyltransferase OS=Proteobacteria bacterium; OX = 1977087 GN=tgt PE=3 SV=1
MHDGRLQFSIEARDGEARAARVSLPRGSYETPIFMPVGTYATVKAITPEELETLGAQVILSNAYHLFLRPGHERVRRLGGLQRFMGWERLILTDSGGYQLFSLRQQMTIDEDGVRFRSPIDGSPRRLGPERAMAVEAALGSDIAMAFDHCAPSDASKDAIVAALERTTRWARRCVGEPRPDHQARFGIVQGALDLELRERHVAELTPLGFDGYALGGLSVGEAPPEMHRVVRAVAPRMPADRPRYLMGVGRPEDLIVAIGAGIDMFDCVMPTRHARNGQLFTATGRIVITNAEHRDADAPIDDDCSCAVCRRFSRAYLRHLYTAKEILYSRLATYHNLHAFISLVRRAREAIREGRYAAFAAAELAARGEGSR

SEQ ID NO: 59423 - protein, 380 aa, Proteus hauseri
  REGION 1..380: note = tr|A0A410XAV5|A0A410XAV5_PROHU Queuine tRNA-ribosyltransferase OS=Proteus hauseri OX=183417; GN = tgt PE=3 SV=1
MKYELQTTNGNARRGRLIFDRGVVETPAFMPVGTYGTVKGMTPEEVQATGAQILLGNTFHLWLRPGQEIMKLHGDLHDFMQWKGPILTDSGGFQVFSLGAMRKIKEEGVHFRNPINGEKIFLSPEKSMEIQYDLGSDIVMIFDECTPYPSDWDYAKNSMEMSLRWAKRSRQRFDELNNKNSLFGIIQGGVYEDLRDISVKGLVEIGFDGYAVGGLAVGEPKEDMHRILEHVCPQIPADKPRYLMGVGKPEDLVEGVRRGIDMFDCVMPTRNARNGHLFVTDGVVKIRNAKHRSDTSTLDEHCDCYTCKNYSRAYLHHLDRCNEILGARLNTIHNLRYYQRLMAEIRQSIEDGRFEEFVHEFYERIGKPVPPLNSSTSKCD

SEQ ID NO: 59424 - protein, 380 aa, Proteus mirabilis
  REGION 1..380: note = sp|B4EU13|TGT_PROMH Queuine tRNA-ribosyltransferase; OS = Proteus mirabilis (strain HI4320) OX=529507 GN=tgt PE=3; SV = 1
MKYELDKTDGHARRGRLKFERGVVETPAFMPVGTYGTVKGMTPEEVEATGAQILLGNTFHLWLRPGQEIMKLHGDLHDFMQWKGPILTDSGGFQVFSLGAMRKIKEEGVHFRNPINGEKIFLSPEKSMEIQYDLGSDIVMIFDECTPYPSDWDYAKNSMEMSLRWAKRSRQRFDELNNKNALFGIIQGGVYEDLRDISVKGLVEIGFDGYAVGGLAVGEPKEDMHRILEHVCPQIPADKPRYLMGVGKPEDLVEGVRRGIDMFDCVMPTRNARNGHLFVTNGVIKIRNAKHRSDTSTLDEHCDCYTCKNYSRAYLHHLDRCNEILGARLNTIHNLRYYQRLMAEIRQAIDESRFEDFVHEFYERIGKPVPPLNSSASKCD

SEQ ID NO: 59425 - protein, 380 aa, Proteus mirabilis; identical to SEQ ID NO: 59424
  REGION 1..380: note = tr|A0A1Z1T052|A0A1Z1T052_PROMI Queuine tRNA-ribosyltransferase OS=Proteus mirabilis OX=584 GN=tgt; PE = 3 SV=1

SEQ ID NO: 59426 - protein, 380 aa, Proteus penneri
  REGION 1..380: note = tr|A0A379EIZ8|A0A379EIZ8_9GAMM Queuine tRNA-ribosyltransferase OS=Proteus penneri OX=102862; GN = tgt PE=3 SV=1
MKYELDKTDGNARRGRLIFERGVVETPAFMPVGTYGTVKGMTPEEVKATGAQILLGNTFHLWLRPGQEIMKLHGDLHDFMQWQGPILTDSGGFQVFSLGAMRKIKEEGVHFRNPINGEKIFLSPEKSMEIQYDLGSDIVMIFDECTPYPSDWDYAKNSMEMSLRWAKRSRARFDELNNKNSLFGIIQGGVYEDLRDISVKGLVEIGFDGYAVGGLAVGEPKEDMHRILEHVCPQIPANKPRYLMGVGKPEDLVEGVRRGIDMFDCVMPTRNARNGHLFVTDGVIKIRNAKHRSDTSTLDEHCDCYTCKNYSRAYLHHLDRCNEILGARLNTIHNLRYYQRLMAEIRQSIEDSRFEEFVHEFYERIGKPVPPLNGSATKCE

SEQ ID NO: 59427 - protein, 343 aa, Proteus penneri
  REGION 1..343: note = tr|C0AYU5|C0AYU5_9GAMM Queuine tRNA-ribosyltransferase OS=Proteus penneri ATCC 35198; OX = 471881 GN=tgt PE=3 SV=1
MKYELDKTDGNARRGRLIFERGVVETPAFMPVGTYGTVKGMTPEEVKATGAQILLGNTFHLWLRPGQEIMKLHGDLHDFMQWQGPILTDSGGFQVFSLGAMRKIKEEGVHFRNPINGEKIFLSPEKSMEIQYDLGSDIVMIFDECTPYPSDWDYAKNSMEMSLRWAKRSRARFDELNNKNSLFGIIQGGVYEDLRDISVKGLVEIGFDGYAVGGLAVGEPKEDMHRILEHVCPQIPANKPRYLMGVGKPEDLVEGVRRGIDMFDCVMPTRNARNGHLFVTDGVIKIRNAKHRSDTSTLDEHCDCYTCKNYSRAYLHHLDRCNENFRCKAEHYPQLALLSTLDG

SEQ ID NO: 59428 - protein, 375 aa, Proteus sp.; identical to SEQ ID NO: 56353
  REGION 1..375: note = tr|A0A1F2HDG7|A0A1F2HDG7_9GAMM Queuine tRNA-ribosyltransferase OS=Proteus sp. HMSC10D02; OX = 1581079 GN=tgt PE=3 SV=1

SEQ ID NO: 59429 - protein, 380 aa, Proteus vulgaris; identical to SEQ ID NO: 59426
  REGION 1..380: note = tr|A0A0G4Q896|A0A0G4Q896_PROVU Queuine tRNA-ribosyltransferase OS=Proteus vulgaris OX=585 GN=tgt; PE = 3 SV=1

SEQ ID NO: 59430 - protein, 380 aa, Proteus vulgaris
  REGION 1..380: note = tr|A0A379F6T4|A0A379F6T4_PROVU Queuine tRNA-ribosyltransferase OS=Proteus vulgaris OX=585 GN=tgt; PE = 3 SV=1
MKYELDKIDGNARRGRLIFERGVVETPAFMPVGTYGTVKGMTPEEVKATGAQILLGNTFHLWLRPGQEIMKLHGDLHDFMQWQGPILTDSGGFQVFSLGAMRKIKEEGVHFRNPINGEKIFLSPEKSMEIQYDLGSDIVMIFDECTPYPSDWDYAKNSMEMSLRWAKRSRERFDELNNKNSLFGIIQGGVYEDLRDISVKGLVEIGFDGYAVGGLAVGEPKEDMHRILEHVCPQIPADKPRYLMGVGKPEDLVEGVRRGIDMFDCVMPTRNARNGHLFVTDGVIKIRNAKHRSDTSTLDEHCDCYTCKNYSRAYLHHLDRCNEILGARLNTIHNLRYYQRLMAEIRQSIEDSRFEEFVHEFYERIGKPVPPLNGSASKCD

SEQ ID NO: 59431 - protein, 376 aa, unidentified
  source 1..376: note = Protochlamydia amoebophila
  REGION 1..376: note = tr|A0A2P9H9M8|A0A2P9H9M8_PARUW Queuine tRNA-ribosyltransferase OS=Protochlamydia amoebophila (strain UWE25) OX=264201 GN=tgt PE=3 SV=1
MTYFKFELIHRSKKSRARVGRIHTPHGIIDTPNFVAVGTNGTVKALNNTMLHDIGLQLMFCNTYHMMLQPGTDIVRQAGGLHSFIQRKLPIITDSGGFQVFSLAYGSVADELKSRGTKKQGGCVLKITEEGVLFRSYRDGSKVLLTPESSIKAQKDLGADIIIPFDELPPYHIARDALKKSLDRTHRWEKRSLEAHLKNPQEQAMYAVVHGGIDPDLRKESCAILTELPFDGFAVGGSMGKTKDEMHTLLSLTLPLLPEDKPNHLLGIGDLPSIERSVPLGIDTFDSSYPTRAARHGILLTKQGPLNITKSEYATNFNSIEKGCLCPACHHFSLAYIHHLFKARELTCMSLATVHNLYFMVQLMEKYRKQIQEDLI

SEQ ID NO: 59432 - protein, 387 aa, unidentified
  source 1..387: note = Protochlamydia amoebophila
  REGION 1..387: note = sp|Q6MD31|TGT_PARUW Queuine tRNA-ribosyltransferase; OS = Protochlamydia amoebophila (strain UWE25) OX=264201; GN = tgt PE=3 SV=1
MFYSFCKVGQYMTYFKFELIHRSKKSRARVGRIHTPHGIIDTPNFVAVGTNGTVKALNNTMLHDIGLQLMFCNTYHMMLQPGTDIVRQAGGLHSFIQRKLPIITDSGGFQVFSLAYGSVADELKSRGTKKQGGCVLKITEEGVLFRSYRDGSKVLLTPESSIKAQKDLGADIIIPFDELPPYHIARDALKKSLDRTHRWEKRSLEAHLKNPQEQAMYAVVHGGIDPDLRKESCAILTELPFDGFAVGGSMGKTKDEMHTLLSLTLPLLPEDKPNHLLGIGDLPSIERSVPLGIDTFDSSYPTRAARHGILLTKQGPLNITKSEYATNFNSIEKGCLCPACHHFSLAYIHHLFKARELTCMSLATVHNLYFMVQLMEKYRKQIQEDLI

SEQ ID NO: 59433 - protein, 375 aa, Providencia alcalifaciens
  REGION 1..375: note = tr|A0A4R3NJK1|A0A4R3NJK1_9GAMM Queuine tRNA-ribosyltransferase OS=Providencia alcalifaciens; OX = 126385 GN=tgt PE=3 SV=1
MKYELQTTDGNARRGRLIFERGVVETPAFMPVGTYGTVKGMTPEEVKETGAQILLGNTFHLWLRPGQEIMKLHGDLHDFMQWQGPILTDSGGFQVFSLGAMRKIKEEGVHFRNPINGEKVFLSPEKSMEIQYDLGSDIVMIFDECTPYPADWDYAKTSMEMSLRWAARSRQRFDELNNKNALFGIIQGSVYEDLRDISVKGLVEIGFDGYAVGGLAVGEPKEDMHRILEHVCPQIPAEKPRYLMGVGKPEDLVEGVRRGIDMFDCVMPTRNARNGHLFVTNGVVKIRNAKYKSDTSPLDAECDCYTCRHYSRAYLHHLDRCNEILGARLNTIHNLRYYQRLMAGIRQAIEAGNFEQFAADFYQKIGKAQPSLNRE

SEQ ID NO: 59434 - protein, 375 aa, Providencia alcalifaciens
  REGION 1..375: note = tr|B6XA47|B6XA47_9GAMM Queuine tRNA-ribosyltransferase OS=Providencia alcalifaciens DSM 30120 OX=520999 GN=tgt PE=3 SV=1
MKYELQTTDGNARRGRLIFERGVVETPAFMPVGTYGTVKGMTPEEVKETGAQILLGNTFHLWLRPGQEIMKLHGDLHDFMQWQGPILTDSGGFQVFSLGAMRKIKEEGVHFRNPINGEKVFLSPEKSMEIQYDLGSDIVMIFDECTPYPADWDYAKTSMEMSLRWAARSRQRFDELNNKNALFGIIQGSVYEDLRDISVKGLVEIGFDGYAVGGLAVGEPKEDMHRILEHVCPQIPAEKPRYLMGVGKPEDLVEGVRRGIDMFDCVMPTRNARNGHLFVTNGVVKIRNAKYKSDTSSLDEECDCYTCRHYSRAYLHHLDRCNEILGARLNTIHNLRYYQRLMAGIRQAIEAGNFEQFAADFYQKIGKPQPSLNRA

SEQ ID NO: 59435 - protein, 375 aa, Providencia burhodogranariea
  REGION 1..375: note = tr|K8W1I5|K8W1I5_9GAMM Queuine tRNA-ribosyltransferase OS=Providencia burhodogranariea DSM 19968 OX=1141662 GN=tgt PE=3 SV=1
MKYELQTTDGKARRGRLVFERGVVETPAFMPVGTYGTVKGMTPEEVKETGAQILLGNTFHLWLRPGQEIMKLHGDLHDFMQWHGPILTDSGGFQVFSLGAMRKIKEEGVHFRNPINGEKVFLSPEKSMEIQNDLGSDIVMIFDECTPYPADWDYAKTSMEMSLRWAQRSRQRFDELNNKNALFGIIQGSVYEDLRDISVKGLVEIGFDGYAVGGLAVGEPKPDMHRILEHVCPQIPADKPRYLMGVGKPEDLVEGVRRGIDMFDCVMPTRNARNGHLFVTNGVVKIRNAKYKSDTSTLDPECDCYTCRHYSRAYLHHLDRCNEILGARLNTIHNLRYYQRLMAGIRQAIEEGNFEEFAQDFYQKIGKTQPSLNME

SEQ ID NO: 59436 - protein, 375 aa, Providencia heimbachae
  REGION 1..375: note = tr|A0A4D7J1Y9|A0A4D7J1Y9_9GAMM Queuine tRNA-ribosyltransferase OS=Providencia heimbachae; OX = 333962 GN=tgt PE=3 SV=1
MKYELQTTDGNARRGRLVFERGVVETPAFMPVGTYGTVKGMTPEEVKETGAQILLGNTFHLWLRPGQDVIKLHGDLHDFMQWQGPILTDSGGFQVFSLGAMRKIKEEGVHFRNPINGEKVFLSPEKSMEIQNDLGSDIVMIFDECTPYPADWDYAKTSMEMSLRWAVRSRQRFDELNNKNALFGIIQGSVYEDLRDISVKGLVEIGFDGYAVGGLAVGEPKEDMHRILEHVCPQIPADKPRYLMGVGKPEDLVEGVRRGIDMFDCVMPTRNARNGHLFVTNGIVKIRNAKYKSDTSTLDADCDCYTCRHYSLAYLHHLDKCNEILGARLNTIHNLRYYQRLMAGIRQAIEDGNFEEFATDFYQKIGKPQPSLNRE

SEQ ID NO: 59437 - protein, 375 aa, Providencia heimbachae; identical to SEQ ID NO: 59436
  REGION 1..375: note = tr|A0A1B7JQ01|A0A1B7JQ01_9GAMM Queuine tRNA-ribosyltransferase OS=Providencia heimbachae ATCC 35613 OX=1354272 GN=tgt PE=3 SV=1

SEQ ID NO: 59438 - protein, 375 aa, Providencia rettgeri
  REGION 1..375: note = tr|A0A1J0E3A5|A0A1J0E3A5_PRORE Queuine tRNA-ribosyltransferase OS=Providencia rettgeri OX=587; GN = tgt PE=3 SV=1
MKYELQMTSGNARRGRLVFERGVVETPAFMPVGTYGTVKGMTPEEVKETGAQILLGNTFHLWLRPGQEVMKLHGDLHDFMQWQGPILTDSGGFQVFSLGAMRKIKEEGVHFRNPINGEKIFLSPEKSMEIQYDLGSDIVMIFDECTPYPADWDYAKTSMEMSLRWAARSRQRFDELNNKNALFGIIQGSVYEDLRDISVKGLVEIGFDGYAVGGLAVGEPKEDMHRILEHVCPQIPADKPRYLMGVGKPEDLVEGVRRGIDMFDCVMPTRNARNGHLFVTHGVVKIRNAKYKSDTSTLDADCDCYTCRHYSRAYLHHLDRCNEILGARLNTIHNLRYYQRLMAGIRQAIENGKFEEFAKDFYQKIGKPEPSLNIE

SEQ ID NO: 59439 - protein, 375 aa, Providencia rettgeri
  REGION 1..375: note = tr|A0A1B8SNJ5|A0A1B8SNJ5_PRORE Queuine tRNA-ribosyltransferase OS=Providencia rettgeri OX=587; GN = tgt PE=3 SV=1
MKYELQTTDGNARRGRLVFERGVVETPAFMPVGTYGTVKGMTPEEVKETGAQILLGNTFHLWLRPGQEIMKLHGDLHDFMQWQGPILTDSGGFQVFSLGAMRKIKEEGVHFRNPINGEKVFLSPEKSMEIQYDLGSDIVMIFDECTPYPADWDYAKTSMEMSLRWAARSRQRFDELNNKNALFGIIQGSVYEDLRDISVKGLVEIGFDGYAVGGLAVGEPKEDMHRILEHVCPQIPAEKPRYLMGVGKPEDLVEGVRRGIDMFDCVMPTRNARNGHLFVTNGVVKIRNAKYKSDTSTLDAECDCYTCRHYSRAYLHHLDRCNEILGARLNTIHNLRYYQRLMAGIRQAIENGNFEEFAKDFYQKIGKPEPSLNIE

SEQ ID NO: 59440 - protein, 375 aa, Providencia rustigianii
  REGION 1..375: note = tr|D1P6C2|D1P6C2_9GAMM Queuine tRNA-ribosyltransferase OS=Providencia rustigianii DSM 4541 OX=500637 GN=tgt PE=3 SV=1
MKYELQTTDGNARRGRLIFERGVVETPAFMPVGTYGTVKGMTPEEVKETGAQILLGNTFHLWLRPGQEIMKLHGDLHDFMQWQGPILTDSGGFQVFSLGAMRKIKEEGVHFRNPINGEKIFLSPEKSMEIQYDLGSDIVMIFDECTPYPADWDYAKTSMEMSLRWAARSRQRFDELNNKNALFGIIQGSVYEDLRDISVKGLVEIGFDGYAVGGLAVGEPKEDMHRILEHVCPQIPAEKPRYLMGVGKPEDLVEGVRRGIDMFDCVMPTRNARNGHLFVTNGVVKIRNAKYKSDTSTLDADCDCYTCRHYSRAYLHHLDRCNEILGARLNTIHNLRYYQRLMAGIREAIEAGNFEQFASDFYEKIGKPQPSLNRE

SEQ ID NO: 59441 - protein, 375 aa, Providencia rustigianii; identical to SEQ ID NO: 59440
  REGION 1..375: note = tr|A0A379G0L2|A0A379G0L2_9GAMM Queuine tRNA-ribosyltransferase OS=Providencia rustigianii; OX = 158850 GN=tgt PE=3 SV=1

SEQ ID NO: 59442 - protein, 375 aa, Providencia sneebia
  REGION 1..375: note = tr|K8W164|K8W164_9GAMM Queuine tRNA-ribosyltransferase OS=Providencia sneebia DSM 19967; OX = 1141660 GN=tgt PE=3 SV=1
MKYELQTTDGNARRGRLVFERGVVETPAFMPVGTYGTVKGMTPEEVKETGAQILLGNTFHLWLRPGQEIMKLHGDLHDFMQWQGPILTDSGGFQVFSLGAMRKIKEEGVHFRNPINGEKIFLSPEKSMEIQYDLGSDIVMIFDECTPYPADWDYAKTSMEMSLRWAARSRQRFDELNNKNALFGIIQGSIYEDLRDISVKGLVDIGFDGYAVGGLAVGEPKEDMHRILEHVCPQIPADKPRYLMGVGKPEDLVEGVRRGIDMFDCVMPTRNARNGHLFVTHGVVKIRNAKYKSDTSTLDPECDCYTCRHYSRAYLHHLDRCNEILGARLNTIHNLRYYQRLMAGIRQAIEEGNFEEFAKDFYQKIGKSQPSLNKE

SEQ ID NO: 59443 - protein, 375 aa, Providencia sp.
  REGION 1..375: note = tr|A0A345LX58|A0A345LX58_9GAMM Queuine tRNA-ribosyltransferase OS=Providencia sp. WCHPHu000369; OX = 2027290 GN=tgt PE=3 SV=1
MKYELQTTDGNARRGRLVFERGVVETPAFMPVGTYGTVKGMTPEEVKETGAQILLGNTFHLWLRPGQEIMKLHGDLHDFMQWQGPILTDSGGFQVFSLGAMRKIKEEGVHFRNPINGEKVFLSPEKSMEIQYDLGSDIVMIFDECTPYPADWDYAKTSMEMSLRWAARSRQRFDELNNKNALFGIIQGSVYEDLRDISVKGLVEIGFDGYAVGGLAVGEPKEDMHRILEHVCPQIPAEKPRYLMGVGKPEDLVEGVRRGIDMFDCVMPTRNARNGHLFVTNGVVKIRNAKYKSDTSTLDADCDCYTCRHYSRAYLHHLDRCNEILGARLNTIHNLRYYQRLMAGIRQAIENGNFEEFAKDFYQKIGKPEPSLNIE

SEQ ID NO: 59444 - protein, 375 aa, Providencia sp.
  REGION 1..375: note = tr|A0A4S2YKE9|A0A4S2YKE9_9GAMM Queuine tRNA-ribosyltransferase OS=Providencia sp. MGF014; OX = 2565573 GN=tgt PE=3 SV=1
MKYELQTTDGNARRGRLVFERGVVETPAFMPVGTYGTVKGMTPEEVKETGAQILLGNTFHLWLRPGQEIMKLHGDLHDFMQWQGPILTDSGGFQVFSLGAMRKIKEEGVHFRNPINGEKVFLSPEKSMEIQYDLGSDIVMIFDECTPYPADWDYAKTSMEMSLRWAARSRQRFDELNNKNALFGIIQGSVYEDLRDISVKGLVEIGFDGYAVGGLAVGEPKEDMHRILEHVCPQIPADKPRYLMGVGKPEDLVEGVRRGIDMFDCVMPTRNARNGHLFVTNGVVKIRNAKYKSDTSTLDADCDCYTCRHYSRAYLHHLDRCNEILGARLNTIHNLRYYQRLMAGIRQAIENGNFEEFAKDFYQKIGKPEPSLNIE

SEQ ID NO: 59445 - protein, 375 aa, Providencia stuartii
  REGION 1..375: note = tr|A0A140NK59|A0A140NK59_PROSM Queuine tRNA-ribosyltransferase OS=Providencia stuartii (strain MRSN 2154) OX=1157951 GN=tgt PE=3 SV=1
MKYELQTTDGNARRGRLIFERGVVETPAFMPVGTYGTVKGMTPEEVKETGAQILLGNTFHLWLRPGQEIMKLHGDLHDFMQWQGPILTDSGGFQVFSLGAMRKIKEEGVHFRNPINGEKIFLSPEKSMEIQYDLGSDIVMIFDECTPYPADWDYAKTSMEMSLRWAARSRQRFDELNNKNALFGIIQGSVYEDLRDISVKGLVEIGFDGYAVGGLAVGEPKEDMHRILEHVCPQIPADKPRYLMGVGKPEDLVEGVRRGIDMFDCVMPTRNARNGHLFVTNGVVKIRNAKYKSDTSTLDPECDCYTCRHYSRAYLHHLDRCNEILGARLNTIHNLRYYQRLMAGIRQAIEDGNFEEFAKDFYQKIGKSQPSLNME

SEQ ID NO: 59446 - protein, 375 aa, Providencia stuartii; identical to SEQ ID NO: 59445
  REGION 1..375: note = tr|B2Q6X3|B2Q6X3_PROST Queuine tRNA-ribosyltransferase OS=Providencia stuartii ATCC 25827; OX = 471874 GN=tgt PE=3 SV=1

SEQ ID NO: 59447 - protein, 376 aa, unidentified
  source 1..376: note = Unknown
  REGION 1..376: note = tr|A0A368DZY8|A0A368DZY8_9PROT Queuine tRNA-ribosyltransferase OS=PS1 clade bacterium OX=2175152; GN = tgt PE=3 SV=1
MDFKLHSKDGKARQGSVITPRGEIRTPAFMPVGTAGTVKAMYMDQVKDLGADIVLGNTYHLMLRPGAEEVAALGGLHSFMKWDGPILTDSGGFQVMSLSKLRKMSEEGVNFQSHIDGKSYMLTPERSIEIQTLLGANIRMILDECTPFPATEKQARDSMALSTRWAERSKKAFEHYDKGEGDALFGIVQGGVYESLRQESVSNLLDIGFDGYAVGGLAVGEGQEEMLKVLDFTVPALPENKPRYLMGVGTPEDLVLAVSRGIDMFDCVMPTRAGRHGLAYTRKGKVNLKNARHANDHRPLDEESDCPAASQYSRAYLHHLVRCGEYLAAMLLTWNNLHYYQSLMQEMRQNIEAGSFDAFVAAFYKDQNEGDLPPID

SEQ ID NO: 59448 - protein, 370 aa, unidentified
  source 1..370: note = Unknown
  REGION 1..370: note = tr|A0A368DNI2|A0A368DNI2_9PROT Queuine tRNA-ribosyltransferase OS=PS1 clade bacterium OX=2175152; GN = tgt PE=3 SV=1
MTFEIKKTDGKARNCILNLPNGFVETPVFMPVGTQGTVKAMFTEKLDEIGFKIILANTYHMFLRPGCEVLDNFGGLNNFMQWDKPLLTDSGGFQIMSLSKLTKIENDGVYFKSHIDGKRFFLTPKLSMDIQNSIGSDIQMVLDQCVEYNTDEEKIKNAMSLSLKWAELSKKSFSKKNKRKLFGIVQGGINPDLRKHSAEETIKIGFDGYAIGGLAVGEGHKLMVQTLDNTIPFLPKNKPRYLMGVGTPLDLVESVRRGVDMFDCVMPTRAGRHGLAYTCNGNINIRNSKYSNDNKPIDPYSKCPITSKYSRAYLHHLFKAKELLGSMILTYINLRYYDDLMIKLRKAIRDQKYDEIANQIYEKWDKKENI

SEQ ID NO: 59449 - protein, 392 aa, Pseudacidovorax intermedius
  REGION 1..392: note = tr|A0A147GX04|A0A147GX04_9BURK Queuine tRNA-ribosyltransferase OS=Pseudacidovorax intermedius; OX = 433924 GN=tgt PE=3 SV=1
MTALQFDLLATDPDSHARRGTLTLNHGVVQTPIFMPVGTYGTVKGVMPRSLEEMGAQIILGNTFHLWMRPGLDVMGAFGGLHAFEQWNKPILTDSGGFQVWSLGAMRKISEEGVKFASPVNGDKLLLTPEVSMQIQTVLNSDIVMQFDECTPYETQGRITNEAEARRSMELSLRWARRCQAEFARLQNPNALFGIVQGGMFEHLREESLAALVEMDFPGYAVGGVSVGEPKEDMRRITAHTPHRLPAHKPRYLMGVGTPEDLVEGVAQGVDMFDCVMPTRNARNGTIFTRYGDLKLRNARHRNDPQPLDPSCTCHACAGTAGVSWADGGRGGFSRAYLHHLDRCGEMLGPMLTTIHNLHYYLNLMREIREALDAGRFGEFRRQFASDRARGV

SEQ ID NO: 59450 - protein, 392 aa, Pseudacidovorax intermedius
  REGION 1..392: note = tr|A0A370FLB9|A0A370FLB9_9BURK Queuine tRNA-ribosyltransferase OS=Pseudacidovorax intermedius; OX = 433924 GN=tgt PE=3 SV=1
MTALQFDLLATDPDSHARRGTLTLNHGVVQTPIFMPVGTYGTVKGVMPRSLEEMGAQIILGNTFHLWMRPGLDVMGAFGGLHAFEQWNRPILTDSGGFQVWSLGAMRKISEEGVKFASPVNGDKLLLTPEVSMQIQTVLNSDIVMQFDECTPYETQGRITTEAEARRSMELSLRWAKRCQAEFARLQNPNALFGIVQGGMFEHLREESLAALVEMDFPGYAVGGVSVGEPKEDMRRITAHTPHRLPAHKPRYLMGVGTPEDLVEGVAQGVDMFDCVMPTRNARNGTIFTRYGDLKLRNARHRNDPQPLDPSCTCHACAGTAGVPWADGGRGGFSRAYLHHLDRCGEMLGPMLATIHNLHYYLNLMREIREALDAGRFGEFRRQFASDRARGV

SEQ ID NO: 59451 - protein, 392 aa, Pseudacidovorax sp.
  REGION 1..392: note = tr|A0A1N6VJD2|A0A1N6VJD2_9BURK Queuine tRNA-ribosyltransferase OS=Pseudacidovorax sp. RU35E; OX = 1907403 GN=tgt PE=3 SV=1
MTALQFDLLATDPDSHARRGTLTLNHGVVQTPIFMPVGTYGTVKGVMPRSLEEMGAQIILGNTFHLWMRPGLDVMGAFGGLHAFEQWHKPILTDSGGFQVWSLGAMRKISEEGVKFASPVNGDKLLLTPEVSMQIQTVLNSDIVMQFDECTPYETQGRITTEAEARRSMELSLRWAKRCQAEFARLQNPNALFGIVQGGMFEHLREESLAALVEMDFPGYAVGGVSVGEPKEDMRRITAHTPHRLPAHKPRYLMGVGTPEDLVEGVAQGVDMFDCVMPTRNARNGTIFTRYGDLKLRNARHRNDPQPLDPSCTCHACAGTAGESWADGGRGGFSRAYLHHLDRCGEMLGPMLTTIHNLHYYLNLMREIREALDAGRFGEFRRQFASDRARGV

SEQ ID NO: 59452 - protein, 376 aa, unidentified
  source 1..376: note = Pseudaestuariivita atlantica
  REGION 1..376: note = tr|A0A0L1JNI0|A0A0L1JNI0_9RHOB Queuine tRNA-ribosyltransferase OS=Pseudaestuariivita atlantica; OX = 1317121 GN=tgt PE=3 SV=1
MGRTFDFTLTATDGRARTGVIDTPRGAIRTPAFMPVGTAATVKAMLPESVAATGADILLGNTYHLMLRPTAERIARLGGLHGFMNWDRPILTDSGGFQVMSLAELRKLTEEGVTFRSHIDGSRHMLTPERSMEIQRLLGSDIVMCFDECPALPADRDRIADSMELSMRWAARSKAAFGDRPGHALFGIQQGGLEEDLRKASAEALVDIGFDGYAVGGLAVGEGQEAMFACLDYAPEQLPQDKPRYLMGVGKPDDIVGAVKRGIDMMDCVLPSRSGRTGQAWTRRGQVNIKNARHADDPRPLDEACACPACRSYSRAYLHHVFRAGEMISGMLLTWHNLHYYQDLMGRMRDAISSGEFNAFEREFHAEREAGDIPPL

SEQ ID NO: 59453 - protein, 376 aa, unidentified
  source 1..376: note = Pseudaminobacter manganicus
  REGION 1..376: note = tr|A0A1V8RJA5|A0A1V8RJA5_9RHIZ Queuine tRNA-ribosyltransferase OS=Pseudaminobacter manganicus; OX = 1873176 GN=tgt PE=3 SV=1
MNSEFAFHLIATDGIARRGEIAMPRGTIRTPAFMPVGTGGTVKAMYLDQVRALGADIILGNTYHLMLRPGAERMARLGGLHEFARWPYPILTDSGGFQVMSLSKLRKLTEHGVTFRSHIDGAAYEMTPERSIEIQGLLDSDIQMQLDECTALPAPHKEVERAMELSLRWAERCKAAFGVQPGKAIFGIVQGGDVADLRVKSAQALSAMDLKGYAVGGLAVGEPQAVMLEMLEITCPELPANKPRYLMGVGTPDDILKSVARGIDMFDCVMPTRAGRHGLAYTRRGKVNLRNARHADDPRPLDEQSDCPAARDYSRAYLHHLVRSQEALGAMLLTWNNLAYYQSLMQDIRDSIEKGEFTTRAAGISENWARGDIAAL

SEQ ID NO: 59454 - protein, 376 aa, Pseudaminobacter salicylatoxidans
  REGION 1..376: note = tr|A0A316CU76|A0A316CU76_PSESE Queuine tRNA-ribosyltransferase OS=Pseudaminobacter salicylatoxidans OX=93369 GN=tgt PE=3 SV=1
MSTEFTFKVLATDGKARRGEITMPRGTIRTPAFMPVGTGGTVKTMYMDQVRDLGADIILGNTYHLMLRPGAERVARLGGLHEFARWPHPILTDSGGFQVMSLSKLRKITEKGVTFRSHIDGAPYEMSPERSIEIQGLLDSDIQMQLDECTALPAKEREIERAMELSLRWADRCKTAFGDQPGKAMFGIVQGGDNARLRERSAQSLASLGLKGYAVGGLAVGEPQDVMLDMLDVTCPELPADKPRYLMGVGTPDDIVKSVARGIDMFDCVMPTRAGRHGLAYTRRGKVNLRNARHADDHRPLDEESDCPAARDYSRAYLHHLVRSQEALGAMLLTWNNLSYYQSLMQGLRDAIEQGRYAEHVAEVSEGWARGDIPAL

SEQ ID NO: 59455 - protein, 376 aa, Pseudaminobacter sp.
  REGION 1..376: note = tr|A0A432V6U9|A0A432V6U9_9RHIZ Queuine tRNA-ribosyltransferase OS=Pseudaminobacter sp. CB3; OX = 1851146 GN=tgt PE=3 SV=1
MTQEFSFRLIATDGKARRGEISMPRGTVRTPAFMPVGTGGTVKAMYMDQVRDLGSDIILGNTYHLMLRPGAERVARLGGLHEFARWPYPILTDSGGFQVMSLSKLRKLTEKGVTFRSHIDGVPYEMTPERSIEIQGLLDSDIQMQLDECIALPAKESDVERAMELSLRWAERCKAAFGTQQGKAMFGIVQGGDVALLRERSAQVLSGLDLKGYAVGGLAVGEPQPVMLDMLDVTCPQLPGDKPRYLMGVGTPDDILKSVARGIDMFDCVMPTRAGRHGLAYTRRGKINLRNARHAEDHRPLDEESDCPASRDYSRAYLHHLVKSQESLGAMLLTWNNLAYYQRLMADIRGAVEAGTFGERAALITEGWARGDIPTL

SEQ ID NO: 59456 - protein, 345 aa, unidentified
  source 1..345: note = Pseudanabaena biceps
  REGION 1..345: note = tr|L8N1U5|L8N1U5_9CYAN Queuine tRNA-ribosyltransferase OS=Pseudanabaena biceps PCC 7429; OX = 927668 GN=tgt PE=3 SV=1
MPVGTLANVKTVTPAQLKECKAEMILANTYHLHLQPGEDIVAEAGGLHKFMNWDGPILTDSGGFQVFSLSEIRSISENGVQFRSPRDGNTINLTPEKSIQIQNQLGADVIMAFDECAPYPATYEAVKLAGQRTTRWLERCIKAHDRKDDQALFGIVQGGVFLDLRQQSARELIEFDLPGYAIGGVSVGEPPELIEKIVKATTPLLPADKPRYLMGVGTYKEMAQAVAAGIDLFDCVIPTRFARHSVALVRGERWNLKNQKFKRDFTPIDRECNCYACQNFSRAYISHLVRSQEILGYTLLSIHNITELIRFTQQMRQAIIENCFVEKFGHYLVEDSPAHADKVGH

SEQ ID NO: 59457 - protein, 378 aa, unidentified
  source 1..378: note = Pseudanabaena frigida
  REGION 1..378: note = tr|A0A2W4WKC4|A0A2W4WKC4_9CYAN Queuine tRNA-ribosyltransferase OS=Pseudanabaena frigida OX=945775; GN = tgt PE=3 SV=1
MNNFTFKLECKCCHTDARVGQFNTPHGVVHTPRFMPVGTLANVKTVTPAQLQDCKAEMVLANTYHLHLQPGEDIVAEAGGLHKFMNWDGPILTDSGGFQVFSLSEIRSISEEGVKFRSPREGNMIDLTPEKSIQIQNQLGADVIMAFDECAPYPATYDAVKLAGQRTTRWLERCIKAHDRQDVQALFGIVQGGVYLDLRQQSARELIQFDLPGYAIGGVSVGEPPELIEKIVKATTPLLPKNKPRYLMGVGTYKEMAQAVASGIDLFDCVIPTRLARHSVGLVKGDRWNLKNQKFKRDFTPLDRDCPCYACQNFSRAYISHLVRSQEILGYTLLSIHNITELIRFTQQMRQAIIENRFVEEFGHYLTKSPSLIEGHHQ

SEQ ID NO: 59458 - protein, 378 aa, Pseudanabaena sp.
  REGION 1..378: note = tr|A0A256BKR8|A0A256BKR8_9CYAN Queuine tRNA-ribosyltransferase OS=Pseudanabaena sp. SR411; OX = 1980935 GN=tgt PE=3 SV=1
MNNFTFKLECQCDLTDARVGQFHTPHGVVHTPRFMPVGTLANVKTVTPAQLKDCKAEMVLANTYHLHLQPGEDIVSEAGGLHKFMNWDGPILTDSGGFQVFSLSEIRSISEEGVQFRSPRDGNMINLTPEKSIQIQNQLGADVIMAFDECAPYPSTYEAIKLAGQRTTRWLERCIKAHDRKNDQALFGIVQGGVYLDLRQQSARELIEFDLPGYAIGGVSVGEPPELIEKIVRATTPLLPTDKPRYLMGVGTYKEMAQAVAAGIDLFDCVIPTRFARHSVALVKGERWNLKNQKFKRDFTPIDSDCDCYACQNFSRAYISHLVRSQEILGYTLLSIHNITELIRFTQQMRQAIIDNQFVEKFGHYLSKSSSFAEERHP

SEQ ID NO: 59459 - protein, 382 aa, Pseudanabaena sp.
  REGION 1..382: note = tr|K9SHT2|K9SHT2_9CYAN tRNA-guanine transglycosylase, various specificities OS=Pseudanabaena sp. PCC 7367 OX=82654 GN=Pse7367_1026 PE=4 SV=1
MDEATSTITTSQNTLKLPHGELQLPAFLPDATVGVVRSLDAQDLEQCGIQALVMNAFHLMQRPGSSTVSALGGIHRMSGWQRPIFTDSGGFQAYSLIRANSKYGSISDRGLIFYPEGSQRKLKLTPEKTIQLQMGYGADLLFCLDDCTNAEDSLDVQEVSVKRTIAWAKRCKAEFVRLLEQKKIDLNSSDRPLLFAVLQGGGSFELRRECAEALLEIGFDGYGFGGWPLDQHGNLLTDILAFCRSLIPKQFPMHALGIGHPQNVLAVARMGYELFDCVMPTRDARHGRLYAFTRELDDLPEAMDSSWFSYVYAQDKKHIKANQAIAPFCDASCCQRYSLGYLHHLFNINDTLYYRLATIHNLRFMARLMELLRKNLRRDQNI

SEQ ID NO: 59460 - protein, 378 aa, unidentified
  source 1..378: note = Pseudarcicella hirudinis
  REGION 1..378: note = tr|A0A1I5VVC1|A0A1I5VVC1_9BACT Queuine tRNA-ribosyltransferase OS=Pseudarcicella hirudinis; OX = 1079859 GN=tgt PE=3 SV=1
MTFDIKTTDPNSNARAGVIQTDHGQILTPIFMPVGTAGSVKAVHQRELKEDINAQIILGNTYHLYLRPGLDIIEKAGGLHKFNGWDKPILTDSGGYQVYSLSGTGRKIKEEGVTFKSHIDGSKHIFTPEKVMDIQRTIGADIIMAFDECTPYPCEYEYARESMEMTHRWLKRCCEHFDATEPKYGYSQTLFPIVQGSVYKDLRKKSAEAIAEFGREGNAIGGLSVGEPAEMMYEMTELVTDILPKDKPRYLMGVGTPANILESIALGIDMFDCVMPTRNARNGMLFTTQGVINIRNEKWKDDFSVLDPGLPESYVSSFYTKAYLRHLVKSDEMLGAMIASVHNLTFYLWLVSQARERILNGTFKSWKDRMVVQLMEKL

SEQ ID NO: 59461 - protein, 377 aa, unidentified
  source 1..377: note = Pseudarcicella sp.
  REGION 1..377: note = tr|A0A2S2DRH8|A0A2S2DRH8_9BACT Queuine tRNA-ribosyltransferase OS=Pseudarcicella sp. HME7025; OX = 2183547 GN=tgt PE=3 SV=1
MKFEIQSTDVHSKARAGSLSTDHGTIQTPIFMPVGTAGTVKGVHISELTDPIKAQIILGNTYHLYLRPGLEVIEAAGGLHKFNSWNGPILTDSGGYQVYSLAGTGRKIVEEGVKFKSHIDGSTHFFSPESVMDIQRTIGADIMMAFDECTPYPCTYEYARKSMEMTHRWLDRCINRFEATEPKYGHNQALFPIVQGSVYKDLRKISAEYIAEKGAFGNAIGGLSVGEPVEDMYEMADEVTDILPKDKPRYLMGVGTPANILEGIALGIDMFDCVMPTRNARNGMIFTTQGIINIKNEKWKSDFSVIDPAFADTVHGQYSKAYVRHLIRCEEMLGAMIASVCNLRFYLWLVGEARKEILQGSFTSWKNRMIPQLMQRL

SEQ ID NO: 59462 - protein, 434 aa, unidentified
  source 1..434: note = Pseudarthrobacter chlorophenolicus
  REGION 1..434: note = tr|B8HC14|B8HC14_PSECP Queuine tRNA-ribosyltransferase OS=Pseudarthrobacter chlorophenolicus (strain ATCC 700700 / DSM 12829 / CIP 107037 / JCM 12360 / KCTC 9906 / N CIMB 13794 / A6); OX = 452863 GN=tgt PE=3 SV=1
MPANPAPATTSDPALPAEQSAFSFTVGTRLGESCPPSAAQVSENGGEFLGRTGTITTPHGEIRTPAFIAVGTKATVKAVLPESMADLGAQALLANAYHLYLQPGADILDEAGGLGSFMNWAGPTFTDSGGFQVMSLGSGFKKVIDMKSVDASGPDDAVAPGKERLAHIDDDGVWFKSHLNGDRHRFSPEISMQVQHQIGADIMFAFDELTTLQNSRGYQEESLERTRLWAERCIAEHFRLTGERMGKPYQALFGVIQGAQYEDLRRKACRDLGAMPFDGFGIGGALEKENLGTIVRWCNEELPEDKPRHLLGISEPDDIFTAIENGADTFDCVSPTRVARNSAFYHPTGRYNLSGAKYKRDFGPLQDGCDCYTCQNYSRAYIHHLFKAKEMVSATLISIHNERFVVKMVDDARLAIEAGTFFDFKAETLANYYS

SEQ ID NO: 59463 - protein, 434 aa, unidentified
  source 1..434: note = Pseudarthrobacter equi
  REGION 1..434: note = tr|A0A1H1VHW7|A0A1H1VHW7_9MICC Queuine tRNA-ribosyltransferase OS=Pseudarthrobacter equi; OX = 728066 GN=tgt PE=3 SV=1
MPANPAPATTPDPALPAEQSAFSFTVGTRLSESCPPSAAHVSENGGEFLGRTGTITTPHGEIRTPAFIAVGTKATVKAVLPESMADLGAQALLANAYHLYLQPGADILDEAGGLGSFMNWAGPTFTDSGGFQVMSLGSGFKKVIDMKSVDASGPDDAVAPGKERLAHIDDDGVWFKSHLNGDRHRFSPEISMQVQHQIGADIMFAFDELTTLQNSRGYQEESLERTRLWAERCIAEHFRLTGERVGKPYQALFGVIQGAQYEDLRRKACRDLGAMPFDGFGIGGALEKENLGTIVRWCNEELPENKPRHLLGISEPDDIFTAIENGADTFDCVSPTRVARNSAFYHPTGRYNLSGARYKRDFGPLQDGCDCYTCQNYSRAYIHHLFKAKEMVSATLISIHNERFVVKMVDDARLAIESGTFFDFKAETLANYYS

SEQ ID NO: 59464 - protein, 434 aa, unidentified
  source 1..434: note = Pseudarthrobacter phenanthrenivorans
  REGION 1..434: note = tr|F0MBE8|F0MBE8_PSEPM Queuine tRNA-ribosyltransferase OS=Pseudarthrobacter phenanthrenivorans (strain DSM 18606 / JCM 16027 / LMG 23796 / Sphe3) OX=930171 GN=tgt PE =3 SV=1
MPANPAPALPADPSARADQSQFSFTVGTRLAESCPPSSTQTAENGGRFLGRTGTMSTPHGDIRTPAFIAVGTKATVKSVLPESMAELGAQALLANAYHLYLQPGADILDEAGGLGAFMNWPGPTFTDSGGFQVMSLGSGFKKVIDMKSVDASGPDDAVAPGKERLAHIDDDGVWFKSHLNGDRHRFSPEISMQVQHQIGADIMFAFDELTTLQNSRRYQEESLERTRLWALRCLEEHFRLTSSRVGKPYQALFGVIQGAQYEDLRRKACRDLGAMPFDGYGIGGALEKENLGTIVRWCNEELPEDKPRHLLGISEPDDIFTAIENGADTFDCVSPTRVARNSAFYTPQGRFNLSGAKYKRDFGPLQDGCDCYACANYSRAYIHHLFKAKEMLSATLISIHNERFVVKMVDDARLAIEDGTFFDFKAETLGQYYS

SEQ ID NO: 59465 - protein, 428 aa, unidentified
  source 1..428: note = Pseudarthrobacter phenanthrenivorans
  REGION 1..428: note = tr|A0A0B4D8X2|A0A0B4D8X2_9MICC Queuine tRNA-ribosyltransferase OS=Pseudarthrobacter phenanthrenivorans OX=361575 GN=tgt PE=3 SV=1
MPANPAFALPDTRSQFSFTVGTRLAESNPPTDAQVAGNGGGFLGRTGTITTPHGDIQTPAFIAVGTKATVKAVLPESMADLGAQALLANAYHLYLQPGPDILDEAGGLGRFMNWPGPTFTDSGGFQVMSLGSGFKKVIDMKSVDASGPDDAVAPGKERLAHIDDDGVWFKSHLNGDRHRFSPEISMQVQHRIGADIMFAFDELTTLQNSRRYQEESLERTRLWAERCIAEHFRLSGERAAKPYQALFGVIQGAQYEDLRRKACRDLGAMPFDGFGIGGALEKENLGTIVRWCNEELPEDKPRHLLGISEPDDIFTAIENGADTFDCVSPTRVARNSAFYTPYGRFNLSGAKYKRDFGPLQDGCDCYACTNYSRAYIHHLFKAKEMLSATLISIHNERFVVKMVDDARLAIESGTFFDFKAETLGRYYS

SEQ ID NO: 59466 - protein, 449 aa, unidentified
  source 1..449: note = Pseudarthrobacter siccitolerans
  REGION 1..449: note = tr|A0A024H769|A0A024H769_9MICC Queuine tRNA-ribosyltransferase OS=Pseudarthrobacter siccitolerans; OX = 861266 GN=tgt PE=3 SV=1
MPANPASASSPSAPAAAPAVETALHGALSRQSEFGFRVGSRLAEACPASAAQVADNGGEFLGRTGTITTPHGEIRTPAFIAVGTKATVKAVLPESMADLGAQALLANAYHLYLQPGADILDEAGGLGAFMNWTGPTFTDSGGFQVMSLGSGFKKVIDMKTVSSADAAVPDDAVAPGKERLAHIDDDGVWFKSHLNGDKHRFSPEISMQVQHRIGADIMFAFDELTTLQNSRGYQEESLERTRLWAERCITEHFRLTGSRAGKPYQALFGVIQGAQYEDLRRKACRDLGAMPFDGFGIGGALEKENLGTIVRWCNEELPEDKPRHLLGISEPDDIFTAIENGADTFDCVSPTRVARNSAFYTPQGRFNLSGAKYKRDFGPLQDGCDCYTCTHYSRAYIHHLFKAKEMLSATLISIHNERFVVKMVDDARLAIEAGTFFEFKAETLGQYYS

SEQ ID NO: 59467 - protein, 431 aa, unidentified
  source 1..431: note = Pseudarthrobacter sp.
  REGION 1..431: note = tr|A0A365D0B0|A0A365D0B0_9MICC Queuine tRNA-ribosyltransferase OS=Pseudarthrobacter sp. AG30; OX = 2249742 GN=tgt PE=3 SV=1
MPANPAFALPETQSQFSFTVGTRLADSCPPSAAQERENGGEFLGRTGTITTPHGEIQTPAFIAVGTKATVKAVLPESMADLGAQALLANAYHLYLQPGPDILDEAGGLGAFMNWSGPTFTDSGGFQVMSLGSGFKKVIDMKTVAAAGAPGPDDAVAPGKERLAHIDDDGVWFKSHLNGDRHRFSPEISMQVQHQIGADIMFAFDELTTLQNSRRYQEESLERTRLWAVRCIEEHFRLTEDRAGKPYQALFGVIQGAQYEDLRRKACRDLGAMPFDGFGIGGALEKENLGTIVRWCNEELPEDKPRHLLGISEPDDIFTAIENGADTFDCVSPTRVARNSAFYTPYGRFNLSGAKYKRDFGPLQEGCDCYACANYSRAYIHHLFKAKEMVSATLISIHNERFVVKMVDDARLAIESGTFFDFKAETLGRYYS

SEQ ID NO: 59468 - protein, 451 aa, unidentified
  source 1..451: note = Pseudarthrobacter sp.
  REGION 1..451: note = tr|A0A3P5WF80|A0A3P5WF80_9MICC Queuine tRNA-ribosyltransferase OS=Pseudarthrobacter sp. T11b; OX = 2483813 GN=tgt PE=3 SV=1
MPANPAPDQSPATPVSDRHPGGALSAAPASTFTARQAEFGFQIGTRLAESCAPTAAHVAQNGGDFLGRTGVISTPHGEIRTPAFIAVGTKATVKAVLPESMADLGAQALLANAYHLYLQPGADILDEAGGLGSFMNWPGPTFTDSGGFQVMSLGSGFKKVIDMKSVDTSGPDDSVAPGKERLAHIDDDGVWFKSHLNGDKHRFSPEISMQVQHQIGADIMFAFDELTTLQNSRGYQEESLERTRLWALRCIAEHANLTEARATKPYQALFGVIQGAQYEDLRRQACLDLGAMPFDGFGIGGALEKENLGTIVRWCNEELPENKPRHLLGISEPDDIFTAIENGADTFDCVSPTRVARNSAFYTPQGRFNLSGAKYKRDFGPLQDGCDCYTCTNYSRAYIHHLFKAKEMLSATLISIHNERFVVKMVDDARLAIEAGTFFDFKAETLGQYYA

SEQ ID NO: 59469 - protein, 448 aa, unidentified
  source 1..448: note = Pseudarthrobacter sulfonivorans
  REGION 1..448: note = tr|A0A0U3NVW3|A0A0U3NVW3_9MICC Queuine tRNA-ribosyltransferase OS=Pseudarthrobacter sulfonivorans; OX = 121292 GN=tgt PE=3 SV=1
MPANPASAPFVSVSAASADPVAAAAGSAAAADQSQFSFAVGTRLADSCAPSSAQVSASGGEFLGRTGTITTPHGKIRTPAFIAVGTKATVKSVLPESMADLGAQALLANAYHLYLQPGADILDEAGGLGAFMNWSGPTFTDSGGFQVMSLGSGFKKVIDMKSVDTSGPDDAVAPGKERLAHIDDDGVWFKSHLNGDRHRFSPEISMQVQHQIGADIIFAFDELTTLQNSRGYQEESLERTRLWALRCLEEHFRLTAERVGKPYQALFGVIQGAQYEDLRRKACRDLGAMDFDGYGIGGALEKENLGTIVRWCNEELPEDKPRHLLGISEPDDIFTAIENGADTFDCVSPTRVARNSAFYTPAGRFNLSGAKYKRDFGPLQDGCDCYACANYSRAYIHHLFKAKEMLSATLISIHNERFVVKMVDDARLAIEAGTFFEFKAETLAQYYR

SEQ ID NO: 59470 - protein, 375 aa, unidentified
  source 1..375: note = Pseudescherichia vulneris
  REGION 1..375: note = tr|A0A090VTP3|A0A090VTP3_PSEVU Queuine tRNA-ribosyltransferase OS=Pseudescherichia vulneris NBRC 102420 OX=1115515 GN=tgt PE=3 SV=1
MKFELDTTDGRARRGRLVFARGVVETPAFMPVGTYGTVKGMTPEEVEATGAQILLGNTFHLWLRPGQEIMKLHGDLHDFMQWKGPILTDSGGFQVFSLGDIRKITEAGVHFRNPINGDPIFLDPEKSMEIQYDLGSDIVMIFDECTPYPADWDYAKRSMEMSLRWAQRSRDRFDSLGNKNALFGIIQGSVYEDLRDISVKGLVEIGFDGYAVGGLAVGEPKEDMHRILEHVCPQIPADKPRYLMGVGKPEDLVEGVRRGIDMFDCVMPTRNARNGHLFVTNGVVKIRNAKYKSDTGPLDEECDCYTCRNYSLAYLHHLDRCNEILGARLNTIHNLRHYQRLMAGLRKAIEEGKLESFVTDFYERQGRPVPPLNVD

SEQ ID NO: 59471 - protein, 371 aa, unidentified
  source 1..371: note = Pseudidiomarina sp.
  REGION 1..371: note = tr|A0A443YYA9|A0A443YYA9_9GAMM Queuine tRNA-ribosyltransferase OS=Pseudidiomarina sp. R04H25; OX = 2487740 GN=tgt PE=3 SV=1
MKFELLKTSGKARRGRMTFARGVVDTPAFMPVGTAGTVKGMTPEEVKATGAQICLGNTFHLMLRPGTAIIKQHGDLHDFMNWDKPILTDSGGFQVFSLGELRKITEEGVTFRSPINGEKILLTPEKSMEVQRDLGSDIVMIFDECTPYPATQAEARSSMELSLRWAERSKTAHGDNPSALFGIIQGGMYEELRSISLEGLTDIGFDGYAIGGLSVGEPKEDMMRILDHIAPEMPIDKPRYLMGVGKPEDLVEAVRRGVDMFDCVMPTRNARNGHLFISTGVVKIRNAVHRTDTGPLDPECDCYTCKNYSRAYLHHLDRSNEMLGGRLNTIHNLHFYQKVMQDLRDAIEQDRLEEHVAEFYAKRNLDVPALK

SEQ ID NO: 59472 - protein, 374 aa, unidentified
  source 1..374: note = Pseudoalteromonadaceae bacterium
  REGION 1..374: note = tr|A0A2D7MZU6|A0A2D7MZU6_9GAMM Queuine tRNA-ribosyltransferase OS=Pseudoalteromonadaceae bacterium OX=2026783 GN=tgt PE=3 SV=1
MKFELDRTDGKARRGRLIFDRGVIETPAFMPVGTYGTVKGMTPDEVKATGAQICLGNTFHLMLRPGTEIIKQHGDLHDFMNWDFPILTDSGGFQVFSLGAMRKITEEGVLFQSPVNGDQIMMSPEKSMEVQRDLGSDIVMIFDECTPYPATEKEAKDSMELSLRWAKRSKEGHGDNPSALFGIIQGGMYPELRAQSQKGLEEIGFDGYALGGLSVGEPKNEMMNILDHCAYKMPEDKPRYLMGVGKPEDLVESVRRGIDMFDCVMPTRNARNGHLFITTGTIKIRNAVHKTDTGPLDPECDCHTCKNYSRAYLHHLDKCNEILGARLNTIHNLRYYQRVMEGLRNAISEGKLEEFVSDFYARRGQDVPELADIN

SEQ ID NO: 59473 - protein, 375 aa, unidentified
  source 1..375: note = Pseudoalteromonadaceae bacterium
  REGION 1..375: note = tr|A0A2D6VNH6|A0A2D6VNH6_9GAMM Queuine tRNA-ribosyltransferase OS=Pseudoalteromonadaceae bacterium OX=2026783 GN=tgt PE=3 SV=1
MKFELDRTDGKARRGRLIFERGVVETPAFMPVGTYGTVKGMTPDEVKDTGAQICLGNTFHLMLRPGTEIIKQHGDLHDFMNWDRPILTDSGGFQVFSLGAMRKITEEGVMFSSPVNGEKIMLSPEKAMQVQRDLGSDIVMIFDECTPYPATEKEAKDSMELSLRWAKRSKEGHGDNPAALFGIIQGGMYPELRAQSQKGLEEIGFDGYALGGLSVGEPKNEMINILDHCAYKMPEDKPRYLMGVGKPEDLVEAVRRGIDMFDCVMPTRNARNGHLFVTGGIVKIRNAVHKTDTGPLDPECDCHTCKNYSRAYLHHLDKCNEILGARLNTIHNLRYYQRVMEGLRNAISNGKLDEFVADFYARRGQEVPELADTSD

SEQ ID NO: 59474 - protein, 374 aa, Pseudoalteromonas agarivorans; identical to SEQ ID NO: 59472
  REGION 1..374: note = tr|A0A290RW87|A0A290RW87_9GAMM Queuine tRNA-ribosyltransferase OS=Pseudoalteromonas agarivorans DSM 14585 OX=1312369 GN=tgt PE=3 SV=1

SEQ ID NO: 59475 - protein, 374 aa, Pseudoalteromonas agarivorans; identical to SEQ ID NO: 59472
  REGION 1..374: note = tr|N6W674|N6W674_9GAMM Queuine tRNA-ribosyltransferase OS=Pseudoalteromonas agarivorans S816 OX=1307437 GN=tgt PE=3 SV=1

SEQ ID NO: 59476 - protein, 375 aa, Pseudoalteromonas aliena
  REGION 1..375: note = tr|A0A1Q2GYH9|A0A1Q2GYH9_9GAMM Queuine tRNA-ribosyltransferase OS=Pseudoalteromonas aliena; OX = 247523 GN=tgt PE=3 SV=1
MKFELDRTDGKARRGRLIFDRGVIETPAFMPVGTYGTVKGMTPDEVKATGAQICLGNTFHLMLRPGTEIIKQHGDLHDFMNWDFPILTDSGGFQVFSLGAMRKITEEGVLFSSPVNGEKIMMSPEKSMEVQRDLGSDIVMIFDECTPYPATEKEAKDSMELSLRWAKRSKEGHGDNPSALFGIIQGGMYPELRAQSQAGLEEIGFDGYALGGLSVGEPKNEMMNILDHCAFKMPEDKPRYLMGVGKPEDLVESVRRGIDMFDCVMPTRNARNGHLFITTGVVKIRNAVHKTDTGPLDPECDCHTCGNYSRAYLHHLDKCNEILGARLNTIHNLRYYQRVMEGLRNAISEGKLEEFVQDFYARRGQEVPELADIKN

SEQ ID NO: 59477 - protein, 374 aa, unidentified
  source 1..374: note = Pseudoalteromonas amylolytica
  REGION 1..374: note = tr|A0A1S1MW09|A0A1S1MW09_9GAMM Queuine tRNA-ribosyltransferase OS=Pseudoalteromonas amylolytica; OX = 1859457 GN=tgt PE=3 SV=1
MKFELDRTDGKARRGRLIFERGVVETPAFMPVGTYGTVKGMTPDELKGTGAQICLGNTFHLMLRPGTEIIKQHGDLHDFMNWDKPILTDSGGFQVFSLGAMRKITEEGVLFKSPVNGEKIMLSPEKAMQVQCDLGSDIVMIFDECTPYPATEKEARDSMELSLRWAKRSKEGHGDNPAALFGIIQGGMYPELRAESQKGLEEIGFDGYALGGLSVGEPKEDMIRILDHCAYKMPEDKPRYLMGVGKPEDLVEAVRRGIDMFDCVMPTRNARNGHLFITGGVVKIRNAVHKTDTGPLDPECDCHTCENYSRAYLHHLDKCNEILGARLNTIHNLRYYQRVMEGLRNAISEGQLDAFVQDFYARRGQEVPPLAETK

SEQ ID NO: 59478 - protein, 375 aa, Pseudoalteromonas arctica
  REGION 1..375: note = tr|A0A290S8Q2|A0A290S8Q2_9GAMM Queuine tRNA-ribosyltransferase OS=Pseudoalteromonas arctica A 37-1-2 OX=1117313 GN=tgt PE=3 SV=1
MKFELDCTDGKARRGRLIFDRGVIETPAFMPVGTYGTVKGMTPDEVKATGAQICLGNTFHLMLRPGTEIIKQHGDLHDFMNWDFPILTDSGGFQVFSLGAMRKITEEGVLFQSPVNGDEIMMSPEKSMEVQRDLGSDIVMIFDECTPYPATEKEAKDSMELSLRWAKRSKEGHGDNPSALFGIIQGGMYPELRAQSQAGLEEIGFDGYALGGLSVGEPKNEMMNILDHCAFKMPEDKPRYLMGVGKPEDLVESVRRGIDMFDCVMPTRNARNGHLFITTGVVKIRNAVHKTDTGPLDPECDCHTCGNYSRAYLHHLDKCNEILGARLNTIHNLRYYQRVMEGLRNAISEGKLEEFVQDFYARRGQDVPELVDIKN

SEQ ID NO: 59479 - protein, 370 aa, Pseudoalteromonas atlantica
  REGION 1..370: note = sp|Q15WI4|TGT_PSEA6 Queuine tRNA-ribosyltransferase; OS = Pseudoalteromonas atlantica (strain T6c / ATCC BAA-1087) OX=342610 GN=tgt PE=3 SV=1
MQFELDNTDGKARRGRLKFDRGIVETPAFMPVGTYGTVKGMTPEELDETGAHICLGNTFHLMLRPGTEIIKQHGDLHDFMHWQKPILTDSGGFQVFSLGDLRKITEEGVTFRSPINGEKILLTPEKSMQVQRDLGSDIVMIFDECTPHPATESEARQSMELSLRWAKRSKAEHGDNPSALFGIIQGGMYEGLRDVSLKGLEDIGFDGYAIGGLSVGEPKEDMIRILDHTTDKIPAHKPRYLMGVGKPEDLVEGVRRGVDMFDCVMPTRNARNGHLFVTSGIVKIRNAAHKTDTSPLDDKCDCYTCKNYSRSYLHHLDKCNEILGARLNTIHNLRYYQRVMQGLRDAIAEQKLDEFVADFYAQKDMPVPAL

SEQ ID NO: 59480 - protein, 374 aa, Pseudoalteromonas atlantica; identical to SEQ ID NO: 59472
  REGION 1..374: note = tr|A0A510ZJL0|A0A510ZJL0_PSEAF Queuine tRNA-ribosyltransferase OS=Pseudoalteromonas atlantica; OX = 288 GN=tgt PE=3 SV=1

SEQ ID NO: 59481 - protein, 374 aa, Pseudoalteromonas byunsanensis
  REGION 1..374: note = tr|A0A1S1N9D5|A0A1S1N9D5_9GAMM Queuine tRNA-ribosyltransferase OS=Pseudoalteromonas byunsanensis; OX = 327939 GN=tgt PE=3 SV=1
MKFELDRTDGKARRGRLIFERGVVETPAFMPVGTYGTVKGMTPDELKGTGAQICLGNTFHLMLRPGTEIIKQHGDLHDFMNWDKPILTDSGGFQVFSLGAMRKITEEGVLFKSPVNGEKIMLSPEKAMQVQCDLGSDIVMIFDECTPYPATEKEARDSMELSLRWAKRSKEGHGDNPAALFGIIQGGMYPELRAESQKGLEEIGFDGYALGGLSVGEPKEDMIRILDHCAYKMPEDKPRYLMGVGKPEDLVEAVRRGIDMFDCVMPTRNARNGHLFITGGVVKIRNAVHKTDTGPLDPECDCHTCENYSRAYLHHLDKCNEILGARLNTIHNLRYYQRVMEGLRNAISEGQLDAFVQDFYARRGQDVPPLAETK

SEQ ID NO: 59482 - protein, 375 aa, Pseudoalteromonas carrageenovora
  REGION 1..375: note = tr|A0A2K4XCW7|A0A2K4XCW7_PSEVC Queuine tRNA-ribosyltransferase OS=Pseudoalteromonas carrageenovora IAM 12662 OX=1314868 GN=tgt PE=3 SV=1
MKFELDRTDGKARRGRLIFDRGVIETPAFMPVGTYGTVKGMTPDEVKATGAQICLGNTFHLMLRPGTEIIKQHGDLHDFMNWDFPILTDSGGFQVFSLGAMRKITEEGVLFQSPVNGDEIMMSPEKSMEVQRDLGSDIVMIFDECTPYPATEKEAKDSMELSLRWAKRSKEGHGDNPSALFGIIQGGMYPELRAQSQAGLEEIGFDGYALGGLSVGEPKNEMMNILDHCAYKMPEDKPRYLMGVGKPEDLVESVRRGIDMFDCVMPTRNARNGHLFITTGIVKIRNAVHKTDTGPLDPECDCHTCTNYSRAYLHHLDKCNEILGARLNTIHNLRYYQRVMEGLRNAISEGKLEEFVQDFYARRGQEVPELVETTN

SEQ ID NO: 59483 - protein, 375 aa, Pseudoalteromonas citrea
  REGION 1..375: note = tr|U1JBL2|U1JBL2_9GAMM Queuine tRNA-ribosyltransferase OS=Pseudoalteromonas citrea DSM 8771 OX=1117314 GN=tgt PE=3 SV=1
MKFELDRTDGKARRGRLIFDRGVVETPAFMPVGTYGTVKGMTPDELKGTGAEICLGNTFHLMLRPGTEIIKQHGDLHDFMNWDKPILTDSGGFQVFSLGAMRKISEEGVLFQSPVNGEKIMLSPEKAMQVQCDLGSDIVMIFDECTPYPATEKEARDSMELSLRWAKRSKEGHGDNPSALFGIIQGGMYPELRAVSQKGLEEIGFDGYALGGLSVGEPKEDMIRILDHCAYKMPEDKPRYLMGVGKPEDLVEAVRRGIDMFDCVMPTRNARNGHLFITGGVVKIRNAVHKTDTGPLDPECDCHTCTGYSRAYLHHLDKCNEILGARLNTIHNLRYYQRVMEGLRNAIGEGKLDEFVADFYARRDLPVPPLADTTS

SEQ ID NO: 59484 - protein, 379 aa, Pseudoalteromonas denitrificans
  REGION 1..379: note = tr|A0A1I1DVX7|A0A1I1DVX7_9GAMM Queuine tRNA-ribosyltransferase OS=Pseudoalteromonas denitrificans DSM 6059 OX=1123010 GN=tgt PE=3 SV=1
MKFELDCTDGKARRGRLIFERGVVETPAFMPVGTYGTVKGMTPDEVKETGAHICLGNTFHLMLRPGTEIIKQHGDLHDFMNWDKPILTDSGGFQVFSLGKMRKITEEGVMFSSPVNGDKIMLTPEKSMQVQRDLGSDIVMIFDECTPYPATEKEAKDSMMLSQRWAKRSKAEHINVEEGKKPSALFGIIQGGMYPELRAQSQKGLEEIGFDGYALGGLSVGEPKEDMINILDECAYKMPETKPRYLMGVGKPEDLVESVRRGIDMFDCVMPTRNARNGFLFITDGIVKIRNAVHKTDTGPVDSECDCHTCKNYSRAYLHHLDKCNEILGSRLNTIHNLRYYQRLMQGLRDAIGEGKLTEFVENFYAIRGLEVPELKENN

SEQ ID NO: 59485 - protein, 375 aa, Pseudoalteromonas distincta
  REGION 1..375: note = tr|F3BE13|F3BE13_9GAMM Queuine tRNA-ribosyltransferase OS=Pseudoalteromonas distincta; OX = 77608 GN=tgt PE=3 SV=1
MKFELDCTDGKARRGRLIFDRGVIETPAFMPVGTYGTVKGMTPDEVKATGAQICLGNTFHLMLRPGTEIIKQHGDLHDFMNWDFPILTDSGGFQVFSLGAMRKITEEGVLFQSPVNGDEIMMSPEKSMEVQRDLGSDIVMIFDECTPYPATEKEAKDSMELSLRWAKRSKEGHGDNPSALFGIIQGGMYPELRAQSQAGLEEIGFDGYALGGLSVGEPKNEMMNILDHCAFKMPEDKPRYLMGVGKPEDLVESVRRGIDMFDCVMPTRNARNGHLFITTGVVKIRNAVHKTDTGPLDPECDCHTCKNYSRAYLHHLDKCNEILGARLNTIHNLRYYQRVMEGLRNAISEGKLEEFVQDFYARRGQDVPELADIKN

SEQ ID NO: 59486 - protein, 375 aa, Pseudoalteromonas elyakovii; identical to SEQ ID NO: 59485
  REGION 1..375: note = tr|A0A558I1E7|A0A558I1E7_9GAMM Queuine tRNA-ribosyltransferase OS=Pseudoalteromonas elyakovii; OX = 81037 GN=tgt PE=3 SV=1

SEQ ID NO: 59487 - protein, 374 aa, Pseudoalteromonas espejiana
  REGION 1..374: note = tr|A0A510XX53|A0A510XX53_9GAMM Queuine tRNA-ribosyltransferase OS=Pseudoalteromonas espejiana; OX = 28107 GN=tgt PE=3 SV=1
MKFELDRTDGKARRGRLIFDRGVIETPAFMPVGTYGTVKGMTPDEVKATGAQICLGNTFHLMLRPGTEIIKQHGDLHDFMNWDFPILTDSGGFQVFSLGAMRKITEEGVLFQSPVNGDQIMMSPEKSMEVQRDLGSDIVMIFDECTPYPATEKEAKDSMELSLRWAKRSKEGHGDNPSALFGIIQGGMYPELRAQSQKGLEEIGFDGYALGGLSVGEPKNEMMNILDHCAFKMPEDKPRYLMGVGKPEDLVESVRRGIDMFDCVMPTRNARNGHLFITTGTIKIRNAVHKTDTGPLDPECDCHTCKNYSRAYLHHLDKCNEILGARLNTIHNLRYYQRVMEGLRNAISEGKLEEFVSDFYARRGQDVPELADIN

SEQ ID NO: 59488 - protein, 375 aa, unidentified
  source 1..375: note = Pseudoalteromonas fuliginea
  REGION 1..375: note = tr|A0A063KN96|A0A063KN96_9GAMM Queuine tRNA-ribosyltransferase OS=Pseudoalteromonas fuliginea; OX = 1872678 GN=tgt PE=3 SV=1
MKFELDRTDGKARRGRLIFDRGVIETPAFMPVGTYGTVKGMTPDEVKATGAQICLGNTFHLMLRPGTEIIKQHGDLHDFMNWDFPILTDSGGFQVFSLGAMRKITEEGVLFQSPVNGDEIMMSPEKSMEVQRDLGSDIVMIFDECTPYPATEKEAKDSMELSLRWAKRSKEGHGDNPSALFGIIQGGMYPELRAQSQAGLEDIGFDGYALGGLSVGEPKNEMMNILDHCAFKMPEDKPRYLMGVGKPEDLVESVRRGIDMFDCVMPTRNARNGHLFITTGVVKIRNAVHKTDTGPLDPECDCHTCGNYSRAYLHHLDKCNEILGARLNTIHNLRYYQRVMEGLRNAISEGKLEEFVKDFYARRGQDVPELADIKN

SEQ ID NO: 59489 - protein, 375 aa, unidentified
  source 1..375: note = Pseudoalteromonas fuliginea
  REGION 1..375: note = tr|A0A5B0UHT4|A0A5B0UHT4_9GAMM Queuine tRNA-ribosyltransferase OS=Pseudoalteromonas fuliginea; OX = 1872678 GN=tgt PE=3 SV=1
MKFELDRTDGKARRGRLIFDRGVIETPAFMPVGTYGTVKGMTPDEVKATGAQICLGNTFHLMLRPGTEIIKQHGDLHDFMNWDFPILTDSGGFQVFSLGAMRKITEEGVLFQSPVNGDEIMMSPEKSMEVQRDLGSDIVMIFDECTPYPATEKEAKDSMELSLRWAKRSKEGHGDNPSALFGIIQGGMYPELRAQSQAGLEDIGFDGYALGGLSVGEPKNEMMNILDHCAFKMPEDKPRYLMGVGKPEDLVESVRRGIDMFDCVMPTRNARNGHLFITTGVVKIRNAVHKTDTGPLDPECDCHTCKNYSRAYLHHLDKCNEILGARLNTIHNLRYYQRVMEGLRNAISEGKLEEFVQDFYARRGQDVPELADIKN

SEQ ID NO: 59490 - protein, 375 aa, Pseudoalteromonas haloplanktis
  REGION 1..375: note = sp|Q3ILB8|TGT_PSEHT Queuine tRNA-ribosyltransferase; OS = Pseudoalteromonas haloplanktis (strain TAC 125); OX = 326442 GN=tgt PE=3 SV=1
MKFELDTTDGKARRGRLIFDRGVIETPAFMPVGTYGTVKGMTPDEVKATGAQVCLGNTFHLMLRPGTEIIKQHGGLHKFMNWDFPILTDSGGFQVFSLGAMRKITEEGVLFSSPVNGEKIMMTPESSMQVQRDLGSDIVMIFDECTPYPATEKEAKDSMELSLRWAKRSKEGHGDNPSALFGIIQGGMYPELRAQSQAGLEEIGFDGYALGGLSVGEPKNEMINILDHCAYKMPADKPRYLMGVGKPEDLVESVRRGIDMFDCVMPTRNARNGHLFITTGVVKIRNAVHKTDTGPLDPECDCHTCGNYSRAYLHHLDKCNEILGARLNTIHNLRYYQRVMEGLRNAISAGKLDEFVQDFYARRGQDVPELADITN

SEQ ID NO: 59491 - protein, 375 aa, Pseudoalteromonas issachenkonii
  REGION 1..375: note = tr|A0A290SGK8|A0A290SGK8_9GAMM Queuine tRNA-ribosyltransferase OS=Pseudoalteromonas issachenkonii; OX = 152297 GN=tgt PE=3 SV=1
MKFELDCTDGKARRGRLIFDRGVIETPAFMPVGTYGTVKGMTPDEVKATGAQICLGNTFHLMLRPGTEIIKQHGDLHDFMNWDFPILTDSGGFQVFSLGAMRKITEEGVMFQSPVNGDQIMMSPEKSMEVQRDLGSDIVMIFDECTPYPATEKEAKDSMELSLRWAKRSKEGHGDNPSALFGIIQGGMYPELRAQSQAGLEEIGFDGYALGGLSVGEPKHEMINILDHCAYKMPENKPRYLMGVGKPEDLVESVRRGIDMFDCVMPTRNARNGHLFITTGIIKIRNAVHKTDTGPLDPECDCHTCKNYSRAYLHHLDKCNEILGARLNTIHNLRYYQRVMEGLRNAISEGQLETFVHDFYARRGQEVPELADTTN

SEQ ID NO: 59492 - protein, 375 aa, Pseudoalteromonas lipolytica
  REGION 1..375: note = tr|A0A1I7ARY1|A0A1I7ARY1_9GAMM Queuine tRNA-ribosyltransferase OS=Pseudoalteromonas lipolytica; OX = 570156 GN=tgt PE=3 SV=1
MKFELDRTDGKARRGRLIFERGVVETPAFMPVGTYGTVKGMTPDEVKDTGAQICLGNTFHLMLRPGTEIIKQHGDLHDFMNWDRPILTDSGGFQVFSLGAMRKITEEGVMFSSPVNGEKIMLSPEKAMQVQRDLGSDIVMIFDECTPYPATEKEAKDSMELSLRWAKRSKEGHGDNPAALFGIIQGGMYPELRAQSQKGLEDIGFDGYALGGLSVGEPKNEMINILDHCAYKMPADKPRYLMGVGKPEDLVEAVRRGIDMFDCVMPTRNARNGHLFVTGGIVKIRNAVHKTDTGPLDPECDCHTCKNYSRAYLHHLDKCNEILGARLNTIHNLRYYQRVMEGLRNAISHGKLDEFVADFYARRGQEVPELADTSD

SEQ ID NO: 59493 - protein, 375 aa, Pseudoalteromonas lipolytica; identical to SEQ ID NO: 59492
  REGION 1..375: note = tr|Z5XLK1|Z5XLK1_9GAMM Queuine tRNA-ribosyltransferase OS=Pseudoalteromonas lipolytica SCSIO 04301 OX=1452721 GN=tgt PE=3 SV=1

SEQ ID NO: 59494 - protein, 376 aa, Pseudoalteromonas luteoviolacea
  REGION 1..376: note = tr|A0A166XJ20|A0A166XJ20_9GAMM Queuine tRNA-ribosyltransferase OS=Pseudoalteromonas luteoviolacea DSM 6061 OX=1365250 GN=tgt PE=3 SV=1
MKFELDCTHGKARRGRLVFERGVVETPAFMPVGTYGTVKGMTPDELNETGAHICLGNTFHLMLRPGTEIIKQHGDLHDFMNWDKPILTDSGGFQVFSLGAMRKISEEGVLFKSPVNGEKIMLSPEKAMEVQRDLGSDIVMIFDECTPYPATEKEAKDSMELSLRWAKRSKEAHGDNPSALFGIIQGGMYPELRAESQKGLEDIGFDGYALGGLSVGEPKEEMVKILDHCAYKMPEQKPRYLMGVGKPEDLVEAVRRGIDMFDCVMPTRNARNGHLFVTDGVIKIRNAVHKTDTSPLDAECDCHTCKNYSRAYLHHLDKCNEILGARLNTIHNLRYYQRLMEGMRNALSEGTFDEFVADFYERRGLPVPPLADVEAE

SEQ ID NO: 59495 - protein, 376 aa, Pseudoalteromonas luteoviolacea
  REGION 1..376: note = tr|A0A0C1MLT0|A0A0C1MLT0_9GAMM Queuine tRNA-ribosyltransferase OS=Pseudoalteromonas luteoviolacea; OX = 43657 GN=tgt PE=3 SV=1
MKFELDCTHGKARRGRLVFDRGVVETPAFMPVGTYGTVKGMTPDELKDTGAHICLGNTFHLMLRPGTEIIKQHGDLHDFMNWDKPILTDSGGFQVFSLGAMRKISEEGVLFKSPVNGEKIMLSPEKAMEVQRDLGSDIVMIFDECTPYPATEKEAKDSMELSLRWAKRSKEAHGDNPSALFGIIQGGMYPELRAESQKGLEDIGFDGYALGGLSVGEPKEEMVKILDHCAYKMPEQKPRYLMGVGKPEDLVEAVRRGIDMFDCVMPTRNARNGHLFVTDGVIKIRNAVHKTDTSPLDAECDCHTCKNYSRAYLHHLDKCNEILGARLNTIHNLRYYQRLMEGMRNALSEGTFDEFVADFYERRGLPVPPLADVEAE

SEQ ID NO: 59496 - protein, 375 aa, Pseudoalteromonas marina; identical to SEQ ID NO: 51559
  REGION 1..375: note = tr|U1JPP2|U1JPP2_9GAMM Queuine tRNA-ribosyltransferase OS=Pseudoalteromonas marina DSM 17587 OX=1117316 GN=tgt PE=3 SV=1

SEQ ID NO: 59497 - protein, 375 aa, unidentified
  source 1..375: note = Pseudoalteromonas neustonica
  REGION 1..375: note = tr|A0A558IPG8|A0A558IPG8_9GAMM Queuine tRNA-ribosyltransferase OS=Pseudoalteromonas neustonica; OX = 1840331 GN=tgt PE=3 SV=1
MKFELDRTDGKARRGRLIFDRGVVETPAFMPVGTYGTVKGMTPDEVKDTGAHICLGNTFHLMLRPGTEIIKQHGGLHGFMNWDKPILTDSGGFQVFSLGAMRKITEEGVLFSSPVNGEKIMLSPEKAMQVQRDLGSDIVMIFDECTPYPATEKEAKDSMELSLRWAKRSKEGHGDNPSALFGIIQGGMYPELRAQSQQGLEEIGFDGYALGGLSVGEPKNEMINILDHCAYKMPENKPRYLMGVGKPEDLVEAVRRGIDMFDCVMPTRNARNGHLFITGGIVKIRNAVHKTDTGPLDPECDCHTCKNYSRAYLHHLDKCNEILGARLNTIHNLRYYQRVMEGLRNAIGDGKLDEFVNDFYARRGQEVPELADTTN

SEQ ID NO: 59498 - protein, 375 aa, Pseudoalteromonas nigrifaciens
  REGION 1..375: note = tr|A0A379HEB7|A0A379HEB7_9GAMM Queuine tRNA-ribosyltransferase OS=Pseudoalteromonas nigrifaciens; OX = 28109 GN=tgt PE=3 SV=1
MKFELDTTDGKARRGRLIFDRGVIETPAFMPVGTYGTVKGMTPDEVKATGAQVCLGNTFHLMLRPGTEIIKQHGGLHKFMNWDFPILTDSGGFQVFSLGAMRKITEEGVLFSSPVNGEKIMMTPESSMQVQRDLGSDIVMIFDECTPYPATEKEAKDSMELSLRWAKRSKEGHGDNPSALFGIIQGGMYPELRAQSQAGLEEIGFDGYALGGLSVGEPKNEMINILDHCAYKMPADKPRYLMGVGKPEDLVESVRRGIDMFDCVMPTRNARNGHLFITTGVVKIRNAVHKTDTGPLDPECDCHTCGNYSRAYLHHLDKCNEILGARLNTIHNLRYYQRVMEGLRNAISAGKLDEFVQNFYARRGQDVPELADITN

SEQ ID NO: 59499 - protein, 379 aa, Pseudoalteromonas peptidolytica
  REGION 1..379: note = tr|A0A510U771|A0A510U771_9GAMM Queuine tRNA-ribosyltransferase OS=Pseudoalteromonas peptidolytica; OX = 61150 GN=tgt PE=3 SV=1
MKFELDRKQGKARRGRLIFDRGVVETPAFMPVGTYGTVKGMTPDELKETGAHICLGNTFHLMLRPGTEIIKQHGDLHDFMNWDKPILTDSGGFQVFSLGAMRKISEEGVLFKSPVNGEKIMLSPEKAMEVQRDLGSDIVMIFDECTPYPATEKEAKDSMELSLRWAKRSKEAHGDNPSALFGIIQGGMYPELRAESQKGLEEIGFDGYALGGLSVGEPKEDMINILDQCAYKMPEQKPRYLMGVGKPEDLVEAVRRGIDMFDCVMPTRNARNGHLFVTGGVVKIRNAAHKTDTSPLDAECDCHTCQNYSRAYLHHLDKCNEILGARLNTIHNLRYYQRLMEGMRNALSEGTFDEFVEDFYARRGIPVPELADVGLTENN

SEQ ID NO: 59500 - protein, 374 aa, Pseudoalteromonas phenolica
  REGION 1..374: note = tr|A0A0S2JXZ5|A0A0S2JXZ5_9GAMM Queuine tRNA-ribosyltransferase OS=Pseudoalteromonas phenolica; OX = 161398 GN=tgt PE=3 SV=1
MKFELDRTDGKARRGRLIFDRGVVETPAFMPVGTYGTVKGMTPDELKDTGAHICLGNTFHLMLRPGTEIIKQHGDLHDFMNWDKPILTDSGGFQVFSLGAMRKISEEGVMFKSPVNGEKIMLSPEKAMQVQRDLGSDIVMIFDECTPYPATEKEARDSMELSLRWAKRSKEGHGDNPSALFGIIQGGMYPELRAESQKGLEEIGFDGYALGGLSVGEPKEDMINILDHCAYKMPEDKPRYLMGVGKPEDLVEAVRRGIDMFDCVMPTRNARNGHLFISTGVIKIRNAVHKTDTGPLDPECDCHTCKNYSRAYLHHLDKCNEILGARLNTIHNLRFYQRVMEGLRNAIAEGKLDEFVEDFYAKRGLPVPPLAETE

SEQ ID NO: 59501 - protein, 375 aa, unidentified
  source 1..375: note = Pseudoalteromonas piratica
  REGION 1..375: note = tr|A0A0A7EI61|A0A0A7EI61_9GAMM Queuine tRNA-ribosyltransferase OS=Pseudoalteromonas piratica; OX = 1348114 GN=tgt PE=3 SV=1
MKFELDNTDGKARRGRLIFDRGVVETPAFMPVGTYGTVKGMTPEELKGTGAEICLGNTFHLMLRPGTEIIKQHGDLHDFMGWDKPILTDSGGFQVFSLGEMRKISEEGVMFRSPVNGEKIMLSPEKAMQVQRDLGSDIVMIFDECTPYPATEKEARDSMELSLRWAKRSKEGHGDNPSALFGIIQGGMYPELREISQKGLEEIGFDGYALGGLSVGEPKEEMIKILDHCAYKMPEDKPRYLMGVGKPEDLVEAVRRGIDMFDCVMPTRNARNGHLFITTGVIKIRNAVHKTDTGPLDPECDCHTCQNFSRAYLHHLDKCNEILGARLNTIHNLRYYQRVMEGLRNAIAENKLDEFVADFYARRDLPVPELKQIED

SEQ ID NO: 59502 - protein, 379 aa, Pseudoalteromonas piscicida
  REGION 1..379: note = tr|A0A3B6XYY9|A0A3B6XYY9_PSEO7 Queuine tRNA-ribosyltransferase OS=Pseudoalteromonas piscicida; OX = 43662 GN=tgt PE=3 SV=1
MKFELDRKQGKARRGRLIFERGVVETPAFMPVGTYGTVKGMTPDELKETGAHICLGNTFHLMLRPGTEIIKQHGDLHDFMNWDKPILTDSGGFQVFSLGAMRKISEEGVLFKSPVNGEKIMLSPEKAMEVQRDLGSDIVMIFDECTPYPATEKEAKDSMELSLRWAKRSKDAHGDNPSALFGIIQGGMYPELRAESQKGLEEIGFDGYALGGLSVGEPKEDMINILDQCAYKMPENKPRYLMGVGKPEDLVEAVRRGIDMFDCVMPTRNARNGHLFVTGGVVKIRNAAHKTDTSPLDAECDCHTCKNYSRAYLHHLDKCNEILGARLNTIHNLRYYQRLMEGMRNALSEGTFDEFVEDFYARRGIPVPELADVGLTENN

SEQ ID NO: 59503 - protein, 379 aa, Pseudoalteromonas piscicida
  REGION 1..379: note = tr|A0A0F4P7D3|A0A0F4P7D3_PSEO7 Queuine tRNA-ribosyltransferase OS=Pseudoalteromonas piscicida; OX = 43662 GN=tgt PE=3 SV=1
MKFELDSKQGKARRGRLIFDRGVVETPAFMPVGTYGTVKGMTPDELKETGAHICLGNTFHLMLRPGTEIIKQHGDLHDFMNWDKPILTDSGGFQVFSLGAMRKISEEGVLFKSPVNGEKIMLSPEKAMEVQRDLGSDIVMIFDECTPYPATEKEAKDSMELSLRWAKRSKDAHADNPSALFGIIQGGMYPELRAESQKGLEEIGFDGYALGGLSVGEPKEDMINILDQCAYKMPENKPRYLMGVGKPEDLVEAVRRGIDMFDCVMPTRNARNGHLFVTGGVVKIRNAAHKTDTSPLDAECDCHTCKNYSRAYLHHLDKCNEILGARLNTIHNLRYYQRLMEGMRNALSEGKFDEFVEDFYARRGIAVPELADVGLTENN

SEQ ID NO: 59504 - protein, 375 aa, unidentified
  source 1..375: note = Pseudoalteromonas porphyrae
  REGION 1..375: note = tr|A0A0N1EX95|A0A0N1EX95_9GAMM Queuine tRNA-ribosyltransferase OS=Pseudoalteromonas porphyrae; OX = 187330 GN=tgt PE=3 SV=1
MKFELDRTDGKARRGRLIFDRGVVETPAFMPVGTYGTVKGMTPDEVKDTGAHICLGNTFHLMLRPGTEIIKQHGGLHGFMNWDKPILTDSGGFQVFSLGAMRKISEEGVLFSSPVNGEKIMLSPEKAMQVQRDLGSDIVMIFDECTPYPATEKEAKDSMELSLRWAKRSKEGHSDNPSALFGIIQGGMYPELRAQSQAGLEEIGFDGYALGGLSVGEPKADMINILDHCAYKMPENKPRYLMGVGKPEDLVEAVRRGIDMFDCVMPTRNARNGHLFITGGIVKIRNAVHKTDTGPLDPECDCHTCKNYSRAYLHHLDKCNEILGARLNTIHNLRYYQRVMEGLRNAISEGKLDEFVNDFYARRGQEVPELADTEN

SEQ ID NO: 59505 - protein, 375 aa, unidentified; identical to SEQ ID NO: 59473
  source 1..375: note = Pseudoalteromonas profundi
  REGION 1..375: note = tr|A0A3A3EQU2|A0A3A3EQU2_9GAMM Queuine tRNA-ribosyltransferase OS=Pseudoalteromonas profundi; OX = 1774956 GN=tgt PE=3 SV=1

SEQ ID NO: 59506 - protein, 374 aa, Pseudoalteromonas rubra
  REGION 1..374: note = tr|A0A0F4QV54|A0A0F4QV54_9GAMM Queuine tRNA-ribosyltransferase OS=Pseudoalteromonas rubra; OX = 43658 GN=tgt PE=3 SV=1
MKFELDCTQGKARRGRLIFDRGVVETPAFMPVGTYGTVKGMTPDELKDTGAHICLGNTFHLMLRPGTEIIKQHGDLHDFMNWDKPILTDSGGFQVFSLGAMRKISEEGVLFQSPVNGERIMLSPEKAMEVQRDLGSDIVMIFDECTPYPATEKEARDSMELSLRWAKRSKEAHGDNPSALFGIIQGGMYPELRAESQAGLEDIGFDGYALGGLSVGEPKEDMINILDHCAYKMPEQKPRYLMGVGKPEDLVEAVRRGIDMFDCVMPTRNARNGHLFITGGVIKIRNAVHKTDTGPLDPECDCHTCKNYSRAYLHHLDKCNEILGARLNTIHNLRYYQRLMEGMREAIAAGTFDQFVADFYARRDRPVPPLADTE

SEQ ID NO: 59507 - protein, 374 aa, Pseudoalteromonas rubra; identical to SEQ ID NO: 59506
  REGION 1..374: note = tr|U1KGX1|U1KGX1_9GAMM Queuine tRNA-ribosyltransferase OS=Pseudoalteromonas rubra DSM 6842 OX=1117318 GN=tgt PE=3 SV=1

SEQ ID NO: 59508 - protein, 374 aa, Pseudoalteromonas ruthenica
  REGION 1..374: note = tr|A0A0F4Q3D0|A0A0F4Q3D0_9GAMM Queuine tRNA-ribosyltransferase OS=Pseudoalteromonas ruthenica; OX = 151081 GN=tgt PE=3 SV=1
MKFELDTTDGKARRGRLIFERGVVETPAFMPVGTYGTVKGMTPDELKDTGAHICLGNTFHLMLRPGTEIIKQHGDLHDFMAWDKPILTDSGGFQVFSLGAMRKITEEGVMFRSPVNGEKIMLSPEKAMQVQCDLGSDIVMIFDECTPYPATEKQAKDSMELSLRWAKRSKQAHGDNPSALFGIIQGGMYPELRAQSQAGLEEIDFDGYALGGLSVGEPKEDMINILDHCAYKMPEQKPRYLMGVGKPEDIVEAVRRGIDMFDCVMPTRNARNGHLFVTGGVVKIRNAVHKTDTAPLDSECDCHTCKNYSRAYLHHLDKCNEILGARLNTIHNLRYYQRLMEGLREAIASGKLDAFVADFYARRNTAVPELAETE

SEQ ID NO: 59509 - protein, 374 aa, Pseudoalteromonas sp.
  REGION 1..374: note = tr|A0A4Q6YEY8|A0A4Q6YEY8_9GAMM Queuine tRNA-ribosyltransferase OS=Pseudoalteromonas sp. CO325X; OX = 1777262 GN=tgt PE=3 SV=1
MKFELDTTDGKARRGRLIFERGVVETPAFMPVGTYGTVKGMTPDELKDTGAHICLGNTFHLMLRPGTEIIKQHGDLHDFMAWDKPILTDSGGFQVFSLGAMRKITEEGVMFRSPVNGEKIMLSPEKAMQVQCDLGSDIVMIFDECTPYPATEKQAKDSMELSLRWAKRSKQAHGDNPSALFGIIQGGMYPELRAQSQAGLEEIEFDGYALGGLSVGEPKEDMINILDHCAYKMPEQKPRYLMGVGKPEDIVEAVRRGIDMFDCVMPTRNARNGHLFVTGGVVKIRNAVHKTDTAPLDSECDCHTCKNYSRAYLHHLDKCNEILGARLNTIHNLRYYQRLMEGLREAIASGKLDAFVADFYARRNTAVPELAETE

SEQ ID NO: 59510 - protein, 375 aa, Pseudoalteromonas sp.; identical to SEQ ID NO: 59473
  REGION 1..375: note = tr|A0A4V3P909|A0A4V3P909_9GAMM Queuine tRNA-ribosyltransferase OS=Pseudoalteromonas sp. MEBiC 03607 OX=2563601 GN=tgt PE=3 SV=1

SEQ ID NO: 59511 - protein, 375 aa, Pseudoalteromonas spongiae
  REGION 1..375: note = tr|A0A290T6P4|A0A290T6P4_9GAMM Queuine tRNA-ribosyltransferase OS=Pseudoalteromonas spongiae UST010723-006 OX=1117319 GN=tgt PE=3 SV=1
MKFELDNTDGKARRGRLIFERGVVETPAFMPVGTYGTVKGMTPEELKGTGAEICLGNTFHLMLRPGTEIIKQHGDLHDFMGWDKPILTDSGGFQVFSLGEMRKISEEGVMFRSPVNGEKIMLSPEKAMQVQRDLGSDIVMIFDECTPYPATEKEARDSMELSLRWAKRSKEGHGDNPSALFGIIQGGMYPELREISQKGLEEIGFDGYALGGLSVGEPKEDMINILDHCAYKMPEDKPRYLMGVGKPEDLVEAVRRGIDMFDCVMPTRNARNGHLFITGGVIKIRNAVHKTDTGPLDPECDCHTCENFSRAYLHHLDKCNEILGARLNTIHNLRYYQRVMEGLRNAIAENKLEEFVADFYARRGMPVPELKQIED

SEQ ID NO: 59512 - protein, 375 aa, Pseudoalteromonas tetraodonis
  REGION 1..375: note = tr|A0A1E3WV34|A0A1E3WV34_9GAMM Queuine tRNA-ribosyltransferase OS=Pseudoalteromonas tetraodonis; OX = 43659 GN=tgt PE=3 SV=1
MKFELDCTDGKARRGRLIFDRGVIETPAFMPVGTYGTVKGMTPDEVKATGAQICLGNTFHLMLRPGTEIIKQHGDLHDFMNWDFPILTDSGGFQVFSLGAMRKITEEGVMFQSPVNGDQIMMSPEKSMEVQRDLGSDIVMIFDECTPYPATEKEAKDSMELSLRWAKRSKEGHGDNPSALFGIIQGGMYPELRAQSQAGLEEIGFDGYALGGLSVGEPKHEMINILDHCAYKMPENKPRYLMGVGKPEDLVESVRRGIDMFDCVMPTRNARNGHLFITTGIIKIRNAVHKTDTGPLDPECDCHTCKNYSRAYLHHLDKCNEILGARLNTIHNLRYYQRVMEGLRNAISEGQLEAFVHDFYARRGQEVPELADTTN

SEQ ID NO: 59513 - protein, 375 aa, Pseudoalteromonas tetraodonis
  REGION 1..375: note = tr|A0A290TIR6|A0A290TIR6_9GAMM Queuine tRNA-ribosyltransferase OS=Pseudoalteromonas tetraodonis; OX = 43659 GN=tgt PE=3 SV=1
MKFELDCTDGKARRGRLIFDRGVIETPAFMPVGTYGTVKGMTPDEVKATGAQICLGNTFHLMLRPGTEIIKQHGDLHDFMNWDFPILTDSGGFQVFSLGAMRKITEEGVMFQSPVNGDQIMMSPEKSMEVQRDLGSDIVMIFDECTPYPATEKEAKDSMELSLRWAKRSKEGHGDNPSALFGIIQGGMYPELRAQSQAGLEEIGFDGYALGGLSVGEPKHEMINILDHCAYKMPENKPRYLMGVGKPEDLVESVRRGIDMFDCVMPTRNARNGHLFITTGIIKIRNAVHKTDTGPLDPECDCHTCNNYSRAYLHHLDKCNEILGARLNTIHNLRYYQRVMEGLRNAISEGQLETFVHDFYARRGQEVPELADTTN

SEQ ID NO: 59514 - protein, 375 aa, Pseudoalteromonas translucida; identical to SEQ ID NO: 59490
  REGION 1..375: note = tr|A0A0U2V1D5|A0A0U2V1D5_9GAMM Queuine tRNA-ribosyltransferase OS=Pseudoalteromonas translucida KMM 520 OX=1315283 GN=tgt PE=3 SV=1

SEQ ID NO: 59515 - protein, 373 aa, Pseudoalteromonas tunicata
  REGION 1..373: note = tr|A4C7I7|A4C7I7_9GAMM Queuine tRNA-ribosyltransferase OS=Pseudoalteromonas tunicata D2; OX = 87626 GN=tgt PE=3 SV=1
MKFELDCTDGKARRGRLIFDRGVVETPAFMPVGTYGTVKGMTPEEVKETGAHICLGNTFHLMLRPGTEIVKMHGDLHDFMHWDKPILTDSGGFQVFSLGDLRKITEEGVLFRSPVNGEKIMLSPEKSMEVQRDLGSDIVMIFDECTPYPATEKEAKDSMELSLRWAKRSKDAHAENPAALFGIIQGGMYPELRAISQQGLEDIGFDGYALGGLSVGEPKEDMVNILDHCAYKMPENKPRYLMGVGKPEDIVEAVRRGIDMFDCVMPTRNARNGHLFVTEGVIKIRNAAHKTDPGPLDPHCDCQTCKNYSRAYLHHLDKCNEILGARLNTIHNLRYYQRLMEGLRNAIALGELDTFVVDFYAKIGKPVPELKQV

SEQ ID NO: 59516 - protein, 373 aa, Pseudoalteromonas ulvae
  REGION 1..373: note = tr|A0A244CNJ7|A0A244CNJ7_9GAMM Queuine tRNA-ribosyltransferase OS=Pseudoalteromonas ulvae; OX = 107327 GN=tgt PE=3 SV=1
MKFELDCTDGKARRGRLIFDRGVVETPAFMPVGTYGTVKGMTPDEVKETGAHICLGNTFHLMLRPGTDIIKQHGDLHEFMNWDKPILTDSGGFQVFSLGDLRKITEEGVLFRSPVNGEKIMLSPEKSMEVQRDLGSDIVMIFDECTPYPATEKEAKDSMELSLRWAKRSKEAHGDNPSALFGIIQGGMYPELRAVSQQGLEDIGFDGYALGGLSVGEPKEDMVNILDHCAYKMPENKPRYLMGVGKPEDIVEAVRRGIDMFDCVMPTRNARNGHLFVTNGVIKIRNAVHKTDPGPLDAECDCHTCKNYSRAYLHHLDKCNEILGARLNTIHNLRYYQRIMQGLRDAIAAGELDAFVTDFYEKIGKPVPELKQV

SEQ ID NO: 59517 - protein, 373 aa, unidentified
  source 1..373: note = Pseudoarcobacter caeni
  REGION 1..373: note = tr|A0A363CZ37|A0A363CZ37_9PROT Queuine tRNA-ribosyltransferase OS=Pseudoarcobacter caeni; OX = 1912877 GN=tgt PE=3 SV=1
MEFTIDATSNKARACTIKTAHSTIQTPVFMPVGTQGTVKALDANDMLELGAKIILGNTYHLYLRPGSKIVKKFGGLHGFSKFPNSFLTDSGGFQAFSLSSNSKPDENGIMFKSHIDGSRHYFTPKSVLDTQYDLNSDIMMILDDLVALPNTQERIAKSIERTTKWAKEAIEYHMEQKANGIGVHQNIFAIIQGGTDKNFRKQSAEQLCALTDFDGFAIGGLSVGEPNADMYETVEWTTQFMPQDKPRYLMGVGTPEDLIENIERGVDMFDCVMPTRNARNGTLFTTFGRLNIKKADYKEDMTPIDEACDCYTCKNFSKAYLNHLYRAKEITYFRLGSIHNIHYYLSLMKEARTAILNDNWDEFKKDFYAKRSK

SEQ ID NO: 59518 - protein, 379 aa, unidentified
  source 1..379: note = Pseudobacter ginsenosidimutans
  REGION 1..379: note = tr|A0A4Q7MSG7|A0A4Q7MSG7_9BACT Queuine tRNA-ribosyltransferase OS=Pseudobacter ginsenosidimutans; OX = 661488 GN=tgt PE=3 SV=1
MASLQFQLQATDGHSAARAGKITTDHGEILTPIFMPVGTAGSVKAVSQQQLKNDVQAQIILGNTYHLYLRPGLETLEKAGGLHKFNGWNRPILTDSGGYQVFSLASSRKITEEGVVFQSHIDGSKHLFTPENVMDIQRSIGGDIIMAFDECPPYPSEYKYAEKSMHLTHRWLDRCFERFNGTPDRYGYTQNLFPIVQGSTYADLRKASCEYAASKNAAGNAIGGLSVGEPDHMMYEFTQLCCENLPAEKPRYLMGVGTPWNILECIALGVDMFDCVMPTRNGRNAMLFTSKGVINIDNKKWEHDYSPLDDGIDSDISNYYSKAYLRHLMKAKEILGLTIASVHNLAFYLWLVGEARKHILAGDFISWKNEQAAILQQRL

SEQ ID NO: 59519 - protein, 673 aa, unidentified
  source 1..673: note = Pseudobacteriovorax antillogorgiicola
  REGION 1..673: note = tr|A0A1Y6CK14|A0A1Y6CK14_9PROT Queuine tRNA-ribosyltransferase OS=Pseudobacteriovorax antillogorgiicola OX=1513793 GN=tgt PE=3 SV=1
MTRLSFHLDGEAPGSQARATSFKTLHTQVETPLFMPVGTQATVKGLRVEDLEKTGANILLANTYHLLLRPGPEVFEKLGGIHRMMNWSGSVLTDSGGFQIFSLPNARTMTEEGARFKSYVDGRSILLTPEKSITTQKSIGSDIMMVLDQCVPSTSEHKFAKDAMELTHRWAKRSLAARGNSPQSMFGIIQGACFEDLRKQSADFICDLPFDGFAIGGLAVGESKQEREDFTELTTQWMPKDRPRYLMGVGTPIDLLEAVHRGVDMFDCIIPTAYAQQSFAFTTKGQLRLERQVYKFQDEALDPACDCYTCKNYSRAYIHHLFKARENLGAQLLSIHNLRFYDRLTKAMRAKILDGSFLSFYQEQRELLVRRDQEHPSQPPKPKRRTKTPPQELGTFVIHHSKYGFSSIKEKVSGEIMHSVNHPDEEAKALYVDQVDWQEKLQGDFQEPLRVWDVGLGAAHNAMALIQFYEKQNDGNLRPIEIYSFESDLDALRLALRNHHLFTHLRHGAPHHLLKTKSWQRDPIKWFLREGDFLDQINESPVPDIIFYDPFSSATNHELWTLDCFNKVKNALGEKYCEMITYSASTSVRAGLLGAGFFVGKGVATGPKSDTTIAYNGLVETTKANLLDRKWLERWSRSHKPFPLGICSAMKQDFLDTIPKHPQFLSHLNERQQ

SEQ ID NO: 59520 - protein, 364 aa, unidentified
  source 1..364: note = Pseudobacteriovorax antillogorgiicola
  REGION 1..364: note = tr|A0A1Y6CPG5|A0A1Y6CPG5_9PROT Queuine tRNA-ribosyltransferase OS=Pseudobacteriovorax antillogorgiicola OX=1513793 GN=tgt PE=3 SV=1
MFKVHKTDGRARLGQMTLAHGVVNTPIFMPVGTVGSVKSLVPEDLKTLGAEIILGNTYHLYLRPGLDVIRHFNGLHKFIQWDKPILTDSGGFQIFSLGQLRKITEEGCVFQSHIDGKKINLTPELAVEIQETIGADIHMVLDECTPYPATPEEAKHSMERSLRWAKRCREVKSRDELWQFGIVQGGMYHDLRKQSLEGLGELGFEGFSIGGLSVGEPKPAMRETTDFCCEHLPEDKPRYLMGVGTPLDIIESVNYGVDMFDCVMPTRNGRNGTLFTSLGKVNIKNQKHQFDESPLDPECSCYTCQNFSRSYLRHLFIAKEITALRLLTLHNLTYYLHLIHDIRDAIREDRFQDLLKHHQQLWDK

SEQ ID NO: 59521 - protein, 376 aa, unidentified
  source 1..376: note = Pseudobacteroides cellulosolvens
  REGION 1..376: note = tr|A0A0L6JHW3|A0A0L6JHW3_9FIRM Queuine tRNA-ribosyltransferase OS=Pseudobacteroides cellulosolvens ATCC 35603 = DSM 2933 OX=398512 GN=tgt PE=3; SV = 1
MSAVRYELIKKCGQTGARLGKVHTPHGSFDTPAFMPVGTQATVKGMSPEELKGINAQIILSNTYHLYMRPGEDIVKEAGGLHSFMNWNRPILTDSGGFQVFSLSDLRDIKEEGVTFKSHIDGSKHFITPEKAIEIQNDLGADIIMAFDECIPYPCEFEYAKKSLERTTRWAKRCKEAHKNTEKQALFGIVQGGIYKELREQSAKELLELDFPGYAIGGLSVGEPAQDMYDMLECTVPLLPEDKPRYLMGVGSPDYLIEGALRGIDMFDCVLPTRIGRNGTVLTSQGKMIIRDAKYARDFTPMDPECDCYACQNFSRAYIRHLLKAGEVLGIRLTTWHNLRFLLKLMENVRKAIMDDRLQDFRNEFFEAFGYNKITK

SEQ ID NO: 59522 - protein, 378 aa, Pseudobutyrivibrio ruminis
  REGION 1..378: note = tr|A0A1H7G632|A0A1H7G632_9FIRM Queuine tRNA-ribosyltransferase OS=Pseudobutyrivibrio ruminis; OX = 46206 GN=tgt PE=3 SV=1
MKYELLKTEGRAKRGRFHTVHGVIETPVFMNVGTVAAIKGAVSTDDLRDIKCQVELSNTYHLHVRTGDKLIKELGGLHKFMAWDRPILTDSGGFQVFSLAGIRKIKEEGVTFNSHIDGRKIFMGPEESMQIQSNLGSTIAMAFDECPPALAERKYVEDSVARTTRWLHRCKEEMARLNSLPDTINKEQLLFGINQGAIYNDIRIEHAKAISELDLPGYAVGGLAVGESHEQMYDVLDHVVPYLPQNKPTYLMGVGTPANILEAVDRGVDFFDCVYPSRNGRHGHVYTNHGKLNLFNQKFEKDMRPIEEGCGCPACKTYSRAYIRHLLKAKEMLGMRLCVLHNLYFYNTMMEEIRNALDAGEFATYKKNKLASMEAGEQ

SEQ ID NO: 59523 - protein, 378 aa, Pseudobutyrivibrio ruminis
  REGION 1..378: note = tr|A0A285RCP2|A0A285RCP2_9FIRM Queuine tRNA-ribosyltransferase OS=Pseudobutyrivibrio ruminis DSM 9787 OX=1123011 GN=tgt PE=3 SV=1
MKYELLKTEGRAKRGRFHTAHGVIETPVFMNVGTVAAIKGAVSTDDLRDIKCQVELSNTYHLHVRTGDKLIKELGGLHKFMAWDRPILTDSGGFQVFSLAGIRKIKEEGVTFNSHIDGRKIFMGPEESMQIQSNLGSTIAMAFDECPPALAERKYVEDSVARTTRWLHRCKEEMARLNSLPDTINKEQLLFGINQGAIYNDIRIEHAKAISELDLPGYAVGGLAVGESHEQMYDVLDHVVPYLPQNKPTYLMGVGTPANILEAVDRGVDFFDCVYPSRNGRHGHVYTNHGKLNLFNQKFEKDMRPIEEGCGCPACKTYSRAYIRHLLKAKEMLGMRLCVLHNLYFYNTMMEEIRNALDAGEFATYKKNKLASMEAGEQ

SEQ ID NO: 59524 - protein, 378 aa, Pseudobutyrivibrio sp.; identical to SEQ ID NO: 59522
  REGION 1..378: note = tr|A0A1I5DAZ5|A0A1I5DAZ5_9FIRM Queuine tRNA-ribosyltransferase OS=Pseudobutyrivibrio sp. JW11; OX = 1855302 GN=tgt PE=3 SV=1

SEQ ID NO: 59525 - protein, 377 aa, Pseudobutyrivibrio sp.
  REGION 1..377: note = tr|A0A1H3VV10|A0A1H3VV10_9FIRM Queuine tRNA-ribosyltransferase OS=Pseudobutyrivibrio sp. ACV-2; OX = 1520801 GN=tgt PE=3 SV=1
MKYELLKTEGKAKRGRFHTVHGTIETPVFMNVGTVAAIKGAVSTDDLREIKCQVELSNTYHLHVRTGDKLIKELGGLHKFMAWDRPILTDSGGFQVFSLAGIRKIKEEGVTFNSHIDGRKIFMGPEESMQIQSNLGSTIAMAFDECPPALAERKYVEDSVARTTRWLYRCKEEMDRLNSLPDTINKEQLLFGINQGAVYNDIRIEHAKRISELDLPGYAVGGLAVGESHEQMYDVLDHVVPYLPQNKPTYLMGVGTPANILEAVERGVDFFDCVYPSRNGRHGHVYTNHGKLNLFNQKFEKDMRPIEEGCGCPTCRTYSRAYVRHLLKAKEMLGMRLCVLHNLYFYNTMMEEIRNSLDAGEFASYKARKLATMEAGE

SEQ ID NO: 59526 - protein, 378 aa, Pseudobutyrivibrio xylanivorans
  REGION 1..378: note = tr|A0A1M6BIV5|A0A1M6BIV5_PSEXY Queuine tRNA-ribosyltransferase OS=Pseudobutyrivibrio xylanivorans DSM 14809 OX=1123012 GN=tgt PE=3 SV=1
MKYELLKTEGRAKRGRFHTVHGVIETPVFMNVGTVAAIKGAVSTDDLREIKCQVELSNTYHLHVRTGDKLIKELGGLHKFMNWDRPILTDSGGFQVFSLAGIRKIKEEGVTFNSHIDGRKIFMGPEESMQIQSNLGSTIAMAFDECPPALAERKYVEDSVARTTRWLYRCKEEMARLNSLEKTINKEQLLFGINQGAVFNDIRIEHAKIISELDLPGYAVGGLAVGESHEQMYDVLDHVVPYLPQNKPTYLMGVGTPANILEAVDRGVDFFDCVYPSRNGRHGHVYTNHGKLNLFNQKFEKDMRPIEEGCGCPTCRSYSRAYVRHLLKAKEMLGMRLCVLHNLYFYNTMMEEIRDALDAGEFAAYKKRKLDSMAQGQD

SEQ ID NO: 59527 - protein, 378 aa, Pseudobutyrivibrio xylanivorans
  REGION 1..378: note = tr|A0A1G5RVE7|A0A1G5RVE7_PSEXY Queuine tRNA-ribosyltransferase OS=Pseudobutyrivibrio xylanivorans; OX = 185007 GN=tgt PE=3 SV=1
MKYELLKTEGRAKRGRFHTVHGVIETPVFMNVGTVAAIKGAVSTDDLREIKCQVELSNTYHLHVRTGDKLIKELGGLHKFMNWDRPILTDSGGFQVFSLAGIRKIKEEGVTFNSHIDGRKIFMGPEESMQIQSNLGSTIAMAFDECPPALAERKYVEDSVARTTRWLYRCKEEMARLNSLENTINKEQLLFGINQGAVFNDIRIEHAKIISELDLPGYAVGGLAVGESHEQMYDVLDHVVPYLPQNKPTYLMGVGTPANILEAVDRGVDFFDCVYPSRNGRHGHVYTNHGKLNLFNQKFEKDMRPIEEGCGCPTCRSYSRAYVRHLLKAKEMLGMRLCVLHNLYFYNTMMEEIRDALDAGEFAAYKKRKLDSMAQGQD

SEQ ID NO: 59528 - protein, 378 aa, Pseudochrobactrum asaccharolyticum
  REGION 1..378: note = tr|A0A366EB58|A0A366EB58_9RHIZ Queuine tRNA-ribosyltransferase OS=Pseudochrobactrum asaccharolyticum OX=354351 GN=tgt PE=3 SV=1
MTSENFEFKVLATDGKARRGEITMPRGTIRTPAFMPVGTAGTVKAMYMDQVKDLGADIILGNTYHLMLRPGAERVARLGGLHEFGGWQGPILTDSGGFQVMSLAQLRKLTEQGVTFRSHIDGRAYEMSPERSIEIQGLLDSDIQMQLDECTALPASFNVMQKAMELSLRWAERCKVAFGDQPGKAMFGIVQGGDNVQLREQSAQALKDMDLKGYAVGGLAVGEPQQVMLDMLDVTCPILPHEKPRYLMGVGTPDDMLKSVARGIDMFDCVMPTRAGRHGLAFTRRGKVNLRNARHAEDHRPLDEMSACPASSQYSRAYLHHLVKSNEALGGMLLTWNNLHYYQYLMQGIRDAIEAGRFNDFFEETTAEWAKGDIAPLG

SEQ ID NO: 59529 - protein, 375 aa, unidentified
  source 1..375: note = Pseudocitrobacter faecalis
  REGION 1..375: note = tr|A0A366F516|A0A366F516_9ENTR Queuine tRNA-ribosyltransferase OS=Pseudocitrobacter faecalis; OX = 1398493 GN=tgt PE=3 SV=1
MKFELDTTDGRARRGRLVFDRGVVETPAFMPVGTYGTVKGMTPEEVEATGAQIILGNTFHLWLRPGQEIMKLHGDLHDFMQWKGPILTDSGGFQVFSLGDIRKITEQGVHFRNPINGDPIFLDPEKSMEIQYDLGSDIVMIFDECTPYPADWDYAKRSMEMSLRWAKRSRERFDSLGNKNALFGIIQGSVYEDLRDISVKGLVDIGFDGYAVGGLAVGEPKADMHRILEHVCPQIPADKPRYLMGVGKPEDLVEGVRRGIDMFDCVMPTRNARNGHLFVTDGVVKIRNAKHKSDTSPLDAECDCYTCRNYSRAYLHHLDRCNEILGARLNTIHNLRYYQRLMAGLRKAIEEGKLESFVTDFYQRQGREVPALNVD

SEQ ID NO: 59530 - protein, 375 aa, unidentified
  source 1..375: note = Pseudocitrobacter sp.
  REGION 1..375: note = tr|A0A5B0KGH0|A0A5B0KGH0_9ENTR Queuine tRNA-ribosyltransferase OS=Pseudocitrobacter sp. 73; OX = 2605731 GN=tgt PE=3 SV=1
MKFELDTTDGRARRGRLVFDRGVVETPAFMPVGTYGTVKGMTPEEVEATGAQIILGNTFHLWLRPGQEIMKLHGDLHDFMQWKGPILTDSGGFQVFSLGDIRKITEQGVHFRNPINGDPIFLDPEKSMEIQYDLGSDIVMIFDECTPYPADWDYAKRSMEMSLRWARRSRERFDGLGNKNALFGIIQGSVYEDLRDISVKGLVDIGFDGYAVGGLAVGEPKADMHRILEHVCPQIPADKPRYLMGVGKPEDLVEGVRRGIDMFDCVMPTRNARNGHLFVTDGVVKIRNAKHKSDTSPLDAECDCYTCRNYSRAYLHHLDRCNEILGARLNTIHNLRYYQRLMAGLRKAIEEGKLESFVTDFYQRQGREVPALNVD

SEQ ID NO: 59531 - protein, 375 aa, unidentified
  source 1..375: note = Pseudoclostridium thermosuccinogenes
  REGION 1..375: note = tr|A0A2K2F2P2|A0A2K2F2P2_9FIRM Queuine tRNA-ribosyltransferase OS=Pseudoclostridium thermosuccinogenes OX=84032 GN=tgt PE=3 SV=1
MAAIRYELIKKCKQTGARLGRVHTPHGSFDTPVFMPVGTQATVKGMSPDELKEIDAKIILSNTYHLYLRPGQEIIREAGGLHSFMNWDRPILTDSGGFQVFSLGSFRKIEEDGVTFKSHIDGSRHFISPEKAVEIQNDLGSDIIMCFDECTPYPAEYDYAKKSLERTTRWAKRCKEAHKNTERQALFGIVQGGVYKDLREQSAKELVALDFPGYSIGGLSVGEPAELMYEMLECTVPLLPEDKPRYLMGVGSPDYLVEGAIRGIDMFDCVLPTRIGRNGTVMTSRGRIIVRDAKYARDFSPIDPECDCYACRNFTRAYIRHLLKVDEVLGIRLTTWHNLRFLINLMKKVRQAIMEDRLGDFRDEFFENYGYSKKA

SEQ ID NO: 59532 - protein, 372 aa, unidentified
  source 1..372: note = Pseudodesulfovibrio aespoeensis
  REGION 1..372: note = tr|E6VVX8|E6VVX8_PSEA9 Queuine tRNA-ribosyltransferase OS=Pseudodesulfovibrio aespoeensis (strain ATCC 700646 / DSM 10631 / Aspo-2) OX=643562 GN=tgt; PE = 3 SV=1
MSIPGQFTVHTTDGQARRATLTTAHGEIQTPIFMPVGTQGTVKSLSPLDLEEMDAQIILGNTYHLYLRPGDELVARRGGLHAFANWKRPILTDSGGFQVFSLQSIRKLSEEGVEFRSYIDGSKHFFSPEKAIDIQKNLGSDIMMVLDECVGFGADRQYTEKSLEMTTRWAQRCRDHHPRGTNGQIMFGIVQGGFFKDLRERSLEQLRSIDFEGLAIGGLSVGESTEEMYDILHHITPIMPADKPRYLMGVGTPLDLLEGVSAGVDMFDCVLPSRNARNGTLYTSKGKVNIKRAEFAEDDTPLDPECGCYTCRNFTKAYLRHLYMAKELLSYRLNTYHNLHFYLDLMQQVRAAIENGTFTDLKQRYQAAYATE

SEQ ID NO: 59533 - protein, 372 aa, unidentified
  source 1..372: note = Pseudodesulfovibrio hydrargyri
  REGION 1..372: note = tr|A0A1J5NEM9|A0A1J5NEM9_9DELT Queuine tRNA-ribosyltransferase OS=Pseudodesulfovibrio hydrargyri; OX = 2125990 GN=tgt PE=3 SV=1
MTRPGDFTIHATDNLARRATLGTAHGDIQTPIFMPVGTQGTVKSLTPLDLEEMEAQIILGNTYHLYLRPGDDLVARRGGLHKFAGWKRPILTDSGGFQVFSLEGIRKLSEEGVEFRSYIDGSKHFFSPEKAIDIQRNLGSDIMMVLDECVGYGNDRAYTEKSLEMTTRWARRCRDHYPKGSGGQLMFGIVQGGFYKDLRDRSLEQLREIDFEGFAIGGLSVGESTEEMYDILHHIAPKLPHEKPRYLMGVGTPLDILEGVSAGVDMFDCVLPSRNARNGTLFTSTGKINIKRAEYAEDDSPLDPNCGCYTCRNFTKAYLRHLYMAKELLSYRLNTYHNLYFYLDLMKQIRKAIEEGSFRELKGRYEAAYGQR

SEQ ID NO: 59534 - protein, 372 aa, unidentified
  source 1..372: note = Pseudodesulfovibrio indicus
  REGION 1..372: note = tr|A0A126QPG6|A0A126QPG6_9DELT Queuine tRNA-ribosyltransferase OS=Pseudodesulfovibrio indicus; OX = 1716143 GN=tgt PE=3 SV=1
MSKPGDFTIHATDNLARRATLTTAHGEIQTPIFMPVGTQGTVKSLTPLDLEEMEAQIILGNTYHLYLRPGDDLVARRGGLHKFANWKRPILTDSGGFQVFSLEGIRKLSEEGVEFRSYIDGSKHFFSPEKAIDIQKNLGSDIMMVLDECVGYGNDRAYTEKSLEMTTRWAQRCRDHYPKGSGDQLMFGIVQGGFHKDLRDRSLEQLREIDFEGFAIGGLSVGESTEEMYDILHHIAPKLPSNKPRYLMGVGTPLDILEGVSAGVDMFDCVLPSRNARNGTLFTSLGKVNIKRAEYAEDDSPLDPNCGCYTCRNFTKAYLRHLYMAKELLSYRLNTYHNLYYYLDLMKQVRQAIENGTFRELKAKVEAAYGPK

SEQ ID NO: 59535 - protein, 370 aa, unidentified
  source 1..370: note = Pseudodesulfovibrio piezophilus
  REGION 1..370: note = tr|M1WNA7|M1WNA7_PSEP2 Queuine tRNA-ribosyltransferase OS=Pseudodesulfovibrio piezophilus (strain DSM 21447 / JCM 15486 / C1TLV30) OX=1322246 GN=tgt; PE = 3 SV=1
MNQPGNFIIHATDGNARRATLTTAHGEIQTPIFMPVGTQGTVKSLTPLDLEEMDAQIILGNTYHLYLRPGDDLVARRGGLHEFSNWKRPILTDSGGFQVFSLQEIRKLSEEGVEFRSYIDGSKHFFSPEKAIDIQKNLGSDIMMVLDECVGYGEDKKYTNKSLEMTTRWAQRCRDHYPKGSGDQLMFGIVQGGFFKDLREKSLAQLREIDFEGFAIGGLSVGESTEEMYDILHHIAPMMPETKPRYLMGVGTPLDLLEGVSAGVDMFDCVLPSRNARNGTLFTSMGKINIKRAQFAEDDSPLDPNCNCYTCRNFTKAYLRHLYQAKELLSYRLNTYHNLYFYLDLMKQVRASIEEGTFATLKAHYEEIYA

SEQ ID NO: 59536 - protein, 372 aa, unidentified
  source 1..372: note = Pseudodesulfovibrio profundus
  REGION 1..372: note = tr|A0A2C8F3Z3|A0A2C8F3Z3_9DELT Queuine tRNA-ribosyltransferase OS=Pseudodesulfovibrio profundus; OX = 57320 GN=tgt PE=3 SV=1
MSTPGDFKVHATDGEARRATLSTAHGEIQTPIFMPVGTQGTVKSLTPLDLEEMDAQIILGNTYHLYLRPGDDLVARRGGLHKFANWKRPILTDSGGFQVFSLQEIRKLTEEGVEFRSYIDGSKHFFSPEKAIDIQKNLGSDIMMVLDECVGYGEDKDYTNKSLEMTTRWAKRCREHYPKGSGDQLMFGIVQGGFFKDLREKSLEQLRKIDFEGFAIGGLSVGESTEEMYDILHHIAPLMPKEKPRYLMGVGTPLDILEGVASGVDMFDCVLPSRNARNGTLFTSQGKVNIKRAEYAEDDSPLDPECGCYTCRNFTKAYLRHLYQAKELLSYRLNTYHNLYFYLDMMKQVRAAIENGTFQELKQRYEAAYAPK

SEQ ID NO: 59537 - protein, 372 aa, unidentified
  source 1..372: note = Pseudodesulfovibrio sp.
  REGION 1..372: note = tr|A0A443YNN6|A0A443YNN6_9DELT Queuine tRNA-ribosyltransferase OS=Pseudodesulfovibrio sp. S3; OX = 2283629 GN=tgt PE=3 SV=1
MTKPGDFTIHATDNLARRATLSTAHGDIQTPIFMPVGTQGTVKSLTPLDLEEMNAQIILGNTYHLYLRPGDDLVARRGGLHKFSNWKRPILTDSGGFQVFSLQGIRKLSEEGVEFRSYIDGSKHFFSPEKAIDIQRNLGSDIMMVLDECVGYGNDREYTKKSLEMTTRWAQRCRAHYPKGAGDQLMFGIVQGGFHKDLRDKSLEQLREIDFEGFAIGGLSVGESTEEMYDILHHIAPKMPNDKPRYLMGVGTPLDLLEGVSAGVDMFDCVLPSRNARNGTLFTSMGKVNIKRAEYAEDDSSLDPNCNCYTCRNFSKAYLRHLYQAKELLSYRLNTYHNLYFYLDLMKQIRQAIEDGTFKALKAHYEAVYSSK

SEQ ID NO: 59538 - protein, 379 aa, unidentified
  source 1..379: note = Pseudoflavitalea sp.
  REGION 1..379: note = tr|A0A3B7MU11|A0A3B7MU11_9BACT Queuine tRNA-ribosyltransferase OS=Pseudoflavitalea sp. 5GH32-13; OX = 2315862 GN=tgt PE=3 SV=1
MAVLQFELEVTDQVSKARAGTITTDHGQIQTPIFMPVGTAGSVKAVSQQQLKEDVQAQIILGNTYHLYLRPGLDVLEQAGGLHRFNAWDRPILTDSGGYQVFSLASSRKITEEGVLFQSHIDGSRHLFTPENVMDIQRTIGADIIMAFDECPPYPSEYAYAKKSMELTHRWLDRCFTQFNNTPDKYGYTQNLFPIIQGSTFADLRKASSEYIASKNAAGNAIGGLSVGEPDNMMYEYTELCCDLLPVHKPRYLMGVGTPWNILECIALGVDMFDCVMPTRNGRNAMLFTSKGVINIDNKKWEKDNSPLDDGIDCTVSNLYSKAYLRHLMKAKEILGLTIASVHNLAFYLWLVKEARKHIQAGDFLSWKNEQVQILQQRL

SEQ ID NO: 59539 - protein, 379 aa, Pseudoflavonifractor capillosus
  REGION 1..379: note = tr|A6NV28|A6NV28_9FIRM Queuine tRNA-ribosyltransferase OS=Pseudoflavonifractor capillosus ATCC 29799 OX=411467 GN=tgt PE=3 SV=1
MFEVVKTEGRARRGVFTCAHGTVQTPVFMNVGTQGAIKGAVSAHDLKDVGCQIELSNTYHLHLRPGDGVVKEMGGLHKFMDWNGPILTDSGGFQVFSLSGLRKITEEGVTFASHIDGRRVFMGPEESMRIQSNLGSDIAMAFDECVANPSTREYVKPSCERTLRWLARCKEEHDRLNSLPDTVNPHQMLFGINQGGIYPDLRVWHMKETAKIDCDGYAIGGLAVGEPTQTMYDIIDAVEPHMPKDKPRYLMGVGTPSNIIEAVARGVDFFDCVMPARNARHGKLYTWEGTLNIKNEKYKTDPTPIDPTCTCPACQSFSRAYLRHLFAAGEMLAMRLAVLHNLHFYNELMVRIRAALDEGTFEEFRRTYSGKLDVPIGNS

SEQ ID NO: 59540 - protein, 380 aa, Pseudoflavonifractor sp.
  REGION 1..380: note = tr|A0A1Y4L644|A0A1Y4L644_9FIRM Queuine tRNA-ribosyltransferase OS=Pseudoflavonifractor sp. An184; OX = 1965576 GN=tgt PE=3 SV=1
MFQVVKTEGRARRGVFTCPHGTVQTPVFMNVGTQGAIKGAVSALDLKEIGCQVELSNTYHLHLRPGDGVVKEMGGLHKFMGWDGPMLTDSGGFQVFSLSGLRKITEEGVTFASHIDGRRIFMGPEESMRIQSNLGSDIAMAFDECIENPAPREYVQQSVERTYRWLERCVAEHQRLNRQPDCVNPGQMLFGINQGGTYPDIRQWHMDQIAQLPCDGFAIGGLAVGESTQTMYDIIDAVEPRMPGDKPRYLMGVGTPSNIIEAVARGVDFFDCVMPARNARHGKLYTWRGTINIKNEKYKLDPLPIDPECRCPACRSFSRAYLRHLVTAGEMLAMRLAVLHNLHFYNELMVRIRRALDEGTFEEFRKKYSGMLDRKIEDNQ

SEQ ID NO: 59541 - protein, 377 aa, Pseudoflavonifractor sp.
  REGION 1..377: note = tr|A0A1Y3YW52|A0A1Y3YW52_9FIRM Queuine tRNA-ribosyltransferase OS=Pseudoflavonifractor sp. An44; OX = 1965635 GN=tgt PE=3 SV=1
MFELLKTEGKARRGQFTTPHGTVQTPVFMNVGTQGAIKGGLSAFDLKDIGCQVELSNTYHLHLRPGDDVVRQMGGLHKFMRWDGPMLTDSGGFQVFSLSGLRKITEEGVTFASHLDGRKIFMGPEESMRIQSNLGSDIAMAFDECVENPATYEYAKASCERTLRWLKRCKDEHDKLNGQPDCVNPGQMLFGINQGATFPDLRIWHMQETAKVECDGYAIGGLAVGEPTQVMYDIIDAVEPYMPQDKPRYLMGVGTPSNIIEAVARGVDFFDCVMPARNARHAKLFTWSGWMNMKNERYKTDELPIDPECDCPVCRNFSRAYVRHLFTAGEMLGLRLAVMHNLYFYNKLMERIRQALDEGTFQQFRAEYSEKLAQRMP

SEQ ID NO: 59542 - protein, 370 aa, Pseudofulvimonas gallinarii
  REGION 1..370: note = tr|A0A4R3LNZ6|A0A4R3LNZ6_9GAMM Queuine tRNA-ribosyltransferase OS=Pseudofulvimonas gallinarii; OX = 634155 GN=tgt PE=3 SV=1
MDFELIANDGASRRGRLHLPHGTVETPAFMPVGTYGSVKAVTPGQVRDLGAQIVLGNTFHLFLRPGLEVIEAHGGLHGFMRWPGPILTDSGGFQVWSLAQRRKISEEGVKFASPVDGSPVFLSPEESMRIQRVLNSDIVMIFDECTPYPATEPQARASMELSLRWAERSRRAHEGNHNALFGIVQGGMYGALRRRSAEGLRAIGFDGYAIGGLSVGEPADEREHVLDETVPHLPADRPRYLMGVGRPEDIVEAVRRGVDMFDCVMPTRNARNGHLFTADGDLRIRNARYATDTRPIEEGCDCQACAGDFSRAYLRHLDRCSEMLGPTLATIHNLRYYQRLMAEIRDAVAAGRFADWAAAFHQRRRRGVPE

SEQ ID NO: 59543 - protein, 403 aa, unidentified
  source 1..403: note = Pseudoglutamicibacter albus
  REGION 1..403: note = tr|A0A2I1JBX3|A0A2I1JBX3_9MICC Queuine tRNA-ribosyltransferase OS=Pseudoglutamicibacter albus; OX = 98671 GN=tgt PE=3 SV=1
MDNGRGRTGVIRTPHGDIKTPAFVTVGTKATVKAVLPRDVAELGAQAVLSNAYHLYLQPGHEVVDAAGGLGKFMGWDGPTFTDSGGFQVMSLGSGFKKVIDMGADGAPVGGGADDAVAPGHERMANVDDDGVWFTSHINGDKHRFTPEISMQVQHGLGADIMFAFDELTTLHNSRQYQIESLERTRRWAERCILEHFRLTDERDHRPYQALFGVIQGAQYEDLRRQACQDLAGMPFDGFGIGGALEKENLGTIVGWCAEELPENKPRHLLGISEPDDVLWAIENGADTFDCVSPTRVARNSAFYTDYGRYNLSNRRFREDFRPLQPGCDCATCATYSRAYIHHLYKAKEMLSHTLISIHNLAFTVRLVDRAREAIENGTYEDYKHTVLSNYYGGSGSPDGPES

SEQ ID NO: 59544 - protein, 403 aa, unidentified
  source 1..403: note = Pseudoglutamicibacter cumminsii
  REGION 1..403: note = tr|A0A2U3ATB4|A0A2U3ATB4_9MICC Queuine tRNA-ribosyltransferase OS=Pseudoglutamicibacter cumminsii; OX = 156979 GN=tgt PE=3 SV=1
MDNGRGRTGVIRTPHGDIKTPAFVTVGTKATVKAVLPRDVAELGAQAVLSNAYHLYLQPGHEVVDAAGGLGKFMGWDGPTFTDSGGFQVMSLGSGFKKVIDMGADGAPVGGGADDAVAPGHERMANVDDDGVWFTSHINGDKHRFTPEISMQVQHGLGADIMFAFDELTTLHNSRQYQIESLERTRRWAERCILEHFRLTDERGHRPYQALFGVIQGAQYEDLRRQACQDLGAMPFDGFGIGGALEKENLGTIVGWCAEELPENKPRHLLGISEPDDVLWAIENGADTFDCVSPTRVARNSAFYTDYGRYNLSNRRFREDFRPLQPGCDCATCSTYSRAYIHHLYKAKEMLSHTLISIHNLTFTVRLVDRAREAIENGTYEDYKHTVLSNYYGGSGSPDGPES

SEQ ID NO: 59545 - protein, 378 aa, unidentified
  source 1..378: note = Pseudogracilibacillus auburnensis
  REGION 1..378: note = tr|A0A2V3W0C9|A0A2V3W0C9_9BACI Queuine tRNA-ribosyltransferase OS=Pseudogracilibacillus auburnensis OX=1494959 GN=tgt PE=3 SV=1
MAITYELIKTCKQTGARLGKVHTPHGSFDTPMFMPVGTLATVKTMSPEELIQMDAQIILSNTYHLWLRPGEDIVKEAGGLHRFMNWDRPILTDSGGFQVFSLSKIRDITEEGVHFRHHLSGEKLFFSPEKAMQVQNDLGPDIMMVLDECPPYPATYDYMEQSINRTTRWAERCLQAHKRKEDQALFGIIQGGEYEDLRKQSAKDLISLDFPGYAIGGLSVGEPKEIMNEMLEVTTPLMPSNKPRYLMGVGSPDSLIDGAIRGIDMFDCVLPTRIARNGTCMTSSGRLVVRNAKYARDFSPIDQNCECYTCQNYTRAYIRHLINTNEILGFRLTTYHNLYFLLKLMKQVRTAISEDRLGDFKEVFFEQYGFNEHKPKNF

SEQ ID NO: 59546 - protein, 371 aa, unidentified; identical to SEQ ID NO: 53761
  source 1..371: note = Pseudogulbenkiania ferrooxidans
  REGION 1..371: note = tr|U1AVU8|U1AVU8_9NEIS Queuine tRNA-ribosyltransferase OS=Pseudogulbenkiania ferrooxidans EGD-HP2 OX=1388764 GN=tgt PE=3 SV=1

SEQ ID NO: 59547 - protein, 371 aa, unidentified
  source 1..371: note = Pseudogulbenkiania ferrooxidans
  REGION 1..371: note = tr|B9Z6Y3|B9Z6Y3_9NEIS Queuine tRNA-ribosyltransferase OS=Pseudogulbenkiania ferrooxidans 2002 OX=279714 GN=tgt PE=3 SV=1
MLKFTVHKTSGGARRGTLELNHGTVETPVFQPVGTYGSVKAMSPVELNDIGAQIILGNTFHLWLRPGLEVIQQFGGLHDFIGWNKPILTDSGGFQVFSLGALNKITEEGVTFQSPVNGDKLFLSPEKSMEIQKVLNSDIVMIFDECTPGQVDHNTAAKSMRMSLRWAERSRRAFDDLKNPNALFGIVQGNLYTDLRRESLEGLMEIGFDGYAIGGLSVGEPKPEMYRMLAEMKDMLPADKPHYLMGVGTPEDLVHGVANGVDMFDCVMPTRNARNGWLFTQWGDVKIKNARYKDDKKPLDETCGCYACRNFSRAYLHHLHRVGEILGARLNTIHNLYYYQQLMAEMRQAIEEDRFPAFQVDFAQRRARGAD

SEQ ID NO: 59548 - protein, 371 aa, Pseudogulbenkiania sp.
  REGION 1..371: note = tr|G2J1E5|G2J1E5_PSEUL Queuine tRNA-ribosyltransferase OS=Pseudogulbenkiania sp. (strain NH8B) OX=748280 GN=tgt PE=3 SV=1
MLKFTVHKTSGGARRGTLELNHGTVETPVFQPVGTYGSVKAMSPVELGDIGAQIILGNTFHLWLRPGLEVIAQFGGLHDFIGWDKPILTDSGGFQVFSLGALNKITEEGVTFQSPVNGDKLFLSPEKSMEIQKVLNSDIVMIFDECTPGQVDHNTAAKSMRMSLRWAERSRRAFDDLKNPNALFGIVQGNLYTDLRRESLEGLMEIGFDGYAIGGLSVGEPKPEMYRMLAEMKDMLPADKPHYLMGVGTPEDLVHGVANGVDMFDCVMPTRNARNGWLFTQWGDVKIKNARYKGDKKPLDETCGCYACRNFSRAYLHHLHRVGEILGARLNTIHNLYYYQQLMAEMRQAIEEDRFPAFQVDFAQRRARGAD

SEQ ID NO: 59549 - protein, 371 aa, unidentified
  source 1..371: note = Pseudohaliea rubra
  REGION 1..371: note = tr|A0A095VQD9|A0A095VQD9_9GAMM Queuine tRNA-ribosyltransferase OS=Pseudohaliea rubra DSM 19751; OX = 1265313 GN=tgt PE=3 SV=1
MREACHLRFERLGSDGAARRGRLHFPRGTVETPAFMPVGTYGTVKGMLPRDVAATGAEIILGNTFHLWLRPGTEIIAAHGDLHDFMGWEGPILTDSGGFQVFSLGAMRKITEAGVSFRSPVNGDKVFLDPETSMAVQRALGSDVVMIFDDCTPYPAARDEAAASMQLSLRWAKRSRDAHGDSPAALFGIVQGGMYPDLRRESLAGLEAIGFDGYAIGGLSVGEPKDEMLAVLSDLAPALPAETPRYLMGVGTPGDLIEGVRRGIDMFDCVMPTRNARNGNLFTSVGQVKLRNARHRADTGPLDPNCDCYTCANFSRAYLHHLERCNELLGSQLNTLHNIHYYQRHMQGIRAAIERGELDAFAHAYYAAQEE

SEQ ID NO: 59550 - protein, 377 aa, unidentified
  source 1..377: note = Pseudohoeflea suaedae
  REGION 1..377: note = tr|A0A4R5PRK3|A0A4R5PRK3_9RHIZ Queuine tRNA-ribosyltransferase OS=Pseudohoeflea suaedae OX=877384; GN = tgt PE=3 SV=1
MSASEFGFKVTATDGAARRGTVSMPRGEIRTPAFMPVGTGGTVKAMYMEQVRDLGADIILGNTYHLMLRPGAERVAKLGGLHSFARWERPILTDSGGFQVMSLAGLRKVTEQGVTFQSHIDGRKYDMSPERSIEIQGLLDSDIQMQLDECVRLPASAEEIERAMEMSVRWADRCKTAFGDQPGKAMFGIVQGGDSPALRERSARALVDLDLKGYAVGGLAVGEPQEVMLDMLEVTCPLLPDNKPRYLMGVGTPDDILKSVARGIDMFDCVMPTRAGRHGLAFTRFGKINLKNARHADDPRPLDPDSNCPAARDYSRAYLHHLVRSNEILGMMLLTWVNLAYYQDLMAGVRGAIEAGNYADFCAETQAGWEKGDIAPV

SEQ ID NO: 59551 - protein, 372 aa, unidentified
  source 1..372: note = Pseudohongiella acticola
  REGION 1..372: note = tr|A0A1E8CIQ1|A0A1E8CIQ1_9GAMM Queuine tRNA-ribosyltransferase OS=Pseudohongiella acticola; OX = 1524254 GN=tgt PE=3 SV=1
MKFELKTTDGAARRGTLTFPRGEVQTPAFMPVGTYGTVKGLTPEQIKGTGAEIILGNTFHLMLRPGTDIIRQHGDLHDFMGWDKPILTDSGGFQVFSLGDMRKISEEGVNFRSPVDGAKVFLGPESAIQVQQDLGADIIMIFDECTPYPATETEARDSMQLSLRWAVRCKEAHGDHRAALFGIIQGGMYPNLRQESLDGLVALDFPGYAIGGLSVGESKEEMISVLDYVGHRMPAHKPRYLMGVGTPTDIVDAVARGIDMFDCVMPTRNARNGYLFTSQGLLKLRNARFKTDTRPLDPACACYTCQHFSRAYLHHLDKCKEMLGAQLNTIHNLHYYQDLMQGLRQALEQGRFTAFTEAFYRDQRVLETQPDA

SEQ ID NO: 59552 - protein, 285 aa, unidentified
  source 1..285: note = Pseudohongiella sp.
  REGION 1..285: note = tr|A0A355V8Q2|A0A355V8Q2_9GAMM Queuine tRNA-ribosyltransferase (Fragment) OS=Pseudohongiella sp.; OX = 1979412 GN=DD407_10320 PE=3 SV=1
TDSGGFQVFSLGEMRKITEEGVTFRSPVDGAKVFLGPESAIQVQHELGSDIIMIFDECTPYPATEQEAEASMQLSLRWAQRCKVAHGDHPSALFGIVQGGMYEHLRQQSLDALVAMDFDGYAIGGLSVGEPKDEMIKVLDYVGHRLPEHKPRYLMGVGTPADLVEGVRRGIDMFDCVMPTRNARNAHLFTSQGLLKLRNARFKDDVRPLDPNCDCYTCQNFSRAYLHHLDKCKEMLGAQLNTIHNLHYYQHLMQGLRQALEQGRFTAFAEEFYQNQARLQDEPEA

SEQ ID NO: 59553 - protein, 94 aa, unidentified
  source 1..94: note = Pseudohongiella sp.
  REGION 1..94: note = tr|A0A355V8P5|A0A355V8P5_9GAMM tRNA guanosine(34) transglycosylase Tgt (Fragment) OS=Pseudohongiella sp.; OX = 1979412 GN=tgt PE=4 SV=1
MEFKVHHTDGHARRGTLSFPRGDVQTPAFMPVGTYGTVKGMTPQQILDTGAEIILGNTFHLMLRPGTGIIRKHGDLHDFGGWQKPILTDSGGFQ

SEQ ID NO: 59554 - protein, 372 aa, unidentified
  source 1..372: note = Pseudohongiella spirulinae
  REGION 1..372: note = tr|A0A0S2KBY6|A0A0S2KBY6_9GAMM Queuine tRNA-ribosyltransferase OS=Pseudohongiella spirulinae; OX = 1249552 GN=tgt PE=3 SV=1
MEFTVHATEGHARRATLSFPRGDVQTPAFMPVGTYGTVKGMTPQQIHDIGAEIILGNTFHLMLRPGTEIIRKHGDLHDFMGWDKPILTDSGGFQVFSLGEMRKITEEGVTFRSPVDGAKVFLGPESAIQVQHELGSDIIMIFDECTPYPATEQEAESSMQLSLRWAERCKTAHGDHPSALFGIIQGGMYENLRQQSLDALRDMDFDGYAIGGLSVGEPKDEMIKVLDYVGHQMPADKPRYLMGVGTPSDIVEAVRRGIDMFDCVMPTRNARNAHLFTSQGLLKLRNARFKDDTRPLDPACGCYTCQHFSRAYLHHLDKCKEMLGAQLNTIHNLHYYQSLMQGLRQALEQGRFTAFVEAFYQGQAVLEQQPDA

SEQ ID NO: 59555 - protein, 378 aa, Pseudolabrys sp.
  REGION 1..378: note = tr|A0A0Q7U100|A0A0Q7U100_9RHIZ Queuine tRNA-ribosyltransferase OS=Pseudolabrys sp. Root1462; OX = 1736466 GN=tgt PE=3 SV=1
MSEPFSFTLRNTDGMARRGEIVTPHGRIDTPVFMPVGTAATVKGLHPEDVADTGAQILLGNTYHLMLRPGAERIAALGGLHRFMNWDKPILTDSGGFQVMSLATLRKLTEQGVTFRSHIDGTKHELTPERSIEIQALLGTDVTMQLDECLKLPASREEIERAMRLSLRWAERSKRAFEARAREGYALFGIVQGGDDIPLRQDSARALTEIGFHGYAVGGLAVGEPQDVMLKVVEETTPVLPVDRPRYLMGVGTPHDILEAVARGIDMFDCVMPTRNGRHGMAFTRFGQINLSNARHADDPRPLDEESPHPAARTYSRAYLHHLTKANEMLGQVLLSTINIAYYQALTAGMRTAIEQGRFEAFRMATIEGWKRGDLPPI

SEQ ID NO: 59556 - protein, 378 aa, Pseudolabrys sp.
  REGION 1..378: note = tr|A0A371B0M8|A0A371B0M8_9RHIZ Queuine tRNA-ribosyltransferase OS=Pseudolabrys sp. GY_H; OX = 2292256 GN=tgt PE=3 SV=1
MTQSFSFTLHKTDGMARRGTVVTPHGPVETPAFMPVGTQATVKGLYPEAVEGTGAQILLGNTYHLMLRPGAERVAALGGLHKFMNWPHAILTDSGGFQVMSLATLRKLTEQGVTFRSHIDGSKHELTPERSIEIQALLGTDITMQLDECLKLPASREEIERAMQLSIRWGERSKRAFEARARDGYALFGIVQGGDDVPLRQQSAKALTDIGFHGYAIGGLAVGEPQEVMLKVVEETTPALPAAAPRYLMGVGTPHDLIEAVARGVDMFDCVMPTRNGRHGMAFTRFGQINLSNARHADDPRPLDEDSPHPLARVYSRAYLHHLTKANEMLGQVMLSTINIAYYQALTAGMRAAIEAGRFADYRETVLEGWRKGDLPPL

SEQ ID NO: 59557 - protein, 384 aa, Pseudolabrys taiwanensis
  REGION 1..384: note = tr|A0A345ZT09|A0A345ZT09_9RHIZ Queuine tRNA-ribosyltransferase OS=Pseudolabrys taiwanensis; OX = 331696 GN=tgt PE=3 SV=1
MTEKMMTDPFTFTLKTTDGMARRGQFVAPHGVVQTPAFMPVGTAGTVKGLHPEDVADTGAEIVLGNTYHLMLRPGPERVAALGGLHKFMNWQKPILTDSGGFQVMSLATLRKLTEKAVTFRSHIDGTMFELSPERSIEIQALLGADISMQLDECLKLPAAREEIQRAMALSLRWAERSRRAFEARNATGYALFGIVQGGDDIPLRQESARELIDIGFEGYAIGGLAVGEPQAVMLKVVEETTPVLPAERPRYLMGVGTPHDLLEAVKRGVDMFDCVMPTRNGRHGMAFTRFGSINLSNARHADDPRPLDEASPHPAARTYSRAYLHHLIKANEILGQVLLSTINIAYYQALMAGMRAAIEEGRFADFYAGTMAGWKGGDIPPLS

SEQ ID NO: 59558 - protein, 377 aa, unidentified
  source 1..377: note = Pseudomonadaceae bacterium
  REGION 1..377: note = tr|A0A3T0SIW9|A0A3T0SIW9_9GAMM Queuine tRNA-ribosyltransferase OS=Pseudomonadaceae bacterium SI-3; OX = 2079806 GN=tgt PE=3 SV=1
MSRTCHMSFELLATEGRARRGRLTFPRGSVETPAFMPVGTYGTVKGMLPRDIEGIGAQIILGNTFHLWLRPGTEVIKAHGDLHDFMQWQGPILTDSGGFQVFSLGAMRKIKEEGVYFASPVDGAKVFMGPEESMQVQRDLGSDIVMIFDECTPYPADEDVARRSMELSLRWAKRSKDAHGDSPAALFGIVQGGMHESLRKRSLEGLCEIGFDGLAIGGLSVGEPKEEMIRVLDFLPPLMPADKPRYLMGVGKPEDLVEGVRRGVDMFDCVMPTRNARNGHLFTDVGVVKIRNASHRYDDSPLDAGCDCYTCKHFSRAYLHHLDKCGEMLGSMLNTIHNLRHYQRLMAGLRDAIQQGTLAAFVDAFYAKRGLPTPPLA

SEQ ID NO: 59559 - protein, 380 aa, unidentified
  source 1..380: note = Pseudomonadaceae bacterium
  REGION 1..380: note = tr|A0A2D5CGS2|A0A2D5CGS2_9GAMM Queuine tRNA-ribosyltransferase OS=Pseudomonadaceae bacterium; OX = 1914538 GN=tgt PE=3 SV=1
MTRTCRMSFELLATEGKARRGRLTFPRGVVETPAFMPVGTYGTVKGMLPRDIEAIGAQMILGNTFHLWLRPGTEVIKKHGDLHDFMQWKGPILTDSGGFQVFSLGAMRKIKEEGVTFASPVDGAKVFMGPEESMQVQRDLGSDIVMIFDECTPYPAEFDVAKRSMELSLRWAKRSKEAHGDNTAALFGIVQGGMHEELRMRSLEGLNEIGFDGLAIGGLSVGEPKEEMIRVLDYLPDVMPADKPRYLMGVGKPEDLVEGVRRGVDMFDCVMPTRNARNGHLFVDTGVLKIRNAVHKHDDSPLDSSCDCYTCKNFSRAYLHHLDKCGEMLGSMLNTIHNLRHYQRLMAGLREAIQQSTLAAFVDDFYARRGLPTPPLDTNN

SEQ ID NO: 59560 - protein, 373 aa, unidentified
  source 1..373: note = Pseudomonadales bacterium
  REGION 1..373: note = tr|A0A2E3CV42|A0A2E3CV42_9GAMM Queuine tRNA-ribosyltransferase OS=Pseudomonadales bacterium; OX = 1891229 GN=tgt PE=3 SV=1
MKFELTGTDAGARRGRLIFDRGVVETPAFMPVGTYGSVKAMLPRDIEAIGAHIILGNTFHLMLRPGTEIIKQHGDLHDFMQWQGPILTDSGGFQVFSLGKMRKISEEGVKFQSPVDGSPVVVTPEISMQVQRDLGSDIVMIFDECPPYPATEKEARDSMELSLRWAKRSKDAHEGNPSALFGIVQGGMYEHLRRESLAGLMEIGFDGYAIGGLSVGEPKEEMMSVLNYLQPHMPKDRPRYLMGVGKPEDIVEAVRRGVDMFDCVMPTRNARNGHLFTSKGVIKIRNAAHKTDTGPLEEGCDCYTCQNFSRAYLHHLDRCKEILGAQLNTIHNLRYYQRLMLGLRTAIETGTFERFVTDFYQLRGETVPPLESN

SEQ ID NO: 59561 - protein, 375 aa, unidentified
  source 1..375: note = Pseudomonadales bacterium
  REGION 1..375: note = tr|A0A2D9PXK0|A0A2D9PXK0_9GAMM Queuine tRNA-ribosyltransferase OS=Pseudomonadales bacterium; OX = 1891229 GN=tgt PE=3 SV=1
MSHMSFELLATDGRARRGRLTFPRGVVETPAFMPVGTYGTVKGMLPRDIEAIGAQIILGNTFHLWLRPGTEVIRRHGDLHDFMQWQGPILTDSGGFQVFSLGAMRKIKEEGVYFSSPVDGAKVFMGPEESMQVQRALGSDIVMIFDECTPYPADLDTARRSMELSLRWAKRSKQAHGDNPSALFGIIQGGMHEELRLRSLEGLSEIGFDGLAIGGLSVGEPKEEMIRVLDFLPGHMPPEKPRYLMGVGKPEDLVEGVRRGVDMFDCVMPSRNARNGHLFTEAGVIKIRNAVHRHDESPLDPACDCYTCQHFSRAYLHHLDKCGEMLGSMLNTIHNLRHYQRLMAGLRGAIQQGTLTAFVENFYAKLGRPVPPLEP

SEQ ID NO: 59562 - protein, 377 aa, Pseudomonas abietaniphila
  REGION 1..377: note = tr|A0A1G8B9H3|A0A1G8B9H3_9PSED Queuine tRNA-ribosyltransferase OS=Pseudomonas abietaniphila; OX = 89065 GN=tgt PE=3 SV=1
MSRTCRMSFELLATDGKARRGRLTFPRGVVETPAFMPVGTYGTVKGMLPRDIEATGAQIILGNTFHLWLRPGTEVIKGHGDLHDFMQWKGPILTDSGGFQVFSLGAMRKIKEEGVTFASPVDGAKVFMGPEESMQVQRDLGSDIVMIFDECTPYPADEDVARTSMELSLRWAKRSKVAHGENTAALFGIVQGGMHENLRMRSLEGLNELDFDGLAIGGLSVGEPKHEMIKVLDYLPGRMPAEKPRYLMGVGKPEDLVEGVRRGVDMFDCVMPTRNARNGHLFIDTGVLKIRNAFHRHDESPLDPTCDCYTCKNFSRAYLHHLDKCGEMLGSMLNTIHNLRHYQLLMAGLREAIQQGTLAAFVDTFYAKRGLPVPPLD

SEQ ID NO: 59563 - protein, 375 aa, unidentified
  source 1..375: note = Pseudomonas abyssi
  REGION 1..375: note = tr|A0A2A3MKN8|A0A2A3MKN8_9PSED Queuine tRNA-ribosyltransferase OS=Pseudomonas abyssi OX=170540; GN = tgt PE=3 SV=1
MSHMSFELLATDGKARRGRLTFPRGVVETPAFMPVGTYGTVKGMLPRDIEAIGAQIILGNTFHLWLRPGTEVISKHGDLHDFMQWQGPILTDSGGFQVFSLGAMRKIKEEGVYFSSPVDGAKVFMGPEESMQVQRALGSDIVMIFDECTPYPADVDTARRSMELSLRWAKRSKQAHGDNPSALFGIIQGGMHEELRLRSLEGLSEIGFDGLAIGGLSVGEPKEEMIRVLDFLPGHMPPEKPRYLMGVGKPEDLVEGVRRGVDMFDCVMPSRNARNGHLFTEAGVIKIRNAVHRHDESPLDPACDCYTCQHFSRAYLHHLDKCGEMLGSMLNTIHNLRHYQRLMAGLRGAIQQGTLSAFVDNFYAKLGRPVPPLEP

SEQ ID NO: 59564 - protein, 403 aa, unidentified
  source 1..403: note = Pseudomonas acidophila
  REGION 1..403: note = tr|A0A2A4EXP4|A0A2A4EXP4_9PSED Queuine tRNA-ribosyltransferase OS=Pseudomonas acidophila; OX = 1912599 GN=tgt PE=3 SV=1
MTDDRATPTAGDTHTPPQGGLAFELLTTDGAARRGRLTLNHGVVETPIFMPVGTYGTVKAIQPRELEEIHAQIILGNTFHLWLRPGLETIAAHGGLHGFMGWKRPILTDSGGFQVFSLGDLRKITEDGVTFASPINGDKLFLSPEVSMQVQKVLNSDVVMQFDECTPYATNGVPTSHQDAADSMRMSMRWAQRSIDEFRRLDNPNALFGIVQGGMFEDLRDESLAGLAEMDFHGLAIGGLSVGEPKEDMMRVLNHIGPKLPAHKPHYLMGVGTPEDLVAGVAAGVDMFDCVMPTRNARNGWLFTRFGDIKIRNATHRNSLRPLDEQCGCYTCRNFSRGYLHHLHRVGEILGAQLNTIHNLHYYLELMGEIRNAIETHTFDAFRIAFRENRARGVEEATAAAAS

SEQ ID NO: 59565 - protein, 372 aa, Pseudomonas aeruginosa
  REGION 1..372: note = sp|Q9HXH9|TGT_PSEAE Queuine tRNA-ribosyltransferase; OS = Pseudomonas aeruginosa (strain ATCC 15692 / DSM 22644 / CIP 104116 / JCM 14847 / LMG 12228 / 1C / PRS 101 / PA O1); OX = 208964 GN=tgt PE=3 SV=1
MNFELLATDGKARRGRLTFPRGVVETPAFMPVGTYGTVKGMLPRDIEDIGAQIILGNTFHLWLRPGTEVIQRHGDLHDFMQWKGPILTDSGGFQVFSLGAMRKIKEEGVTFASPVDGAKVFMGPEESMAVQRALGSDIVMIFDECTPYPADHDVAKRSMELSLRWAKRSKIAHGDSPSALFGIVQGGMHEDLRLRSLDGLQEIGFDGLAIGGLSVGEPKEEMIRVLDFLPPQMPADKPRYLMGVGKPEDLVEGVRRGVDMFDCVMPTRNARNGHLFVDSGVIKIRNSVHKHDDSTLDPTCDCYTCKHFSRAYLHHLDKCGEMLGSMLNTIHNLRHYQRVMAGLREAIQQGTLAAFVDAFYAKRGLPTPPLDA

SEQ ID NO: 59566 - protein, 375 aa, Pseudomonas aeruginosa
  REGION 1..375: note = tr|A0A1C7BIW0|A0A1C7BIW0_PSEAI Queuine tRNA-ribosyltransferase OS=Pseudomonas aeruginosa BL04; OX = 1402545 GN=tgt PE=3 SV=1
MSFMNFELLATDGKARRGRLTFPRGVVETPAFMPVGTYGTVKGMLPRDIEDIGAQIILGNTFHLWLRPGTEVIQRHGDLHDFMQWKGPILTDSGGFQVFSLGAMRKIKEEGVTFASPVDGAKVFMGPEESMAVQRALGSDIVMIFDECTPYPADHDVAKRSMELSLRWAKRSKIAHGDSPSALFGIVQGGMHEDLRLRSLDGLQEIGFDGLAIGGLSVGEPKEEMIRVLDFLPPQMPADKPRYLMGVGKPEDLVEGVRRGVDMFDCVMPTRNARNGHLFVDSGVIKIRNSVHKHDDSTLDPTCDCYTCKHFSRAYLHHLDKCGEMLGSMLNTIHNLRHYQRVMAGLREAIQQGTLAAFVDAFYAKRGLPTPPLDA

SEQ ID NO: 59567 - protein, 375 aa, unidentified
  source 1..375: note = Pseudomonas aestusnigri
  REGION 1..375: note = tr|A0A1H5Y9A6|A0A1H5Y9A6_9PSED Queuine tRNA-ribosyltransferase OS=Pseudomonas aestusnigri; OX = 857252 GN=tgt PE=3 SV=1
MSHMSFELLATDGRARRGRLTFPRGVVETPAFMPVGTYGTVKGMLPRDIEAIGAQIILGNTFHLWLRPGTEVIRKHGDLHDFMQWQGPILTDSGGFQVFSLGAMRKIKEEGVYFSSPVDGAKVFMGPEESMQVQRALGSDIVMIFDECTPYPADLDTARRSMELSLRWAKRSKQAHGDNPSALFGIIQGGMHEELRLRSLEGLSEIGFDGLAIGGLSVGEPKEEMIRVLDFLPGHMPPEKPRYLMGVGKPEDLVEGVRRGVDMFDCVMPSRNARNGHLFTEAGVIKIRNAVHRHDESPLDPACDCYTCQHFSRAYLHHLDKCGEMLGSMLNTIHNLRHYQRLMAGLRGAIQQGTLTAFVENFYAKLGRPVPPLEP

SEQ ID NO: 59568 - protein, 377 aa, Pseudomonas agarici
  REGION 1..377: note = tr|A0A0X1T4B4|A0A0X1T4B4_PSEAA Queuine tRNA-ribosyltransferase OS=Pseudomonas agarici OX=46677; GN = tgt PE=3 SV=1
MSRTSRMSFELLATDGKARRGRLTFPRGTVETPAFMPVGTYGTVKGMLPRDIVATGAEIILGNTFHLWLRPGTEVIKAHGDLHDFMQWNGPILTDSGGFQVFSLGAMRKIKEEGVTFASPVDGAKVFMGPEESMQVQRDLGSDIVMIFDECTPYPADEDVARTSMELSLRWAQRSKNAHGDNSAALFGIVQGGMHQNLRMRSLEGLDKIGFDGLAIGGLSVGEPKHEMIKVLDYLPGQMPADKPRYLMGVGKPEDLVEGVRRGVDMFDCVMPTRNARNGHLFVDTGVLKIRNAFHRHDDSPLDPTCDCYTCQNFSRAYLHHLDKCGEMLGSMLNTLHNLRHYQRLMAGLREAIQQGTLAAFIDAFYAKRGLCVPPLD

SEQ ID NO: 59569 - protein, 375 aa, Pseudomonas alcaligenes
  REGION 1..375: note = tr|A0A1N6QYG2|A0A1N6QYG2_PSEAC Queuine tRNA-ribosyltransferase OS=Pseudomonas alcaligenes; OX = 43263 GN=tgt PE=3 SV=1
MSHMSFELLATDGRARRGRLSFPRGVVETPAFMPVGTYGTVKGMLPRDIEGIGAQIILGNTFHLWLRPGTEVIKRHGDLHDFMQWQGPILTDSGGFQVFSLGAMRKIKEEGVYFSSPVDGAKVFMGPEESMQVQRDLGSDIVMIFDECTPYPADFDTAKRSMELSLRWAKRSKNAHEGNPSALFGIVQGGMHEELRLRSLEGLMEIGFDGLAIGGLSVGEPKEEMIRVLDFLPPHLPTDKPRYLMGVGKPEDLVEGVRRGVDMFDCVMPTRNARNGHLFIDTGVIKIRNAVHKHDDSPLDPACDCYTCKHFSRAYLHHLDKCGEMLGSMLNTIHNLRHYQRLMAGLREAIQQGTLAAFVDAFYARRGLPTPPLEP

SEQ ID NO: 59570 - protein, 372 aa, Pseudomonas alcaligenes
  REGION 1..372: note = tr|A0A5C7WCJ7|A0A5C7WCJ7_PSEAC Queuine tRNA-ribosyltransferase OS=Pseudomonas alcaligenes; OX = 43263 GN=tgt PE=3 SV=1
MSFELLATDGRARRGRLTFPRGVVETPAFMPVGTYGTVKGMLPRDIEGIGAQIILGNTFHLWLRPGTEVIKRHGDLHDFMQWQGPILTDSGGFQVFSLGAMRKIKEEGVYFSSPVDGAKVFMGPEESMQVQRDLGSDIVMIFDECTPYPADFDTAKRSMELSLRWAKRSKNAHEGNPSALFGIVQGGMHEELRLRSLEGLMEIGFDGLAIGGLSVGEPKEEMIRVLDFLPPHLPTDKPRYLMGVGKPEDLVEGVRRGVDMFDCVMPTRNARNGHLFIDTGVIKIRNAVHKHDDAPLDPACDCYTCQHFSRAYLHHLDKCGEMLGSMLNTIHNLRHYQRLMAGLREAIQQGTLAAFVDAFYARRGLPTPPLEP

SEQ ID NO: 59571 - protein, 377 aa, Pseudomonas alcaliphila
  REGION 1..377: note = tr|A0A1G7PHX4|A0A1G7PHX4_9PSED Queuine tRNA-ribosyltransferase OS=Pseudomonas alcaliphila; OX = 101564 GN=tgt PE=3 SV=1
MSRTCRMSFELLATDGKARRGRLTFPRGVVETPAFMPVGTYGTVKGMLPRDVEAIGAQIILGNTFHLWLRPGMEVIKKHGDLHDFMQWQGPILTDSGGFQVFSLGAMRKIKEEGVYFASPVDGAKVFMGPEESMQVQRDLGSDIVMIFDECTPYPAEFDVAKRSMELSLRWAKRSKTAHGESTAALFGIVQGGMHEELRMRSLEGLCEIGFDGLAIGGLSVGEPKEEMIRVLDFLPPHMPADKPRYLMGVGKPEDLVEGVRRGVDMFDCVMPTRNARNGHLFVDTGVVKIRNAVHKHDDSPLDPTCDCYTCKHFSRAYLHHLDKCGEMLGSMLNTIHNLRHYQRVMAGLREAIGQGTLAAFVETFYAKRGLPVPPLD

SEQ ID NO: 59572 - protein, 377 aa, Pseudomonas alcaliphila
  REGION 1..377: note = tr|A0A1L7G3B2|A0A1L7G3B2_9PSED Queuine tRNA-ribosyltransferase OS=Pseudomonas alcaliphila JAB1; OX = 741155 GN=tgt PE=3 SV=1
MSRTCRMSFELLATDGKARRGRLTFPRGVVETPAFMPVGTYGTVKGMLPRDVEDIGAQIILGNTFHLWLRPGMEVIKKHGDLHDFMQWQGPILTDSGGFQVFSLGAMRKIKEEGVYFASPVDGAKVFMGPEESMQVQRDLGSDIVMIFDECTPYPAEFDVAKRSMELSLRWAKRSKTAHGESSAALFGIVQGGMHEELRMRSLEGLCEIGFDGLAIGGLSVGEPKEEMIRVLDFLPPHMPADKPRYLMGVGKPEDLVEGVRRGVDMFDCVMPTRNARNGHLFVDTGVVKIRNAVHKHDDSPLDPSCDCYTCKHFSRAYLHHLDKCGEMLGSMLNTIHNLRHYQRVMAGLREAIGQGTLAAFVETFYAKRGLPVPPLD

SEQ ID NO: 59573 - protein, 377 aa, unidentified
  source 1..377: note = Pseudomonas alkylphenolica
  REGION 1..377: note = tr|A0A443ZXT2|A0A443ZXT2_9PSED Queuine tRNA-ribosyltransferase OS=Pseudomonas alkylphenolica; OX = 237609 GN=tgt PE=3 SV=1
MSRTCRMSFELLATDGKARRGRLTFPRGVVETPAFMPVGTYGTVKGMLPRDIEAIGAQMILGNTFHLWLRPGTEVIKAHGDLHDFMKWQGPILTDSGGFQVFSLGAMRKIKEEGVTFASPVDGSKVFMGPEESMQVQRDLGSDVVMIFDECTPYPADEDVARISMELSLRWAQRSKNAHGDNTAALFGIVQGGMHENLRMRSLEGLDKIGFDGLAIGGLSVGEPKHEMIKVLDYLPGQMPADKPRYLMGVGKPEDLVEGVRRGVDMFDCVMPTRNARNGHLFVDTGVLKIRNAFHRHDDSPLDPTCDCYTCQNFSRAYLHHLDKCGEMLGSMLNTIHNLRHYQRLMAGLREAIQQGTLAVFVDAFYAKRGLPVPPLD

SEQ ID NO: 59574 - protein, 377 aa, unidentified
  source 1..377: note = Pseudomonas alkylphenolica
  REGION 1..377: note = tr|A0A077FE20|A0A077FE20_9PSED Queuine tRNA-ribosyltransferase OS=Pseudomonas alkylphenolica; OX = 237609 GN=tgt PE=3 SV=1
MSRTCRMSFELLATDGKARRGRLTFPRGVVETPAFMPVGTYGTVKGMLPRDIEAIGAQMILGNTFHLWLRPGTEVIKAHGDLHDFMKWQGPILTDSGGFQVFSLGAMRKIKEEGVTFASPVDGSKVFMGPEESMQVQRDLGSDVVMIFDECTPYPADEDVARISMELSLRWAQRSKNAHGDNTAALFGIVQGGMHQDLRMRSLEGLDKIGFDGLAIGGLSVGEPKHEMIKVLDYLPGQMPADKPRYLMGVGKPEDLVEGVRRGVDMFDCVMPTRNARNGHLFIDTGVLKIRNAFHRHDDSPLDPTCDCYTCQNFSRAYLHHLDKCGEMLGSMLNTIHNLRHYQRLMAGLREAIQQGTLAAFVDAFYAKRGLPVPPLD

SEQ ID NO: 59575 - protein, 384 aa, Pseudomonas amygdali
  REGION 1..384: note = tr|A0A3M6GJT8|A0A3M6GJT8_PSEAJ Queuine tRNA-ribosyltransferase OS=Pseudomonas amygdali pv. tabaci; OX = 322 GN=tgt PE=3 SV=1
MGTRGSRMSRTCRMSFELLATDGKARRGRLTFPRGVVETPAFMPVGTYGTVKGMLPRDIEATGAQMILGNTFHLWLRPGTEVIKGHGDLHDFMQWKGPILTDSGGFQVFSLGAMRKIKEEGVTFASPVDGAKVFMGPEESMQVQRDLGSDVVMIFDECTPYPADEDVARVSMELSLRWAKRSKVAHGENTAALFGIVQGGMHENLRKRSLEGLDEIGFDGLAIGGLSVGEPKHEMIKVLDYLPGLMPADKPRYLMGVGKPEDLVEGVRRGVDMFDCVMPTRNARNGHLFTDAGVLKIRNAFHRHDNSPLDPTCDCYTCKNFSRAYLHHLDKCGEMLGSMLNTIHNLRHYQLLMAGLREAIQQGTLAAFVDAFYAKRGLPTPPLG

SEQ ID NO: 59576 - protein, 377 aa, Pseudomonas amygdali
  REGION 1..377: note = tr|A0A0P9WKF9|A0A0P9WKF9_PSEA0 Queuine tRNA-ribosyltransferase OS=Pseudomonas amygdali pv. hibisci OX=251723 GN=tgt PE=3 SV=1
MSRTCRMSFELLATDGKARRGRLTFPRGVVETPAFMPVGTYGTVKGMLPRDIEATGAQMILGNTFHLWLRPGTEVIKGHGDLHDFMQWKGPILTDSGGFQVFSLGAMRKIKEEGVTFASPVDGAKVFMGPEESMQVQRDLGSDVVMIFDECTPYPADEDVARVSMELSLRWAKRSKVAHGENTAALFGIVQGGMHENLRKRSLEGLDEIGFDGLAIGGLSVGEPKHEMIKVLDYLPGLMPADKPRYLMGVGKPEDLVEGVRRGVDMFDCVMPTRNARNGHLFTDTGVLKIRNAFHRHDNSPLDPTCDCYTCKNFSRAYLHHLDKCGEMLGSMLNTIHNLRHYQLLMAGLREAIQQGTLAAFVDAFYAKRGLPTPPLG

SEQ ID NO: 59577 - protein, 377 aa, Pseudomonas anguilliseptica
  REGION 1..377: note = tr|A0A1H4P4Z9|A0A1H4P4Z9_PSEAG Queuine tRNA-ribosyltransferase OS=Pseudomonas anguilliseptica; OX = 53406 GN=tgt PE=3 SV=1
MTRTCRMSFELLATEGKARRGRLTFPRGVVETPAFMPVGTYGTVKGMLPRDIEAIGAQIILGNTFHLWLRPGTEVIKKHGDLHDFMQWQGPILTDSGGFQVFSLGAMRKIKEEGVYFASPVDGAKVFMGPEESMQVQCDLGSDIVMIFDECTPYPAEFDVAKRSMELSLRWAKRSKEAHGESTAALFGIVQGGMHEELRKVSLDGLEQIGFDGYAIGGLSVGEPKEEMIKVLDYLPPQLPADKPRYLMGVGKPEDLVEGVRRGVDMFDCVMPTRNARNGHLFVDTGVLKIRNAFHKHDESPLDPTCDCYTCKHFSRAYLHHLDKCGEMLGSMLNTIHNLRHYQVLMAGLREAIQQGTLAAFVDAFYAKRGLPTPPLD

SEQ ID NO: 59578 - protein, 374 aa, Pseudomonas antarctica
  REGION 1..374: note = tr|A0A172Z6N2|A0A172Z6N2_9PSED Queuine tRNA-ribosyltransferase OS=Pseudomonas antarctica; OX = 219572 GN=tgt PE=3 SV=1
MSRMSFELLATDGKARRGRLTFPRGTVETPAFMPVGTYGTVKGMLPRDIVATGAEIILGNTFHLWLRPGTEVIKKHGDLHDFMKWQGPILTDSGGFQVFSLGAMRKIKEEGVTFASPVDGSKVFMGPEESMQVQRDLGSDIVMIFDECTPYPADEDVARISMELSLRWAQRSKNAHGDNTAALFGIVQGGMHESLRKRSLEGLDKIGFDGLAIGGLSVGEPKHEMIKVLDYLPGLMPADKPRYLMGVGKPEDLVEGVRRGVDMFDCVMPTRNARNGHLFIDTGVLKIRNAFHRHDDSPLDPTCDCYTCQNFSRAYLHHLDKCGEMLGSMLNTIHNLRHYQVLMAGLREAIQQGTLAAFVDAFYAKRGLPVPPLD

SEQ ID NO: 59579 - protein, 377 aa, Pseudomonas argentinensis
  REGION 1..377: note = tr|A0A1I3HC29|A0A1I3HC29_9PSED Queuine tRNA-ribosyltransferase OS=Pseudomonas argentinensis; OX = 289370 GN=tgt PE=3 SV=1
MTRTCRMSFELLATDGKARRGRLTFPRGVVETPAFMPVGTYGTVKGMLPRDIEAIGAQIILGNTFHLWLRPGTEVIKRHGDLHDFMQWQGPILTDSGGFQVFSLGAMRKIKEEGVTFASPVDGSKVFMGPEESMQVQRDLGSDIVMIFDECTPYPAEFDVAKTSMELSLRWAKRSKVAHGDSSAALFGIVQGGMHESLRMRSLKGLSELEFDGLAIGGLSVGEPKEEMIKVLDYLPGQMPSDKPRYLMGVGKPEDLVEGVRRGVDMFDCVMPTRNARNGHLFVDTGVLKIRNAFHRHDDSPLDPTCDCYTCKHFSRAYLHHLDKCGEMLGSMLNTIHNLRHYQRLMAGLREAIQQGTLAAFVDAFYARRGLPTPPLD

SEQ ID NO: 59580 - protein, 377 aa, Pseudomonas arsenicoxydans
  REGION 1..377: note = tr|A0A502HU96|A0A502HU96_9PSED Queuine tRNA-ribosyltransferase OS=Pseudomonas arsenicoxydans; OX = 702115 GN=tgt PE=3 SV=1
MSRQSRMSFELLATDGKARRGRLTFPRGTVETPAFMPVGTYGTVKGMLPRDITATGAEIILGNTFHLWLRPGTEVIKKHGDLHDFMQWKGPILTDSGGFQVFSLGAMRKIKEEGVTFASPVDGAKVFMGPEESMQVQRDLGSDIVMIFDECTPYPADEDVARISMELSLRWAKRSKEAHGDNTAALFGIVQGGMHQDLRMRSLEGLDQIGFDGLAIGGLSVGEPKHEMIKVLDYLPGQMPADKPRYLMGVGKPEDLVEGVRRGVDMFDCVMPTRNARNGHLFIDTGVLKIRNAFHRHDDSPLDPTCDCYTCQNFSRAYLHHLDKCGEMLGSMLNTIHNLRHYQVLMAGLREAIQQGTLAAFVDAFYAKRGLPVPPLD

SEQ ID NO: 59581 - protein, 377 aa, Pseudomonas arsenicoxydans
  REGION 1..377: note = tr|A0A1H0H8F2|A0A1H0H8F2_9PSED Queuine tRNA-ribosyltransferase OS=Pseudomonas arsenicoxydans; OX = 702115 GN=tgt PE=3 SV=1
MSRQSRMSFELLATDGKARRGRLTFPRGTVETPAFMPVGTYGTVKGMLPRDIVATGAEIILGNTFHLWLRPGTEVIKKHGDLHDFMQWKGPILTDSGGFQVFSLGAMRKIKEEGVTFASPVDGAKVFMGPEESMQVQRDLGSDIVMIFDECTPYPADEDVARVSMELSLRWAKRSKEAHGDNTAALFGIVQGGMHQDLRMRSLEGLDNIGFDGLAIGGLSVGEPKHEMIKVLDYLPGQMPADKPRYLMGVGKPEDLVEGVRRGVDMFDCVMPTRNARNGHLFIDTGVLKIRNAFHRHDDSPLDPTCDCYTCQNFSRAYLHHLDKCGEMLGSMLNTIHNLRHYQVLMAGLREAIQQGTLAAFVDAFYAKRGLPVPPLD

SEQ ID NO: 59582 - protein, 377 aa, Pseudomonas asplenii
  REGION 1..377: note = tr|A0A3S3ELA7|A0A3S3ELA7_9PSED Queuine tRNA-ribosyltransferase OS=Pseudomonas asplenii OX=53407; GN = tgt PE=3 SV=1
MSRNCRMSFELLATDGKARRGRLTFPRGTVETPAFMPVGTYGTVKGMLPRDIVATGAEIILGNTFHLWLRPGTEVIKAHGDLHDFMQWKGPILTDSGGFQVFSLGAMRKIKEEGVTFASPVDGAKVFMGPEESMQVQRDLGSDIVMIFDECTPYPADEDVARVSMELSLRWAQRSKNAHGENTAALFGIVQGGMHESLRKRSLEGLDQIGFDGLAIGGLSVGEPKHEMIKVLDYLPGLMPADKPRYLMGVGKPEDLVEGVRRGVDMFDCVMPTRNARNGHLFIDTGVLKIRNAFHRHDESPLDPTCDCYTCQNFSRAYLHHLDKCGEMLGSMLNTIHNLRHYQRLMAGLREAIQQGTLAAFVDAFYAKRGLPVPPLD

SEQ ID NO: 59583 - protein, 377 aa, Pseudomonas asplenii
  REGION 1..377: note = tr|A0A1H1P1B5|A0A1H1P1B5_9PSED Queuine tRNA-ribosyltransferase OS=Pseudomonas asplenii OX=53407; GN = tgt PE=3 SV=1
MSRTCRMSFELLATDGKARRGRLTFPRGTVETPAFMPVGTYGTVKGMLPRDIVATGAEIILGNTFHLWLRPGTEVIKEHGDLHDFMQWKGPILTDSGGFQVFSLGAMRKIKEEGVTFASPVDGAKVFMGPEESMQVQRDLGSDIVMIFDECTPYPADEDVARVSMELSLRWAQRSKNAHGDNTAALFGIVQGGMHENLRMRSLEGLDKIGFDGLAIGGLSVGEPKHEMIKVLDYLPGRMPADKPRYLMGVGKPEDLVEGVRRGVDMFDCVMPTRNARNGHLFIDTGVLKIRNAFHRHDDSPLDPTCDCYTCQNFSRAYLHHLDKCGEMLGSMLNTIHNLRHYQRLMAGLREAIQQGTLAAFVDAFYAKRGLPVPPLD

SEQ ID NO: 59584 - protein, 377 aa, unidentified
  source 1..377: note = Pseudomonas asturiensis
  REGION 1..377: note = tr|A0A1M7LNZ4|A0A1M7LNZ4_9PSED Queuine tRNA-ribosyltransferase OS=Pseudomonas asturiensis; OX = 1190415 GN=tgt PE=3 SV=1
MSRTCRMSFELLATDGKARRGRLTFPRGVVETPAFMPVGTYGTVKGMLPRDIEATGAQIILGNTFHLWLRPGTEVIKGHGDLHDFMQWQGPILTDSGGFQVFSLGAMRKIKEEGVTFASPVDGAKVFMGPEESMQVQRDLGSDIVMIFDECTPYPADEDVARISMELSLRWAKRSKIAHGENTAALFGIVQGGMHENLRMRSLEGLDQIGFDGLAIGGLSVGEPKHEMIKVLDYLPGQMPADKPRYLMGVGKPEDLVEGVRRGIDMFDCVMPTRNARNGHLFIDTGVLKIRNAFHRHDNSPLDPTCDCYTCKNFSRAYLHHLDKCNEMLGSMLNTIHNLRHYQLLMAGLREAIQQGTLAAFVDAFYAKRGLPTPPLG

SEQ ID NO: 59585 - protein, 377 aa, Pseudomonas avellanae
  REGION 1..377: note = tr|A0A2S3TK94|A0A2S3TK94_9PSED Queuine tRNA-ribosyltransferase OS=Pseudomonas avellanae OX=46257; GN = tgt PE=3 SV=1
MSRTCRMSFELLATDGKARRGRLTFPRGVVETPAFMPVGTYGTVKGMLPRDIEATGAQMILGNTFHLWLRPGTEVIKGHGDLHDFMQWKGPILTDSGGFQVFSLGAMRKIKEEGVTFASPVDGAKVFMGPEESMQVQRDLGSDVVMIFDECTPYPADEDVARVSMELSLRWAKRSKVAHGENTAALFGIVQGGMHENLRKRSLEGLDEIGFDGLAIGGLSVGEPKHEMIKVLDYLPGLMPADKPRYLMGVGKPEDLVEGVRRGVDMFDCVMPTRNARNGHLFIDTGVLKIRNAFHRHDNTPLDPTCDCYTCKNFSRAYLHHLDKCGEMLGSMLNTIHNLRHYQLLMAGLREAIQQGTLAAFVDAFYAKRGLPTPPLG

SEQ ID NO: 59586 - protein, 371 aa, Pseudomonas avellanae
  REGION 1..371: note = tr|A0A261WKP7|A0A261WKP7_9PSED Queuine tRNA-ribosyltransferase OS=Pseudomonas avellanae OX=46257; GN = tgt PE=3 SV=1
MSFELLATDGKARRGRLTFPRGVVETPAFMPVGTYGTVKGMLPRDIEATGAQMILGNTFHLWLRPGTEVIKGHGDLHDFMQWKGPILTDSGGFQVFSLGAMRKIKEEGVTFASPVDGAKVFMGPEESMQVQRDLGSDVVMIFDECTPYPADEDVARVSMELSLRWAKRSKVAHGENTAALFGIVQGGMHENLRKRSLEGLDEIGFDGLAIGGLSVGEPKHEMIKVLDYLPGLMPADKPRYLMGVGKPEDLVEGVRRGVDMFDCVMPTRNARNGHLFIDTGVLKIRNAFHRHDNTPLDTTCDCYTCKNFSRAYLHHLDKCGEMLGSMLNTIHNLRHYQLLMAGLREAIQQGTLAAFVDAFYAKRGLPTPPLG

SEQ ID NO: 59587 - protein, 374 aa, Pseudomonas azotoformans
  REGION 1..374: note = tr|A0A4Q0HSM7|A0A4Q0HSM7_PSEAZ Queuine tRNA-ribosyltransferase OS=Pseudomonas azotoformans; OX = 47878 GN=tgt PE=3 SV=1
MSRMSFELLATDGKARRGRLTFPRGTVETPAFMPVGTYGTVKGMLPRDIVATGAEIILGNTFHLWLRPGTEVIKKHGDLHDFMKWQGPILTDSGGFQVFSLGAMRKIKEEGVTFASPVDGAKVFMGPEESMQVQRDLGSDIVMIFDECTPYPADEDVARISMELSLRWAQRSKNAHGDNTAALFGIVQGGMHESLRKRSLEGLDKIGFDGLAIGGLSVGEPKHEMIKVLDYLPGLMPADKPRYLMGVGKPEDLVEGVRRGVDMFDCVMPTRNARNGHLFIDTGVLKIRNAFHRHDDSPLDPTCDCYTCQNFSRAYLHHLDKCGEMLGSMLNTIHNLRHYQVLMAGLREAIQQGTLAAFVDAFYAKRGLPVPPLD

SEQ ID NO: 59588 - protein, 374 aa, Pseudomonas azotoformans
  REGION 1..374: note = tr|A0A127HRA2|A0A127HRA2_PSEAZ Queuine tRNA-ribosyltransferase OS=Pseudomonas azotoformans; OX = 47878 GN=tgt PE=3 SV=1
MSRMSFELLATDGKARRGRLTFPRGTVETPAFMPVGTYGTVKGMLPRDIVATGAEIILGNTFHLWLRPGTEVIKKHGDLHDFMKWQGPILTDSGGFQVFSLGAMRKIKEEGVTFASPVDGSKVFMGPEESMQVQRDLGSDIVMIFDECTPYPADEDVARISMELSLRWAQRSKNAHGDNTAALFGIVQGGMHESLRKRSLEGLHKIGFDGLAIGGLSVGEPKHEMIKVLDYLPGLMPADKPRYLMGVGKPEDLVEGVRRGVDMFDCVMPTRNARNGHLFIDTGVLKIRNAFHRHDDSPLDPTCDCYTCQNFSRAYLHHLDKCGEMLGSMLNTIHNLRHYQVLMAGLREAIQQGTLAAFVDAFYAKRGLPVPPLD

SEQ ID NO: 59589 - protein, 377 aa, Pseudomonas baetica
  REGION 1..377: note = tr|A0A2N0DHW5|A0A2N0DHW5_9PSED Queuine tRNA-ribosyltransferase OS=Pseudomonas baetica OX=674054; GN = tgt PE=3 SV=1
MSRECRMSFELLATDGKARRGRLTFPRGTVETPAFMPVGTYGTVKGMLPRDIVATGAEIILGNTFHLWLRPGTEVIKAHGDLHDFMQWKGPILTDSGGFQVFSLGAMRKIKEGGVTFASPVDGSKVFMGPEESMQVQRDLGSDIVMIFDECTPYPADEDVARVSMELSLRWAQRSKNAHGENTAALFGIVQGGMHQDLRMRSLEGLDKIGFDGLAIGGLSVGEPKHEMIKVLDYLPGMMPADKPRYLMGVGKPEDLVEGVRRGVDMFDCVMPTRNARNGHLFIDTGVLKIRNAFHRHDDSPLDPTCDCYTCQNFSRAYLHHLDKCGEMLGSMLNTIHNLRHYQVLMAGLREAIQQGTLAAFVDAFYAKRGLPVPPLD

SEQ ID NO: 59590 - protein, 377 aa, Pseudomonas balearica
  REGION 1..377: note = tr|A0A1G9SWF6|A0A1G9SWF6_9PSED Queuine tRNA-ribosyltransferase OS=Pseudomonas balearica DSM 6083; OX = 1123016 GN=tgt PE=3 SV=1
MSRTCRMTFELLATEGKARRGRLRFPRGVVETPAFMPVGTYGTVKGMLPRDVEGIGAQIILGNTFHLWLRPGMDVIREHGSLHGFMQWNGPILTDSGGFQVFSLGAMRKIKEEGVYFASPVDGAKVFMGPEESMQVQRDLGSDIVMIFDECTPYPADEETARRSMELSLRWAKRSKVAHGDSSAALFGIVQGGMHESLRMRSLEGLCEIGFDGLAIGGLSVGEPKEEMIRVLDFLPPQMPADKPRYLMGVGKPEDLVEGVRRGVDMFDCVMPTRNARNGHLFTENGVVKIRNSVHKHDNSPLDAECDCYTCKHFSRAYLHHLDKCGEMLGSMLNTIHNLRHYQRLMAGLRGAIEEGTLAAFVDAFYARRGLPTPPLA

SEQ ID NO: 59591 - protein, 371 aa, unidentified
  source 1..371: note = Pseudomonas batumici
  REGION 1..371: note = tr|A0A0C2E796|A0A0C2E796_9PSED Queuine tRNA-ribosyltransferase OS=Pseudomonas batumici OX=226910; GN = tgt PE=3 SV=1
MSFELLATDGKARRGRLTFPRGTVETPAFMPVGTYGTVKGMLPRDIVATGAEIILGNTFHLWLRPGTEVIKEHGDLHDFMQWKGPILTDSGGFQVFSLGAMRKIKEEGVTFASPVDGAKVFMGPEESMQVQRDLGSDIVMIFDECTPYPADEDVARVSMELSLRWAQRSKNAHGDNTAALFGIVQGGMHENLRKRSLEGLDKIGFDGLAIGGLSVGEPKHEMIKVLDYLPGLMPADKPRYLMGVGKPEDLVEGVRRGVDMFDCVMPTRNARNGHLFIDTGVLKIRNAFHRHDESPLDPTCDCYTCQNFSRAYLHHLDKCGEMLGSMLNTIHNLRHYQRLMAGLREAIQQGTLAAFVDAFYAKRGLPVPPLD

SEQ ID NO: 59592 - protein, 372 aa, Pseudomonas bauzanensis
  REGION 1..372: note = tr|A0A4U0YS09|A0A4U0YS09_9PSED tRNA guanosine(34) transglycosylase Tgt OS=Pseudomonas bauzanensis OX=653930; GN = tgt PE=4 SV=1
MQFELLATDGKARRGRLTFPRGVVETPAFMPVGTYGTVKGMLPRDVEDIGAQIILGNTFHLWLRPGTEVIRKHGDLHDFMQWQGPILTDSGGFQVFSLGAMRKIKEEGVYFSSPVDGAKVFMGPEESMQVQRDLGSDIVMIFDECTPYPADVDTARRSMELSLRWAQRSKDAHEGNPSALFGIVQGGMHEELRARSLDGLCEIGFDGLAIGGLSVGEPKEDMIRILDYLPPLMPPEKPRYLMGVGKPEDLVEGVRRGVDMFDCVMPTRNARNGHLFTDTGVVKIRNAVHRHDDSPLDPGCDCYTCRHFTRAYLHHLDKCGEMLGSMLNTIHNLRHYQRVMHGLRGAIQQGTLTAFVDNFYARLGQPVPPLEA

SEQ ID NO: 59593 - protein, 375 aa, Pseudomonas bauzanensis
  REGION 1..375: note = tr|A0A1H9P998|A0A1H9P998_9PSED Queuine tRNA-ribosyltransferase OS=Pseudomonas bauzanensis; OX = 653930 GN=tgt PE=3 SV=1
MSHMQFELLATDGKARRGRLTFPRGVVETPAFMPVGTYGTVKGMLPRDVEDIGAQIILGNTFHLWLRPGTEVIRKHGDLHDFMQWQGPILTDSGGFQVFSLGAMRKIKEEGVYFSSPVDGAKVFMGPEESMQVQRDLGSDIVMIFDECTPYPADVDTARRSMELSLRWAQRSKDAHEGNPSALFGIVQGGMHEELRARSLDGLCEIGFDGLAIGGLSVGEPKEDMIRILDYLPPLMPPEKPRYLMGVGKPEDLVEGVRRGVDMFDCVMPTRNARNGHLFTDTGVVKIRNAVHRHDDSPLDPGCDCYTCRHFTRAYLHHLDKCGEMLGSMLNTIHNLRHYQRVMHGLRGAIQQGTLTAFVDNFYARLGQPVPPLEA

SEQ ID NO: 59594 - protein, 377 aa, Pseudomonas benzenivorans
  REGION 1..377: note = tr|A0A1G7XTF9|A0A1G7XTF9_9PSED Queuine tRNA-ribosyltransferase OS=Pseudomonas benzenivorans; OX = 556533 GN=tgt PE=3 SV=1
MTRSCRMSFELLATDGKARRGRLTFPRGVVETPAFMPVGTYGTVKGMLPRDIEAIGAQIILGNTFHLWLRPGTEVIKRHGDLHDFMQWQGPILTDSGGFQVFSLGAMRKIKEEGVTFASPVDGAKVFMGPEESMQVQRDLGSDIVMIFDECTPYPAEFDVAKRSMELSLRWAQRSKDAHGENSAALFGIVQGGMHEELRLRSLEGLNEIGFDGLAIGGLSVGEPKEEMIRVLDYLPGQMPADKPRYLMGVGKPEDLVEGVRRGVDMFDCVMPTRNARNGHLFVETGVLKIRNSAHKQDDSPLDPTCDCYTCQHFSRAYLHHLDKCGEMLGSMLNTIHNLRHYQRLMAGLRGAIQQGTLAAFVDAFYARRGLQTPPLD

SEQ ID NO: 59595 - protein, 377 aa, Pseudomonas borbori
  REGION 1..377: note = tr|A0A1I5VK24|A0A1I5VK24_9PSED Queuine tRNA-ribosyltransferase OS=Pseudomonas borbori OX=289003; GN = tgt PE=3 SV=1
MTRTCRMSFELLATDGKARRGRLTFPRGVVETPAFMPVGTYGTVKGMLPRDIEAIGAQMILGNTFHLWLRPGTEVIKRHGDLHDFMQWQGPILTDSGGFQVFSLGAMRKIKEEGVYFASPVDGAKVFMGPEESMQVQRDLGSDIVMIFDECTPYPAEFDVAKRSMELSLRWAKRSKEAHGDSTAALFGIVQGGMHEELRMRSLEGLNALDFDGLAIGGLSVGEPKEEMIRVLDYLPAQLPADKPRYLMGVGKPEDLVEGVRRGVDMFDCVMPTRNARNGHLFVESGVLKIRNALHRHDDSPLDASCDCYTCKHFSRAYLHHLDKCGEMLGSMLNTIHNLRHYQRLMAGLREAIQQGTLAAFVDAFYTRRGLPVPPLD

SEQ ID NO: 59596 - protein, 377 aa, Pseudomonas brassicacearum
  REGION 1..377: note = tr|A0A423HYN9|A0A423HYN9_9PSED Queuine tRNA-ribosyltransferase OS=Pseudomonas brassicacearum; OX = 930166 GN=tgt PE=3 SV=1
MSRQSRMSFELLATDGKARRGRLTFPRGTVETPAFMPVGTYGTVKGMLPRDIVATGAEIILGNTFHLWLRPGTEVIKKHGDLHDFMQWKGPILTDSGGFQVFSLGAMRKIKEEGVTFASPVDGAKVFMGPEESMQVQRDLGSDIVMIFDECTPYPADEDVARVSMELSLRWAKRSKEAHGDNTAALFGIVQGGMHQDLRMRSLEGLDQIGFDGLAIGGLSVGEPKHEMIKVLDYLPGQMPADKPRYLMGVGKPEDLVEGVRRGVDMFDCVMPTRNARNGHLFIDTGVLKIRNAFHRHDDSPLDPTCDCYTCQNFSRAYLHHLDKCGEMLGSMLNTIHNLRHYQVLMAGLRESIQQGTLAAFVDAFYAKRGLPVPPLD

SEQ ID NO: 59597 - protein, 377 aa, Pseudomonas brassicacearum
  REGION 1..377: note = tr|A0A423J6D9|A0A423J6D9_9PSED Queuine tRNA-ribosyltransferase OS=Pseudomonas brassicacearum; OX = 930166 GN=tgt PE=3 SV=1
MSRTSRMSFELLATDGKARRGRLTFPRGTVETPAFMPVGTYGTVKGMLPRDITATGAEIILGNTFHLWLRPGTEVIKKHGDLHDFMQWKGPILTDSGGFQVFSLGAMRKIKEEGVTFASPVDGAKVFMGPEESMQVQRDLGSDIVMIFDECTPYPADEDVARVSMELSLRWAKRSKEAHGDNTAALFGIVQGGMHQDLRMRSLEGLDNIGFDGLAIGGLSVGEPKHEMIKVLDYLPGQMPADKPRYLMGVGKPEDLVEGVRRGVDMFDCVMPTRNARNGHLFIDTGVLKIRNAFHRHDDSPLDPTCDCYTCQNFSRAYLHHLDKCGEMLGSMLNTIHNLRHYQVLMAGLREAIQQGTLAAFVDAFYAKRGLPVPPLD

SEQ ID NO: 59598 - protein, 374 aa, Pseudomonas brenneri
  REGION 1..374: note = tr|A0A5B2UJ60|A0A5B2UJ60_9PSED Queuine tRNA-ribosyltransferase OS=Pseudomonas brenneri OX=129817; GN = tgt PE=3 SV=1
MSRMSFELLATDGKARRGRLTFPRGTVETPAFMPVGTYGTVKGMLPRDIVATGAEIILGNTFHLWLRPGTEVIKKHGDLHDFMKWQGPILTDSGGFQVFSLGAMRKIKEEGVTFASPVDGSKVFMGPEESMQVQRDLGSDIVMIFDECTPYPADEEVARISMELSLRWAQRSKNAHGDNTAALFGIVQGGMHESLRKRSLEGLDKIGFDGLAIGGLSVGEPKHEMIKVLDYLPGLMPSDKPRYLMGVGKPEDLVEGVRRGVDMFDCVMPTRNARNGHLFIDTGVLKIRNAFHRHDDSPLDPTCDCYTCQNFSRAYLHHLDKCGEMLGSMLNTIHNLRHYQVLMAGLREAIQQGTLAAFVDAFYAKRGLPVPPLD

SEQ ID NO: 59599 - protein, 374 aa, Pseudomonas brenneri
  REGION 1..374: note = tr|A0A176V4A5|A0A176V4A5_9PSED Queuine tRNA-ribosyltransferase OS=Pseudomonas brenneri OX=129817; GN = tgt PE=3 SV=1
MSRMSFELLATDGKARRGRLTFPRGTVETPAFMPVGTYGTVKGMLPRDIVATGAEIILGNTFHLWLRPGTEVIKKHGDLHDFMKWQGPILTDSGGFQVFSLGAMRKIKEEGVTFASPVDGSKVFMGPEESMQVQRDLGSDIVMIFDECTPYPADEDVARISMELSLRWAQRSKNAHGDNTAALFGIVQGGMHESLRKRSLEGLDKIGFDGLAIGGLSVGEPKHEMIKVLEYLPGLMPSDKPRYLMGVGKPEDLVEGVRRGVDMFDCVMPTRNARNGHLFIDTGVLKIRNAFHRHDDSPLDPTCDCYTCQNFSRAYLHHLDKCGEMLGSMLNTIHNLRHYQVLMAGLREAIQQGTLAAFVDAFYAKRGLPVPPLD

SEQ ID NO: 59600 - protein, 374 aa, unidentified; identical to SEQ ID NO: 59578
  source 1..374: note = Pseudomonas canadensis
  REGION 1..374: note = tr|A0A423EVI0|A0A423EVI0_9PSED Queuine tRNA-ribosyltransferase OS=Pseudomonas canadensis; OX = 915099 GN=tgt PE=3 SV=1

SEQ ID NO: 59601 - protein, 377 aa, Pseudomonas cannabina
  REGION 1..377: note = tr|A0A0P9P1E3|A0A0P9P1E3_PSECA Queuine tRNA-ribosyltransferase OS=Pseudomonas cannabina OX=86840; GN = tgt PE=3 SV=1
MSRTCRMSFELLATDGKARRGRLTFPRGVVETPAFMPVGTYGTVKGMLPRDIEATGAQMILGNTFHLWLRPGTEVIKGHGDLHDFMQWKGPILTDSGGFQVFSLGAMRKIKEEGVTFASPVDGAKVFMGPEESMQVQRDLGSDVMMIFDECTPYPADEDVARVSMELSLRWAKRSKVAHGENTAALFGIVQGGMHENLRKRSLEGLDDIGFDGLAIGGLSVGEPKHEMIKVLDYLPGLMPADKPRYLMGVGKPEDLVEGVRRGVDMFDCVMPTRNARNGHLFIDTGVLKIRNAFHRHDNSPLDPSCDCYTCKNFSRAYLHHLDKCGEMLGSMLNTIHNLRHYQLLMTGLREAIQQGTLAAFVDAFYAKRGLPTPPLG

SEQ ID NO: 59602 - protein, 377 aa, Pseudomonas cannabina
  REGION 1..377: note = tr|A0A3M3PSF7|A0A3M3PSF7_PSECA Queuine tRNA-ribosyltransferase OS=Pseudomonas cannabina OX=86840; GN = tgt PE=3 SV=1
MSRTCRMSFELLATDGKARRGRLTFPRGVVETPAFMPVGTYGTVKGMLPRDIEATGAQMILGNTFHLWLRPGTEVIKGHGDLHDFMQWKGPILTDSGGFQVFSLGAMRKIKEEGVTFASPVDGAKVFMGPEESMQVQRDLGSDVVMIFDECTPYPADEDVARVSMELSLRWAKRSKVAHGENTAALFGIVQGGMHENLRKRSLEGLDEIGFDGLAIGGLSVGEPKHEMIKVLDYLPGLMPADKPRYLMGVGKPEDLVEGVRRGVDMFDCVMPTRNARNGHLFIDTGVLKIRNAFHRHDNSPLDTSCDCYTCKNFSRAYLHHLDKCGEMLGSMLNTIHNLRHYQLLMAGLREAIQQGTLAAFVDAFYAKRGLPTPPLG

SEQ ID NO: 59603 - protein, 377 aa, unidentified
  source 1..377: note = Pseudomonas capeferrum
  REGION 1..377: note = tr|A0A084CBZ1|A0A084CBZ1_9PSED Queuine tRNA-ribosyltransferase OS=Pseudomonas capeferrum; OX = 1495066 GN=tgt PE=3 SV=1
MSRTCRMSFELLATDGKARRGRITFPRGTVETPAFMPVGTYGTVKGMLPRDIEAIGAEMILGNTFHLWLRPGTEVIKKHNGLHDFMQWKGPILTDSGGFQVFSLGAMRKIKEEGVTFASPVDGSKVFMGPEESMQVQRDLGSDVVMIFDECTPYPAEHDVARTSMELSLRWAQRSKNAHADNTAALFGIVQGGMYQDLRMRSLEGLENIGFDGLAIGGLSVGEPKHEMIKVLDYLPDQMPADKPRYLMGVGKPEDLVEGVRRGVDMFDCVMPTRNARNGHLFVDTGVIKIRNAFHRHDESPLDPTCDCYTCTNFSRAYLHHLDKCGEMLSSMLNTIHNLRHYQRLMAGLREAIQQGKLAAFVDAFYAKRGLPVPPLG

SEQ ID NO: 59604 - protein, 377 aa, Pseudomonas caricapapayae
  REGION 1..377: note = tr|A0A0N8QTW3|A0A0N8QTW3_9PSED Queuine tRNA-ribosyltransferase OS=Pseudomonas caricapapayae; OX = 46678 GN=tgt PE=3 SV=1
MSRTCRMSFELLATDGKARRGRLTFPRGVVETPAFMPVGTYGTVKGMLPRDIEATGAQMILGNTFHLWLRPGTEVIKGHGDLHDFMQWQGPILTDSGGFQVFSLGAMRKIKEEGVTFASPVDGAKVFMGPEESMQVQRDLGSDVVMIFDECTPYPADEDVARISMELSLRWARRSKVAHGENTAALFGIVQGGMHENLRKRSLEGLDEIGFDGLAIGGLSVGEPKHEMIKVLDYLPGLMPADKPRYLMGVGKPEDLVEGVRRGVDMFDCVMPTRNARNGHLFTDTGVLKIRNAFHRHDNSPLDPTCDCYTCKNFSRAYLHHLDKCGEMLGSMLNTIHNLRHYQLLMAGLREAIQQGTLAAFVDAFYAKRGLPTPPLG

SEQ ID NO: 59605 - protein, 377 aa, unidentified; identical to SEQ ID NO: 59597
  source 1..377: note = Pseudomonas caspiana
  REGION 1..377: note = tr|A0A502JC05|A0A502JC05_9PSED Queuine tRNA-ribosyltransferase OS=Pseudomonas caspiana OX=1451454; GN = tgt PE=3 SV=1

SEQ ID NO: 59606 - protein, 371 aa, unidentified
  source 1..371: note = Pseudomonas caspiana
  REGION 1..371: note = tr|A0A1Y3P6M6|A0A1Y3P6M6_9PSED Queuine tRNA-ribosyltransferase OS=Pseudomonas caspiana OX=1451454; GN = tgt PE=3 SV=1
MSFELLATDGKARRGRLTFPRGVVETPAFMPVGTYGTVKGMLPRDIEATGAQIILGNTFHLWLRPGTEVIKAHGDLHDFMKWNGPILTDSGGFQVFSLGAMRKIKEEGVTFASPVDGAKVFMGPEESMQVQRDLGSDIVMIFDECTPYPADEDVARVSMELSLRWAKRSKVAHGESTAALFGIVQGGMHESLRKRSLEGLDQIGFDGLAIGGLSVGEPKHEMIKVLDYLPGLMPPEKPRYLMGVGKPEDLVEGVRRGIDMFDCVMPTRNARNGHLFIDTGVLKIRNAFHRHDDSPLDPTCDCYTCQNFSRAYLHHLDKCGEMLGSMLNTIHNLRHYQRLMAGLREAIQQGTLAAFVDAFYAKRGIPTPPMD

SEQ ID NO: 59607 - protein, 374 aa, Pseudomonas cedrina; identical to SEQ ID NO: 59587
  REGION 1..374: note = tr|A0A2S9D786|A0A2S9D786_PSECE Queuine tRNA-ribosyltransferase OS=Pseudomonas cedrina OX=651740; GN = tgt PE=3 SV=1

SEQ ID NO: 59608 - protein, 374 aa, Pseudomonas cedrina
  REGION 1..374: note = tr|A0A1V2KJ63|A0A1V2KJ63_PSECE Queuine tRNA-ribosyltransferase OS=Pseudomonas cedrina subsp. cedrina OX=76762 GN=tgt PE=3 SV=1
MSRMSFELLATDGKARRGRVTFPRGTVETPAFMPVGTYGTVKGMLPRDIVATGAEIILGNTFHLWLRPGTEVIKKHGDLHDFMKWQGPILTDSGGFQVFSLGAMRKIKEEGVTFASPVDGSKVFMGPEESMQVQRDLGSDIVMIFDECTPYPADEDVARISMELSLRWAQRSKNAHGDNTAALFGIVQGGMHESLRKRSLEGLDKIGFDGLAIGGLSVGEPKHEMIKVLDYLPGLMPADKPRYLMGVGKPEDLVEGVRRGVDMFDCVMPTRNARNGHLFIDTGVLKIRNAFHRHDDSPLDPTCDCYTCQNFSRAYLHHLDKCGEMLGSMLNTIHNLRHYQVLMAGLREAIQQGTLAAFVDAFYAKRGLPVPPLD

SEQ ID NO: 59609 - protein, 377 aa, unidentified
  source 1..377: note = Pseudomonas cerasi
  REGION 1..377: note = tr|A0A193SL95|A0A193SL95_9PSED Queuine tRNA-ribosyltransferase OS=Pseudomonas cerasi OX=1583341; GN = tgt PE=3 SV=1
MSRTCRMSFELLATDGKARRGRLTFPRGVVETPAFMPVGTYGTVKGMLPRDIEATGAQMILGNTFHLWLRPGTEVIKGHGDLHDFMQWKGPILTDSGGFQVFSLGAMRKIKEEGVTFASPVDGAKVFMGPEESMQVQRDLGSDVVMIFDECTPYPADEDVARVSMELSLRWAKRSKIAHGENTAALFGIVQGGMHENLRKRSLEGLDEIGFDGLAIGGLSVGEPKHEMIKVLDYLPGLMPADKPRYLMGVGKPEDLVEGVRRGVDMFDCVMPTRNARNGHLFTDTGVLKIRNAFHRHDNSPLDPTCDCYTCKNFSRAYLHHLDKCGEMLGSMLNTIHNLRHYQLLMAGLREAIQQGTLAAFVDAFYAKRGLPTPPLG

SEQ ID NO: 59610 - protein, 377 aa, unidentified
  source 1..377: note = Pseudomonas chengduensis
  REGION 1..377: note = tr|A0A1G6KG37|A0A1G6KG37_9PSED Queuine tRNA-ribosyltransferase OS=Pseudomonas chengduensis; OX = 489632 GN=tgt PE=3 SV=1
MSRTCRMSFELLATDGKARRGRLTFPRGVVETPAFMPVGTYGTVKGMLPRDVEDIGAQIILGNTFHLWLRPGMEVIKKHGDLHDFMQWQGPILTDSGGFQVFSLGAMRKIKEEGVYFASPVDGAKVFMGPEESMQVQRDLGSDIVMIFDECTPYPAEFDVAKRSMELSLRWAKRSKTAHGESSAALFGIVQGGMHEELRMRSLEGLCEIGFDGLAIGGLSVGEPKEEMIRVLDFLPPHMPADKPRYLMGVGKPEDLVEGVRRGVDMFDCVMPTRNARNGHLFVDTGVVKIRNAVHKHDDSPLDPTCDCYTCKHFSRAYLHHLDKCGEMLGSMLNTIHNLRHYQRVMAGLREAIGQGTLAAFVETFYAKRGLPVPPLD

SEQ ID NO: 59611 - protein, 371 aa, unidentified
  source 1..371: note = Pseudomonas chloritidismutans
  REGION 1..371: note = tr|V4QGJ1|V4QGJ1_PSECO Queuine tRNA-ribosyltransferase OS=Pseudomonas chloritidismutans AW-1 OX=1263865 GN=tgt PE=3 SV=1
MSFELLATDGKARRGRLTFPRGTVETPAFMPVGTYGTVKGMLPRDIEAIGAQIILGNTFHLWLRPGTEVIKRHGDLHDFMQWQGPILTDSGGFQVFSLGAMRKIKEEGVYFASPVDGAKVFMGPEESMQVQRDLGSDIVMIFDECTPYPADEDVARRSMELSLRWAKRSKVAHGDSPAALFGIVQGGMHESLRMRSLEGLCEIGFDGLAIGGLSVGEPKEEMIRVLDFLPPQMPADKPRYLMGVGKPEDLVEGVRRGVDMFDCVMPTRNARNGHLFVDSGVIKIRNAVHKHDDSPLDPSCDCYTCKHFSRAYLHHLDKCGEMLGSMLNTIHNLRHYQRVMAGLRDAIQQGTLAAFVDAFYAKRGLPTPPLA

SEQ ID NO: 59612 - protein, 377 aa, Pseudomonas chlororaphis
  REGION 1..377: note = tr|A0A1E1G2T7|A0A1E1G2T7_9PSED Queuine tRNA-ribosyltransferase OS=Pseudomonas chlororaphis subsp. aurantiaca OX=86192 GN=tgt PE=3 SV=1
MSRTCRMSFELLATDGKARRGRLTFPRGTVETPAFMPVGTYGTVKGMLPRDIVATGAEIILGNTFHLWLRPGTEVIKKHGDLHDFMQWKGPILTDSGGFQVFSLGAMRKIKEEGVTFASPVDGAKVFMGPEESMQVQRDLGSDIVMIFDECTPYPADEDVARVSMELSLRWAQRSKNAHGDNTAALFGIVQGGMHQDLRMRSLEGLDKIGFDGLAIGGLSVGEPKHEMIKVLDYLPGQMPADKPRYLMGVGKPEDLVEGVRRGVDMFDCVMPTRNARNGHLFIDTGVLKIRNAFHRHDDSPLDPTCDCYTCQNFSRAYLHHLDKCGEMLGSMLNTIHNLRHYQRLMAGLREAIQQGTLAAFVDSFYAKRGLPVPPLE

SEQ ID NO: 59613 - protein, 377 aa, Pseudomonas chlororaphis
  REGION 1..377: note = tr|A0A423DLS5|A0A423DLS5_9PSED Queuine tRNA-ribosyltransferase OS=Pseudomonas chlororaphis; OX = 587753 GN=tgt PE=3 SV=1
MSRTCRMSFELLATDGKARRGRLTFPRGTVETPAFMPVGTYGTVKGMLPRDIVATGAEIILGNTFHLWLRPGTEVIKKHGDLHDFMQWSGPILTDSGGFQVFSLGAMRKIKEEGVTFASPVDGAKVFMGPEESMQVQRDLGSDIVMIFDECTPYPADEDVARISMELSLRWAQRSKNAHGENTAALFGIVQGGMHQDLRMRSLEGLDKIGFDGLAIGGLSVGEPKHEMIKVLDYLPGQMPADKPRYLMGVGKPEDLVEGVRRGVDMFDCVMPTRNARNGHLFIDTGVLKIRNAFHRHDDSPLDPTCDCYTCQNFSRAYLHHLDKCGEMLGSMLNTIHNLRHYQRLMAGLREAIQQGTLAAFVDSFYAKRGLPVPPLD

SEQ ID NO: 59614 - protein, 377 aa, Pseudomonas cichorii
  REGION 1..377: note = tr|A0A3M3SP50|A0A3M3SP50_PSECI Queuine tRNA-ribosyltransferase OS=Pseudomonas cichorii OX=36746; GN = tgt PE=3 SV=1
MSRTCRMSFELLATDGKARRGRLTFPRGVVETPAFMPVGTYGTVKGMLPRDIEATGAQIILGNTFHLWLRPGTEVIKGHGDLHDFMQWKGPILTDSGGFQVFSLGAMRKIKEEGVTFASPVDGAKVFMGPEESMQVQRDLGSDIVMIFDECTPYPADEDVARVSMELSLRWAKRSKVAHGESTAALFGIVQGGMHENLRMRSLEGLDQIGFDGLAIGGLSVGEPKHEMIKVLDYLPGQMPADKPRYLMGVGKPEDLVEGVRRGVDMFDCVMPTRNARNGHLFIDTGVLKIRNAFHRHDDSPLDPTCDCYTCKNFSRAYLHHLDKCGEMLGSMLNTIHNLRHYQLLMAGLREAIQQGTLAAFVDAFYAKRGLPTPPLG

SEQ ID NO: 59615 - protein, 377 aa, Pseudomonas cichorii
  REGION 1..377: note = tr|A0A3M4LID2|A0A3M4LID2_PSECI Queuine tRNA-ribosyltransferase OS=Pseudomonas cichorii OX=36746; GN = tgt PE=3 SV=1
MSRTCRMSFELLATDGKARRGRLTFPRGVVETPAFMPVGTYGTVKGMLPRDIEATGAQIILGNTFHLWLRPGTEVIKGHGDLHDFMQWKGPILTDSGGFQVFSLGAMRKIKEEGVTFASPVDGSKVFMGPEESMQVQRDLGSDIVMIFDECTPYPADEDVARVSMELSLRWAKRSKVAHGESTAALFGIVQGGMHENLRMRSLEGLDQIGFDGLAIGGLSVGEPKHEMIKVLDYLPGQMPADKPRYLMGVGKPEDLVEGVRRGVDMFDCVMPTRNARNGHLFIDTGVLKIRNAFHRHDDSPLDPTCDCYTCQNFSRAYLHHLDKCGEMLGSMLNTIHNLRHYQLLMAGLREAIQQGTLAAFVDAFYAKRGLPTPPLG

SEQ ID NO: 59616 - protein, 375 aa, Pseudomonas citronellolis
  REGION 1..375: note = tr|A0A127MYW0|A0A127MYW0_9PSED Queuine tRNA-ribosyltransferase OS=Pseudomonas citronellolis; OX = 53408 GN=tgt PE=3 SV=1
MSFMKFELLATDGKARRGRLSFPRGVVETPAFMPVGTYGTVKGMLPRDIEGIGAQIILGNTFHLWLRPGTEVIRKHGDLHDFMQWQGPILTDSGGFQVFSLGALRKIKEEGVYFASPVDGAKVFMGPEESMAVQRALGSDIVMIFDECTPYPAEFDVAKRSMELSLRWAKRSKIAHGDSPSALFGIVQGGMHEELRMRSLEGLQEIGFDGLAIGGLSVGEPKEEMIRVLDFLPPRMPADKPRYLMGVGKPEDLVEGVRRGVDMFDCVMPTRNARNGHLFVDTGVIKIRNAVHKHDESPLDPTCDCYTCKHFSRAYLYHLDKCGEMLGSMLNTIHNLRHYQRLMAGLREAIQQGTLAAFVDAFYAKRGLPTPPLGD

SEQ ID NO: 59617 - protein, 372 aa, Pseudomonas citronellolis
  REGION 1..372: note = tr|A0A4Z0ILH0|A0A4Z0ILH0_9PSED Queuine tRNA-ribosyltransferase OS=Pseudomonas citronellolis; OX = 53408 GN=tgt PE=3 SV=1
MKFELLATDGKARRGRLSFPRGVVETPAFMPVGTYGTVKGMLPRDIEGIGAQIILGNTFHLWLRPGTEVIRKHGDLHDFMQWQGPILTDSGGFQVFSLGALRKIKEEGVYFASPVDGAKVFMGPEESMAVQRALGSDIVMIFDECTPYPAEFDVAKRSMELSLRWAKRSKIAHGDSPSALFGIVQGGMHEELRMRSLEGLQEIGFDGLAIGGLSVGEPKEEMIRVLDFLPPRMPADKPRYLMGVGKPEDLVEGVRRGVDMFDCVMPTRNARNGHLFVDTGVIKIRNAVHKHDESPLDPTCDCYTCKHFSRAYLYHLDKCGEMLGSMLNTIHNLRHYQRLMAGLREAIQQGTLAAFVDAFYAKRGLPTPPLGD

SEQ ID NO: 59618 - protein, 377 aa, unidentified
  source 1..377: note = Pseudomonas coleopterorum
  REGION 1..377: note = tr|A0A1H5EC28|A0A1H5EC28_9PSED Queuine tRNA-ribosyltransferase OS=Pseudomonas coleopterorum; OX = 1605838 GN=tgt PE=3 SV=1
MSRTCRMSFELLATDGKARRGRLTFPRGVVETPAFMPVGTYGTVKGMLPRDIEAIGAQMILGNTFHLWLRPGTEVIKAHGDLHDFMQWKGPILTDSGGFQVFSLGAMRKIKEEGVYFASPVDGSKVFMGPEESMQVQRDLGSDVVMIFDECTPYPADEQTARTSMELSLRWAQRSKDAHADSTAALFGIVQGGMHENLRMRSLEGLDKIGFDGLAIGGLSVGEPKHEMIKVLDYLPGQMPADKPRYLMGVGKPEDLVEGVRRGVDMFDCVMPTRNARNGHLFIDTGVLKIRNAFHRHDDSPLDPTCDCYTCRNFSRAYLHHLDKCGEMLGSMLNTIHNLRHYQRLMAGLREAIQQGTLAAFVDAFYAKRGLPVPPLD

SEQ ID NO: 59619 - protein, 377 aa, Pseudomonas composti
  REGION 1..377: note = tr|A0A1I5LMU2|A0A1I5LMU2_9PSED Queuine tRNA-ribosyltransferase OS=Pseudomonas composti OX=658457; GN = tgt PE=3 SV=1
MSRTCRMSFELLATDRKARRGRLTFPRGVVETPAFMPVGTYGTVKGMLPRDVEEIGAQIILGNTFHLWLRPGMEVIKRHGDLHDFMQWQGPILTDSGGFQVFSLGAMRKIKEEGVYFASPVDGAKVFMGPEESMQVQRDLGSDIVMIFDECTPYPAEFDVAKRSMELSLRWAKRSKTAHGESSAALFGIVQGGMHEELRMRSLEGLCEIGFDGLAIGGLSVGEPKEEMIRVLDFLPPHMPADKPRYLMGVGKPEDLVEGVRRGVDMFDCVMPTRNARNGHLFVDTGVVKIRNAVHKHDDSPLDPTCDCYTCKHFSRAYLHHLDKCGEMLGSMLNTIHNLRHYQRVMAGLREAIQQGTLAAFVETFYAKRGLPVPPLD

SEQ ID NO: 59620 - protein, 377 aa, Pseudomonas congelans
  REGION 1..377: note = tr|A0A0P9MEH4|A0A0P9MEH4_9PSED Queuine tRNA-ribosyltransferase OS=Pseudomonas congelans OX=200452; GN = tgt PE=3 SV=1
MSRTCRMSFELLATDGKARRGRLTFPRGVVETPAFMPVGTYGTVKGMLPRDIEATGAQMILGNTFHLWLRPGTEVIKGHGDLHDFMQWQGPILTDSGGFQVFSLGAMRKIKEEGVTFASPVDGAKVFMGPEESMQVQRDLGSDVVMIFDECTPYPADEDVARVSMELSLRWAKRSKIAHGENTAALFGIVQGGMHENLRKRSLEGLDEIGFDGLAIGGLSVGEPKHEMIKVLDYLPGLMPADKPRYLMGVGKPEDLVEGVRRGVDMFDCVMPTRNARNGHLFTDTGVLKIRNAFHRHDNTPLDPTCDCYTCKNFSRAYLHHLDKCGEMLGSMLNTIHNLRHYQLLMAGLREAIQQGTLAAFVDAFYAKRGLPTPPLG

SEQ ID NO: 59621 - protein, 377 aa, unidentified
  source 1..377: note = Pseudomonas coronafaciens
  REGION 1..377: note = tr|A0A0P9XKB3|A0A0P9XKB3_9PSED Queuine tRNA-ribosyltransferase OS=Pseudomonas coronafaciens pv. porri OX=83964 GN=tgt PE=3 SV=1
MSRTCRMSFELLATDGKARRGRLTFPRGVVETPAFMPVGTYGTVKGMLPRDIEATGAQMILGNTFHLWLRPGTEVIKGHGDLHDFMQWQGPILTDSGGFQVFSLGAMRKIKEEGVTFASPVDGAKVFMGPEESMQVQRDLGSDIVMIFDECTPYPADEDVARISMELSLRWAKRSKVAHGENTAALFGIVQGGMHENLRMRSLEGLDEIGFDGLAIGGLSVGEPKHEMIKVLDYLPGRMPADKPRYLMGVGKPEDLVEGVRRGVDMFDCVMPTRNARNGHLFIDTGVLKIRNAFHRHDNSPLDPSCDCYTCKNFSRAYLHHLDKCGEMLGSMLNTIHNLRHYQLLMAGLREAIQQGTLAAFVDAFYAKRGLPTPPLG

SEQ ID NO: 59622 - protein, 377 aa, unidentified
  source 1..377: note = Pseudomonas coronafaciens
  REGION 1..377: note = tr|A0A3M3LFS8|A0A3M3LFS8_9PSED Queuine tRNA-ribosyltransferase OS=Pseudomonas coronafaciens pv. zizaniae OX=251700 GN=tgt PE=3 SV=1
MSRTCRMSFELLATDGKARRGRLTFPRGVVETPAFMPVGTYGTVKGMLPRDIEATGAQMILGNTFHLWLRPGTEVIKGHGDLHDFMQWQGPILTDSGGFQVFSLGAMRKIKEEGVTFASPVDGAKVFMGPEESMQVQRDLGSDIVMIFDECTPYPADEDVARISMELSLRWAKRSKVAHGENTAALFGIVQGGMHENLRMRSLEGLDEIGFDGLAIGGLSVGEPKHEMIKVLDYLPGQMPADKPRYLMGVGKPEDLVEGVRRGVDMFDCVMPTRNARNGHLFIDTGVLKIRNAFHRHDNSPLDPTCDCYTCKNFSRAYLHHLDKCGEMLGSMLNTIHNLRHYQLLMAGLREAIQQGTLAAFVDAFYAKRGLPTPPLG

SEQ ID NO: 59623 - protein, 377 aa, Pseudomonas corrugata
  REGION 1..377: note = tr|A0A3M3E927|A0A3M3E927_9PSED Queuine tRNA-ribosyltransferase OS=Pseudomonas corrugata OX=47879; GN = tgt PE=3 SV=1
MSRTCRMSFELLATDGKARRGRLTFPRGTVETPAFMPVGTYGTVKGMLPRDIEAIGAEIILGNTFHLWLRPGMEVIKAHGDLHDFMQWKGPILTDSGGFQVFSLGAMRKIKEEGVTFASPVDGAKVFMGPEESMQVQRDLGSDIVMIFDECTPYPADEDVARVSMELSLRWAQRSKNAHGDNTAALFGIVQGGMHQDLRMRSLEGLDKIGFDGLAIGGLSVGEPKHEMIKVLDYLPGQMPADKPRYLMGVGKPEDLVEGVRRGVDMFDCVMPTRNARNGHLFIDTGVLKIRNAFHRHDSSPLDPTCDCYTCKNFSRAYLHHLDKCGEMLGSMLNTIHNLRHYQVLMAGLREAIQQGTLAAFVEAFYAKRGLPVPPLD

SEQ ID NO: 59624 - protein, 374 aa, Pseudomonas costantinii
  REGION 1..374: note = tr|A0A1S2UTV3|A0A1S2UTV3_9PSED Queuine tRNA-ribosyltransferase OS=Pseudomonas costantinii; OX = 168469 GN=tgt PE=3 SV=1
MSRMSFELLATDGKARRGRLTFPRGTVETPAFMPVGTYGTVKGMMPRDIVATGAEIILGNTFHLWLRPGTEVIKKHGDLHDFMKWQGPILTDSGGFQVFSLGAMRKIKEEGVTFASPVDGSKVFMGPEESMQVQRDLGSDIVMIFDECTPYPADEDVARISMELSLRWAQRSKNAHGDNTAALFGIVQGGMHESLRKRSLEGLDKIGFDGLAIGGLSVGEPKHEMIKVLDYLPGLMPADKPRYLMGVGKPEDLVEGVRRGVDMFDCVMPTRNARNGHLFIDTGVLKIRNAFHRHDDSPLDPTCDCYTCQNFSRAYLHHLDKCGEMLGSMLNTIHNLRHYQVLMAGLREAIQQGTLAAFVDAFYAKRGLPVPPLD

SEQ ID NO: 59625 - protein, 377 aa, Pseudomonas cremoricolorata
  REGION 1..377: note = tr|A0A089Y8B5|A0A089Y8B5_9PSED Queuine tRNA-ribosyltransferase OS=Pseudomonas cremoricolorata; OX = 157783 GN=tgt PE=3 SV=1
MSRTCRMSFELLATDGKARRGRLTFPRGTVETPAFMPVGTYGTVKGMLPRDIEAIGAEIILGNTFHLWLRPGTEVIRKHNGLHDFMQWKGPILTDSGGFQVFSLGAMRKIKEEGVTFASPVDGSKVFMGPEESMQVQRDLGSDIVMIFDECTPYPAEHDVARTSMELSLRWAQRSKNAHGDNSAALFGIVQGGMHEDLRMRSLEGLDKIGFDGLAIGGLSVGEPKHEMIKVLDYLPGQMPADKPRYLMGVGKPEDLVEGVRRGVDMFDCVMPTRNARNGHLFVDTGVIKIRNAFHRHDESPLDPTCDCYTCSNFSRAYLHHLDKCGEMLSSMLNTIHNLRHYQRLMAGLREAIQQGKLAAFVDAFYAKRGLPVPPLD

SEQ ID NO: 59626 - protein, 377 aa, Pseudomonas cuatrocienegasensis
  REGION 1..377: note = tr|A0A1H9E6X0|A0A1H9E6X0_9PSED Queuine tRNA-ribosyltransferase OS=Pseudomonas cuatrocienegasensis; OX = 543360 GN=tgt PE=3 SV=1
MTRTCRMSFELLATDGKARRGRVTFPRGVVETPAFMPVGTYGTVKGMLPRDIEATGAQIILGNTFHLWLRPGTEVIKKHGDLHDFMQWQGPILTDSGGFQVFSLGAMRKIKEEGVYFASPVDGAKVFMGPEESMQVQRDLGSDIVMIFDECTPYPAEFDVAKRSMELSLRWAKRSKEAHGDSTAALFGIVQGGMYEELRKVSLDGLEQIGFDGYAIGGLSVGEPKDEMIKVLDYLPAELPADKPRYLMGVGKPEDLVEGVRRGVDMFDCVMPTRNARNGHLFVETGVLKIRNAFHRHDDSPLDSTCDCYTCKHFSRAYLHHLDKCGEMLGSMLNTIHNLRHYQRLMAGLREAIQQGTLAAFVDAFYARRGLPVPPLD

SEQ ID NO: 59627 - protein, 377 aa, unidentified
  source 1..377: note = Pseudomonas daroniae
  REGION 1..377: note = tr|A0A4Q9QJI1|A0A4Q9QJI1_9PSED Queuine tRNA-ribosyltransferase OS=Pseudomonas daroniae OX=2487519; GN = tgt PE=3 SV=1
MTRSCRMSFELLATDGKARRGRLTFPRGVVETPAFMPVGTYGTVKGMLPRDIEAIGAQIILGNTFHLWLRPGTEVIKRHGDLHDFMQWQGPILTDSGGFQVFSLGAMRKIKEEGVTFASPVDGSKVFMGPEESMQVQRDLGSDIVMIFDECTPYPAEFDVAKTSMELSLRWAKRSKVAHGDSTAALFGIVQGGMHESLRMRSLEGLSELDFDGLAIGGLSVGEPKEEMIKVLDYLPGQMPSDKPRYLMGVGKPEDLVEGVRRGVDMFDCVMPTRNARNGHLFIDTGVLKIRNAFHRHDDSPLDPTCDCYTCKHFSRAYLHHLDKCGEMLGSMLNTIHNLRHYQRLMAGLREAIQQGTLAAFVDAFYTRRGLPTPPLD

SEQ ID NO: 59628 - protein, 376 aa, Pseudomonas deceptionensis
  REGION 1..376: note = tr|A0A1H5KT24|A0A1H5KT24_PSEDM Queuine tRNA-ribosyltransferase OS=Pseudomonas deceptionensis; OX = 882211 GN=tgt PE=3 SV=1
MSNCRMSFELLATDGKARRGRLTFPRGVVETPAFMPVGTYGTVKGMLPRDIVDTGAQMILGNTFHLWLRPGTEVIKKHGDLHDFMKWQGPILTDSGGFQVFSLGAMRKIKEEGVTFASPVDGAKVFMGPEESMQVQRDLGSDVVMIFDECTPYPADEDVARISMELSLRWAQRSKNAHGDNTAALFGIVQGGMHQNLRERSLEGLNKIGFDGLAIGGLSVGEPKHEMIKVLDYLPAMMPADKPRYLMGVGKPEDLVEGVRRGVDMFDCVMPTRNARNGHLFIDTGVIKIRNAFHRHDDSSLDPTCDCYTCQNFSRAYLHHLDKCGEMLGSMLNTIHNLRHYQVLMAGLREAIQQGTLATFVDAFYAKRGLPVPPLD

SEQ ID NO: 59629 - protein, 375 aa, Pseudomonas delhiensis
  REGION 1..375: note = tr|A0A239DSK1|A0A239DSK1_9PSED Queuine tRNA-ribosyltransferase OS=Pseudomonas delhiensis; OX = 366289 GN=tgt PE=3 SV=1
MSFMKFELLATDGKARRGRLSFPRGVVETPAFMPVGTYGTVKGMLPRDIEGIGAQIILGNTFHLWLRPGTEVIRRHGDLHDFMQWQGPILTDSGGFQVFSLGALRKIKEEGVYFASPVDGAKVFMGPEESMAVQRALGSDIVMIFDECTPYPAEFDVAKRSMELSLRWAKRSKVAHGESPSALFGIVQGGMHEELRMRSLEGLQEIGFDGLAIGGLSVGEPKEEMIRVLDFLPPRMPADKPRYLMGVGKPEDLVEGVRRGVDMFDCVMPTRNARNGHLFVDTGVIKIRNAVHKHDESPLDPTCDCYTCKHFSRAYLYHLDKCGEMLGSMLNTIHNLRHYQRLMAGLREAIQQGTLAAFVDAFYAKRGLPTPPLGD

SEQ ID NO: 59630 - protein, 372 aa, unidentified
  source 1..372: note = Pseudomonas denitrificans
  REGION 1..372: note = tr|A0A5J6RCR0|A0A5J6RCR0_PSEDE tRNA guanosine(34) transglycosylase Tgt OS=Pseudomonas denitrificans OX=43306; GN = tgt PE=4 SV=1
MKFELLATEGKARRGRLTFPRGVVETPAFMPVGTYGTVKGMLPHDIEGIGAQIILGNTFHLWLRPGTEVIQKHGDLHDFMQWKGPILTDSGGFQVFSLGALRKIKEEGVYFASPVDGAKVFMGPEESMAVQRALGSDIVMIFDECTPYPAEFDVAKRSMELSLRWAKRSKTAHGDSPSALFGIVQGGMHEELRMRSLEGLQEIGFDGLAIGGLSVGEPKEEMIRVLDFLPRHMPADKPRYLMGVGKPEDLVEGVRRGVDMFDCVMPTRNARNGHLFVDTGVIKIRNAVHKHDESPLDPTCDCYTCKHFSRAYLYHLDKCGEMLGSMLNTIHNLRHYQRLMAGLREAIQQGTLANFVDAFYAKRGLPVPPLAD

SEQ ID NO: 59631 - protein, 377 aa, unidentified
  source 1..377: note = Pseudomonas donghuensis
  REGION 1..377: note = tr|A0A2M9VPN0|A0A2M9VPN0_9PSED Queuine tRNA-ribosyltransferase OS=Pseudomonas donghuensis; OX = 1163398 GN=tgt PE=3 SV=1
MSRTCRMSFELLATDGKARRGRLTFPRGVVETPAFMPVGTYGTVKGMLPRDIEAIGAHMILGNTFHLWLRPGTEVIKAHGDLHDFMKWQGPILTDSGGFQVFSLGAMRKIREEGVTFASPVDGSKVFMGPEESMQVQRDLGSDVVMIFDECTPYPADEDVARVSMELSLRWAQRSKNAHGDSTAALFGIVQGGMHENLRMRSLEGLEKIGFDGLAIGGLSVGEPKHEMIKVLDYLPGRMPADKPRYLMGVGKPEDLVEGVRRGVDMFDCVMPTRNARNGHLFVDTGVLKIRNAFHRHDDSPLDPTCDCYTCQNFSRAYLHHLDKCGEMLGSMLNTIHNLRHYQRLMAGLREAIQQGTLAAFVDAFYAKRGLPVPPLD

SEQ ID NO: 59632 - protein, 377 aa, unidentified
  source 1..377: note = Pseudomonas dryadis
  REGION 1..377: note = tr|A0A4Q9R3V7|A0A4Q9R3V7_9PSED Queuine tRNA-ribosyltransferase OS=Pseudomonas dryadis OX=2487520; GN = tgt PE=3 SV=1
MTRSCRMSFELLASDGKARRGRLTFPRGVVETPAFMPVGTYGTVKGMLPRDIEAIGAQIILGNTFHLWLRPGTEVIKRHGDLHDFMQWQGPILTDSGGFQVFSLGAMRKIREEGVTFASPVDGAKVFMGPEESMQVQRDLGSDIVMIFDECTPYPAEFDVAKTSMELSLRWAKRSKEAHGDNSAALFGIVQGGMHESLRMRSLEGLSELDFDGLAIGGLSVGEPKEEMIRVLDYLPGQMPADKPRYLMGVGKPEDLVEGVRRGVDMFDCVMPTRNARNGHLFIDTGVLKIRNAFHRHDDSPLDPTCDCYTCKHFSRAYLHHLDKCGEMLGSMLNTIHNLRHYQRLMAGLREAIQQGTLAAFVDAFYTRRGLPTPPLD

SEQ ID NO: 59633 - protein, 375 aa, Pseudomonas duriflava
  REGION 1..375: note = tr|A0A562QQU6|A0A562QQU6_9PSED Queuine tRNA-ribosyltransferase OS=Pseudomonas duriflava OX=459528; GN = tgt PE=3 SV=1
MSFMKFELLATEGRARRGRLSFPRGVVETPAFMPVGTYGTVKGMLPRDIEAIGAHIILGNTFHLWLRPGIEVIQKHGDLHDFMQWKGPILTDSGGFQVFSLGALRKIKEEGVYFASPVDGAKVFMGPEESMAVQRALGSDIVMIFDECTPYPADFETAKRSMELSLRWAKRSRIAHGDNPSALFGIVQGGMHEELRLRSLEGLDSIGFDGYAIGGLSVGEPKEEMIRVLDFLPPHLPADKPRYLMGVGKPEDLVEGVRRGVDMFDCVMPTRNARNGHLFIDTGVIKIRNAVHRHDDSPLDSTCDCYTCRNFSRAYLHHLDKCGEMLGSMLNTIHNLRHYQQVMSGLRDAIQQGKLADFVDSFYARRGLPTPPLAD

SEQ ID NO: 59634 - protein, 371 aa, unidentified
  source 1..371: note = Pseudomonas endophytica
  REGION 1..371: note = tr|A0A0Q0T4L6|A0A0Q0T4L6_9PSED Queuine tRNA-ribosyltransferase OS=Pseudomonas endophytica; OX = 1563157 GN=tgt PE=3 SV=1
MSFELLATDGKARRGRLTFPRGVVETPAFMPVGTYGTVKGMLPRDIEAIGAQMILGNTFHLWLRPGTEVIKKHGDLHDFMKWQGPILTDSGGFQVFSLGAMRKIKEEGVTFASPVDGAKVFMGPEESMQVQRDLGSDVVMIFDECTPYPADEDVARVSMELSLRWAQRSKNAHGDNTAALFGIVQGGMHQNLRERSLEGLNKIGFDGLAIGGLSVGEPKHEMIKVLDYLPAMMPSDKPRYLMGVGKPEDLVEGVRRGVDMFDCVMPTRNARNGHLFIDTGVLKIRNAFHRHDDSPLDPTCDCYTCQNFSRAYLHHLDKCGEMLGSMLNTIHNLRHYQVLMAGLREAIQQGTLATFVDAFYAKRGLPVPPLD

SEQ ID NO: 59635 - protein, 377 aa, unidentified
  source 1..377: note = Pseudomonas entomophila
  REGION 1..377: note = tr|A0A3S8UPZ8|A0A3S8UPZ8_9PSED Queuine tRNA-ribosyltransferase OS=Pseudomonas entomophila; OX = 312306 GN=tgt PE=3 SV=1
MSRTCRMSFELLATDGKARRGRLTFPRGTVETPAFMPVGTYGTVKGMLPRDIEAIGAEIILGNTFHLWLRPGTEVIKKHNGLHDFMQWKGPILTDSGGFQVFSLGAMRKIKEEGVTFASPVDGSKVFMGPEESMQVQRDLGSDIVMIFDECTPYPAEHDVARTSMELSLRWAQRSKNAHADNTAALFGIVQGGMYQDLRMRSLEGLDNIGFDGLAIGGLSVGEPKHEMIKVLDYLPGQMPADKPRYLMGVGKPEDLVEGVRRGVDMFDCVMPTRNARNGHLFIDTGVIKIRNAFHRHDESPLDPTCDCYTCTNFSRAYLHHLDKCGEMLSSMLNTIHNLRHYQRLMAGLREAIQQGKLAAFVDAFYAKRGLPVPPLD

SEQ ID NO: 59636 - protein, 377 aa, unidentified
  source 1..377: note = Pseudomonas entomophila
  REGION 1..377: note = tr|Q1IEK1|Q1IEK1_PSEE4 Queuine tRNA-ribosyltransferase OS=Pseudomonas entomophila (strain L48) OX=384676 GN=tgt PE=3 SV=1
MSRTCRMSFELLATDGKARRGRLTFPRGTVETPAFMPVGTYGTVKGMLPRDIEAIGAEIILGNTFHLWLRPGTEVIKKHNGLHDFMQWKGPILTDSGGFQVFSLGAMRKIKEEGVTFASPVDGSKVFMGPEESMQVQRDLGSDIVMIFDECTPYPAEHDVARTSMELSLRWAQRSKNAHGDNTAALFGIVQGGMYEDLRMRSLEALVNIDFDGLAIGGLSVGEPKHEMIKVLDYLPAQMPADKPRYLMGVGKPEDLVEGVRRGVDMFDCVMPTRNARNGHLFVDTGVIKIRNAFHRHDDSPLDPTCDCYTCTNFSRAYLHHLDKCGEMLSSMLNTIHNLRHYQRLMAGLREAIQQGKLAAFVDAFYAKRGLPVPPLD

SEQ ID NO: 59637 - protein, 374 aa, Pseudomonas extremaustralis
  REGION 1..374: note = tr|A0A5C5QGJ6|A0A5C5QGJ6_9PSED Queuine tRNA-ribosyltransferase OS=Pseudomonas extremaustralis; OX = 359110 GN=tgt PE=3 SV=1
MSRMSFELLATDGKARRGRLTFPRGTVETPAFMPVGTYGTVKGMLPRDIVATGAEIILGNTFHLWLRPGTEVIKKHGDLHDFMKWQGPILTDSGGFQVFSLGAMRKIKEEGVTFASPVDGSKVFMGPEESMQVQRDLGSDIVMIFDECTPYPADEDVARVSMELSLRWAQRSKNAHGDNTAALFGIVQGGMHESLRKRSLEGLDKIGFDGLAIGGLSVGEPKHEMIKVLDYLPGLMPADKPRYLMGVGKPEDLVEGVRRGVDMFDCVMPTRNARNGHLFIDTGVLKIRNAFHRHDDSPLDPTCDCYTCQNFSRAYLHHLDKCGEMLGSMLNTIHNLRHYQVLMAGLREAIQQGTLAAFVDAFYAKRGLPVPPLD

SEQ ID NO: 59638 - protein, 374 aa, Pseudomonas extremorientalis
  REGION 1..374: note = tr|A0A1H0QGM2|A0A1H0QGM2_9PSED Queuine tRNA-ribosyltransferase OS=Pseudomonas extremorientalis; OX = 169669 GN=tgt PE=3 SV=1
MSRMSFELLATDGKARRGRLTFPRGTVETPAFMPVGTYGTVKGMLPRDIVATGAEIILGNTFHLWLRPGTEVIKKHGDLHDFMKWQGPILTDSGGFQVFSLGAMRKIKEEGVTFASPVDGSKVFMGPEESMQVQRDLGSDIVMIFDECTPYPADEDVARISMELSLRWAQRSKNAHGDNTAALFGIVQGGMHESLRKRSLEGLDKIGFDGLAIGGLSVGEPKHEMIKVLDYLPSLMPADKPRYLMGVGKPEDLVEGVRRGVDMFDCVMPTRNARNGHLFIDTGVLKIRNAFHRHDDSPLDPTCDCYTCLNFSRAYLHHLDKCGEMLGSMLNTIHNLRHYQVLMAGLREAIQQGTLAAFVDAFYAKRGLPVPPLD

SEQ ID NO: 59639 - protein, 377 aa, Pseudomonas ficuserectae
  REGION 1..377: note = tr|A0A0P9RQB2|A0A0P9RQB2_9PSED Queuine tRNA-ribosyltransferase OS=Pseudomonas ficuserectae; OX = 53410 GN=tgt PE=3 SV=1
MSRTCRMSFELLATDGKARRGRLTFPRGVVETPAFMPVGTYGTVKGMLPRDIEATGAQMILGNTFHLWLRPGTEVIKGHGDLHDFMQWKGPILTDSGGFQVFSLGAMRKIKEEGVTFASPVDGAKVFMGPEESMQVQRDLGSDVVMIFDECTRYPADEDVARVSMELSLRWAKRSKVAHGENTAALFGIVQGGMHENLRKRSLEGLDEIGFDGLAIGGLSVGEPKHEMIKVLDYLPGLMPADKPRYLMGVGKPEDLVEGVRRGVDMFDCVMPTRNARNGHLFTDTGVLKIRNAFHRHDNSPLDPTCDCYTCKNFSRAYLHHLDKCGEMLGSMLNTIHNLRHYQLLMAGLREAIQQGTLAAFVDAFYAKRGLPTPPLG

SEQ ID NO: 59640 - protein, 434 aa, Pseudomonas ficuserectae
  REGION 1..434: note = tr|A0A3M5CX00|A0A3M5CX00_9PSED Queuine tRNA-ribosyltransferase OS=Pseudomonas ficuserectae; OX = 53410 GN=tgt PE=3 SV=1
MHAVDAGFGVRRLSRDDGGLRCGHRARLPLLQLRRCDVHHPQSRADGPTGIGTRGSRMSRTCRMSFELLATDGKARRGRLTFPRGVVETPAFMPVGTYGTVKGMLPRDIEATGAQMILGNTFHLWLRPGTEVIKGHGDLHDFMQWKGPILTDSGGFQVFSLGAMRKIKEEGVTFASPVDGAKVFMGPEESMQVQRDLGSDVVMIFDECTRYPADEDVARVSMELSLRWAKRSKVAHGENTAALFGIVQGGMHENLRKRSLEGLDEIGFDGLAIGGLSVGEPKHEMIKVLDYLPGLMPADKPRYLMGVGKPEDLVEGVRRGVDMFDCVMPTRNARNGHLFTDTGVLKIRNAFHRHDNSPLDPTCDCYTCKNFSRAYLHHLDKCGEMLGSMLNTIHNLRHYQLLMAGLREAIQQGTLAAFVDAFYAKRGLPTPPLG

SEQ ID NO: 59641 - protein, 378 aa, Pseudomonas flavescens
  REGION 1..378: note = tr|A0A1G8KUZ3|A0A1G8KUZ3_9PSED Queuine tRNA-ribosyltransferase OS=Pseudomonas flavescens OX=29435; GN = tgt PE=3 SV=1
MTRSCRMSFELLATDGKARRGRLTFPRGVVETPAFMPVGTYGTVKGMLPRDIEAIGAQIILGNTFHLWLRPGTEVIKRHGDLHDFMQWQGPILTDSGGFQVFSLGAMRKIKEEGVTFASPVDGAKVFMGPEESMQVQRDLGSDIVMIFDECTPYPAEFDVAKTSMELSLRWAKRSKVAHGDSTAALFGIVQGGMHESLRMRSLEGLSELDFDGLAIGGLSVGEPKEEMIKVLDYLPVQMPSDKPRYLMGVGKPEDLVEGVRRGVDMFDCVMPTRNARNGHLFIDTGVLKIRNAFHRHDDSPLDPTCDCYTCKHFSRAYLHHLDKCGEMLGSMLNTIHNLRHYQRLMAGLREAIQQGTLAAFVDAFYARRGLPTPPLDC

SEQ ID NO: 59642 - protein, 377 aa, unidentified
  source 1..377: note = Pseudomonas flexibilis
  REGION 1..377: note = tr|A0A1N6NP46|A0A1N6NP46_9PSED Queuine tRNA-ribosyltransferase OS=Pseudomonas flexibilis; OX = 706570 GN=tgt PE=3 SV=1
MTRTCHMNFDVLATEGKARRGRLTFPRGTVETPAFMPVGTYGTVKGMLPRDIEAIGAQIILGNTFHLWLRPGTEVIKAHGDLHNFMQWQGPILTDSGGFQVFSLGEMRKIKEEGVYFSSPVDGAKVFMGPEESMQVQRDLGSDIVMIFDECTPYPADHDTARRSMELSLRWAKRSKVAHGDNPSALFGIVQGGMHEDLRLRSLEGLMEIGFDGLAIGGLSVGEPKEEMIRVLDFLPPHMPADKPRYLMGVGKPEDLVEGVRRGVDMFDCVMPTRNARNGHLFVTGGIVKIRNAVHRHDDSPLDPGCDCYTCKHFSRAYLHHLDKCGEMLGSMLNTIHNLRYYQRLMAGLRDAIQQGTLAAFVDAFYARRGLPTPPLD

SEQ ID NO: 59643 - protein, 377 aa, unidentified
  source 1..377: note = Pseudomonas flexibilis
  REGION 1..377: note = tr|A0A0B3BRZ1|A0A0B3BRZ1_9PSED Queuine tRNA-ribosyltransferase OS=Pseudomonas flexibilis; OX = 706570 GN=tgt PE=3 SV=1
MTRTCHMNFDVLATEGKARRGRLTFPRGTVETPAFMPVGTYGTVKGMLPRDIEAIGAQIILGNTFHLWLRPGTEVIKAHGDLHNFMQWQGPILTDSGGFQVFSLGEMRKIKEEGVYFSSPVDGAKVFMGPEESMQVQRDLGSDIVMIFDECTPYPADHDTARRSMELSLRWAKRSKMAHGDNPSALFGIVQGGMHEDLRLRSLEGLMEIGFDGLAIGGLSVGEPKEEMIRVLDFLPPHMPADKPRYLMGVGKPEDLVEGVRRGVDMFDCVMPTRNARNGHLFVTGGIVKIRNAVHRHDDSPLDPGCDCYTCKHFSRAYLHHLDKCGEMLGSMLNTIHNLRYYQRLMAGLRDAIQQGTLAAFVDAFYARRGLPAPPLD

SEQ ID NO: 59644 - protein, 371 aa, unidentified
  source 1..371: note = Pseudomonas floridensis
  REGION 1..371: note = tr|A0A1X0N6D7|A0A1X0N6D7_9PSED Queuine tRNA-ribosyltransferase OS=Pseudomonas floridensis; OX = 1958950 GN=tgt PE=3 SV=1
MSFELLATDGKARRGRLTFPRGVVETPAFMPVGTYGTVKGMLPRDIEATGAQIILGNTFHLWLRPGTEVIKGHGDLHDFMQWQGPILTDSGGFQVFSLGAMRKIKEEGVTFASPVDGAKVFMGPEESMQVQRDLGSDIVMIFDECTPYPADEDVARISMELSLRWAKRSKVAHGENTAALFGIVQGGMHESLRMRSLEGLDQIGFDGLAIGGLSVGEPKHEMIKVLDYLPGQMPADKPRYLMGVGKPEDLVEGVRRGVDMFDCVMPTRNARNGHLFIDTGVLKIRNAFHRHDDSPLDPTCDCYTCKHFSRAYLHHLDKCGEMLGSMLNTIHNLRHYQLLMAGLREAIQQGTLAAFVDAFYAKRGLPTPPLG

SEQ ID NO: 59645 - protein, 374 aa, Pseudomonas fluorescens
  REGION 1..374: note = tr|A0A2N1E8D5|A0A2N1E8D5_PSEFL Queuine tRNA-ribosyltransferase OS=Pseudomonas fluorescens OX=294; GN = tgt PE=3 SV=1
MSRMSFELLATDGKARRGRLTFPRGTVETPAFMPVGTYGTVKGMLPRDIVATGAEIILGNTFHLWLRPGTEVIKKHGDLHDFMKWQGPILTDSGGFQVFSLGAMRKIKEEGVTFASPVDGSKVFMGPEESMQVQRDLGSDIVMIFDECTPYPADEDVARISMELSLRWAQRSKNAHGDNTAALFGIVQGGMHESLRKRSLEGLDKIGFDGLAIGGLSVGEPKHEMIKVLDYLPGLMPAEKPRYLMGVGKPEDLVEGVRRGVDMFDCVMPTRNARNGHLFIDTGVLKIRNAFHRHDDSPLDPTCDCYTCQNFSRAYLHHLDKCGEMLGSMLNTIHNLRHYQVLMAGLREAIQQGTLAAFVDAFYAKRGLPVPPLD

SEQ ID NO: 59646 - protein, 374 aa, Pseudomonas fluorescens; identical to SEQ ID NO: 59578
  REGION 1..374: note = tr|A0A0W0I537|A0A0W0I537_PSEFL Queuine tRNA-ribosyltransferase OS=Pseudomonas fluorescens OX=294; GN = tgt PE=3 SV=1

SEQ ID NO: 59647 - protein, 375 aa, unidentified
  source 1..375: note = Pseudomonas formosensis
  REGION 1..375: note = tr|A0A1I6C7Q8|A0A1I6C7Q8_9PSED Queuine tRNA-ribosyltransferase OS=Pseudomonas formosensis; OX = 1002526 GN=tgt PE=3 SV=1
MSHMQFEVFATDGKARRGRLTFPRGVVETPAFMPVGTYGTVKGMLPRDIKDIGAQIILGNTFHLWLRPGTEVIRKHGDLHDFMQWQGPILTDSGGFQVFSLGAMRKIREEGVYFSSPVDGAKVFMGPEESMQVQRELGSDIVMIFDECTPYPADHDTARRSMELSLRWAQRSKNAHEGNPSALFGIVQGGMHEDLRARSLDGLCEIGFDGLAIGGLSVGEPKEDMIRILDFLPPLMPPEKPRYLMGVGKPEDLVEGVRRGVDMFDCVMPTRNARNGHLFTDTGVVKIRNAVHRHDDSPLDPACDCYTCRHFTRSYLHHLDKCGEMLGSMLNTIHNLRHYQRLMDGLRGAIQQGTLTDFVDNFYARLGRPVPPLET

SEQ ID NO: 59648 - protein, 371 aa, Pseudomonas fragi
  REGION 1..371: note = tr|A0A267BY57|A0A267BY57_PSEFR Queuine tRNA-ribosyltransferase OS=Pseudomonas fragi OX=296 GN=tgt; PE = 3 SV=1
MSFELLATDGKARRGRLTFPRGVVETPAFMPVGTYGTVKGMLPRDIEAIGAQMILGNTFHLWLRPGTEVIKKHGDLHDFMKWQGPILTDSGGFQVFSLGAMRKIKEEGVTFASPVDGAKVFMGPEESMQVQRDLGSDVVMIFDECTPYPADEDTARVSMELSLRWAQRSKNAHCDNTAALFGIVQGGMHQNLRERSLEGLNKIGFDGLAIGGLSVGEPKHEMIKVLDYLPAMMPADKPRYLMGVGKPEDLVEGVRRGVDMFDCVMPTRNARNGHLFIDTGVIKIRNAFHRHDDSPLDPTCDCYTCQNFSRAYLHHLDKCGEMLGSMLNTIHNLRHYQVLMAGLREAIQQGTLATFVDAFYAKRGLPVPPLD

SEQ ID NO: 59649 - protein, 371 aa, Pseudomonas fragi
  REGION 1..371: note = tr|A0A267CMT5|A0A267CMT5_PSEFR Queuine tRNA-ribosyltransferase OS=Pseudomonas fragi OX=296 GN=tgt; PE = 3 SV=1
MSFELLATDGKARRGRLTFPRGVVETPAFMPVGTYGTVKGMLPRDIEAIGAQMILGNTFHLWLRPGTEVIKKHGDLHDFMKWQGPILTDSGGFQVFSLGAMRKIKEEGVTFASPVDGAKVFMGPEESMQVQRDLGSDVVMIFDECTPYPADEDTARVSMELSLRWAQRSKNAHGDNTAALFGIVQGGMHQNLRERSLEGLNKIGFDGLAIGGLSVGEPKHEMIKVLDYLPAMMPADKPRYLMGVGKPEDLVEGVRRGVDMFDCVMPTRNARNGHLFIDTGVIKIRNAFHRHDDSPLDPTCDCYTCQNFSRAYLHHLDKCGEMLGSMLNTIHNLRHYQVLMAGLREAIQQGTLATFVDAFYAKRGLPVPPLD

SEQ ID NO: 59650 - protein, 374 aa, Pseudomonas frederiksbergensis
  REGION 1..374: note = tr|A0A1H4VFT2|A0A1H4VFT2_9PSED Queuine tRNA-ribosyltransferase OS=Pseudomonas frederiksbergensis; OX = 104087 GN=tgt PE=3 SV=1
MSRMSFELLATDGKARRGRLTFPRGTVETPAFMPVGTYGTVKGMLPRDITATGAEIILGNTFHLWLRPGTEVIKKHGDLHDFMQWKGPILTDSGGFQVFSLGAMRKIKEEGVTFASPVDGAKVFMGPEESMQVQRDLGSDIVMIFDECTPYPADEDVARVSMELSLRWAKRSKEAHGDNTAALFGIVQGGMHQDLRMRSLEGLDKIGFDGLAIGGLSVGEPKHEMIKVLDYLPGQMPADKPRYLMGVGKPEDLVEGVRRGVDMFDCVMPTRNARNGHLFIDTGVLKIRNAFHRHDDSPLDPTCDCYTCQNFSRAYLHHLDKCGEMLGSMLNTIHNLRHYQVLMAGLREAIQQGTLAAFVDAFYAKRGLPVPPLD

SEQ ID NO: 59651 - protein, 377 aa, Pseudomonas frederiksbergensis
  REGION 1..377: note = tr|A0A423J330|A0A423J330_9PSED Queuine tRNA-ribosyltransferase OS=Pseudomonas frederiksbergensis; OX = 104087 GN=tgt PE=3 SV=1
MSRTSRMTFELLATDGKARRGRLTFPRGTVETPAFMPVGTYGTVKGMLPRDIVATGAEIILGNTFHLWLRPGTEVIKKHGDLHDFMQWKGPILTDSGGFQVFSLGAMRKIKEEGVTFASPVDGAKVFMGPEESMQVQRDLGSDIVMIFDECTPYPADEDVARVSMELSLRWAKRSKEAHGDNTAALFGIVQGGMHQDLRMRSLEGLDKIGFDGLAIGGLSVGEPKHEMIKVLDYLPGQMPADKPRYLMGVGKPEDLVEGVRRGVDMFDCVMPTRNARNGHLFIDTGVLKIRNAFHRHDDSPLDPTCDCYTCQNFSRAYLHHLDKCGEMLGSMLNTIHNLRHYQVLMAGLRESIQQGTLAAFVDAFYAKRGLPVPPLD

SEQ ID NO: 59652 - protein, 377 aa, Pseudomonas fulva
  REGION 1..377: note = tr|F6AB05|F6AB05_PSEF1 Queuine tRNA-ribosyltransferase OS=Pseudomonas fulva (strain 12-X); OX = 743720 GN=tgt PE=3 SV=1
MTRSCRMSFELLATDGKARRGRLTFPRGVVETPAFMPVGTYGTVKGMLPRDIEAIGAQIILGNTFHLWLRPGTEVIKRHGDLHDFMQWQGPILTDSGGFQVFSLGAMRKIKEEGVTFASPVDGSKVFMGPEESMQVQRDLGSDIVMIFDECTPYPAEFDVAKTSMELSLRWAKRSKIAHGESTAALFGIVQGGMHESLRMRSLEGLSELEFDGLAIGGLSVGEPKEEMIKVLDYLPGQMPSDKPRYLMGVGKPEDLVEGVRRGVDMFDCVMPTRNARNGHLFVDTGVLKIRNAFHRHDDSPLDPTCDCYTCKHFSRAYLHHLDKCGEMLGSMLNTIHNLRHYQRLMAGLREAIQQGTLAAFVDAFYARRGLPTPPLD

SEQ ID NO: 59653 - protein, 377 aa, Pseudomonas fulva
  REGION 1..377: note = tr|A0A2L1WHI0|A0A2L1WHI0_9PSED Queuine tRNA-ribosyltransferase OS=Pseudomonas fulva OX=47880; GN = tgt PE=3 SV=1
MSRTCRMSFELLATDGKARRGRITFPRGTVETPAFMPVGTYGTVKGMLPRDIEAIGAEMILGNTFHLWLRPGTEVIKKHNGLHDFMQWKGPILTDSGGFQVFSLGAMRKIKEEGVTFASPVDGSKVFMGPEESMQVQRDLGSDVVMIFDECTPYPAEHDIARTSMELSLRWAQRSKNAHADNTAALFGIVQGGMYQDLRMRSLEGLENIGFDGLAIGGLSVGEPKHEMIKVLDYLPEQMPADKPRYLMGVGKPEDLVEGVRRGVDMFDCVMPTRNARNGHLFVDTGVIKIRNAFHRHDESPLDPTCDCYTCSNFSRAYLHHLDKCGEMLSSMLNTIHNLRHYQRLMAGLREAIQQGKLAAFVDAFYAKRGLVVPPLD

SEQ ID NO: 59654 - protein, 377 aa, unidentified
  source 1..377: note = Pseudomonas furukawaii
  REGION 1..377: note = tr|L8MC43|L8MC43_PSEFK Queuine tRNA-ribosyltransferase OS=Pseudomonas furukawaii; OX = 1149133 GN=tgt PE=3 SV=1
MSRTCRMNFELLATDGKARRGRLTFPRGVVETPAFMPVGTYGTVKGMLPRDIEGIGAQIILGNTFHLWLRPGMEVIKRHGDLHDFMQWQGPILTDSGGFQVFSLGAMRKIKEEGVTFASPVDGAKVFMGPEESMQVQRDLGSDIVMIFDECTPYPADFDTAKRSMELSLRWAKRSKAAHGENTAALFGIVQGGMHEELRMRSLEGLMEIDFDGLAIGGLSVGEPKEEMLRVLDFMPGRMPADKPRYLMGVGKPEDLVEGVRRGVDMFDCVMPTRNARNGHLFIETGVLKIRNSVHKHDESPLDPTCDCYTCKHFSRAYLHHLDKCGEMLGSMLNTIHNLRHYQRLMAGLREAIQQGKLAAFVDAFYARRGLPTPPLD

SEQ ID NO: 59655 - protein, 377 aa, Pseudomonas fuscovaginae; identical to SEQ ID NO: 59583
  REGION 1..377: note = tr|A0A1H6NG95|A0A1H6NG95_9PSED Queuine tRNA-ribosyltransferase OS=Pseudomonas fuscovaginae; OX = 50340 GN=tgt PE=3 SV=1

SEQ ID NO: 59656 - protein, 377 aa, Pseudomonas fuscovaginae
  REGION 1..377: note = tr|A0A0M9GK85|A0A0M9GK85_9PSED Queuine tRNA-ribosyltransferase OS=Pseudomonas fuscovaginae; OX = 50340 GN=tgt PE=3 SV=1
MSRTCRMSFELLATDGKARRGRLTFPRGTVETPAFMPVGTYGTVKGMLPRDIVATGAEIILGNTFHLWLRPGTEVIKAHGDLHDFMQWKGPILTDSGGFQVFSLGAMRKIKEEGVTFASPVDGAKVFMGPEESMQVQRDLGSDIVMIFDECTPYPADEDVARVSMELSLRWAQRSKNAHGDNTAALFGIVQGGMHENLRMRSLEGLEKIGFDGLAIGGLSVGEPKHEMIRVLDYLPGRMPADKPRYLMGVGKPEDLVEGVRRGVDMFDCVMPTRNARNGHLFVDTGVLKIRNAFHRHDDSPLDPTCDCYTCQNFSRAYLHHLDKCGEMLGSMLNTIHNLRHYQRLMAGLREAIQQGTLAAFVDAFYAKRGLPVPPLD

SEQ ID NO: 59657 - protein, 375 aa, unidentified; identical to SEQ ID NO: 59563
  source 1..375: note = Pseudomonas gallaeciensis
  REGION 1..375: note = tr|A0A395R7K1|A0A395R7K1_9PSED Queuine tRNA-ribosyltransferase OS=Pseudomonas gallaeciensis; OX = 857227 GN=tgt PE=3 SV=1

SEQ ID NO: 59658 - protein, 376 aa, unidentified
  source 1..376: note = [Pseudomonas] geniculata
  REGION 1..376: note = tr|A0A0L8ABZ6|A0A0L8ABZ6_9GAMM Queuine tRNA-ribosyltransferase OS=[Pseudomonas] geniculata N1; OX = 1167641 GN=tgt PE=3 SV=1
MSRLQFQLQTRDGRARRGRLTFPRGTVETPAFMPVGTYGSVKGILPDQVRALGAEIILGNTFHLYLRPGLDIIADHGGLHGFCRWDGPILTDSGGFQVFSLAHRRKITEQGVTFASPTDGARVFLGPEESMKIQKVLDSDVVMIFDECTPYPATEDVARRSMELSLRWAQRSRNAHDELGNDAALFGIVQGGVHTDLRSRSAEALQAIGFDGYAIGGLAVGEPEHERNAMLDHLDPELPGDRPRYLMGVGRPEDLVEGVARGVDMFDCVMPTRNARNGHYFTSFGTVRIRNSQYARDMDPIEPGCGCVACTGGYTRSYLRHLDRCNEMLAPMLGTLHNLFYYEKLMADIRAAIEAGTFLAFRESFYAARGAVAPPL

SEQ ID NO: 59659 - protein, 374 aa, Pseudomonas gessardii
  REGION 1..374: note = tr|A0A1V2J244|A0A1V2J244_9PSED Queuine tRNA-ribosyltransferase OS=Pseudomonas gessardii OX=78544; GN = tgt PE=3 SV=1
MSRMSFELLATDGKARRGRLTFPRGTVETPAFMPVGTYGTVKGMLPRDIVATGAEIILGNTFHLWLRPGTEVIKKHGDLHDFMKWQGPILTDSGGFQVFSLGAMRKIKEEGVTFASPVDGSKVFMGPEESMQVQRDLGSDIVMIFDECTPYPADEDVARISMELSLRWAQRSKNAHGDNTAALFGIVQGGMHESLRKRSLEGLDKIGFDGLAIGGLSVGEPKHEMIKVLDYLPGLMPSDKPRYLMGVGKPEDLVEGVRRGVDMFDCVMPTRNARNGHLFIDTGVLKIRNAFHRHDDSPLDPTCDCYTCQNFSRAYLHHLDKCGEMLGSMLNTIHNLRHYQVLMAGLREAIQQGTLAAFVDAFYAKRGLPVPPLD

SEQ ID NO: 59660 - protein, 377 aa, unidentified
  source 1..377: note = Pseudomonas gingeri
  REGION 1..377: note = tr|A0A2K1FHH7|A0A2K1FHH7_9PSED Queuine tRNA-ribosyltransferase OS=Pseudomonas gingeri NCPPB 3146 = LMG 5327 OX=707248 GN=tgt PE=3 SV=1
MSRTSRMSFELLATDGKARRGRLTFPRGTVETPAFMPVGTYGTVKGMLPRDIVATGAEIILGNTFHLWLRPGTEVIKKHGDLHDFMQWKGPILTDSGGFQVFSLGAMRKIKEEGVTFASPVDGAKVFMGPEESMQVQRDLGSDIVMIFDECTPYPADEDVARVSMELSLRWAQRSKNAHGDNTAALFGIVQGGMHQNLRMRSLEGLDKIGFDGLAIGGLSVGEPKHEMIKVLDYLPGQMPADKPRYLMGVGKPEDLVEGVRRGVDMFDCVMPTRNARNGHLFVDTGVLKIRNAFHRHDDSPLDPTCDCYTCQNFSRAYLHHLDKCGEMLGSMLNTIHNLRHYQLLMAGLREAIQQGTLAAFVDAFYAKRGLPVPPLD

SEQ ID NO: 59661 - protein, 377 aa, Pseudomonas graminis
  REGION 1..377: note = tr|A0A4R7VBN0|A0A4R7VBN0_9PSED Queuine tRNA-ribosyltransferase OS=Pseudomonas graminis OX=158627; GN = tgt PE=3 SV=1
MSRTCRMSFELLATDGKARRGRLTFPRGVVETPAFMPVGTYGTVKGMLPRDIEATGAQMILGNTFHLWLRPGTEVIKGHGDLHDFMQWKGPILTDSGGFQVFSLGAMRKIKEEGVTFASPVDGAKVFMGPEESMQVQRDLGSDVVMIFDECTPYPADEDVARTSMELSLRWAKRSKVAHGENTAALFGIVQGGMHENLRMRSLEGLNELDFDGLAIGGLSVGEPKDEMIKVLDYLPGRMPADKPRYLMGVGKPEDLVEGVRRGVDMFDCVMPTRNARNGHLFIDTGVLKIRNAFHRYDESPLDPTCDCYTCKNFSRAYLHHLDKCGEMLGSMLNTIHNLRHYQLLMAGLREAIQQGTLAAFVDTFYAKRGLVTPLLD

SEQ ID NO: 59662 - protein, 377 aa, Pseudomonas graminis
  REGION 1..377: note = tr|A0A1I0BL40|A0A1I0BL40_9PSED Queuine tRNA-ribosyltransferase OS=Pseudomonas graminis OX=158627; GN = tgt PE=3 SV=1
MSRTCRMSFELLATDGKARRGRLTFPRGVVETPAFMPVGTYGTVKGMLPRDIEATGAQMILGNTFHLWLRPGTEVIKGHGDLHDFMQWKGPILTDSGGFQVFSLGAMRKIKEEGVTFASPVDGAKVFMGPEESMQVQRDLGSDVVMIFDECTPYPADEEVARTSMELSLRWAKRSKIAHGENTAALFGIVQGGMHENLRMRSLEGLNELDFDGLAIGGLSVGEPKDEMIKVLDYLPGRMPADKPRYLMGVGKPEDLVEGVRRGVDMFDCVMPTRNARNGHLFIDTGVLKIRNAFHRYDESPLDPTCDCYTCKNFSRAYLHHLDKCGEMLGSMLNTIHNLRHYQLLMAGLREAIQQGTLAAFVDTFYAKRGLATPLLA

SEQ ID NO: 59663 - protein, 374 aa, Pseudomonas grimontii; identical to SEQ ID NO: 59578
  REGION 1..374: note = tr|A0A1H1BU54|A0A1H1BU54_9PSED Queuine tRNA-ribosyltransferase OS=Pseudomonas grimontii OX=129847; GN = tgt PE=3 SV=1

SEQ ID NO: 59664 - protein, 374 aa, unidentified
  source 1..374: note = Pseudomonas guangdongensis
  REGION 1..374: note = tr|A0A1H2GJZ0|A0A1H2GJZ0_9PSED Queuine tRNA-ribosyltransferase OS=Pseudomonas guangdongensis; OX = 1245526 GN=tgt PE=3 SV=1
MSHMSFELLATDGKARRGRLTFPRGVVETPAFMPVGTYGTVKGMLPRDIEAIGAQIILGNTFHLWLRPGTEVIKKHGDLHDFMQWQGPILTDSGGFQVFSLGAMRKIKEEGVYFASPVDGAKVFMGPEESMQVQRELGSDIVMIFDECTPYPADFDTAKRSMELSLRWAKRSKIAHEGNPSALFGIVQGGMHEELRLRSLEGLLEIGFDGLAIGGLSVGEPKEDMIRILDFLPPQLPADKPRYLMGVGKPEDLVEGVRRGVDMFDCVMPTRNARNGHLFVDTGVIKIRNAVHKHDDSPLDPACDCYTCSHFSRAYLHHLDKCGEMLGSMLNTIHNLRHYQRLMAGLRDAIAQGTLAAFVDDFYARRGLPVPPLD

SEQ ID NO: 59665 - protein, 377 aa, unidentified
  source 1..377: note = Pseudomonas guariconensis
  REGION 1..377: note = tr|A0A1G6TS45|A0A1G6TS45_9PSED Queuine tRNA-ribosyltransferase OS=Pseudomonas guariconensis; OX = 1288410 GN=tgt PE=3 SV=1
MSRTCRMSFELLATDGKARRGRLTFPRGTVETPAFMPVGTYGTVKGMLPRDIEAIGAEIILGNTFHLWLRPGTEVIKKHGSLHDFMQWKGPILTDSGGFQVFSLGAMRKIKEEGVTFASPVDGSKVFMGPEESMQVQRDLGSDIVMIFDECTPYPAEHDVARTSMELSLRWAQRSKNAHADNTAALFGIVQGGMYQDLRMRSLEALENIGFDGLAIGGLSVGEPKHEMIKVLDYLPGQMPADKPRYLMGVGKPEDLVEGVRRGVDMFDCVMPTRNARNGHLFVDTGVIKIRNAFHRHDDSPLDPTCDCYTCTNFSRAYLHHLDKCGEMLSSMLNTIHNLRHYQRLMAGLREAIQQGKLAAFVDAFYAKRGLPVPPLD

SEQ ID NO: 59666 - protein, 377 aa, unidentified
  source 1..377: note = Pseudomonas guguanensis
  REGION 1..377: note = tr|A0A1H0X3M8|A0A1H0X3M8_9PSED Queuine tRNA-ribosyltransferase OS=Pseudomonas guguanensis; OX = 1198456 GN=tgt PE=3 SV=1
MSRTCRMSFELLATDGKARRGRLTFPRGVVETPAFMPVGTYGTVKGMLPRDVADIGAQIILGNTFHLWLRPGMEVIRKHGDLHDFMQWQGPILTDSGGFQVFSLGAMRKIKEEGVYFASPVDGAKVFMGPEESMQVQRDLGSDIVMIFDECTPYPAEFDVAKRSMELSLRWAKRSKTAHGESTAALFGIVQGGMHEELRMRSLEGLCEIGFDGLAIGGLSVGEPKEEMIRVLDFLPPQMPADKPRYLMGVGKPEDLVEGVRRGVDMFDCVMPTRNARNGHLFVDTGVVKIRNAVHKLDDSPLDPTCDCYTCKHFSRAYLHHLDKCGEMLGSMLNTIHNLRHYQRVMAGLREAIGQGTLAAFVEAFYAKRGLPVPPLD

SEQ ID NO: 59667 - protein, 377 aa, Pseudomonas guineae
  REGION 1..377: note = tr|A0A1I3DN45|A0A1I3DN45_9PSED Queuine tRNA-ribosyltransferase OS=Pseudomonas guineae OX=425504; GN = tgt PE=3 SV=1
MTRTCRMSFELLATEGKARRGRLTFPRGVVETPAFMPVGTYGTVKGMMPDDVEAIGAQIILGNTFHLWLRPGTEVIKKHGDLHDFMQWQGPILTDSGGFQVFSLGAMRKIKEEGVYFASPVDGAKVFMGPEESMQVQRDLGSDIVMIFDECTPYPAEFDVAKQSMELSLRWAKRSKDAHGENTAALFGIVQGGMHEELRKVSLDGLEQIGFDGYAIGGLSVGEPKEEMIKVLDYLPAQLPADKPRYLMGVGKPEDLVEGVRRGVDMFDCVMPTRNARNGHLFVDTGVLKIRNAFHKQDNSPLDSTCDCYTCKHFSRAYLHHLDKCGEMLGSMLNTIHNLRHYQVLMAGLREAIQQGTLAAFVDAFYAKRGLPTPPLD

SEQ ID NO: 59668 - protein, 371 aa, unidentified
  source 1..371: note = Pseudomonas helleri
  REGION 1..371: note = tr|A0A0J6JCL0|A0A0J6JCL0_9PSED Queuine tRNA-ribosyltransferase OS=Pseudomonas helleri OX=1608996; GN = tgt PE=3 SV=1
MSFELLATDGKARRGRLTFPRGVVETPAFMPVGTYGTVKGMLPRDIEAIGAQMILGNTFHLWLRPGTEVIKKHGDLHDFMKWQGPILTDSGGFQVFSLGAMRKIKEEGVTFASPVDGAKVFMGPEESMQVQRDLGSDVVMIFDECTPYPADEDVARVSMELSLRWAQRSKIAHGDNTAALFGIVQGGMHQNLRERSLEGLNKIGFDGLAIGGLSVGEPKHEMIKVLDYLPAMMPADKPRYLMGVGKPEDLVEGVRRGVDMFDCVMPTRNARNGHLFIDTGVLKIRNAFHRHDDSPLDPTCDCYTCQNFSRAYLHHLDKCGEMLGSMLNTIHNLRHYQVLMAGLREAIQQGTLATFVDAFYAKRGLPVPPLD

SEQ ID NO: 59669 - protein, 377 aa, unidentified
  source 1..377: note = Pseudomonas helmanticensis
  REGION 1..377: note = tr|A0A4R7UVW5|A0A4R7UVW5_9PSED Queuine tRNA-ribosyltransferase OS=Pseudomonas helmanticensis; OX = 1471381 GN=tgt PE=3 SV=1
MSRECRMSFELLATDGKARRGRLTFPRGTVETPAFMPVGTYGTVKGMLPRDIVATGAEIILGNTFHLWLRPGTQVIKEHGDLHDFMQWKGPILTDSGGFQVFSLGAMRKIKEEGVTFASPVDGAKVFMGPEESMQVQRDLGSDIVMIFDECTPYPADEDVARVSMELSLRWAQRSKNAHGENTAALFGIVQGGMHQDLRMRSLEGLDKIGFDGLAIGGLSVGEPKHEMIKVLDYLPGMMPADKPRYLMGVGKPEDLVEGVRRGVDMFDCVMPTRNARNGHLFIDTGVLKIRNAFHRHDESPLDPTCDCYTCQNFSRAYLHHLDKCGEMLGSMLNTIHNLRHYQVLMAGLREAIQQGTLAAFVDAFYAKRGLPVPPLD

SEQ ID NO: 59670 - protein, 377 aa, unidentified
  source 1..377: note = Pseudomonas hunanensis
  REGION 1..377: note = tr|A0A2I0CCW3|A0A2I0CCW3_9PSED Queuine tRNA-ribosyltransferase OS=Pseudomonas hunanensis; OX = 1247546 GN=tgt PE=3 SV=1
MSRTCRMSFELLATDGKARRGRITFPRGTVETPAFMPVGTYGTVKGMLPRDIEAIGAEMILGNTFHLWLRPGTEVIKKHNGLHDFMQWKGPILTDSGGFQVFSLGAMRKIKEEGVTFASPVDGSKVFMGPEESMQVQRDLGSDVVMIFDECTPYPAEHDVARTSMELSLRWAQRSKNAHADNTAALFGIVQGGMYQDLRMRSLEGLENIGFDGLAIGGLSVGEPKHEMIKVLDYLPDQMPADKPRYLMGVGKPEDLVEGVRRGVDMFDCVMPTRNARNGHLFVDTGVIKIRNAFHRHDESPLDPTCDCYTCTNFSRAYLHHLDKCGEMLSSMLNTIHNLRHYQRLMAGLREAIQQGKLAAFVDAFYAKRGLPVPPLD

SEQ ID NO: 59671 - protein, 379 aa, unidentified
  source 1..379: note = Pseudomonas hussainii
  REGION 1..379: note = tr|A0A1H7GPU4|A0A1H7GPU4_9PSED Queuine tRNA-ribosyltransferase OS=Pseudomonas hussainii; OX = 1429083 GN=tgt PE=3 SV=1
MSFMQFDLLATDGKARRGRLNFPRGAVETPAFMPVGTYGTVKGMLPRDIEAIGAHIILGNTFHLWLRPGTEVIREHGDLHDFTQWQGPILTDSGGFQVFSLGAMRKIKEEGVTFASPVDGSKVFMSPEVSMQVQRELGSDIVMIFDECTPYPATHEEAKRSMELSLRWAKRSKDAHGDNPSALFGIVQGGMYEDLRAQSLAGLEEIGFDGYAIGGLSVGEPKDEMIKVLNYLPAQLPADKPRYLMGVGKPEDIVEAVRRGVDMFDCVMPTRNARNGHLFTDTGVIKIRNAKHRHDTGPLDAACDCYTCKNFSRAYLHHLDKCGEMLGSMLNTIHNLRHYQRLMAGLREAIQQGRLSAFVADFYAQRGLPVPPLEEPASE

SEQ ID NO: 59672 - protein, 377 aa, Pseudomonas indica
  REGION 1..377: note = tr|A0A1G9JH29|A0A1G9JH29_9PSED Queuine tRNA-ribosyltransferase OS=Pseudomonas indica OX=137658; GN = tgt PE=3 SV=1
MSRTCHMSFELLATDGKARRGRLTFPRGVVETPAFMPVGTYGTVKGMLPRDIEAIGAQIILGNTFHLWLRPGTEVIKRHGDLHDFMQWKGPILTDSGGFQVFSLGALRKIKEEGVTFASPVDGSKVFMGPEESMQVQRDLGSDIVMIFDECTPYPADEDVARRSMELSLRWALRSKVAHGDNPAALFGIVQGGMHESLRMRSLEGLESIGFDGLAIGGLSVGEPKEEMIRVLDFLPPRMPVDKPRYLMGVGKPEDLVEGVRRGVDMFDCVMPTRNARNGHLFIETGVLKIRNSAHKHDESPLDPTCDCYTCQHFSRAYLHHLDKCGEMLGSMLNTIHNLRHYQRLMAGLREAIQQGTLAAFVDAFYARRGLPTPPLD

SEQ ID NO: 59673 - protein, 371 aa, unidentified
  source 1..371: note = Pseudomonas indoloxydans
  REGION 1..371: note = tr|A0A2T5PD20|A0A2T5PD20_9PSED Queuine tRNA-ribosyltransferase OS=Pseudomonas indoloxydans; OX = 404407 GN=tgt PE=3 SV=1
MSFELLATDGKARRGRLTFPRGVVETPAFMPVGTYGTVKGMLPRDIEAIGAQIILGNTFHLWLRPGMEVIKKHGDLHDFMQWQGPILTDSGGFQVFSLGAMRKIKEEGVYFASPVDGTKVFMGPEESMQVQRDLGSDIVMIFDECTPYPAEFDVAKRSMELSLRWAKRSKTAHGESSAALFGIVQGGMHEELRMRSLEGLCEIGFDGLAIGGLSVGEPKEEMIRVLDFLPPHMPADKPRYLMGVGKPEDLVEGVRRGVDMFDCVMPTRNARNGHLFVDTGVVKIRNAVHKHDDSPLDPTCDCYTCKHFSRAYLHHLDKCGEMLGSMLNTIHNLRHYQRVMAGLREAIGQGTLAAFVETFYAKRGLPVPPLD

SEQ ID NO: 59674 - protein, 377 aa, Pseudomonas japonica
  REGION 1..377: note = tr|A0A239CZ03|A0A239CZ03_9PSED Queuine tRNA-ribosyltransferase OS=Pseudomonas japonica OX=256466; GN = tgt PE=3 SV=1
MSRTCRMSFELLATDGKARRGRLTFPRGTVETPAFMPVGTYGTVKGMLPRDIEAIGAEIILGNTFHLWLRPGTEVIKAHGDLHDFMQWKGPILTDSGGFQVFSLGAMRKIKEEGVTFASPVDGSKVFMGPEESMQVQRDLGSDIVMIFDECTPYPADEDVARISMELSLRWAQRSKNAHGDSTAALFGIVQGGMHQDLRMRSLEGLDKIGFDGLAIGGLSVGEPKHEMIKVLDYLPGQMPADKPRYLMGVGKPEDLVEGVRRGVDMFDCVMPTRNARNGHLFIDTGVLKIRNAFHRHDDSPLDPTCDCYTCQNFSRAYLHHLDKCGEMLGAMLNTIHNLRHYQRLMAGLREAIQQGTLAAFVDAFYAKRGLPVPPLD

SEQ ID NO: 59675 - protein, 377 aa, Pseudomonas jessenii
  REGION 1..377: note = tr|A0A2V4LTF9|A0A2V4LTF9_9PSED Queuine tRNA-ribosyltransferase OS=Pseudomonas jessenii OX=77298; GN = tgt PE=3 SV=1
MSRECRMSFELLATDGKARRGRLTFPRGTVETPAFMPVGTYGTVKGMLPRDIVATGAEIILGNTFHLWLRPGTQVIKEHGDLHDFMQWKGPILTDSGGFQVFSLGAMRKIKEEGVTFASPVDGAKVFMGPEESMQVQRDLGSDIVMIFDECTPYPADEDVARISMELSLRWAQRSKNAHGDNTAALFGIVQGGMHQDLRMRSLEGLDKIGFDGLAIGGLSVGEPKHEMIKVLDYLPGMMPADKPRYLMGVGKPEDLVEGVRRGVDMFDCVMPTRNARNGHLFIDTGVLKIRNAFHRHDESPLDPTCDCYTCQNFSRAYLHHLDKCGEMLGSMLNTIHNLRHYQVLMAGLREAIQQGTLAAFVDAFYAKRGLPVPPLD

SEQ ID NO: 59676 - protein, 377 aa, Pseudomonas jessenii
  REGION 1..377: note = tr|A0A5C4L011|A0A5C4L011_9PSED Queuine tRNA-ribosyltransferase OS=Pseudomonas jessenii OX=77298; GN = tgt PE=3 SV=1
MSRECRMSFELLATDGKARRGRLTFPRGTVETPAFMPVGTYGTVKGMLPRDIVATGAEIILGNTFHLWLRPGTEVIKEHGDLHDFMQWKGPILTDSGGFQVFSLGAMRKIKEEGVTFASPVDGSKVFMGPEESMQVQRDLGSDIVMIFDECTPYPADEDVARVSMELSLRWAQRSKNAHGDNTAALFGIVQGGMHQDLRMRSLEGLDKIGFDGLAIGGLSVGEPKHEMIKVLDYLPGMMPADKPRYLMGVGKPEDLVEGVRRGVDMFDCVMPTRNARNGHLFIDTGVLKIRNAFHRHDDSPLDPTCDCYTCQNFSRAYLHHLDKCGEMLGSMLNTIHNLRHYQVLMAGLREAIQQGTLAAFVDAFYAKRGLPVPPLD

SEQ ID NO: 59677 - protein, 375 aa, Pseudomonas jinjuensis
  REGION 1..375: note = tr|A0A1H0QY04|A0A1H0QY04_9PSED Queuine tRNA-ribosyltransferase OS=Pseudomonas jinjuensis; OX = 198616 GN=tgt PE=3 SV=1
MSFMNFELLATDGKARRGRLTFPRGVVETPAFMPVGTYGTVKGMLPRDIEGIGAQIILGNTFHLWLRPGTEVIGKHGDLHDFMQWKGPILTDSGGFQVFSLGALRKIKEEGVYFASPVDGAKVFMGPEESMAVQRALGSDIVMIFDECTPYPAEFDVAKRSMELSLRWAKRSKIAHGDSPSALFGIVQGGMHQELRMRSLEGLQEIGFDGLAIGGLSVGEPKEEMIRVLDFLPPHMPADKPRYLMGVGKPEDLVEGVRRGVDMFDCVMPTRNARNGHLFVDTGVIKIRNAVHKHDESPLDPTCDCYTCSNFSRAYLYHLDKCGEMLGSMLNTIHNLRHYQRLMAGLREAIQQGTFANFVDAFYARRGLPTPPLAE

SEQ ID NO: 59678 - protein, 374 aa, unidentified; identical to SEQ ID NO: 59645
  source 1..374: note = Pseudomonas kairouanensis
  REGION 1..374: note = tr|A0A4Z0AHL2|A0A4Z0AHL2_9PSED Queuine tRNA-ribosyltransferase OS=Pseudomonas kairouanensis; OX = 2293832 GN=tgt PE=3 SV=1

SEQ ID NO: 59679 - protein, 377 aa, Pseudomonas kilonensis
  REGION 1..377: note = tr|A0A0F4XME8|A0A0F4XME8_9PSED Queuine tRNA-ribosyltransferase OS=Pseudomonas kilonensis; OX = 132476 GN=tgt PE=3 SV=1
MSRTCRMSFELLATDGKARRGRLTFPRGTVETPAFMPVGTYGTVKGMLPRDIEAIGAEIILGNTFHLWLRPGMEVIKAHGDLHDFMQWKGPILTDSGGFQVFSLGAMRKIKEEGVTFASPVDGSKVFMGPEESMQVQRDLGSDIVMIFDECTPYPADEDVARVSMELSLRWAQRSKNAHGDNTAALFGIVQGGMHRDLRMRSLEGLDKIGFDGLAIGGLSVGEPKHEMIKVLDYLPGEMPADKPRYLMGVGKPEDLVEGVRRGVDMFDCVMPTRNARNGHLFIDTGVLKIRNAFHRHDNSPLDPTCDCYTCQNFSRAYLHHLDKCGEMLGSMLNTIHNLRHYQVLMAGLREAIQQGTLAAFVEAFYAKRGLPVPPLD

SEQ ID NO: 59680 - protein, 375 aa, Pseudomonas knackmussii
  REGION 1..375: note = tr|A0A024HCS3|A0A024HCS3_PSEKB Queuine tRNA-ribosyltransferase OS=Pseudomonas knackmussii (strain DSM 6978 / LMG 23759 / B13) OX=1301098 GN=tgt PE=3 SV=1
MSFMKFELLATEGKARRGRLTFPRGVVETPAFMPVGTYGTVKGMLPRDIEAIGAQIILGNTFHLWLRPGTEVIQKHGDLHDFMQWKGPILTDSGGFQVFSLGALRKIKEEGVYFASPVDGAKVFMGPEESMAVQRALGSDIVMIFDECTPYPAEFDVAKRSMELSLRWAKRSKVAHGDSPSALFGIVQGGMHEELRMRSLEGLQEIGFDGLAIGGLSVGEPKEEMIRVLDFLPPQMPADKPRYLMGVGKPEDLVEGVRRGVDMFDCVMPTRNARNGHLFVDTGVIKIRNAVHKHDESPLDPTCDCYTCKHFSRAYLYHLDKCGEMLGSMLNTIHNLRHYQRLMAGLREAIQQGTLAAFVDAFYARRGLPTPPLGD

SEQ ID NO: 59681 - protein, 377 aa, Pseudomonas koreensis
  REGION 1..377: note = tr|A0A1V3T1G8|A0A1V3T1G8_9PSED Queuine tRNA-ribosyltransferase OS=Pseudomonas koreensis OX=198620; GN = tgt PE=3 SV=1
MSRECRMSFELLATDGKARRGRLTFPRGTVETPAFMPVGTYGTVKGMLPRDIVATGAEIILGNTFHLWLRPGTQVIKEHGDLHDFMQWKGPILTDSGGFQVFSLGAMRKIKEEGVTFASPVDGAKVFMGPEESMQVQRDLGSDIVMIFDECTPYPADEDVARISMELSLRWAQRSKNAHGENTAALFGIVQGSMHQDLRMRSLEGLDKIGFDGLAIGGLSVGEPKHEMIKVLDYLPGMMPADKPRYLMGVGKPEDLVEGVRRGVDMFDCVMPTRNARNGHLFIDTGVLKIRNAFHRHDESPLDPTCDCYTCQNFSRAYLHHLDKCGEMLGSMLNTIHNLRHYQVLMAGLREAIQQGTLAAFVDAFYAKRGLPVPPLD

SEQ ID NO: 59682 - protein, 377 aa, Pseudomonas koreensis; identical to SEQ ID NO: 59675
  REGION 1..377: note = tr|A0A4U3ERY6|A0A4U3ERY6_9PSED Queuine tRNA-ribosyltransferase OS=Pseudomonas koreensis OX=198620; GN = tgt PE=3 SV=1

SEQ ID NO: 59683 - protein, 377 aa, unidentified
  source 1..377: note = Pseudomonas kribbensis
  REGION 1..377: note = tr|A0A345RVJ7|A0A345RVJ7_9PSED Queuine tRNA-ribosyltransferase OS=Pseudomonas kribbensis; OX = 1628086 GN=tgt PE=3 SV=1
MSRECRMSFELLATDGKARRGRLTFPRGTVETPAFMPVGTYGTVKGMLPRDIEAIGAEIILGNTFHLWLRPGTEVIKAHGDLHDFMQWKGPILTDSGGFQVFSLGAMRKIKEEGVTFASPVDGSKVFMGPEESMQVQRDLGSDIVMIFDECTPYPADEDVARVSMELSLRWAQRSKNAHGDNTAALFGIVQGGMHQDLRMRSLEGLDKIGFDGLAIGGLSVGEPKHEMIKVLDYLPGMMPADKPRYLMGVGKPEDLVEGVRRGVDMFDCVMPTRNARNGHLFIDTGVLKIRNAFHRHDDSPLDPTCDCYTCQNFSRAYLHHLDKCGEMLGSMLNTIHNLRHYQVLMAGLREAIQQGTLAAFVDAFYAKRGLPVPPLD

SEQ ID NO: 59684 - protein, 377 aa, unidentified
  source 1..377: note = Pseudomonas kunmingensis
  REGION 1..377: note = tr|A0A1I3U0Y3|A0A1I3U0Y3_9PSED Queuine tRNA-ribosyltransferase OS=Pseudomonas kunmingensis; OX = 1211807 GN=tgt PE=3 SV=1
MTRSCHMSFELLATDGKARRGRLTFPRGTVETPAFMPVGTYGTVKGMLPRDIEAIGAQIILGNTFHLWLRPGTEVIKRHGDLHDFMQWQGPILTDSGGFQVFSLGAMRKIKEEGVYFASPVDGAKVFMGPEESMQVQRDLGSDIVMIFDECTPYPADEDVARRSMELSLRWAKRSKVAHGDSPAALFGIVQGGMHESLRMRSLEGLCEIGFDGLAIGGLSVGEPKEEMIRVLDFLPPQMPADKPRYLMGVGKPEDLVEGVRRGVDMFDCVMPTRNARNGHLFVDGGVIKIRNAVHKHDDSPLDPSCDCYTCKHFSRAYLHHLDKCGEMLGSMLNTIHNLRHYQRVMAGLRDAIQQGTLAAFVDAFYAKRGLPTPPLA

SEQ ID NO: 59685 - protein, 371 aa, unidentified
  source 1..371: note = Pseudomonas kunmingensis
  REGION 1..371: note = tr|A0A2N8SCD0|A0A2N8SCD0_9PSED Queuine tRNA-ribosyltransferase OS=Pseudomonas kunmingensis; OX = 1211807 GN=tgt PE=3 SV=1
MSFELLATDGKARRGRLTFPRGTVETPAFMPVGTYGTVKGMLPRDIEAIGAQIILGNTFHLWLRPGTEVIKRHGDLHDFMQWQGPILTDSGGFQVFSLGAMRKIKEEGVYFASPVDGAKVFMGPEESMQVQRDLGSDIVMIFDECTPYPADEDVARRSMELSLRWAKRSKVAHGDSPAALFGIVQGGMHESLRMRSLEGLCEIGFDGLAIGGLSVGEPKEEMIRVLDFLPPQMPADKPRYLMGVGKPEDLVEGVRRGVDMFDCVMPTRNARNGHLFVDGGVIKIRNAVHKHDDSPLDPSCDCYTCKHFSRAYLHHLDKCGEMLGSMLNTIHNLRHYQRVMAGLRDAIQQGTLAAFVDAFYAKRGLPTPPLA

SEQ ID NO: 59686 - protein, 371 aa, unidentified
  source 1..371: note = Pseudomonas kuykendallii
  REGION 1..371: note = tr|A0A2W5D0H6|A0A2W5D0H6_9PSED Queuine tRNA-ribosyltransferase OS=Pseudomonas kuykendallii; OX = 1007099 GN=tgt PE=3 SV=1
MTFELLATEGRARRGRLTFPRGVVETPAFMPVGTYGTVKGMLPRDIEAIGAQIILGNTFHLWLRPGTEVVREHGDLHDFMQWKGPILTDSGGFQVFSLGAMRKIKEEGVYFASPVDGAKVFMGPEESMRVQRELGSDIVMIFDECTPYPADEEVARRSMELSLRWAERSKIAHADNPSALFGIVQGGMHENLRMRSLERLCEIGFDGLAIGGLSVGEPKEEMIRVLDFLPAQMPADKPRYLMGVGKPEDLVEGVRRGVDMFDCVMPTRNARNGHLFTAEGVVKIRNAGHRHDQSPLEADCDCYTCKHFSRAYLHHLDKCGEMLGSMLNTIHNLRHYQRLMAGLRGAIQQGTLAAFVDAFYARRGLPTPPLD

SEQ ID NO: 59687 - protein, 374 aa, unidentified
  source 1..374: note = Pseudomonas kuykendallii
  REGION 1..374: note = tr|A0A1H2XJL3|A0A1H2XJL3_9PSED Queuine tRNA-ribosyltransferase OS=Pseudomonas kuykendallii; OX = 1007099 GN=tgt PE=3 SV=1
MSHMTFELLATEGRARRGRLTFPRGVVETPAFMPVGTYGTVKGMLPRDIEAIGAQIILGNTFHLWLRPGTEVIREHGDLHDFMQWKGPILTDSGGFQVFSLGAMRKIKEEGVYFASPVDGAKVFMGPEESMRVQRELGSDIVMIFDECTPYPADEDVARRSMELSLRWAERSKIAHADNPSALFGIVQGGMHENLRMRSLERLCEIGFDGLAIGGLSVGEPKEEMIRVLDFLPAQMPADKPRYLMGVGKPEDLVEGVRRGVDMFDCVMPTRNARNGHLFTADGVVKIRNAGHRHDQSPLEADCDCYTCKHFSRAYLHHLDKCGEMLGSMLNTIHNLRHYQRLMAGLRGAIQQGTLAAFVDAFYARRGLPTPPLD

SEQ ID NO: 59688 - protein, 374 aa, unidentified; identical to SEQ ID NO: 59587
  source 1..374: note = Pseudomonas lactis
  REGION 1..374: note = tr|A0A0R3CRW1|A0A0R3CRW1_9PSED Queuine tRNA-ribosyltransferase OS=Pseudomonas lactis OX=1615674; GN = tgt PE=3 SV=1

SEQ ID NO: 59689 - protein, 374 aa, unidentified
  source 1..374: note = Pseudomonas lactis
  REGION 1..374: note = tr|I4K9X4|I4K9X4_9PSED Queuine tRNA-ribosyltransferase OS=Pseudomonas lactis OX=1615674; GN = tgt PE=3 SV=1
MSRMSFELLATDGKARRGRLTFPRGTVETPAFMPVGTYGTVKGMLPRDIVATGAEIILGNTFHLWLRPGTEVIKKHGDLHDFMKWQGPILTDSGGFQVFSLGAMRKIKEEGVTFASPVDGAKVFMGPEESMQVQRDLGSDIVMIFDECTPYPADEEVARISMELSLRWAQRSKNAHGDNTAALFGIVQGGMHESLRKRSLEGLDKIGFDGLAIGGLSVGEPKHEMIKVLDYLPGLMPADKPRYLMGVGKPEDLVEGVRRGVDMFDCVMPTRNARNGHLFIDTGVLKIRNAFHRHDDSPLDPTCDCYTCQNFSRAYLHHLDKCGEMLGSMLNTIHNLRHYQVLMAGLREAIQQGTLAAFVDAFYAKRGLPVPPLD

SEQ ID NO: 59690 - protein, 377 aa, unidentified
  source 1..377: note = Pseudomonas laurylsulfatiphila
  REGION 1..377: note = tr|A0A2S6FGY7|A0A2S6FGY7_9PSED Queuine tRNA-ribosyltransferase OS=Pseudomonas laurylsulfatiphila; OX = 2011015 GN=tgt PE=3 SV=1
MSRTCRMSFELLATDGKARRGRLTFPRGTVETPAFMPVGTYGTVKGMLPRDIEATGAEIILGNTFHLWLRPGTEVIKKHGDLHDFMQWKGPILTDSGGFQVFSLGAMRKIKEEGVTFASPVDGAKVFMGPEESMQVQRDLGSDIVMIFDECTPYPADEDVARISMELSLRWAKRSKEAHGDNTAALFGIVQGGMHQDLRMRSLEGLDKIGFDGLAIGGLSVGEPKHEMIKVLDYLPGMMPADKPRYLMGVGKPEDLVEGVRRGVDMFDCVMPTRNARNGHLFIDTGVLKIRNAFHRHDDSPLDPTCDCYTCQNFSRAYLHHLDKCGEMLGSMLNTIHNLRHYQVLMAGLREAIQQGTLAAFVDAFYAKRGLPVPPLD

SEQ ID NO: 59691 - protein, 377 aa, unidentified
  source 1..377: note = Pseudomonas laurylsulfativorans
  REGION 1..377: note = tr|A0A2S3VS60|A0A2S3VS60_9PSED Queuine tRNA-ribosyltransferase OS=Pseudomonas laurylsulfativorans; OX = 1943631 GN=tgt PE=3 SV=1
MSRTCRMSFELLATDGKARRGRLTFPRGTVETPAFMPVGTYGTVKGMLPRDIEATGAEIILGNTFHLWLRPGTEVIKKHGDLHDFMQWKGPILTDSGGFQVFSLGAMRKIKEEGVTFASPVDGAKVFMGPEESMQVQRDLGSDIVMIFDECTPYPADEDVARISMELSLRWAKRSKEAHGENTAALFGIVQGGMHQDLRMRSLEGLDKIGFDGLAIGGLSVGEPKHEMIKVLDYLPGMMPADKPRYLMGVGKPEDLVEGVRRGVDMFDCVMPTRNARNGHLFIDTGVLKIRNAFHRHDDSPLDPTCDCYTCQNFSRAYLHHLDKCGEMLGSMLNTIHNLRHYQVLMAGLREAIQQGTLAAFVDAFYAKRGLPVPPLD

SEQ ID NO: 59692 - protein, 374 aa, Pseudomonas libanensis; identical to SEQ ID NO: 59587
  REGION 1..374: note = tr|A0A0R2YB13|A0A0R2YB13_9PSED Queuine tRNA-ribosyltransferase OS=Pseudomonas libanensis OX=75588; GN = tgt PE=3 SV=1
